United States Patent Application Publication US 2014/0057251 A1 - sequence listing, part 44

SEQ ID NO: 49500 - DNA, 2057 bp, Cannabis sativa
ctccttggtttgttattggtgacttcaatgaaattctttcgaatagtaataaatctggtggtgctcttagatctgaatcccaaatggatgcgtttcgcaaagcaattgacaaaggctgtctttctgaaactcccgttgatggtgatccctttacttgggcagaatcgggcaacaactaacactcttaaggagcgtctagattggtgctttatcaacaaccattgggattctttctttgagagccctcaagtgcatcatcttgactatttccaatcgaaccatcgtgccattagtgccaccatcagcctgctgtccactcaaaccaccagcaaaaaaaggaaaagtcgcttcaggtatgagaagttatggctgtctgatcctgacagcaagagtataattgctgaaaattggttacaacacgatagcaatgaccctattgctgctgtcatctccaatttaaacacttgtgctggtaaactccaactttggcatgaccataaatatggaaagatgaagaagaacattaaagaatgtcaatctagagttgaacagctcaataattccttcaaccaaagcagcagccattttgatgaattaaagaatgctgaatccatccttgatgagttgttggaacaagaggaggtgtactggcaacaacaatctcgtgttgattggcttgcttgtggagattaaaacactaattttttccacaaaaaagcaagtgcaagacgaaccaacaatcacataaaatttctctacaacagtgttggcggcaaggctttttccactacagacatatcagctattgttcaagatttttatgctgatcttttcacggctggtgaccttgatgagtgtgcccttgctcatacacttgattgtattcccaccttggttacaaatgctcacaatgatgctctccttgctccattcacaacagccgaagtggatagtgctctaaaatctttgagttcggataaaagccagggaattgacggaatgtcggccatgttttaccaacaatattggtcaattgttggagaccttgtgtatcacgtgccatacttaacatactcaatcatggtgctgaccccacaagcttcaatcacactctgatcacactcattcccaaaatcaagaagcctcatcacatgaaggactttcggcctattagtctctgcaatgtcatttccaaattggtaaccaaaatgattgtcgcgcgattcaaagaagttcttcctttgattatttctgaaatgcaaagcgcattcttggctaatagattgatcattgacaacatcctagtggcttttgaactggtgcatgctataaaaaacaagactgctgggagacatggcattgcttctcttaaactggacatgagtaaagcttttgatagagttgaatggaaattcattgaagaagtcatgaaaaaaatgggttttgctcctagttgggtcaagattatcatgagttgcctcactacaaatagattctccttcctggttaatggtgaagtcacgggttctttgacaccaacaagaggtttgcgccaaggctgccctttatctcctaacctatttttgatatgtgctgaaggtttatcaagattgttgcaacatgagcaagatctgggcaatttacatggttttaaactcaccagacgagctcccatgatttcacacttgctcttcgctgatgaaagcctccttttttatcaagctgatgaaagctcctgtctagctataaagcgggttttggacacttatcatcgagcatccggccaattaatcaaccgagacaaatctattatgtccttctcccccaacaccaccttggctgctcaaattttctttcatcgacacctctcaatgccaatcagcgagtgtcatgaacgatacctaggactaccgtcttactcagggagagataaaaaggaactctttagcaacattgaggagcggatttggaaactcatgcaatcttggaatgaaaaactcttctctgctggtggccgtgaagttcttctgaaagcggtagttcaatcaatcccaaca

SEQ ID NO: 49501 - DNA, 611 bp, Cannabis sativa
gtaacaagattacatacttgctctgcattctgatttttccctctgccatctgatgtacatacagttatgttagttgggactgttactgttggacagttatattagttaggttgttcctattctttaggataggtagttatgttggttattgttgtccaccgacctatgtggctgtatatatattcttctactgttgtacactaccaattaattcaattcaataaactctttactgcttcactctcttccgcaatatggtatcagagcaaggaagacatgcttcctttcgattctgatcttgttcagctcatccccgccgtgtgttctcctctcttctccggcgacgatcgcagtccgtaatgttgaattcatttcttcattgaattcttcatcgacttcttcttctcttcctttcttttcttttcttttcatcatctgccatgtctaccgatgatcaaggaacaagaaccatggatgaaccttcaattcaaaccaacaatggcgaaaatcaaagtcaattggctgatgtgggaatcaacacacagatggtcaggtctagaagccaaattgaagacccctccgatccgtatttcctgcaccatggtgataac

SEQ ID NO: 49502 - DNA, 1474 bp, Cannabis sativa
cttccttcctctgtaaatgtccaggtaaaaacccggggtaaggcgatgacgggtatcaagttcaacttgaaattttaagaaccatcgcctgacaattgttttcctgtctgccatatcgtaacccttttatcttcccgctttggccgcaatggtcggggtattgaccgcattaaggtagggggtgggaagccccaaagcttgaacccagaaaactgctttgaaagtatctacgtgactccagtgaccctcctctggccattcgtggataagtaaaagctttccattaataagccaaggtctattctcaagaaccagtacacaatccccttccaggtcgaagaagattccccacacacctggtctaaaggttttaaatctccagttgcccttaagtttacctttagtcttccaaatttgagtaagaatttccttgagtctagatctagagactcctttgccttcgaaaaaatttgccaccacaccagttcttgtgacctcctcattaagttctatgtctggctccagttccagtgtcatagactcaaaaaattccctgcgtaaactttccacatcgtctgtcccctgttcaccagagggaatgggttcattaataccagaattatttataccagtatcagagttgtgcatatcgacatcattaatgactccatcttccctgcttctcgctccgccagttgaattaccaagcccaagtggctcattaatgtctcccatagtagttacagctacagtaccaacccaaagaggggtcttaaaggcagacaaaaatacacacaggccccacttgaacagagaaaatagaaccagaaaaaaaaggaacgtgatagaaagctaaagaaccacgaccctgaataagatggattagaactgtttctaatcttcagatgacaaaggtggaaccaccagaacaaatacgtaaagttggattcccaaccttctcatactagagagagaatttttccataaaacttataagagagtcatcttttttaatggttaattagttagttgaaatatagttaatttcgttgtctgtttgatgagctcttcccttctttttaggaatatgttagatcacaccattcttgtattgctctctcttctaattctatataaacagaattcatgtccctaaatttgaatcaattttgatcagaactttcatcttcattgttttattctttcattctctcattcattagtcttcacttggtattagagccacgcggccatggcgactcaagcatcatcttcaacagcctatgctagctcctcctctaatgttggagatcgcaccatcatcatctcagtgaagcttgacatatcttactacatgctcccaggggcgaccctgaaataaagtgggccaccggaaaaaaatttatttttaggtccttatatattagaaaaaatgtggtatttttaaaaatcagtaaaaaaaaatatataattt

SEQ ID NO: 49503 - DNA, 1568 bp, Cannabis sativa
tgggtttggaattattttgactagttgtggtgttccgaaaggttttgtcattatcctaaactacaaatcaacctcccaataatgcaaggggacgagtgattatgacttgatcatcatcaacaacaacaaattcatatataaaatatttggcatcaattttgtcctttatattgattttgtccactactactacatagagggtaacagaattaatgtattccattcattttcataattgtgtatataattggattcatttaatgattattaattattacaaattaaagtatatataataaattattgagcttatatagaatacatttggttttaattcaaatatataaaataaagtttagactaaataatatgagacatttctttttataaaaatagttcgacactttgcacctttttttattttaataaactaaatatctgtatttatatgtctaattaattatctaactaagcgtgaaatgtgaagtgcttgatcaaattatattattttcactttttcttcttcaatccttcctttttcctccctctttaattcttctttgctttatgttgtgtttgtctatatattatagtatattattttgagtattttttgtgctctcccatcatggcgcgacagttatttttgaaaaaaaaaaattgataaaaaattatgtgtatttttattagttacaacatattatatttataattaaatataataaatataaatataatattagttttgacgtaataattaagttatcttacaaatattatagaagttaagagttcaaattctaacaaaacatttttatttgtaatatttaatttactttttgtattcttcacagaaaacaaaatatgtccccccaactttaattctcagtccgtcactatctctcatgatctatatatgttttatagtttaattatttgttaaaattataaattactgtgtttatatttaatttttccttgattatttatgctagctaggtatcttgtgtgaggtgtaatattattattattgcaatttaatatcgagttccatttatattttagtttaataaaaattatagaaaatcactagctacgtatttatagagcgccacattataatggttctagacactttggtgcctcataacaatgctcgattaaataaatggatgccaaagggaacctagtgctcgctacaaaaaagctacttttaatgacaacataatttttttgtgattaaatgtgacttttaatcacaacaaaaagttacttgtgactaaaacataggttagatacaagttgtcactaatttagttttagtcacaacaattattgtgactaaaaacacatttagtcacaaaaaattatgatttttatgactaatgctttcaaccacaaatattttagtcacaacgtaagaatgataatttataattagttacaatttttttacttttattgtgacaaaaagtaaaattttgtataatgtacctaacacttttataatacgtaatatcactatcgaaagcaattcaatattaaatcttatttattctacttcaata

SEQ ID NO: 49504 - DNA, 1822 bp, Cannabis sativa
gtcaaatctgttgtcgtttagtgagtcctattgattagcccctaatatgccccggacacggacctaacgtaacctctgcgatcaattagttaagtgataattaagttatgaataataatgcacgattggacattactagttggtacaagattatttatgagctaacaacatctttataattacatgtatatttatataaatttttgtataattaatttgaacttttatgtggtttgtaataattagtaatcacaaagaaaagtaagttttgcctctacggtaaatttttgccgacgagtaaatttgctgccagcaaaagttgctggcaatacttagttgagaaagtcgtttttgcatgccaacgaacaactgtatttcgccggtgaaagtcgcatctaccatcgacaaaattcattggtgaaacattgaggcactgacagagcctcatcgagaaagttttgccaactagaaatgtcgtcaacaaaacattttcgacgtatttcttcatttatgggaaagttttgtcggtacatgtaactttgttggcaagacattttttttaagtagttttaccaacactatataatcctccagtaaatttattttgtacttttttaatataatgaaatatatatgtaatttgaatgtaaattaaaattaaatttaaaatttaaaatttcataaataataattcaaaataatgcactaacataatttcgacagtatattatagttacactaaatttatgtaaacattatagaaaaaattaaaaagtggttgtcatagtttatgaaaaatactaaaatttacactgaaaatactataataataatcacactttcaacgacatcatcgtcatcatcgttgttctgggtgggaggggtgacgtgtgatgaagatccagtgcaatgatgacatattggttgaatcagggacagctcgggcatgttgaagacaggaacgatgctagagaaatacctgtactggtcctagaacttactttgattttgatttagagtctgcatcctttgttgatgataattattacattcttctgctcttctgtccttcgtttcagcgcctcgtaatcttggacgttgactgtagcctacctggatggacttgcatgccctagaagtttcccttttggccaagctctaagtctgagcaaaggtccaatgcctctcaagtgacatgaccgctcactaagaacctatcataaaaagcaggtctatagaaaattgggtgagatctacattgtacttacaagggacatcacttggcataggttgaggtttgtgtctgtcaagcttactaattaattgtttaaattcaattgaaattaaatataaaatgctagaaaaaaatttctagtgttctctctgaagaacaaagtgcctatttttcttctcgtttgattactgataacgattttattaagctagactgtattaatgccatgaaaaagaaatctagtggtacaaggtaatgtgaaattgaacttgatatgtccaaagaatatgatcggatagaatggtattttatggctaagattatggataagttggggtttcaggcttattggatagatatgttgttgactgtatatctgtagtggagtactctaatctttttagtggaagaattggtggttctattcatcctaagaggggcattagacaatgttatccaatgtctccttttttttcttgttatgtgccaaaggtttgactgtattggttaagaaagattatgctaataactatctttgtggcatttcttatgggactatggggccaattatttctcactaactttttg

SEQ ID NO: 49505 - DNA, 3459 bp, Cannabis sativa
ttttaagctgtaaacacaaagaaatagtgataactacaatagtttcactttgattattaatttcactagctagtggtagtcgtaacaaaaataatacaagagcttttattgttattctgattgtttaattgaaatttaaataagaaataataatatcgagtttaaaattggacacgttcaataaaacctcagttttttaacaatttttttttggatgataggatgaaaggtatcaaggatgccatttttttaaaaaaaaaaataacatggagaatttaaatgtaaaagttgaagactaattacccaggtgtaaaatgtgggctgttattccgttagtgttagttataactttttcttttgttagttagtttatagctctattatctattatctaacctatttattctactgtaactaagttacttctctggttgtgtatatatataaaactaagttatcaatcacagtgttgagaattttttatttaatttccagctatagataaatatataattaatttttagttatatataaatacttaagtttaatttttgacgataataaatatcaagttattatttacgtgtcatttttttattgatatgtttaaattaattgttaaataaaaaataaaaatatgataataattttaacattacatcactaattctcatcttcgacaatttagaaaacctagaaatccaaccattcttcaaaatctcaattaaagatacttaaatgaaatatgatcatcatacatgtatcatgataagacactaaagctaacaccaaatctcatgcacgcctcgtcaccggagctagcaccaaatcaacacacttttagacagagatactttcgtcagccgcgagtctgcgacactaaatctgacaaaagactaccttgacctgccgtacaggaccttcgttggtttcccaaatcgttgtcgctgtggatctctccgttgttgcaaagttatccatgtcgttgagcaagcattcattgcaaagccatcttcgtcaggctgggtcatgttggagaagacggtaactctatggcggctaagttttgtgggagaagatgaagagacaagagagacataatgaagagataagggtctataatgactaaataactcaattaacttttttattccaaaaaaaaaaacttaattaatattttttttttagtttataaaattattatttttttcaattaaaatgaattttatataatttttaaatagttatgttaggtggaccaatataaatgtgctacgtgtatacgagtgtatacatggcatgtaactgagataaatggatgacactttaaatttgctaatggatcattagtttggagtgttttaccactacaatttaaactttgagggttaagtgcaagtaaaataataatttagtgagtttaatcgcaaaaaactcttaaatttaagtattaatgctgcaaattattttttttatttatttatttttcagaatgagttttctatctctctgctgaaaaattcatctatgttttttttccttttcctatggtctatttgaatttctttctatgtgttatgtgacatatgatatggaacgtggttttttttgttcaattatatttctttttattatttatatgaaatattaaaaatattcagataaatgataacaaaagtatattttatcactagagggagcagggcaattaggtgtgtttccactttaagaatggccaattttcagtcaaaggtgcttatttggttgatcaggaatattgctttaagcttaagctggatatctagaagtggatttggcatctgtcaattcatcctaagatttcaatgacgctttggagaattttgaacgaggctcttcctaccatgaatagactacctttccttagggacaaggactgttttttgtgtggttcagccttagaaagttacctacatctgttcagagattgtagctttgtaaaagttatttgtttcactggtttgtacccctgcagaattgatgcttttgatagtgattctatgttgcagtttgttgaatctattttatgttctttctttggtattacgagactctcgtgtccgatttatgttggttgtgtggctttagaagtttggtatcagaggaattcttttagaatttaggggattacaattgacttgagagcagcttgctcaagaattagtcttttggcctctgaattctctattcagatttcccctgttgctgcagtgaaaactaatgttgcaggtaataatttgttaagtagagatggagtcgatattgttctttgcgcttttgccttttgggctgacggagttgctagtttagtggtggttgtgacaaattttgtagatggttcgtggtctcacttttcgtgtaagtctctagctgcttcggctttggaggctaaaaccagagccctcctgttggctctctcctaggctctgcataactcgtgggaagaggttcatcttttctcagattctcttttggcgttagtagtttttttaagatggtgtgtcctccggattggagctttcttaatgtgtcttttgatgttttaagtttagttaaaaagtttaacactatgtttggtagaggggagagaaggagggaaggagaggggtggagggagaaggatagggggattggagaatcattttgtttggcaagagggagagaaaaagggagaggagagatggaaggagagggtctccctccaaacacattatttttaatccctcttaacatgggagaattcaagaaaaagataaaaaaattatacgaaatatcttttccacccttgaaaaaaataatatataattgtattaaaaatgataaaatataaattttaatatttattttactctccatccttccacatatacttctaacaccaaacaacacaaaggagaacaaatatcctctccatccctcctactccccatcatttctacactctctatccatcctactctctccttcctaccaaatataacttaagggttgtaagttttcgcttttgaattgtagtttaaactctttttgcgaatggtttagctaaaagtgctatctagttaagaagcttgtttgtatcaagagaagggaatttttactgtgattcccatcttttgtccttagtttaatgaacactttgttttttttttttttttgaaaaaaaaaaaactaggtgtgtttcccctctttggctttactttactattcttactctatgagagctccacaatatttctcaagacttcgagcgtgggttgtcctcatccatggggtgtcttattagagccccacttagcactaacaacattattgttaattagaatatcatatattatctttagctttataaaattgaataaatttataagttttattaataataccaatgaaaatggaaaaaaaattgcaataaaatagaat

SEQ ID NO: 49506 - DNA, 844 bp, Cannabis sativa
  modified_base (783)..(813): a, c, t, g, unknown or other
aaggccttactttcaagctcacccaatttgagtttataccgattaacctctacatcaggtcttgcaaaagtcagccgcttttggccagttacttaaatgggcgattgaattagggcaatatgagatcacttaccagccacatacagtaacaaaagggcaggctttagtagattttgtaaccgaatgcatgagaaaagaaaaagaaattttagaagaaagtcccaagccaggaaaagaatccacacctaaggaaaatagtgaaaacaagcccatttggaagcttcatgtggatggatcatccaaagaccagctctccagaccagggataaccttgatcacacctgggggaatcccttgcatggagcaataaagtttgattttacaacatcaaataatgaattcaaatatgaaacgctaactactggattaaattggcacgagaagtaaatgtttaatacttagaaatttgtagtgactcctagttggtcgtaaatcatattctgggtgaatacatggctcagggagaaaaaatgatggcatacctaagtagaatacaagacatgctcgcacaattcaaagggtacaccatcatgtagattccaagagaggaaaatgcaactacaaatgctcttgtatggttagcaagcaatacagtgacagataagttaaactttgtacttatctagtttctaaagaacatgagcattacctacatagaagaaattgagatgctagatattactcccaactggatgaccccaaatactgttggaaattattttnnnnnnnnnnnnnnnnnnnnnnnnnnnnnnnttattaacatcctaaataagaactttctaaa

SEQ ID NO: 49507 - DNA, 1653 bp, Cannabis sativa
tataattcctcaatattattcataatgactaaatttaggttttctctaatccatttcttaattctaaggtattacaacacccatgtgccctagctacaaactttacacctcagacagtgagctatttactgacccaactctttacagaagcaccattggctccctacaatacctcaccatgaccagacttgacttagccttctcaataaacaagaatagtcaatttatgcacaatcctaccgttgctcaccggaatgcctgtaaaagagtccttagatacatcaaaggtactcttacaacttggcattgtcttcacaccagcaacacacctcagtctagaagcctttttagatgcagattaggcctacaatttggatgatcaaaagtcaaaaactgggttttgtgttaaacttgggggcaatcttacatcatggggatcaagaaaataaaaatcagtggcaagatctagtacagagtctgagtataggtccctatccactactgccaccgaagtagtttggactgtttctgtcttggaggaaattgggatcaatttattgaggtcgatgttcactatgttcgagagcttgtaacacaagggaaactccctgtttgttacatacctaatgaggaacaaccagctgatttgttcaccaaacctttaactctgccaaagtttaacttcttatgtcacaaactctctttgagaacctccctgtcaagtttgaggggggatgctgataatataaatgaaattggttagttagacttggctattataggttgttatgttcttgttttcaactaattgtcagaatgttagttaatgattttcttacagttagttaagctctctttagggtataaataatcattgtactcatttacttcaatcaatgaaatacactgctttcttcttcatggttcatactctatttctctgaaaattaactttgcatcaccgaactattgatcttttcttttcattttattttttatgacaaccaaatgctgaagttatttaataagtagaatacactaaaggcagttagatacaccgttcagacaaaaaaatttatgcatgtatatgatatgatgaagaaaccctattagttgaataacataaattaactatataaaaaaaataaattgacacgccagagaaactattgttactggtttgaaagatgataatttttgttattatgtaaaatatagagcaaatgttaaagtgtatctcttgattgcttcttaaatatttttttagttaaaaaataaactctaaccataaaaaattattttttgctaaatttttttaatattattttaataaaaatactattacttttttttattattattgtaaaaaattaattaatatttaaatttaaattataaaatattactaagataattaaatgctaactaaagtaaaagaataataaaaataacactctattcttattttttagcaattttaattaaaatttagataaaaaaaattaaaaaaaatgatcgatggaaatgctctaaataatgagcatttgtaatctataaaagaaaaaacgaaaagtgaaaaaccgagtttttgcaaatgtcaatatatatacgaaaatataaaactgtatgcgcctgcagaagcagaatgtaatt

SEQ ID NO: 49508 - DNA, 821 bp, Cannabis sativa
catgaaaaatacggtttgaaatcagttgcggtgtggttgtaggttttatttttgtcaaaccgtgcggtgcgatgcaatttgaggttttgaatttaataattgtagttcaaactataccacactatacatttcaaacttactataatataatttttattctttttcataaaagaacaaatatatgtaatatatgcgtatatgatattattttttagagacaatttaatataatgacttgatgagtaatacatatgttattatgataaaactttaataagatatttttttttgcatggttataactttattaggtagatttttaaaggatgatagtgtaagtctctcaaaccgcaccgcaccacactgtattttgcggtgtggtttttgtaattttaaaatctcgcggtgcggttgcagtttgagaaattataagaatcgcatatgcggtttgatttgaaaaaaaaaagttacaaactgcaccacccgcaccgcgaacacctataattttacttgtgagaaaattacaactgaaggtgcagaatcttatcaacaatactttaaataatcaaacagatagcaatgacaagatttaataaaacaagaacaataattggataaaaacaaggataaatagagtatggaaaactagaagcaattaaagcagtaaaataatagaaatcaacaccgagatatatactggttcaagtccgatagatcgatgtgatctatggctctactccaattatgaaataccaccaatttttttttattgattgagcaaaaacatgtgcaatacggtcgagatcgattctctgatgagt

SEQ ID NO: 49509 - DNA, 1294 bp, Cannabis sativa
aagccaagaatatgtactgcatttgtagacagcttatcactaatactacatttaattaacaagagaaaaaaattatttctgagtgcaaagatcatcacaatcacgttatgactaacaaatttatgattattcgaaaacaatcgatcatgacagtataatagttgtattataaaataaccactggatcgataaaagttaaagctgctacaccaacactatatttttgccagcagtgtacgtatccaaaaactatcaagcaattgggaaaatatctgtcataatattgaaaaccctaaaatttgaactaaaaaaatggtgcattaatatgtgattgaaccagttcgtcaaaagcaataagttagataaacaatttcccaagaacactaagaatgaaaaagcatgcaacttctagttttacaatatgtaagaagagaaaaatatgcctctagaatgctacacaactccaataaaattgaattatattagctatttgaaaacacttggcaccatatgttcttcattcacaactgtaactccttcaataaatgtttacgctttagtaggagttccttaaaatttgaactaaaatgcgtacaggaagcaatatttgaacctaagtcaatagtctagcacaaacctgcccagccaatttttgtcgtaataatctgactgcatccatcattgactcaggtggtggaatacaaatgaggttctacaaggccataaaccctcactcactctaacttaggtctaatccactccctccgcaacaaatcacctagcttctcccctccattcgacgtctcggttaggggccaatgtggctgaggtggttccaacaattgggaacgagagtgagagagatgtggaaaggttaattagctcgtggtttctgggttcggatcacaggcgagggtaaaagagagcgagagagacgaaaggaatgttggttggtgatggtggtcaatattgtcttgggtggatttcgtggtcaggagaagagtagctagggtggttgcaagtgaccttcgagcaagaagttgaaatcaacagaaacttttaaaaataaattttgtaaacgaaaaaaggggaaacttaaaaatatggtaatttaaaatatttttacaaaaatatggcataagttaattcaaaaaaaatgtcaagattattaaaccccataaactagtgaattaaaaatgtcataaaaaaaataaatccttagtatatctcatattttatgtaatttgggactcagatgcaaaataattctaaatttgataactaaattaataaa

SEQ ID NO: 49510 - DNA, 555 bp, Cannabis sativa
atgtctctcttagcccaatcattgatggccttggcaccgacagtgttttaaccacgaaggacccaccatcactggtaaaaaatattctctctctctagcaccgatgacacccaactccgatgacccaaccaccactgaaggtcccatatgttctcttttttgtgccatgttttttttcttgtgttttctgttatcattttatttttgctgtttgcaggtagttctcgcgactaactcaaatttatgatgcattttatttaaggagtaaagtgttattttgaattgttacatttagatttatgatttccttattaaatcagactctcccttactctattcatcatactccattgaactcctatagaaataaaaaaaaaaaatagaaagataatggtgacggttagcaaataaccgctaactatctctacctttagacttaagaggctattttttctaactgctttagcaatttttgtaactcctacaaattacaaattttgctaaaactatctctaaaaggcagaaaacaccgcctaaaaagattatttttgtagt

SEQ ID NO: 49511 - DNA, 743 bp, Cannabis sativa
ctctctcatttctttccaggcatccctgtaaataagtctttgtacacaatcagttatatgctaattacttctgcttctgctggaattacattctgtattatgtatctattggtgagtcctcgtggtttgtttgattctaataatcacaacaagaatacttctgtcatcaaaattttcataacaagtagcgtgattagcgagctgagctgtaaaatgttgcattttcatgatgttttttgctgtgcaggtggatgtatatggcttcaggcgcttaacatttttgctggaatggatgggaatacattccttgagtattttcgttctcgtcacttctaacttagctgtcattgcagttcaaggattttacttacacagtcctaaaaataacatggtaagtcctgcgactttttggtattcgacagaataagtaacagtagcacacctttaatctcttctcttctgtaacaggttcattggatcataacatgctttgtgaacaaatgacacgtttggctaagtttccttcctacatggaatggggaaatgcagccatgggagcagctaacttaatcttggtccgccagcctttatgtttctttttgccacttcttgttccaagtgtgaatatccattttttcatgagatatgttgtaggggcatatttttacaacaaaccaaattgcattgtttaaatcagtatataccagtacccaatctgtatttttttttttttttttgggaga

SEQ ID NO: 49512 - DNA, 1679 bp, Cannabis sativa
tccaaccatctaaaggaattagacaaggagacccactcttcccatacttgtttcttatttattttgaggggttctcaaggttattgaaacatgaagagcaaatcgaaaatcttcaaggccacaaaatattgcctgacatgctccaagtgtttctcatttattatttatcgacgacagcctgttattttgtcaagccaatgaacgatagtggaatgcaatcaagagaatcttgaacatctatcatcgtgcttctagtcagttcctgaatgcttcaaaatcagtaatggccttcagtccaaatacaacactagcaatgagaataattatttctgtaggtgattggaaatgcccctaaaagaatgccatgagacttatttgggtctgccatcttactcagaacaagataaaaagaagctattcagctaaataaaagagaaaatatggaagttacttcattcttggcataaaaagctcttctcagttagtggtaaggaagtacttctaaaagcagtggtacaatcaatcccaacttacgccatgttatgttttcaattaccaattaaattttgcaaacaaattgaatccatattggttaattttcggtggggatcaaatgttgatggatcaaaaattcacttaaaagctagaaattcttatgtaagaaaaaacttgctagaaggttgggatttcgttattttattcatttcattcaagctttattggctaagcaaatttggcatatttttgacatgcctaaatctttactcagtcgtttacttaaagctaaatatttttcacacaacactctcttacacgctcgtattggcaatcaaccttctatgacatggagatgtatttgtgctaagagatatttattaatcaaaggtctcaaatggaaaataggtactaacatccaagtgttatgccttaatgagctttggattcctaatcatacttcattcaagcctatattgtttcgtgcggtaagaacaatagttgtgtccacatatatcaacacaaatagagagtgggatatacttctgttgctgtaacatttctcagcaattgatgttgataacatcaccattcccttgacttttttttggataacatgatcgccttatatggcattttcatgacacaggcatttataatgtgaaaatagggtatcattcggttctgctttggaggatcaaaattattcctcttcttcacaaaatcatgaatcttggaagaaaactttttagtcccttcaattacctcctaaaattaaaatcttttcttggagagttataaattatgctttgccggtagctaccaaacttgtcaaacgaaaagttattacatctgctacttgttccttatgctcacatgcttgggagtcaattggtcaggcaatgtttggttgtaagtatgcgaaagctgtttggaaacactcagattttagcttttactttcatatggctaattcaatggttcaaggagactacttaatccatttgtcaactatattttctatggctgaaatagaaataattttgtgtcatgtggtcaatttggacttaacgaaataaaatggttcatggaaatcgtgcttaactagctataaagttttcttcatctgctgcaatatagagtagcttgtattagggagtctttctgttagctgttagttgtaa

SEQ ID NO: 49513 - DNA, 2285 bp, Cannabis sativa
tatatatagccagaagaataaggagaccctgtgcattaagacaatgactcaccaataatcccaaatttgtaaggagtatctggattgatttctggtggtgtttcaaaccaaaattctcgggcagtatcaccactcccaattttgtaatagtacttggtgctatactgaacttgcaaattcattgcacatatgttcaaatgaacttgtattagtgtgtggtgctcaacaatatcgatatgttaaaatgaattgaattattacctcaaggttgtcaacaaggcagtgatgaatatagcctgacttatacttgtagaaggtgtagttgttgactgtcccctctgctgtgaactcataattattctcagattttccgtaatgtactttactggatcctggttcatcgggggaaacccatgagattattacagatctaccatcataatcaccttgagtgatgtgaacctacacaaagtagtcaagcatattacaacacagaaagaggtttatgaaatacatatagatatgggaaagaaatgaaatgaaacatatggtagatcaaataatacaattattattcaactaaagtactctcaagcaaaattattacttgttgtggtgcattatgaccatttggtactgcaaatgcttcattgtcaagagggatatcagttgctggccactcagaccgtatgaaggtgcttgttatgcccgcgttcacattgttcaaaatgcttagaaagagaacaaatgcgagtatgacttgaaacaacatggattgcctcgtagtaaccactgccatggttaggtatgaagccagcaaatcacaatggactaccttcatcacaaaaatacaaaacaatctttaccaactatgaaagatctaccatagaaacatgagcactgaaatgcacctacaaattacaacccattactacaatatttcaaagtatcagatgattcagtgtgaacaacttgggataaacactcgttgcaggaacgtggaaacatataaaaaggacataacactaaattctaaaggccaaaacttagcctaatcaagtatcaatcatgcaaatctgcttcttaatctttattttaaaataaaaattatagtgatcgtctttaaaacagccacagctaaggtttcatataactgcagtctaaatttaaactaacatgataataaaggcattgcagcccggtgataggacagaatcaagagtgattaaagtgaaaacaataatataattgacaacaagagagaaacaatagatttcacatttaaattctcactgcattgatgaatcacataactccaactaatcaaactttttggcctaatttcagctataatacccaagtacccaaatccaggtctagatccaatatcacgcctaagttctaacctttcaactcaaacataatcatttccagaaacgacctagtaatcttaacttgcaagcatgaaaatgatcaaagatgcacatttggagcaaatcaatcaatacccaattggcttaagctgagccttaatcaaacttaatcatgaaatcaccattgaacattagagcacttgaaaaatttgaaaacaagaggtaaaagggagtgtttgaaagtagaaaaacaaacctgaaagttctcatagaaagtaaagcagagaggaacagaaataggcaaaggggttgatgatttgagttggatatttgtggaatcgaaatgaaggcgtgtgttagcagcgatgaggttgacgtggcgtagacatggatcaaaatatagttatttaattgtagaaaaacattagatattttacaatattattttatactttttttgaaagaaaaaaaaaggttttaaataacatatctttcccaaagaaaaaagaacatgttggtgaatggctgaattttattggttagatttggttgaatttaaaatacatggatttaaagtaatgtcttggagcaaatggtcagccatattgttccataaatagttggtatcgtgtatattaattttttttttttttgaaatgacttattaaattaaatcattttaaattcaatgaatcaataataataatataacatatagaaaggaggaaggaagtaccctgagcgacttattgaggggttccttaaggccttggacgattgcaacttgttggacatgccccttctttgctttgtttctcaatatgaaccgaaaaatgtgaaggaagccatgacctttgaggaatggctcaatgcaatgcaagaggaactcaaccaatttgttcgcaataaggt

SEQ ID NO: 49514 - DNA, 1292 bp, Cannabis sativa
tgaatgtaaaagcccgatgtggttgtgagtattttgtcactttcattgacgattactctacatatagttttctttacctaatgcaaaagaaatctaaaacattttagaagttctaggaatttcatgctttggctcaaaaccgattgggtaaaacattaaagatcttgtgatttaatagaggtggagaatatatggatatgcagttcaaagattatttaattaaacatggaactgaatatcaatatacttccccatcacctccacaaaaaaatggtgttgtgagaaaaaaggaatcatacgcttttagaaatggttaggtttatgcttagctattcgactccgtcattgtccttttggtgatatgttattcagacggaaaatgatattcaaaatgttgttccatctaaatcagttcccaaaacacctaaagaaagaaagaaggcaagctagaaaagtgaactaaagtttgtatgtttcttggcaagtctaaagagactagggatggaatcttttatggttacaaggataataaagtgtttgtttttacaaatgctacatttctagagaatgactatatcaaagacttcaagcaacaaagcaaggtagtattagaagaaataattttagcattaactcaaacaaatgttccatcatcttctactcaaatagaaggtgatcccactacctcagttgaaccaatgcaaattgactcaattaaggaaactattacaaatattcctattcgaaatatcatggtacctcatcgtagtgggagggtttctaggaaaccatttctttattgttgagattttatgccctaaataaaacctaatttatgttggttttatggtactaaatcaggtacgcagcgaaagaatttcatattatctgattatcattgtatcatatcccaatggatctctagatgtgtgtacattaaatcaaaatagctaatagttagtttagaataaatacatcttgatgactatcagggtatccttaaaacttctcgtatgttgtatcccttaattcaggtgatgaggatgatccaatcggattcacacaagtgtctttcaaatcgttctacaacacacaaggaatagtgtgggctattaggataaagtttataatgtgtttttgttgatttctcaacacatgagcaagaatactttaagagagaaaactatttccatttcatctctcaatttcaaaaattacagtgtaaaagtgatgttctattctcccaaattaggcttctatttgtagtagttaaatgttgggttttgtgccct

SEQ ID NO: 49515 - DNA, 1634 bp, Cannabis sativa
aataataataaaattaattataaagttattaattttatatttttaataaaatattaaattttacattaaaattttacgatccttcgttagaggacaaaattaaaatttaatgtaaatttaacacaaaattaatttttgtatcaaatataccaaaatttttaccactcctaaaataccgattaccgaatatccacttgtacagatcaaaaaacacattgacgaacgaggggtacttctgtcaatgaacactacttccccgaattgagcctattggaccatgccgcgtggcccacactactcggattacacaaaacgacaaaatacgtggttagaatggtgagtcagcgtgatatttttcaaaacgtgacatctttatccaccacctctttttgggcctataaatacctctcttctcttagttctaaaagccttcgtcccttaacaacattttgcttctcttaaacaaaaaaaagaacccatttcatctttgatttcttcttggattacagtttctctgttgtaatttccctaaattttcttaatttaagctaatatggtagttttcggtaactcagttcgtgaatccagttcttttgacactatcctcttcggtaaattaattctcaaaaaaatatatatattttgtaaaaaaaaacaaaaactaatctcctttcatgaaatttcgtttgtttatgatcaaaataatttattttttgttcggaataaacagatttggatgatactctgtaccctggaaatactggattatctggtgctcttaagagaaacattgaaggtaaataatataataataaataaatatagaaatttaggtgatcaatttgcaatgcttaataattattttcattttttttttcagattttcttgtggagaaatgtggattctcagagactcaagctgcgactctcagagttgagcttttcaaaacttatggcagtactcttgctggtttaagggtaataaattcatcttttccaaactttttcctttaaaatttatttatttgtctgtctacttcaacctaataaaattaagctgtacatttttggtacaggtgttgggatacaacgttgatgccgatgattatcataggtatgtatatataactaattagcttaatctaaaaagaaagaaaaaactcttttcttacacaatttgagctaacatttttgttttcttcttccttggaattttttagtgtcgtacacggaagattgccgtatgatcttatcaaagcagaccctcaactacgaaacttgttaaacagtatctcccagagaaaaatcgtaagctaaacagaaatataagaaaaagaaacttgaagaaacaagtaattaactttctaatttggaattaatttaatttaattcagattttcacaaactcggatcggattcacgcgatgaaggctatggatcggcttggaatcgctgattgctttgaccaaatcatatgcttcgagaccatgaaccctaacttgtctaaagcgaccaggccagacgaattccctgtcgttctgaaaccttccatggaagccctgaaaattgctctctctgtcgctgaagtcgatcctcggcgtacggtatgtcgtttttgactttttttttttttt

SEQ ID NO: 49516 - DNA, 1100 bp, Cannabis sativa
  modified_base (49)..(52): a, c, t, g, unknown or other
ttaaataaaactaacactacgtggcttgacacgtaacaatcacctagtnnnnatatatatatatatattaattttgcttttcaaatatgcgcttgctagaaagacctttgtcttatttgaaaaggctaacatataaataatgagaattgttaaaaaaatgtttactactttctattgtcattagtatataattaagtattaatttttatataactttaaaaaatatttttaactaatgaaagacttatttcttccttgatgaacattctttttacagtttattcttttaattattattgtacgcattcatgctggtttatttatatatataatacaatattatacaaattaattaaagacttaattaacaaagacctttttattatgtataattgtgttttgtggacttggtctctcttaatacagtagtgtgatatatttctctttaattaatttgtcatttactctttataataagggaataattaagaatacgtgtagtgggttatctagtgtctattttattaataatatataattagatatttattatattaattcaatatatattaatagaaagctagcaaagaagagcttaaagaatgatatttgttgaataataaagtgtccaattgctaagccagtcaattattcaattaccaaagtctttgtttattatgtcatcacaaaaatacatatataaattcttatggacgaccaataataaaattgaaaacaatattcttgttgagatgcatacaagggaatcggttgttgattcatataaatatatatcattaataatattattaaagtgtgcatcgtaattgacttctttcaacgtaagctacaaataaaataattaaatatatacgtaccatgcgcatatatacacgtgaataatcataataattttcctaataataataataaatattatatatgtgtctatatcgtagttacctggtaactactatagaaatttatacaaatcaaatcatatataagtcatgatagctatagagagattatcataattataacacacactaattagcaattaattgatataatttttttgatatggtgatcatgaatat

SEQ ID NO: 49517 - DNA, 919 bp, Cannabis sativa
aggcctccccagttcatgaaatcccctggcattgaagatgtagtggactgagtacgttacgattcagggccacgattgacctcaacacctcaatcttttcgggccttttcctacaacgacagcgtctaaaagacctatggatacaatagcgatatgaaaaactccccaagctatgctttaaatgtggcacacccatgatcgaagatcctgcttcaaatcgccaaccattgtcaaggatgatcaaggcaacttttaccccatgtatggggtctggctgaagaacgatgctaagaaaaaatccactttcaccactcctctggccaaatggttccaggattggattttgcaaaagcgcttgggaaaagacccggtcctctgtaaccaaatacgggttcacagcggtttttatgcaactccccttggttaatctgtcgtcatgagggttgttatacaagaccttattgatgctgcccccagaaaccaatctatacctttcaccaagattaccatatcagggaaagaatttgaaaaagagttgttgaatatcattacccaatgctctgggttgggcacgtctgaagtagagactaccattttgaaggaggacaacttatgtgatggagaaaaacaacaacagcctaacctcaaagagaaacatagtactttggggcctcatctcccttttgttccttatagtatgagtagtcattgtcaggaggagactaggcccaataagtccaaactgagccctcaccctatacaacatccccacttggatctcaagcccgtgtggttaattggccttcttctaactgttatgcccaacctaagggtcgtgagcttcctatgggctctcttaccgtggacaaattccatagagagtccactctattcgacccattgttagacattgaagatt

SEQ ID NO: 49518 - DNA, 958 bp, Cannabis sativa
  modified_base (28)..(50): a, c, t, g, unknown or other
ttttagagagttcatatttagggtgttnnnnnnnnnnnnnnnnnnnnnnnctaagatcctggtaaattaattccaacacaaagtgcttaccagctgctacagaaacaaaaaccagtcgaagttcggccaaataactcttgtttttggcgaaaattctggcacctgaaactacctcccaaggtcttgaatttattgtggcgagccattacaggttcactcccaacttgtgtcaacctcgtcacgaaacatgttccaatctcccctcaatgtccggtctgccaggctactgcagaaaccgcatcacatgcacttctcacttgccattttgcccgatcttgctggactgtttttggcgtgcctatcgtgatggatatgtccgtttcttttggccactagtttgagcagttgcagaacacacaggacaatgatttcatttgccgagctgcaactctctgttgggctttgtggaaggccagaaacaacgttgtctggaacaaactctcttcaactgtgaaggaagttatgtctacatcttcaattactcttgaacactggaggaaagctcaagataaaagtgctctattatcactatcgtttgaaaataatgatgatggggctgagctatggacaccacctgtaactaataacctcaagattaatgtagatgcgacactcttcccaaatgacaactcatatggctacggtctagttgcaagagatcactttggcaagttcattgaggccaaaactagccaattttctggtagctatccggctgaagtggttgaagacttggggataaaagaagctctaagctggataaaaggaaaatcttgggacaatgtggagcttgaatcggacagtcttttatctgtgcaagcaataagaagtaaccaaaagatgtcctctacttttggaatagttatagaagattgtcgctgttgggttttatgcccta

SEQ ID NO: 49519 - DNA, 2762 bp, Cannabis sativa
aaaactgtttttaaaaaataaggccaaacaagccaaattgtttttaaaaacaattttctgtttttaaaaacaaaaaactgttttttagttatgatgccaaacatgcacttattttcttaaactaataaagacaagaatttgattttgtccatttatgcagggcaacctcagcaacatcacatgttgtcctaggacagttcaaaacatgtgtgttactattgggaagttacctcattttcaattcagatcctggaattgtgagcatttgtggagctgttgcagctctatgtggtatgtcaatttacacatcacttaatctcaaagacaagcttgaaaaaaccactctccaagataattgtcaaattttggatgtgaaagtatagaaaaacaacaagaacaacaacatagtattgtaagtttgtaacataggaaattcttcatttttgttaatttttttttaccatttggaaaaaaatgatgatgaaagagaagagaagggttgtaagttgtaatggttttgggtttactttactcaactttgttcataagctaaaaaaaaggaagaagtgtacatagtcatttaatgaagtagttacaattattgttattattattgtaatgagaaaagtgttttgttacttatgatttcaacaatcttttatttctatttttggatgtgtttgtttgattcttttgctttaaggattggatttcaatatcatccaaagtaagagcaaagaacaaaagagtgataattttcttacactatttttttaaatatatgtcacaagtggatattactcaaataattttatttatttttgtaaggaagtaattatatagttaaaacatggtcaataatataggttattatattctccaccttatacttaatattatacattttcactaaaacaatatttttagaagataatctataccatagtttattttcacaattttaaatttgagttgggcattatgttttattgttcaacttatataaagtatttttaaataattaattattttaaaatgatgagtgataatttcaaacaataagatcccaatatatccactcaataacaagtttaatgggaaattatagaataattttgttacaaatttattgattagctaccataattgcatgcaaatatgtttcaatataacattatttaaaatatttttattagttattagcggtactcaacctacatagaaaatacttaattatattaataatagtataatatcttatggtgtttttatcaaatattactggtacttaacattgagtattattattaggtattagtgtgtttaactgttggactacattcttccaccttgttgagttgtcacctcactttaactcccacattagtgtgatattgtctgctttgagcttaagtcctcaaagtttgggcaccttcccaaaaggttgctaatagaatagatggaatacttatattcaaggcaactcttgcttattcttctaattctaatgagagacttgggttaacaccccaacaatccttcccttgaaccaaggatcacattatggactcccctctaacaaaattaccttgtgttgtcgctatcaccaacaaaactcgccgcctgaccttcaacattgtcagaaagacttttgacacaaaccaccaaacacagatctccatcttgtaccgtcttaatctccaacaggacacgtcgcctgaccactttaatatcaagtagactttcgatacaagatagcctatagatcttcaatcacgaggccatcacattgagggcttctcctacatatatcgcaaattcaatctactatttcagtgctcctaaacctttgactctaatactgcttgttgggtcctttttttctaccttatttggctaccacctcaccttaactccacattattatgatattcttcattttggacctaagcccttatggtattattttaggcatcttcccaaaatgtcttatactgataaaatagatagaacacttatattcaaaataattcttatctattcttctaatgaagaacttgaattaataccctcaacactaaccaaacaagacatcttacaaataattattaattttttataataattattaaattaaaatatacaaatacaatactcaataacaataaaacttgtaattgtgcatcaataacatttttcatataaatatttttttgtgtgggaaaaatgttacttttctatggcttttggggaaaaggttactaaagaggtgatgatgcaaaagagcactaaaatccaaaagcttagttgcatacatatataatcaaatcaaatctactaatgagtgatatactttctggctttgccaaatggctttcatgcatttgtttaaaactctattcttttaactggacaatactagacaatcaaagaaaaaatgagagagttgaattgaattgaatcacaacaatagatactccacacttttcatattctcattggatagactacaaatagtactataatctagtactagtcttttaattggacacagtcataaataagaacaaagtgtgcattgctatcatgtattactcctgcctaatacccaacactttctataagtagcttttcttagttagcggtattctctaaaaaaaaattaaattatatgagatttgatacataattatactaatagcggtatgataccgaagagagtactaagtatcactggcgccttttaacaattctctaaatta

SEQ ID NO: 49520 - DNA, 1911 bp, Cannabis sativa
ctaacaacacaaataaatgagatagttatcctcgcaccattaatatccccaaaaaatattaaatactattttaatctggatattacagttgtcactaaaagtagttattgtttatggtgtagggtaactacaaaaaatcttaattttagtcacaagaaaacttgtaactaaatataaaaagttgtaactaattataaattatcactattcatatgttgtgacaaaaaagtccgtgcctaaaggtattagtcacaaaaatacaattttattgtaaactaaatattgtgactaaaactaattaataatcacaacttatatctaaatatgtactatgttttagtcagaaggtaacatattgtaattaaaaaaatttcacaagtttagacttaatttgatatatatcatattggaattgtgagttgtatatgaaaatgattctatcacattagctcatattctcatataaggtattaagttcagataatgtgtgatttactaacaattgtcacaaaattagtttatgatcctatcactaatataaaataattataaactattcaattaatcttatttgaagtcataaatgcagagtaagaatggtggtgtaccagcttgggagccagtaagaggacaaaagtggatggaagtaaggaaataaacaaatttataagttatatatataaaaatatatatacatatattcttaatcacaaatttgctagttcatatttaacctttttttttaatacaataatttaatttcagatatttaatccaactgaatttttcgcggacattgtgattgagcatgaatatgtagaatgcacttcagcaacaattcaggttttagttttattcaacaaattatatccacaacatagaacaatagaaattcaaaatttcataaataaagctacaaaattccttgaagacacacaaagggatgatggttcttggtaagtatatcatttttttttttctttcttctacattataagtataaatagtatcttttaattgtgtatgattttatatatgtatatgtatatttgaaggtatggaaaatggggatcatgctttacatatggtgcatggtttggtcttgttggattagcaactgctggcaagacttataataacaatgaaactatacgaaaaggagtcaaatttctactcaaaatacaaaatgaggatggtggttggggtgaaagttatctttcatgtcgtaatatggtatttcccaagtgaacattttagtaattttttttaatcttgttcatcttattatttggcttatataaagaagtaaatattatatatgatcatgatgtaggaatatgtaggtcttgaaggaaatcgttcaaatttggtacatacttcttgggcaatgataggtttgattcatgttggtcaacaagaaagagatccaattcctcttcataaggctgcaaaattgttaatcaattcccaaatggaagatggggattttccacagcaagaaatggttggagcttttttgaggaattgtatgctacattatgctgcatatagaaatatattcccactttgggctcttgctgaatatcgtaaaagagttttggtatgatatacgtaccttaaatatgtgttgtagttgtaatgaccaaaattctagtgggtttatattacacttagtagtagttactaagtcttaattaattgaggttttggtaatttaataaatgatatgtatagtataattttataaaataataataaaaagaatcctttgttgttgtagtttaattttttatacttcttaggtcaagtaattaaagatatatatattataaatattataacatgtcagtctaaaaatctctcaatctaattattttatttatttatttattattaattaattaagaaata

SEQ ID NO: 49521 - DNA, 1340 bp, Cannabis sativa
tttttttttttttttatttgaaacaagtagcatttaatttctgatgttaagaatatattaaattttaaaataaaaaaataaatgtaatgcatctgaactctcaacgtgtctatatttatgaattaacggaagtggtagtaacagatgtaagataattgtaatatttggtatttttacctccaaaaattaaaataaaatatatttttttttttgaaggaataaaaataaaatatttaagtgtataaaatgtaaaacatttgatatttatactacaatttacctatatatataattgttttgtttcggtacttatataaattaatatgcttgaaaaaccgtttatgcatatatggttttttttttttaaaataataaggagaaaaagacgtgtttcattttctaatattgaaaagaaaagaaaaaacactatttttaagcaggcagacacctattatctggtctttgttgtgttcgtgggagtcgtcaaagttttgtttggatctcacgacaatgtctatgacagatccaatttgaggtacactattaattttgttgaattcgatgtagatttactttttataaatagtatatatatgagcaaatatatattgtgttttagacgccaacactcttttaattaaagccaatattataggcaacgccttcgtgaatttcgattcaaactcttttactactttgcttaattagatcagtttatacttgcattttcttttttttttttttcaattatttattcgtttatataaaaaaaagaaaatgctcactgtgggaaattagaaagaaatatatttaaagatcataaattcaaaaatgtccacacaaaagggacataaatgaaatttacttgagagggtacccaaatgtaaaattaaataaaaaagatagagttttatttgcactttaaaaacttataaatccatcccattttaatatatatatatatatattttttttttttacataaaatatacatctttaaatatatttgaagaaaacaagatattacatgctcatatattagaagtgagatcattttgagatcactagatattttgattctcactttgcaggatgtcaaaatagtaagagattcattttaggttaaatgattaattattgtttttatagttattaataaataggtgttatacccaaaattcggctgacacttcaaaaaagacacgtgtcaacttgggagaatacgaactaacaagtataatattaattatatttgtagatgttaaaatggaataactcattaaatattgaattgatagagtatatttataactcagtgattgtaaagtcataagcgagac

SEQ ID NO: 49522 - DNA, 904 bp, Cannabis sativa
tctctgttgatctaataacaataatccaaaatgtttctgcagggtaaatacattagcagcttatcttattacaccagccattggctcacatttcgttatgtacctcgcaaagatgcaaggttcgttgattatattatatggcattctagtttaggctgttgttgaaattttattgttggttatcatacttacttcacctttgcagaaaattcacaatctgggctccctgctcacgatgttgagaggtatgttatctctctttttattgtcatttgcctaataatattcctggtttgtgaatagttttgtcaggatttataacttttttcttttcgatctcctgttgtacatattttgtatctctaggttcgtatttgtggtccagggttcagtgacactaactaatgtttctagtgccagccacaaacttgaggtaaaaacttgtatggtgcctatttatttctataattgattcttcgtttaaggtacatgtcagtgatgttactagcttttagttttggaatcttttagctcttaatatcattatgatgtaacttagtctgcttggctgtatgttcttggcataaagtccaaataacaacaagaggtataacactttaatttcattttaagccataccaagatcactgaactgcatatataataagcaaactgaaatatgtaaagagttaacctcatatgtaggaatgtagaagtttagggtagaatatactttatatattgtatatataagggtataaaactgaaaagtggcactacgaattttaataaactgattagtgtttattagagaatacaagaaaatgagtaatgttattatattgagaaaccaataaaaaattgaattaggagcagggttgtagaggtcaatacattggtcttc

SEQ ID NO: 49523 - DNA, 938 bp, Cannabis sativa
atatatgttactgtatgtatatgagtatatcccatttatatggccacatggtatgtatgaatatcgtacgtgtatatgtatatcccatatggccacatggtagcatggtaagtaaaaatgttttacgtgactttgaaccatccaccgacacgattacaataaaaaaataaatattaattatacagaaaaaagaaagttagcgataattgatcatataataaggatgagatcgattggaagtcctagataattaatttattggaggaactgaataaaaactaggagaaaggggcaccgaaagtgagcctgacctgaatgaatgaatctctttccctctcgttactaccatcccatgcctactttcttacttgcttttttcctttctttttgtttacatgcccacttgactctctaatttcgtaccatttttctcttaattaaccccattttgtcccgctcaccattctcttttcttttcttctaatttataaaaagagtttaatctgaaaactcacaataaaaataataaaaagtcctcaattatattatctaaaataaatgatgaaagagaagctcatttatgtgttaatatttatgtggatgaagatttagtcgagtgatgggataacagcagtcctggatattcttgtgccttcgtgggctttcgctctttatttgttttttgagttttgtatggtttttagttggaacaatatgcatgttgtgttcgtgtcctttttggaccttggcttatgcttgtctgatcttttctttgaatatatatatataggtcacatatatgtggttttattgattcggtatggagtatcattctctaattgtaagattttttaaaagctaactattgttcttgttgtccatttggggatcgattggtcttttctatcacctctatggtgtttgtgcctgcccaatat

SEQ ID NO: 49524 - DNA, 1280 bp, Cannabis sativa
  modified_base (486)..(490): a, c, t, g, unknown or other
gaataatgaaaaataaatattggtttttttttttatctattactatttaaagaatgaggaatctctacatttaacttttgaaaatgactagcaattataattaacacatctatacttattattattaatccaatatatataaaatgtggagtagatatatacaaacttatcgaaagaagacaaaattgcagttctcaatctctttcaagtttcaacttaagtttatgtgccacaacaacatatattgatgtatatatatgggtcatacggctatatgcgccctaatccctatttatgtacaattcaatagtgttgttattattattattgagaaagactaccaccgatacctagtccacactaagaagacgtgtaatgttatctaacaattgtccattgagatattctatcctatattactttttttttttgtaagggtatattgaaaaatatcttttttatttatcaattaattaaatttacttnnnnnttatatttaattgaaacatatatttttttatatgtattgtatcaaaaatatcttaacataaagaagtcacatgaaaagtatattgaagtaacagggacagaatcgacaaagtgttaaaaaaagaagtaaaaatgatagactttaaaaaaagggtaaaaaataaaagaagacaatataaaaagagtatatagtctaatttcctcttttttttgaaaattttacccttagtgccactttttgtcaatttttttacatttttatcaatattcggttatttaaacatttataaaacttttgtttttcaatattacatttttaaaagtttcataattacaaatatgtctatccatgcttatgtcatgggttttaccttttcttacacgccatccctgtcattacttctcctttcttattttttttttaattttttgttactctttcgttggtttttatgttgacagaacccacgatcatcccctttgaagccctaactcacgattttttaacctcccatctatgccactctctgcactatcttccataacgtctgttagtttatcctctcacattttcttctcttcttctataaatggccaccactaggtcaggttcaaagtcaccttcacctgctaaaaaaatttcaaaaaatgctgagaaacctccttcgaagtcatctaaagttgattctaaaatgggtttgaaacgcattgcgaaggagggaatgtgtgatgttgcagagccatctggttctgaaaaaagacctcctccagataagattgagtctcgtaag

SEQ ID NO: 49525 - DNA, 3026 bp, Cannabis sativa
aaaaaaattccgtgtgacagtatttttgtaaaagttatactaaattctagtatttttgtaagtttctttttttttttttttaaatcacatttctagtttgtgaagaactaatttgtcataacaaatatttgaaattgagagatacatttaactctaattttgagactcaaaaagaatatagaagataatatattaaatatttcaataaagtaattagatatttttttttttaatcataacataatttatttttgttagagttagatttaaaacatacatgaatcttaaactcacgttagatctttaaaattactttatgtattaatgagaagaaaatatgtgattccatgatttttcgatatgagatcatattatggggatatggtctttcatagactaatcaactctttatgagttctcactcaattgatgggaatagaggagaagaggatttaaagattaaccttggggaccgaacttgtaaagccccgtttcaagcttctattgtgccttttgccacggacttgtggctcttatacatacgtacatcactttggctacttcctggaatgataactaaccctacaaactaacacgagtgtttccagagtgctttgtcctcactcgcacgctccctggggtaacttcccaagagatcacccatctcatgattaccccaagtcaagcacgcttgactttagagttcttaatgatactagaaaataaaatgcaccttattaatatagctagttacctatcaatccatttaagtcctcttcacatgtgtagtctcatacctacacagtctcgagatcatcacacttgaccttttcctagcgatgtgggatgcacaacttatttggtattttcctttacggatcacgagactattgacattcacaaaaccctaaagttatttatatagaaaactaactagagtcccataaatcttaattaggtttactatttggtattagacattacaaagtccatacaaataagatgttcattttattcatttaattaggggttttttacacaacatactgaaatttctaacttttttacttttttactgtggggcagaatttttttttcaaaaatattgtgtattgtattgagttttcactgttgttctacagttgtttttttgttgttccaatgttgttttaattattctgtttttgttgtttcacggtaattttataaaaaaataatatttttgtaaaacatttcgtgtgatagtaaaattataaacttttgctcaaaatttagtatttttgtaaatttaaatcacttatttagccaattttaaaatatttgctcaaataaattttcttaatttgtaagcttacatgttggatcattaaaaatggattatttcatttataaaaatggcaaaaattttacatttttacaaatctactatttttttatatatatttttaaggattttattaaatttttacaaaaatactgagtgttgtttttgaaaaaactattgttttgacattgttactatggaaaagaaacgtgatttttttaacaacaatacgaagtgttatttttctattatttcagaacaatgttgttttagcattgctgctacagggttctattcgatacgggtaagagaagagcccgactcagtattcttaaaaaaataaaaaaattcacatgcaagtcaagatgatacaaattaactccttcttcttgcgccaaagatcttatagtattattttttctggaaaaaaaaacaagtaaaaatgtgtaaaaaaaaatccgcaaaaatgtaaataaaataaaggtccataaaaatgtaaaaataaagtctatttttaaagtgtattgtgtaaattttcttaataaaaataattcaacaattatcttttacgaaaggatactctagctacaataaaagaattaattacttgtgggtaaacaattatatttatttacgagttattattaaaatacttttaatcaaaattttgttaattatttactatggtaaaatttgtagtaactaaaatatatttagtgataataaattatagatttctttatttaatatttttaagggtcgcatgattaagtatgaaaattagtagattattagcagtttaataataattaattagttaattatgattgttgatctcgtttctagccaacgacagtgagtcaagaataaagcgattaagtaatgtaattaagagaaagcaaaaacattaaagtaaagtgaacaccagattttaaaaaggttcgaccttgtaagtgtggtaataacctactccctttatattgtattgacttgagagaaggaacaaagtgttcttcctcttgaaagctcttacaaatgatctatgagtatgtttctctcttagatcactcttttctctctagaatatattttagcaacaattctctcgatccctttcatagtgaggctaggtcaccatttataggaacttattacatgagggatggtttcccttttgtttacaacgaataaaataggaaacaacattaattccataaaattgcaattcaagagaaataggaaattaaattatgttatcatttttctctaactccaccccacgattatagggattgtcttcgcgtctggacacatcgagattattcttcgatgttgccatcttccatatgtagctcggcagacatgtccatacctggtcggacatcttctccacaatcctactcggatgtcagagtgtgacagatgctagttagtcatgttgggatatattttaccgagatctagattaataacaagtatgttgattaacatcttaaatatgaattctattactatgaaattaaacacatcagagtttagaaaaccttacattgattgcagcagaataatatgtctccttccactcagatttctacccttgttcctttccatcgcagagtaataacaagatctgagcctagatctccttctctccttcgggttgattaccaccgtctttcgcactataattgagtacttgact

SEQ ID NO: 49526 - DNA, 4837 bp, Cannabis sativa
gtacaaatatcttccttcttcaaaattagaagtatttcatacaaccaaactcgataagtaaatggaaagcccccattttgtatgtcctaatagatttctccttaatatccaaatctttcttttctagcatctgttttgacttcagtccaaccctcaacccattaaaggtatagtcataagataatttcccccaaagatatgagttgaactccccagaacctatcatatttagtaaaccatcatgaatctttatttcatctccctactaagcaagcaattagttacaaagaaaagaacaactattttaatagcaaaactatcatccttgaaattactaaataggaatctactctcaacaccactataggtaacaatttggtcataaaaataaacttattagaacatttagcatacttggtataattcctgtcaccagttcattttaaatcaaaaaataagaccaaattcagcaacactaaatctaacagtatcgttgccaaagctaaatcaaatatcacgctaattattttgatataatttctatacaatgatgcatgaatcaattgagcttgcattgaaactgattgcatatctagaaaatgaccaaaatatattttaataaaaagcttaagctgttattttgacaattttttcttaatgacctcaataaaatctactttagaattaggatagaatataatctttctagtcaattatcttcaggcttaaagtagtaccctcataactgcaaaaattaatgtcaagaaaataaatcaatacaaataaataaataaactaacattctccaacaaaatcactgccagtactacactgtggttatcaagactagtaagtgtttgttttcacagatattactacttttgcagacgttgattatatagatgtaatttaaaaatcatagtagcaaagtagtggagatactatttgattccaaaagtttttcatcatcttctacaccttgtaatggatgatccatctgcctctgttgaaccaacgcaagttgtgacaactgaaggggattataccacttgtgttactaaacatcaagtgatagtacctcatcgtagtggaggcgtttcaatgaactcacctaagtatggcttgaaagacactagtacttatggtatacctagttatttacatagattgtatcttaatcattggaaacaacaattaagaaactgtcaagacatgtgaaaaaaattacttactcgctcgcaagcaaattacattagtaaggtgctagagggcttttcaatggctaactctaatggaggagacttgacttctagacatgaagtttatttatctaaggagcagtttttaactgttctagaaaagataaagaccaagaaaagaattctctaagcatcaatagtaagaggtcttatgtatgctcttgtatgcactagaccagatttttgttattgagtgggtgttgtgagtaaatattagtgcaataaaggtaagaacattggaagataatcaaacatgtcctgaaatacaagagaagaaactatatattagtcgatatgggcaatattttaaaatctttaggctacaccaaattagatttttacatttgcgtcaatgcaagaaagtctacttaagagatggagattaccatatgggtgggacaatatttttagagaagtgtaaaaaacctatatggaatcactaactctaccaataaggataataataaggctgccctaaagttcgatatagacttttgcataattctagacatggaataattgctagtgacactctgtgttaacacaaatgcaatagccaaacaggaaagaatcttgtaacctaagaggagtaaaacatataaggtaagtatacaaaaattcatgcatattgtgactaagaagaatgtaatggtggagttggttgatattgaatacaacctatctgatcctgttacatagtttataccgaattctacatttaattaaaacatcaagtacatgagattaaattaaaatgcacttttagttttatattagtgcaaatgagagtttgttgggattttttgccctaaataaaatataatttcattgtaatcttatttacttttaataaagataaaaaatcatatcttgaccttgttttatgctttttcacatattttatacatgattataggtttaatatataagttttattaaatctcaaacatatagttgttcaaaattatagtgatgtcatcacagtagaaaataattgtgattatatgcttcaaattattttgtctcacgatttataagtgcactgaatttacgctgacgcgataatcatcgataaggtttacttacacttagctgagtggaatgtcttttctaaggtattagtaaagtaaactaggatcacgatgtgtcatctatatatcacactggaccgatattgacagtggaaaaggtttcataaacttactattatatctttgctaagtcaatatcacttagttgatcatagatcatttgatctcaatcctgagatggttaagctctagctcaaatatattgcctgcattttttgacttgttcattaccagcttaccatagaaccgtctcaatacttacatcttgggatctcgatatggacatctatagcttctatgtttattagaagtgaaacaatgatttcttagagcttggcttaacgcattaaatgatagagcttccatttcgataattatactagtttcatgaaatatcatttgcaagtagttaaatattttaaggataaaatacattgaaggataaaatggtaattttgtatccctactcgatgtagaccatttatagaggatcaatgattgttgtgattgaaataatagatatgttataacatatatattcttggagatttccatgtaagtaggagtacaattctgaatctatagtggaattaggaggaattaataagttaggcaatttactcggtaaatatcaagatctgattattaagagcttgattacatagtcctatgttccctacattttttgagataatattatcttatagactcaactaattaatttatcaagtcaattagaatttgaaaatagactgtcttatttgagaattttcaccaagtttggataattttaagaagaaaagagatataagagtttatttattgactaatacactttgtgagtctaattaataaatatattcaaattgtattttatttgacaattatttataattattaaaataaaattagtatttaaataattagatgagataagtagtaaaattagaaaagacactttagttttaataaagtggcaaaaatctaactctaaagtccatgaggaatttggtcctagagttagacttcaacccaagtctttatttaatggtcatctcatctaaacctaatcctaagtgaatgcctatatgaaaaaaaagtgatgagaagagaaaattaacctaagtttcataatgtcagaaaactctcttctcttctatattttgaattcattatagtattttctctctaaattattcaaaggtgatttgagtatcagcccacactattcaagttgatacttaggcctttgtggaagactgtgatgaacacaattgaaggaggagaagattcaagttaatttcttgatcatactctacaacagaaaggatcacagattagaaaactaaacagaatgagacattatatttcacggccattattgtaagattttctataagtttatgtgtttatttcatcgttttaagtttattcatatttaggttgttagattataaaattataatcaacatacatgttagtaaatatagatcctggtaaaataatttgtagtggaaggttcaaaggagatccagtaaaatttaaagcaaggttagttgctaaagggttcacacagaggaaggggtaaattatactattttttttttctccagtggtgaggtataagactatcagaattatgttatccctaactactcattttaacatggaagtggatcaaatggatgtgacaacaaaatccttacatggggaactagaagaaggcatatacatggagtagcctaataagggatttgtgatcaaatggcaggaagatagagtttgcaaatcggttaagtctctttatggacttaaaatagtctcctatacagtggaataaaaggtttaatgcttacatgacaatcacgaatttatactaggagctaccatgacacttgtctattacttcaaggccagtaagactgaggaagccatctacctaatgttgtatgtagattacatgctaatacttatcaaggaaagacacatggtgaactttataaagaaaattctgaagatagaatttaatatgaaagacctagaaactgctacaaaaatcctagttaattgatcttgacacacgaagattacattcacaagataattgaaattttttcaatggaaggttctaagctagaaactcaacttattacaagttagtacccattatttaaggctcaatgccctaagactcaagctgagaaagaagaaatgagtaaagtgccttactcaaatagagtaggattagtaatatacttaatggtaagtacaagacttgatttggcctatgctataagtcctaagtaaatatatatagcaaatcttggtaaaatatatttgctggctatgaagtggtcgttccggtatcaaataggtactagcaagaaggtataatgtataagtaacacaagcattacactaagatagaggactgcactaatgatgactatacatgggattgagacattatgcatatgatgactatac

SEQ ID NO: 49527 - DNA, 1911 bp, Cannabis sativa
cacgtgtcctttaaagaggagtctggtctcgaatttctaggtgagagaaatctcactataacacatttaaaataaatatccataaatatctaactattcttagaggcatgtaaatgtctctagaagcccctcttctaaaatacaagttgaacatgtgctgatgagattctcccttttgagaatggtataggacatgtcataactcgtgtaggggctcatttgggcaagccttgggactatgaaagttgctctgctcatgtttcaagttccatgaggctcctctttggtgaaaccctttaattcgaaagcattgccatgaagccttaacttgtgacccaattttggggttgaaaacattgaaattttgagtagtctattagacaagcttagttctgtcttgaaaagagccttccattgccacatgaatcgcgtcatttcgaaagaattaagtgagttatggacaatatactgaagggtgtcgagttgagcgatatggaaatagcaccgctcgtgaaaacctttcttgggacgagccttgccatttctccgtggcaatgatcatgtgatacttgtctcccaacaccttgagttgtgttcggcaagtcttttcagggctggtaagaattttcttgagttttgagcttggataccctacgagacctttgttttataccttacacgagcagtgccattggggaatggcactggtcgtgtatgacactaattcaccttttggtggattctttcatttgtcaagtgtcacttgatattggaaaaactcatttcaccactttcctcctttgtaatcttcttgggcgagcactggaacaatggtgtggcagtggtcatatgtttacacgagcagtgccacaccattgtgacaaggctcgtgtaacacccttggggactattccttatgtaatttttactttatgttcaagccttggtattcttacaccttaataagtcatgtaattgttcgatctcttcttggattagggttttggaacaacaaccctacctcagattcatgaagaggccaaacctaggactgaaaccctaggctgggagcactgacagggaatggtcaatgctcccatggtactttttctccatgcggcactcgagcagggtaccatgtaatcagtcatgagggtcttaacctcgtttggtattctcgtatcttggtcaaagcgtttcttgttaatttagatgtcttcaaattactcttggcttatagacctttatgggagaattttttttacgagaattagatatcattttacttagaaaaaaaatataacaatttgggccctttatatttattttcatggcacatacatttttttgatataaattaaacttcacttttgtaacaccgttttaccaaaaggaccatggaaccacacatcatcactacctttagaacttaagtaagagaaatatgcttgttaacagtcaccttaaccaaatatgtagcaaactgttaataattgagtatattttaatattgagtttcacatatattctgatttaataaataatatgagaaactgttaattaattgtaaagtatcatattaatgtaatgttgaacattttaaaatgtgaaatagtgttgctcaaattagtgtcactacctaaattcagtctctttctttttcagttagctagttagaaattatgatgagtaaaactacgtaggcacgcaaaacaaataaatgtccaattaacatatttatgaagtgatttaaatatgacatgcatattgcatggtactaaataatattactctactgtctcctatacacacgcaccatgtacctaccaacagctcgttgcaatgagtattattaatattaaaatagaaaatgtgatcactaatttcacacttatactattagcctcttca

SEQ ID NO: 49528 - DNA, 684 bp, Cannabis sativa
ctctaatcatgttttagtataaaccaagcagttctccacctgcttaccaaagacacttcatctacaacaacttctaatcaatcatttcataaacttcctaggcagcaattcctgaaacaagtaatgacgaaagaaccttgttactacaaagactccattaatcaaatctgattcgtctgaattagggtcaaagtaactaaaaataaaatggagcataacatgatacagatatcataaatgttaaaatgaggtgtaatttatagccagcattcaaagactcctaatttataggatgcaattcatgacttcaaaaacagtatacatattctatgtatttatgtgcttgtaaaagattggttttggttacagtacaagttataaatctgcagctaattgtttggtaccgaacaatttaggtagatttcagagcatttgaagtagtccgtagtaataaataatgttaagttgcaataacatgcaacaactaattgaatcaattctccaagcctgttgacttgctttaaggtttaaagtatattatggagtttatagtccatgcacacaggagaatacagttttactgttagtgacattataaatgtcataaacctgagtttaaaactctacttcagtcaagtttctaatgctaataatatgggaatatagcatatataataaaaagct

SEQ ID NO: 49529 - DNA, 560 bp, Cannabis sativa
gccacaatatttcccaaatttttttagcacacaggcctcgacacgcaaagggacagtcatgcccctcaatggtggattttaggctgtgatttccctacgcactctctacctcaatactaaaccccagtgttgaggcgcgcccatatcttggtcaaaaacaatcttctctgccaaattttggccttttaatgctttgacatggaattttggtgttgaggcactactccattatttcaaatttgtttgccttaggagctccaaatgcactagaacttttggatttttccttggatgaatttcttagtgctctagcattgagtgtttattattttaccttctttgtcatattttttccaaacttctccttttttcttctaaactaaacctgcaaaattgtaattaccaaaagagtaaaattgcacaaaacaagggttaaactatctaaaaacactctaaaaactgtactaataaaaacttggcaaatttccctaaactaaacatttactcgtctttgagtaaagaactaacaactaacactacaagtcaatcaactgaaacat

SEQ ID NO: 49530 - DNA, 779 bp, Cannabis sativa
ttagtaatgtgatgaaaacacaagaaagtacataattattaaaatatactaaatcagaagttttataaattgtaataaataatcaggaaaatagatgtaatatgtttttttttctttctttttttatatgtttgattaatatgagattttaaagtttgtgtagttttttttagcctccttacatttttaagaaacttaattttaacaattgatagtggtaattttgaaaattaatgtagtgacaattggttttcttcgaattagtttcatattgcctaatgtacaaaaccaaaaaaaaaaaaaaagagataaaatctgatgcatcttactatacaattctaaataatatggtatcagaacaattaaaaaactctcatgcttttggtttttgtttcggacctttcgaccaatgtgagcctgtttcttgtgttagggtctttaacttattcaaaaaatttacaaatttttcgatgtgtacacccaaaaacttcttgatttggtcttgtgtaatattttaaatgtctcgttcgatcctgtgatatcttaaagatcattcattgccaattgattttaacttttaagatggaacatcatggaccttaatcctaaattctaaccacatttgtactacctacagtttcatgttaactatattgacatgataatcactttttggtggaccacaatatttttaaatgcagtaagtgttaaatatctaataagtttatcattaaatggcatttgacattgggcttctacataataaattcatatcactt

SEQ ID NO: 49531 - DNA, 2178 bp, Cannabis sativa
  modified_base (548)..(549): a, c, t, g, unknown or other
ttaccatacacttaatatatattaatcacataataatatatatatagtaccacattttaatctacatattattatattaaaaataatataacattgaatatgaatagacaatctacgacttagtaattcgcacacattgctgcaattaagtcaagaacgaatgaaattatttttacattaatactttaaatgtttgtcttaattaatttgtacaattattgtaataacaatcatgtctgatcagttatgtaatattaatagacacttactttctatataaaaaggtgatctaaattaaataaactaagctgaaactattgcaaaagtggactaacaagacaaagctctaattgaaccactatacctctttgtcttctttatttttctattctagtctttgtctatttcgtaacctaaactttgagtactcgttattctaagtgagtactcgcataactgtaagtaggtggcgttcttactttgctcaaatacttgcactttttggtgctgtcgaatttcctccgataacaattattattattattatnnttattattattattattatcaggatatattttttaagctaagatatctaattataaaattaaaacaaagtaacttttagaaaagaggtgagatttgctaagggtttcgcctttagtttttactggagccatggcaggtcgacataggcctcgcaaactcacttctcagctatctagttcaaagagaggcaagaatttgagagtacaaagagagggtggagagaaggttcctaagggaagagggtcaacttcatcaaaacaaccacgaaaggtgaaatcgatggaggaggtgcttagtgttgaaacgactgagttcacagaggatgaatagaggttgaggaattagaaatcggatttaatggaggtggttcccatctcgccccgtactacaagaaaaataaagagtacaatcgtcatgcacacggtatccaatagtcgtcattgcacctatcgaggaccatttttcaagatagagcactaaatgcctaagatttggagggatggccagatattcatatcttgcagtcagaacacatcaaatcaagatggagtatgagagccgaacacgtgtcacccatttgagcaaactgagtggccgagtaagtccacatacgagccaaatggttcccacgtaaaaacttggggggacaaatgttatcccaattttcgcacaaggtgatgtggcttttaataggagtgacacgtggagagcatttcaaaacttggacgagtgtttttccttcacagtctgtccaaataattttatgtgaacctgactaagtttaaaccttcaacatgtattatccggacagagcttgtacatgactgttcgagctcctcatcacccagtgaaaccaaatctttcgagcaggataacacggatgaaacagatctttaagggtatttttcataataaatatatctgcatttatatctcaaatcaaattcctattttttgggattggcacgcgtcaatagagatattacgggaagctaacttaatttcctcttttattcctaattgttttgagaaacctaattcatgtattttttcttataaatagtggaatcattttattatttgggaatccgaaagatatttttttgagagctattatgctgtaaaaataatgtaaacttttttctaaggatttttgagaaactcacttggctagctccctgtgatcatgataattcttcgatagtaataaaagtaaaaggggagtaagacattactataatcacgggatcgaacctctataaattctattgttcttattgcttaactatattaattattatctaaaatctcatcactttaaagactcaatgtcgttgactaaaagcattattagtgcaatttactattagttttcacacatttgattaaataaataatataggaaattgctaaccgcttagagcatctccaaggacatactaaatttggtgttacactatcaccaaatttgacattaaaaagtatttatactccaatgtacaacaccaaaaattacactaaaaaaatattccttattgttatattattaatttgttaataaataaaaaaactaatatcgtattgattaacaaaaatcaccacacctattatatttaactaataatttaa

SEQ ID NO: 49532 - DNA, 2306 bp, Cannabis sativa
  modified_base (47)..(50): a, c, t, g, unknown or other
ataaataattttccataattaaatataattaactgctaatttccaannnnaactaagcggtctttacacatttatttggcatctcaagtgcaacaaattttctatttgcttgatatgagtcatcgtttaaattggagaattgttcaaaaagttaatcatcgtataatttatgatattcctgaagtgtgtaatactcaaaatgattcattaaataatgatgtcttccaagaggaagaatcatttcaattgcttccttttcgacctaccaaggacttggttgaaggttcttctttagttcgacaagatgttgcacccataactctttcagataaacttgttattgaactgaatatgaataaccataatcaatcaatgaaaaatcgagaagaagatgaagattttgatgatggaactgtcttcttcaacaatgacattatttactcaagtgataatgaaatgatttgctcagatgaagacatttctgaaatagaattcgaccaacatgggaaatcctaattcatagttagttttatcaaaatatatgttactatttattttatctcaatatatcttaatatttttttattcaatcataatgttaattttttttcttatttgtttgttatatgatgaataattgctgccatggcacctggacgtcgcattactcgctctactacacatagtccacaagttgaccagaccattgatgctatgccacctagacgtcgcaccactcgttctactatacaaagtcaactacctggacccaacaaacaatctattgtgcaaaggcaaccaaccagtcgcacaacatgtcctaatgttcaaagtccaccaccaagaccaactacatgtacactggacctattcaaccacttggacccactacacactctaatatacagagtccaccaccaccagctaccacacattctgatgtacacgttcaagttcaaccacctgtaagcaccacacactctactgaataaagtcacttagatagagtcaagatagtgttgcttctcaaacacaatcaggtatgtttattatattttacattaagttatttttaattttaattgtttttaatttaaaaaattctaatgtaggaccaaccacacagtctactgcacatattcggccacctaaatgcacctcacactctactagacaaagtcaagaagatagtgttgcttctcaaacacaatcaggtatatgtctaatacattttacatttagttgtttcataatattaatttttatacataataaatatcaaatgtaggacaatctgtatccaacaaatcatgtgggctaactgatggtgtgagaactgctagcattgcaaaggcatcggctaatggaaagttaccaatccattttgataagaagtgtcatcaaccaatttgtacaaatgctgacagatttaataatgacattgggtttattattcgcaaccatggttcatttcattacaaggagtggagaatggtccatgaggaagttagagcaccattgcgacattatcttctggtaagatatttgatattagaagatgctaaaatcaattcacataaactattgtgttaatattacattttaaaaataaattatacaaaaaaatatcataaattagataagaagtaaatatttgaatataaaagtttaactaaaattagttatttattaatagttgtgtattctacttatttgtgaattttaaattgtttaaaaaaagcatatatatttaataggagattaattagagtttgttttctatgaaaaaaagtagtttgcttgctttttaagaaataggaacatactaaatatatatactatagtgtctaccatatttacattatatttttataatattctccattaaaagtaggattgaaagtaaagtattttactaaccaaatatcaatctttaaaattttacttggcgatttacttaccccatgctaggaacaaatcaactgacttcattgaagtattattctatttatatatataaatataatatttaaattgaaaatcaatattattttatatttataagaaacatatcatattgacttgcttgatgaaacgaccctaaagtgtattgatgagcaaatgggtaagcttggaggggtcacaagtataagttacattcatatttcaaagaaattggaggagaagaggatgttgagagggccaagagaaaacgacatccagatctaaaggatgaccatcaaaaagattgggagatattgtgtgatcgttggtgcaccgtgaaatttaaggtatctatattgaaa

SEQ ID NO: 49533 - DNA, 1004 bp, Cannabis sativa
ttaaatgctcttaaatagtatattttcatattaatttttattatatacggtttcttttttttttttttcaaagaacatataatatatattacttctctctaataatacatacatgtattgatgaattttagtaagtataatcgaaaagcaactaagcaagtcttttctagtcaaagcccttctatatctctcgccaaattcttgacattgacaatactctgctactactagagagaatcagaagcaatgggttgcttaatgtaagtctttattaactttaatttaattttagtttcaattttcataagggtatatgttctagagtttgcatatatgtatatgagactattgtcaaataataataatattgcttttgtttaaccatatgataaaaattttagtgttaaaaaatgtgtaaaatgatatgaaagcaaacttatactatattaaatcccgtaatgaaccattacatatatatatatatcatattaacatattattacataagtctaatgaaattgaaagtcattgtcaatgacttgtgaaagcagccatttaccaataccattgttcttctagtgatttactctcgtcactcgtcacttgttaccgccatctttttcaatctcctagtaagttctatataaatatatatacatatttatgtacgcatgttttcagttatatatgtgtataactatatatatatatagatttccttataggaaggttgtcatacaaaaaaaatatgtagtattattgtttatttatcttttttctttctaaaaagttaatagatttttgttctcaaatatataatggttaattttaattattatgtgaaagttccagtaattagtttacgattatttataataattttaatatttttgtatatgtatggactgaaaacgagatatctatttttataattttaataaatatttgtgagaatattggtttaatttaaatttaaatgctttttcaattattttaaattatta

SEQ ID NO: 49534 - DNA, 3337 bp, Cannabis sativa
  modified_base (3302)..(3304): a, c, t, g, unknown or other
tattattcttaatggtcaacgagttgaagcttgaaaaaggtctttgccatgttctaaatttctatagtgtcacattcaaattcttaattaatagtcaaagattaagttggaattgtctctcccgtgtcttaaagttctaactactttcctagctagacttcttttactaaccctaaccctaaccccatgcaaacgattaataatattcaaaccaacatatctatttatatatattcatgcataataggtctatgatcaaaattgttttatatattaatttgttaaaaaaaacttgttatatacataaacccaaaaataaataattataattattgtagaatatttataataaatacataatttattacaagattattcattatcaacgcgcgttgacattgttttttgtattgagtgatctgaatcacaaaactaacaagtttttgatttgttcaaaagatatagttataagatatatgagtaaatacaaaaaagtcagcttttttaaaatctagggtatatttatttttttaaaaaaaaaataatgttgagaaattgagagaaagatagatttttttgacagaattttttttttttcataatttttttttgtacagaaatcgatacaaactaaaataacaaaagtaacaaagttacacaaggattttcttctatctataagaatttattatctaccctaagaacatgcaaaactaccctaaaaaaactagataataaaaccttaatatcagaaaagaaaacctaacatttagatagataaaatgataacaatttatatttataaacgtaaaagagaacataacatatggaaacgaacatgcattaataatttttcaatataatgtttttatatatatttatatcctataaatataatataacccatactataatatttcaaacaaattaaagttgttgcataattccatagtcgactgcacgacttgtctagttatttaattaaaaagcatctattatggtcaaacttgggagacacttccagtttctctggattaaaatccaataattttagaataataatgaccaaccaaatagatattatactttatacaatatttatatatatatatatatgatctctagagtagtactatttgagtattttttttttttagaaaaatattatattatttacaaaaaaatgcactatatatattatggcttatatgggagggagatcttatctattatcttgatcacttttggtgtttctatttcctttcctctttcatactatacaatacaacatccaatttaatttcgaaaaatatcaccaaaagtaaatttctttctttgtttttagtgcaattaagttaaatttaattttatgtgcataatactaaaaatggttggatgaaaattttaatttaatattctttggagtcaatttcaatgtcattaataatatgtacatgtaattttatgaatgggaaaaggttgtgaatgagagtgacccaacagcttaatttgctttgactagtattggccaatttgatttttatgtgttcttctcaatcattatcaatttttgaagaattaaaaaaaaatgtggtctttctcatttgtggattgtgatggtgcttcttcattccctatatgttaatgggcttgggcccaacttgacatggaataccaccccatttcacatgctaaagtcagagactaattcttggtagggcaactctaatgagtaccactctgccatttgcattggaaaaaacatttcatatagtttcttaaaaaaattcaattaaaaatcatctaactataaaagcatgagaggggtattaaagtggtgtagcttattttccataatttttgtccttgatcaattatgtcatgatttttttgaaaccgtacttaaaatggtatcatgaactagttactaatagaactgtagttaagtttcaatcatgtgactaacatattatataatattgacatataaagttgtaattgtgtgggtcgaataggaccaactcgtattttaaaatgtcttcaagaatataaattgtattatcaatattatagagtagatacttatactattagagctaatatctatatattttgtatcaataaattagatttctcattgtggtccatattcagcaaattattttaaaatataaacagagaacaactaaatacttattgggtaatatttttttataagaatggtagtattttttataagaacaactttttcagttagtcctatcttgtgatatgagtttgtgtctctcattcttagagatttttctttaaggttgttagtttttgttgtctctgtttcgctttgctctgtctttgactctattttgtttgttgctctttccatggcttccaccagcatggctgccaacgagataacgaaaaagttagtttgatatttgcctggaggaggaggagaactatgaagctgtttttgaagaagatgaagtaaatgaagtagagttcgacgaccgatggtgtcttataggccgtttactcacaaggaaaatttctgattttaaaattgttcaaaacatcatggctaacctttagaaacccgagaaagaaatgtatgtgaaaatacttgaatcaaatcagtttctctttcaatttttttatgaaatcgatatacaatgggtcattacgtggagtccttagacttatgatcgtaaacaactcatcatccaaagattgaaaataggagaaaatcttaagacggtacaactcaacaagttggacatgtgggttcaagttcataatctccagtctcgttttaagactgaacaggttgttcatgcaaccagtgactataggcaccttcatcgaatcggatctgaacaactatattggggtctagcgtgaatttttaagagtttgggtgtgtataaatattgatgttcctctaaaacaacggatgcggtttcgacgtcaaggaggggaagctttttatgccaattttaaatatgaaaaagttcccacattttattttatttgtggcattgtgggtcattcggaacgattatgcgaaagattatacgataccccaacggataaaattaagaaacctaataggatagagatgaaggcttcatcaaaacggcaaaattttttgacattgtcttcatggctccgaaattctaaaacggtcaccgcctccagtgatggtgctccaaacaacaacgttaatggagttaatgtttccccacaaaataaggctcattttggggataaaatcatgcatgatgatattgttgggttttatgccnnnaataaaactcatttcaatataagatcggaagag

SEQ ID NO: 49535 - DNA, 1903 bp, Cannabis sativa
aaataattgtaatctgaaaagacacgtttaattgtactaaaaaattatttcattaactttgttctacatcatgtatgagtaaaaaatggagacaaatataattttataaccatgttccaatacatatacaaattaacttagcaaattaacaaatatatttaacgcacacaacccccttgctcgagataatttctttattttatatgtttcctacaaaataagatacactttggacaggaacctagggcaccctcacacacacactcatccatcgaactacttgacccaaccttgagagggcagagcgttgcttcaaaagtgaatgttcaaaaatcgactcaattggtcaatcaacacatttaatcagagagaaaaaagaaccttaaagctataaaaaccaatatcacagccccttcattctgcagtatgttgctgcatattccatgtctagcagtcagctttccctcattgatactccaaccctcagctataattccagcaaattaacttctatcccatcgaatgtacaaggtgactatggcaatctataatgcataatccaaaaaaccttcacaaataccagctcgaataggttctccaaaatttgtcaattgatttcttcacatgtggcatgaaacttcactcacattgaaatatcaccagaatcctatgctccatcgagatgtttgattgcatccaagggtcttccttgtacttttttaacctgacacgaatcacaatattttagaaaaaaaaatgcaatcatcacatgtgatgcagtgtatcagtaaactgataccagtacctgtgcctctaattcagcaattctatgtagagatgcctgttcaatgcaagcacggagttcacgctcttcttctaacaagccggtaatatggtgcctaagttcagccatttcttgagctaaatcctctgcttcatcttttgctttcaacttttcttctctcagctcttcctgatgcataatagtttaaaggtacttgcgcaaagacaaaaaagaccggcaaaacttagaacagaagttctatatgtgactgaaacctcactaaatcatgaatatagatgccttgtgttaaatgccactttgtaaatattaatacctttagttgctcgaccataagctcatattcttcaatttgctttgccattgtttgcattttgtccataatatcttcgtttggccccaaaagcatttcaaactttgaaaccagtgagcttatgatttcttcacaagtgctacagaaataagttaaaatgttcaatgtaagatgaaaaccgtttaatacagaagcataactcgtttaaaaacctttaagtaataattagatacctcatttcttctgacaaagtgaatttgctctctagttcatcaaacaatggttttacattgagttgtgaagcatgctttgcaaaccgcttttcaagcttttgcgaaaatgtcctaaaatttgtatctaatgtcttgagcttttcccgtagctctttattttcccattctaggtgttcaataactttctgagcatcttgaaattgaccctcaagctctcggatcaactgagttgttctagctttttcttggagagcttctttccgtactttctcagcttcaaagtaattctgctccaaggccacaatatctagcttcatgctctctatttcacattgggagtctaatgttatagatgaaaccgactcccgtagattttctatgcacaaagatgaattatgtaattccacttctttgttttctagttcctgaatcaagaacaagcactctgaactggacctcttcagttcctctcttaacctctcgactatcttctgtaaagtctccatgtctgctaatttcaattcaaggtagcgtatatgctcttctagacaatct

SEQ ID NO: 49536 - DNA, 1861 bp, Cannabis sativa
aggcgaagacgattatgtactggacaaattctaaatctaagtttctttggttagatgagctttttcttttcttttgggatccccatgatgttgacttcgaatttgaaatgttgttgggttcagattcgtgtatcaaattttgtttgtgggttttgatgttaaattgatttgggattttgaaattgtttaccatattactgggtttgattttttgtattaggattaggttgggatatacttaaatgcttaaaaatgagttagatgaaaattttgaatgtttgaatttctctattacattgttctaattttgatttttattcatatgtttcacaaatatcaatatcacgatttaaaattatttgaattaacgagaagatgatgaataagtatccgtgaaaaagatggaattgactgagtttttcaaaatctattaatgaatttttctattttatgtttttttttaaaacaaaaattatatttttttattaaagataaatcaatttttttattaagtaaatataatagtacatataattagtttaactattaaaataaggtaatttgggaatattaaaactttgaatgcatttagggtaccaaaatgagtagttttcccaaagggtactaattcatcattattgaaaatagagggtattaaaagtgtatttcaacaaaatagaagcaaaatagaaggtatcaaatagggatatacccaaaaaaaaaaaatatcatttacttcacaaataaattaaataatattttaataattatattgtcaaaaaaggacttaacaatcctccatcttttctctaataaattatctaatgagaacacagttgatagcgctgtgaaaaagtataatttagattactgatgcatctagtagagttgaacaaaatacactctatgtatagttcttgattagtaaatttattctaaatggatcaataataaactcccattataataaagaataatgcttaggtagagtcacaaaaaatgtctgtacatacatatattttttttcattaggtcactcttatatttaatactaatatttaattaatttcttttatattatattttttaataattttgtgatatcaatataaagaaaattacttgttcttaaaaaaaattactaattaaatatataattctgtaactaaaaaaaataatgaatttagaatgattttattttttctaatttctaacaatatgcaactagaaaatggatgaaaataggggaaaaaaaaagtacaagccaataaaaacatcataaaaataaaaattataaagaaattgacaaaaataccatatctttgtataaattcaatcttgattactataggtttatagaaaattaaaatatggtatttataattaggcattgcaaaaataaagcaacattcaccttatcatcaccttatatcatcttgtcaattctaacttcatacctcccaaataaaccaaatagttttcctttttttcaaaaacagacttttattatataacaaatagagaaaaacaaaatttattgacatgataaattaactacacatcattattacctaaaacacaattattgttgctcttaatcaacccatcatctactcttccctcatctttatggacgagcgtcatcttcaaactttcatttctcgtacgagttgataacaaaatgtccaaaaattttattttctcaaaaaagaagaagctaatgagttcaacattatatcttctgattttatattttccattcgactaccttctgtattattcaaaccattcaacttgaaaaacggtgtttttgcaaatgtcagttgtataaaagaaaatataaaaactgtaagcgtttgca

SEQ ID NO: 49537 - DNA, 1541 bp, Cannabis sativa
ggtagctggaaaaatactgatgccaactaacccgattccaaagaggcttgatagttgggcataaccagagagcatggcaaatggtttccaagggagaaccacaacaacaacagtaggggcaaatgtccataccacgatgaatcaagttgtcattgacaggaagcaagtcaaggcaaacccgccagccaaaatttttgactttcgaaccaacatttaaactccaaagaaatttccaccaagtgttcatcctttggtgatcagcacaatgctccttgaatcgtaatgctcaaattatagccactgcgaattgtatacaaaccatccgtcgtatagtgccaaatcaagtcatcctctttcgcaagggaactaggcttaagaccaaacacccacagcacatcatcttggtgaaagaggcaatgaacaacatcagagttccagtcacaactgtcaaggataagggtctagagcttagtgttaggaggaacggtcactctagtccaaagagaaaaaggaaaagctctaggtaaccaacgatcttcattgatacgcaccaaatgcctagaatagatacgccagtgagtacccatctcgactagctcacaaccccataacaagctttgccacacataggaaccatgcgttgaaggagtagcctccaacaaactactatccggaaagtagcaattttttaagacccgagccaaaagggtgtgaggatttaaaagaattttccaacaaagcttggccaataaagcttgattaaagacttccgaattctgaacacccatccctcctctgttttaaggtcgacatattttttcccaagaaccccaatgaattttctttgtagaatcagaagctccccaccagaaagacgcttccaaggcatgaatctccgttatggtttctttgggaaggtgaaagtagctcataatgtaataaggaagagcttgaaccactgatttaattagatcttcccgacccacttaagagaatagactagctttccaagattggagtttattcgatacctttctacgaatagtattgaacacttctttcttatgttgaaccacaaaagtcggcatgccgagatacttggggtgacatggaaccagtttaactctaagggtagcaagagtagtgcccatctcctcagtgattcgtttccccatacatatttctaacttgtcaaggttaataagctgccttaaaccattcctatactcggccagaatctgaagaagagtgccccttcttccaaagtcgcattcaagaaaacaaggctgttatcagcgaagaagagatgagaaagcttaagaccatttctcccaaaataaatgtcgtgtatagaactggatctctcaccttcatgaatcaagcaagagaaagactcagaacaaataagaaaaagatagggcgacaagggatcaccttggcaaagaccccaataaggaataaacagccgacatacctgcccgttgagaagaactgagaaagaaacatattgaatgcactttaggatcttctctatccatcta

SEQ ID NO: 49538 - DNA, 2581 bp, Cannabis sativa
cggtctccgaactcactactcattatgtgaaaacacagtaaatccatatgaaaagagtagagagatctgcttggaagcccgattacccacatcaatcaatttttttttttcagattaaagattgtgtgggactaaagctcaaagaatcagtggttggaggtatttctatctttaagttttatcgtgtatatattcgtttattccgcattttatatgcacattcatatattttaattatattattcatataaaatatctaacagttggtattagagcatatcatatatctctgccttgattatgcatatgttcgttttcaaaattttacgtgcatatacatgtatatatatatatcatcggattgaaaggaaatcttgtttttaattattttgatacatattattgttagaattgatttttattcatcaattctaatgttttttttgcatcaaaaattattatatatatatacaaaattatcatttttaaaattcgtatatatgatacatatttatgtatatatgtttatatataatttataatgaatttataattttattgtttgttattgattagaatactttattctctctatttctttatttaaacaattaaattattttatatagttatatatgtatatatatatatatattgaagtggaataaaaataaatatatgtgtatatatatagtaacttctttatgtgtttatttctttaataaaacagtattgtgtgataaatatataatatttttttgttatataagcatatggtacttataattattatattaatcattgtatatatttatatatagattatacattgcactatatatcattatatattatggttcttataaatcataattatataaatttaatggagtctaattaaattactaatgtaattactaattaaaaatatcataattactccttaaaaaaaaggaaaaaaaaaacagattatcataaatattgtaaaagataatattaatgttaatctcttttcattttctttttgttatagcttactaaatgttaaatataaataattaaaataataaaaaaattaaaaaagatagaatattaaaaggagagaatgctacatcatttacattttagaaatattattattattattttattgaaaaaaggcaaagaaattgtacttatttaaagtgtaatttttattgacaataataatgatttcgttatttaagatttgagtaacttggtgtattttaattcttttttgaaataaaatatgtgtaaccattattttaatttagtgttttgagcattttagtgttttggctaattttcgaagataagtagatgacaccaataataacaattaattttttctcatgagaaatatttactattttgttttaacaatacaacaaaagaatattttgaaatggtataatttgatattttggtaattgttttggtgtgagaattttttttaatacaaatatattatcacatattaaaataattgaatcaactcaattgttgaacatatttatatataattttatttatcggatatctatataaaaaaattatagaaaaaaaaaataaaattaagaaataataatttagagatattatatataaaattaaagagataattctacattataaattataagatagggcatatataacttactattaaaaagtaaaaattaaatatataaacacttaattatttttcaaacttgtatttaattaaaaaaaaaaataacaacgtagattaaaaataatgtggccacaaacatgcataatatataagtttgtgaaagagagagagtgagagatatgaaaaatgagaagttttgagaatttatagaggaaatattttattctatcacttatagaactacataaatatatacacacacaattatttaaaagataacaaaaaagaaaaaaaaataatgaaaaaattatacgtaataaaatttatcaataaagctattgtattttgtatctcactcttaacttgttgtgattattatttctttaaatctatatgtgtatatatagtgataaaaatacaataatattcaaaagaattatgggtaagttaaaaggttgtaacttaagcttttatatttatgtatttatatatagtgataaatatgctggaaatattattaattaagaagtggaaaagatattattaaattatttattatttgtggtgattatatactggtgcaattgatgttagttggacaggttttactgttatgttagttagtaaaactggttgagttagttagctcttgtactcttttattcggtctatatataaatgccattttgtaattctttcaaagagagattgaggggtgtgagctgagagtacatctttgtaaagagcatgagagttttcaactcatgtctctcgagtgaattctggtgtaggagcagactccattgtgttcagtttttggtgtccaccattgtaattctctgagttatcttcttcaagtaataaaggcaaagcctcaaggcagttcctcccaaggattagatccaagtgatttcacttgtgattgaa

SEQ ID NO: 49539 - DNA, 2024 bp, Cannabis sativa
  modified_base (1900)..(1910): a, c, t, g, unknown or other
agtattaaaaacaaaaaatgctcccagtgatctcgtcccatatatttataattggtaacataatttacgagacataattttgttctgtgattgtactttcatggaagttgagagagttatttaatttaagggttgagattaatttaggagtaattagagttaaaaaatagtaacataccctcacactcatctaatgtaccttgagactcatctaatataccacaaaatacattctgtaaaattacattaggggataaaatcgtatccttataatctacatatatatgttatgtaatatattatgtacggtatttatgactatatataggttgtttttttcgattttatttattattattacttgtacaagattaatcttgatcttctctttccttttgttttttgacaggagtatttagaggcaaactccaatatgaattcgcagagcacgtgaagtatattcatggaatactcatttgagcaagataatacaactcacttgtatttttgaaggtcaagaagtttttatggcttcacaacctcgtcttcggaccttcaaattcaactatcctatagatgttttttttattaattacgcaaattaatatattattaaaattaagaagttaatatttatgtaaacgtatatttagaagattaagtttttcaaaagaaaataaaatagctctactagtgtcttgcccggccaaaaatcatactacggatcattatttacgttaatattatgttatcatagattttttttcaacaatttgagactagttgttggaggtactaaatttaaatctgtatgcattgtaatatataaacatttaattaaaacaaaaaaattattcaataataaaattttatatacatatatataaatcacacaaaatataatatttatctaatattaaaattatatcataaagttacttggtaactaaaatttagttagaaataatgaaatgtaatagaattgaaagaaaacaatctacatcctatttttttatttagttggatattaaagtattagaatattatttaaatagaatgtcttttttattattttggtaaaataattattttattttgaaatagaaagaaagaccattttaatacataaaaaaatatttaataatttttttttatcaattttaaattgtattctattcttattctcattcttactcttattataattctatgttttcattcttctcacctaaacatcacttaagtgtataaattattaatataattttaaaataaaataaaaatatatattaattatttaggatgggaccatgccactttataataataagagagggggttgaaataaagtagagaaaacaaaagtggtgaaggtacaaaccaaaagaaactatggtggttgagattttgagtatgagagcaagtgtgtgtatatgcatgccaccacccactttaaattgatatgacgtactgatgtgatcatacatatatattaaagtctttgacagctaaaacactcccaattctttacgtaactttttaagttcaaattctttaaattattgaaccattaataaaatattatttttaatatgaattttataggtattaactgtaaaattacttaaatttttattctttttaatacttaattataaaaattaaaattttgacagtaaaatttattaaatttttttttttattttattttgttctttaagtcttttcacttaagtaccatagtacactgactacatatatatttgttcacgggtatcacattttgattgattcacttaatgttaattattaaaattttataaaaaataaataaaaattaaaattaaatattaactaattaatatttttgtccaataaattttgacatgtaacaaatgannnnnnnnnnnttttaaagtagttaaaaatacccctgaacaaattgttggatttaataatttttttctaattttagtaaaaaaatctaacatgaataaaagttaaagagcataatttagtacatg

SEQ ID NO: 49540 - DNA, 998 bp, Cannabis sativa
aaatttaatgtaagcccaaataaaagtctaacaagtatcttctctgattctcagttctctcctagctcagttcttaatctccacgcaccaaagcttcaaaccattatctcgggaaaagaagtgagagactttttagaagaggaaggaagtaattacagcaccactagtactgagaaacaagaagatttagtagctgcggtcaacaagaaagtcaacaaaagaaggagtaggatgaaaaaacatgggagcagtagtaaaagcttgtctgaccttgaatttgaggagcttaaagggtttatggatctgggttttgtttttacagaggaggagtgtagagattcgaagctggtttctattatccctggcttacaaagatttgcagagaaaaaacagagtgatgttgttggacaaaattataacagaggaaaagatcacgataataataatagtaatagtaatattcaggatcaagcgaatttggtttcgaggccttatttatctgaagcttgggatgttttggatattaaaagaacgaagaaatctccattgaagaattggaagttacctgaaactggtaatgaaatcgacatgaaagatcagctcaagttttgggctcattcaattgcatccactgtaagatagcacaagtgtttgatatatttgctttttttttcctttggttgagaaacttgttcttttttggtggaaattttgtgcgtgtaaataatttttttttacttggtaaaaagggtgttattttcactttgattaaaagtttgaactaaatgtatgttttaataaaatgtccaggttatgatgattggttttattatttttaagtgcattattggtaacaataatggtgatgtttattcattatggagcaatttggcctgatttggaaaaagcagacccactatcccctaatataatcatgatattactccatgacgctcccactttaagcaaaagtgtttgtttagcatgaaaatataatt

SEQ ID NO: 49541 - DNA, 1247 bp, Cannabis sativa
gaccactaaaaatttgccacgtatgagtgtgtacacgtggacaatccaccgtgacacgtggacaatccaccgtgacacttaattgtgatttttggacgaaggtgtgcatagcaaaatggaaccagggttaggtagtttagccgccaaaaattcggtttttgtagttaaatgttacaaaccgtaaagttcaggtagtttagtcgccaatatcccttttaatttcaatgttaaaatattataacaaacaaaactcacaattggggaacaaaacaaataaaattgagcatggtgagaggcattttaaggtgtcaagcatcataagaggtgataaattattattaatgaattctaatattggggatttcacacaatttttttaaaactgaataaaaaaactaaaatttataaaacattagaagtgtcttctatttttttaaaaaatatattattttttaaaaaaaatcatatatttttttacattttctctcacttgggtctaagtctagggcccgggtcctggtccatgggttcgatctaggtctgggtcttgggatccaaaattcatttgggcgagacatcttacgatgtcatgatgcgcccattcctatggtggggtttgagtccaagtttggcgtataggtttcaaggtcctaattcagggtccaagtttgggttcaagatggggtctagtgcaagggttggggctggggtttaggtctaggttgaggttcgagttcgtgttcagatcctaggttcgggatgggttgtgttcatgccgtgctatagtataaaatattgaagttttcgtttgttttagtaaaaaaaaactataaaagtagtttttaaaaaatattaacccactaacataaaattttaaaacgacaaaaatctattttttatttttattttgtaaaatacattttaaaaaaactaaaaacacaactaaacactctctcttggttcccactcgtcccatctttgatacaatatctgttaaaagtcacattttattatatattttattttgcgctgtgaattatttgttcaagcctacttttgaatatattgtatttgtatttaatcaattttgtatatataatatttattcatactacaagaaatgtcactgttttcaccacatctttatgttggtaaaagtttggtattgcgctggtaaaatgaaatttacttctgatgtgttcgcaaaagggattggcaaatcaacgttagtattagaacttttgcca

SEQ ID NO: 49542 - DNA, 965 bp, Cannabis sativa
attatacattttcagtaattttaacgaatcaaaaggggagaagagaagggaattcgaatattataggagcctctcttatctgtttgacaaagtgaaattatgttatcagtatctaacaaataagagtctataattatctatttatactacacctattatggttaggttggaatttaaatatatagattaaggaaaaaagttaaaatggctttaaattgaacctttgtcgccaaacccctacaggtttcaattttggcactttattaaataacatatctttctttctcaaataccatattttaactccaactttatattttatatgtttaacaattataattaattactaaataaaattgtcattttatttatttatttatcagatctatcaaagtctcttaattaataaacaaatcttaaaatctctcttcttctcaattaagcccttacttagtgaaaattcataaataagacatagtctaattttgaatttaattgattaattaaaacttattatctgagtctacaagccaatcttatctcaactagtgcggggaccatgggcctatgtaatcaagctcccaataagtagttctagaatttacaaattctctatcttattaactctttctgactccactatagattcgaagttgtactcttgattatatagagcactctatatgttccaaatatagatacactattaattatctattatttcaatccaaataatcaatgatcctctattgatgatctacatcgagtagagataattttactgtgctacccttcaatgtaatttatccttaaaatacttagctcctaatgatatttcagtaaactaatataattactgaaatgtgtactccaccatttaatctcgtttagccaagtccgaagaaaattattattttacttctatgtatttatagaagctatagattgtgtatctatgattagcg

SEQ ID NO: 49543 - DNA, 1010 bp, Cannabis sativa
aaaagaatttgactaaaaaattatgtcgggtgctaaaatagataaaggtgcatcaatatatccattttaagatggtgcattgtagaattttccgaagttatatttttgaataaattattttatattgagaatgcagacataaaatgagaatactgtttttttttcgctgaaacataattaaaatgttaaaatgggaataatgttctttttcttttagctaaaatgagaataatgttttatgtagctatcatatcataaattagaaacaactatttatcgttttatttataaattgtttagaaatatttttctttaatttacgtgtatgttttcatttcatattaaaatttatttattatataatattgtctatttactaaaattataatattattacactatctttcacaataattaaaaaataaaataaaaatctttctttcaaataagtaaatataatgaaaattaattatacattatatacacatgtacattgcacataaattatatctagcatatataaatatgtctctaaatatataaagatagattctttaatccatccatttcatttgtgtgtgaaagtgctaaccaaattgatcgtgtacttaaattatgaccatatataagagaagagaaatgctataaggactagctagtaatgtttagtatctttttatataaatattgttattggtttaattattaaatcttatataatttaatttagagcattgttattgggcactagtagtgcctaacacgtgtcgccttacgattgactaatgatattccctaaaaattattatattaaactatatggaccatatacataattagaccaatagcgatattaacatgtaagaaggtacttggcaccactggtgccttttagtatttttctttaatttaataacttttaataaatatcgctaattaattataaaaactacatacataaaaatatgaaacaccaatactacccaataataatgctcctaacataacta

SEQ ID NO: 49544 - DNA, 1034 bp, Cannabis sativa
atattaatatataataataatattatatagtgtgttcatttttttttttatttaaaaagactcgaactcaggacctccaatacacacgcactcccctatggccacttgagctagactcaagtggttctatagtttgttcacttagtatttatacatattgcacacataatttgtttttttttatgttttatactaaatgtgttaaaaattgtgtcctaaaaaaaacatttgtggtttaaaataatatcaacttagcaatgctatatttaaaaataattaattaattagtatagatgagaagtgaaaagaaaaaaaaaaagtgtgtgctaatataataatcaaaaattcttaaataaataaataatttttaagctttgaattaatattaactatgttaattagtaatgtacaaatttagttgatattatattttatgtcaattttgaaataatttttagcatgtattaaatttagtacacattcataatttcatatcatcaataatattagattattattatttttttcaagatatgttaataataataattaatgtatcatttttatgacactacaccttaaatgtttatacaaaaattgggttatacaattcaaaatgtcatgattttccactaagaaggtttgagtgcattgaacaaaaattgaagccgccataaggttggaaaaacttgttatattattcaggtttccaccactattgaatttggttgtctcaataattttttttttttttttttgacaaatgaacttttattgaagatcagagtttaatacatcataaatgaatgatggaaaatcatccatccaaactagctcaccattcactctgagtgcacgaactgctaattcatgtggagctttattagtcgtacgacgaacatgaattagagatgcctcagtaaaattagactgtaaactagcaatatctcagttattgttccaccttatcttcttcttcttctaatttgcttcttttgaaaatatgatattttgttaaaagaaaaacagacaaa

SEQ ID NO: 49545 - DNA, 1350 bp, Cannabis sativa
tgctgttatgacaaactttcatttttgacagttattttcaccattgtttggactcattcagctgttatttactaacttctcgtaaagttaaaacggttatactgtagggaaaaatttacgaaattatatgaattagttattattagaatattgttgtgagaggttttagtaatttggtgtactgttaatcttatttagtgacctgttaaatgtttgaataagttattttagtttattaactcgggtaccttttattttgagttgcctatattaagttttgtgtactacttctttaagtgaacaattaaagaaatttaaatgacaataattatatttgtaatgagtgaggaaggttgttaaagaagaaatatgtgtctcaagtgagtttatttgtaaagtgtggaagacactgtagttaatgagatcaaactgtgtattctcttttgtaattctgtttaagattgaataaagtgataggtaatggtacttatttttcaaccaggtgaaaatatgattgtgttttttaaccatgtgaaatattacaatagtaattttgtgacttgagacatatgcacgtattcaactatatatgcatttaatgtaagattgatatttccctttcatttgttcatcccatcccaagctattccaagagtaaagagtaatgctcttgagagagaaatagttagaatacatcttagtgagagaaatctaagacaggagaaaaagagagttcccacaaatttgtgagaaacattttttaaagagattgtgagattaccacactaatgagtgtgagaattttgagtgtattcctcaagtatttgtcaaaacttgagagtgtaatattgtacgtttctattattattgttatagtagaaagtttactgtggtttttatttgccacgagataattttttagcgtgcatttggtgatttgattaatattcgtaaagtactacttgcaatggaggatattcgaaaattttaaatttgctttgtgattgcagttgtgattgatctttcacatcagaaaagaatttttagagtctcagccattgtatttttttcgtaaatattgatcctgaaggggaattggaatactattcattaatcccaacaactggtatcagagccatgaggtcagagctctattcttgcaacatcattggttacatacggagtaagtagttccgtttatgagactggaatttaagtaatcactacaatatttatgattattagaggcggtagattccactgctaataatcccttaattcgacggtaaaagataatagtggtgggatctaccagtaataatctgctagtaatacccgttcgctaaaaac

SEQ ID NO: 49546 - DNA, 1170 bp, Cannabis sativa
tattgattaattattggcctaagtcaccataacaaaatcggctagtttgcaaagaattgtcctcaattttttttttatttatatatacttcatatttttatgttatatgtttttgttaatttcatgtatttttattgaataccataaaaaaaaaatgaaaatttaaaaactttgaacgtaaaaagtttaaattttttaactaaaaatagccagtataattttccctattatttaatctaaagattatattacaatattaaagttccaaaggaaaactaaaaaaaaaaaaacaaaattgcagaatatattcccaaagaatatacgtgatctcccaaactacctaatttggatgtttacgtacgtgtcatgcatattcatgcagatgtcaattgtcattattaaggtcaaatcttaattaattcccaactacgtaatttggatgttacgtaagtgtgcatgcatgcatgcatccacatgcatttgccaaaaaccatatgtataaataattaaaaataaaaactcaaattaaaatattgaatatttttggaatatacaactaaataactagaaattaaatttaaaatataaggtggtgtctggtaatgcttttgtttttaaattttttaatcacaaaaataaaaatatttatttttaaaaaacaaaaaatgtgttctataacttttgtttttcaattttaaaaataaaaaacaaaagtgtgttctgtaaatttcattttttattttcatttattgattttatttaactcgggtgtgagtccgaggtcgaaactgggagcgagtccaggtctagggtggggctccaaattcagttttcaaagtctaagttgggatcggagtccaaaatattaattaaaaatattttaaaaaagttttgaaagtgattttttttttgtttttaaaatttaaattcttattaattaaaatattaaaaagtaaaaacaattttataaaatatgattttagaaaatatttttacttttcgaattttaaaaataataaattgattaaaaaagtattattaaacggaccctaaataaatggaatgaaatataagcatagtaacacataactaaaatattctccggaactggaagatcatttcgagattttcgaacatattcgatgattcaatgtgactattgtaacttcg

SEQ ID NO: 49547 - DNA, 1494 bp, Cannabis sativa
tttttggggttttgaaaaaaaaggtatagtttttttagggtttaaatttttggtttagggaaaaaattttaagattttctaagtatagaaaatcaaatttccctaacagaaataactacctaattacaactattttaactaaccaaactggcacttgcaccagtatataaaccccacacacatgaataaatatcatttataaaattagtaaattcaatatataataccatactcataccaactgataattttcctaaaatatcataattaaaaaagttcaaaaaagagaatattagagaaataaaaatatcttcctagttttatttatttaaatcattttcttttaagactaattttaatctaatgcttgttattactgtcatttattttgaagccctttgttgacatagaataatacacttctaattgttaaatgtcttattgctctttattggttcatcttcttcattgcaagaatgagataattcctttttataatttttctatgtaaaaagaacagtgttaactcaagtgatcactataactttggagaaaaattatgttgtatattttgcaagatggacctattgaccacatttgttaaacactagtgtggttacttatgtatacaaggcatacattaattagtaaatagccatacttcacattaattcactacaaaaaatcttatttttatacgtcataataaattttgtgactaaaaataataaaaattataattactcataaattattattcttatattgtgactaaaaaatccataactaaaagtattagtcaaaaaaatcacagttttaatcacaatactgttttaattagtgacaacttgtatttaaatgtaatgttttaatcacaaataattttttgttgtgactaagagtcacatataaatacaaaaaaattatttcgtattttattttttttagtgatttcatttcaataagcttatgtttacaattaattttatcaactttggactcgaactattttttgaattttattttcactattgtgttggagcacgtgcaaatgccactggtgtctatattctaattcatttgtaacaagtgcgtatatattgtaacagttagctccagttggttttagctaattagtctctttcaattgtgtatataaattgtattgtactcattcatcaaaaaataagagattgtctttatttctcttcctttctctctctctctctctctttctctgtctttcttctgtttcatttcttccaatctttaatcatgtctagttaaattaacagtgaaccattcaaatcttttcaagtttaagttttatgtgtgtcattttctgttaaaaataaaggtgctgtaactattttagttgggatcctactgtttttattgctcaacttttaagtaccgtgtggggaacatatattatcatatatacagtagaacctctatccaagaataaacttgggaccaagtaaattatattct

SEQ ID NO: 49548 - DNA, 1000 bp, Cannabis sativa
tatagtctcacttaggttgaaattgaatgtcatgtttaggttgacttccggtatctttatctgtgtgaattataacttgacatttctgggaccttatcacacaaacctttttatgtatcattagacttttcttagtaagtattagaatattagttgtatattagttgtaaaaaattaagataacttgtatttagtagtttcttatttgtatttagtagtttcccatttagtcttctaactttgtatatatataactattctatgaaatacaacacacaattctattcaccattctctatatggtatcagagcaatgcttaaaactgtgattcgaaattcgaaattagagtttataaaaaaaataataaataaaataagattagggtttgagtttagggttcctttttcagaaaccctagttggagtgcaagttttttctcaccacccacatagacggatagcctagctgccgatctcaaaaacccaaaagtttgatcactggagtctctgcgcgtggggctcacgcgccgcttgaagcttctgcgcacatctccacacgtcggtgcgtggaggcacgtgtgatagcgtctttgacagcgttcttttgtcggttctttactgggttcttctaagcctactcgcatcttcctcaggttgtaatttggtattttttgccttcttcgtgtttgggtgttctctttcttccttttctcttcaatggtttctgctttcgagattatggtagagataaaatcagattcgaaatcagtggttgtttctgatgcggttcccgtgatgtctaaaatcacgaaccataaattgattggtttgaattatttagaatggtgtagcagaacgtaaacatagacatcttcttgaaactgcacttgccttcttgtttcaaatgaaagttcctaaaactttttgggccgatgcagtttccacatcatgctttcttattaatcgcatgccatcctatgtacttaatggtgagatccca

SEQ ID NO: 49549 - DNA, 1747 bp, Cannabis sativa
cttagtattgataggttcatacataataaatgaaagttggactaacattcactcttttttttttttattaatctgaccaaaataacatttatctgattatcaagttatggcttaatagttacttggtgtaatataagttccacaaattatttacacatgaacaatgtagaacaaacacacatacattttttttaatagatttaatcatactgaaataatattttttcaattaccaaaaccctcataaaaatatggtaaactaacattcaattattggagagaaatgttgaagaaattctattatgtttttttttcaagaattataatgttttaataagtataaatatatattgtcgccaactgtgctaggcaaatccttggggtctcagtcgcgaggatgaaggtgacatggcttgactaaagtgtgtgtaattagggtcgtctcaaggtgtcaagtggctcaaggcaaaattgaaacaagacctttttcttttacaaaaatttaaaataaatattgtttaaattttgacaaatatcaattttaactcttttatccccatataacaaatagtttctcaccacgtaagctaattcaaagtaatattctattgaagtgttatatattttaacactttaaatagaaagaaaaaaaaaataatactatgtcaaaaatttcatcaattctttttttttttaatctatgttaacaattatataaatttaagaagacatatagtacttaatattttttatatatatatattatattttatttctatatatataatataaattttaatattttagggcacctcctaaggcctgagcctaggccccagctaccccgccatctggccgaccgtgtgtgtaatgactacatatttaaacatgaaaattagcattttgatattaatttaattattatttataattatatgtgcattagtagaaataatccctattgtcagaaataagtatttgtgatatagattttattgaattctaagtgtgtcatgcatgttatttatgaattacgatatttttcatgttttatgtttggtgacagtcgaactcgacgatttggccattaaagtcacttagatacggtattagtggggtaagatttatggacacttatagtatcgggattatgtgggataatttgttatgaccattttatccctaagtttaaagattacttaaaaataaagtaagggtataattgtatttttctacgtaagtttattctaaaaaatctttgtggaattattagtgtaagttaaagtttatattggaaaattactttggtttaatcaagagaaataaaaattagataaacataaaataaaacctaaccttctctctccttatctctctcggctccaaagataacccaagaaacccaaccttaatttcttagtgagcttaacaatgataattttcatttcaaggtatttttggttgttatttgatgaattatatttagtatgtaattgagatgttctggaagatatgagtaggtttgggtttcaattgaggacgaaaattcaagtttggtgatttctacacaaaaacggttaaccgttgattgtttttgtagaagccttgaaccgtttcacctgacagaaccccagtaaacggttactatttggggatcccgataaccagttggggtgatttttaggtacctcaatttttttattttctcgatatttagggtattgtcacgctatttatcgataggaaa

SEQ ID NO: 49550 - DNA, 1693 bp, Cannabis sativa
gttaaattgttgaaacattttggtattttccccgtcaaactattatcactagcatccaatacttgaagcatagaaagtttacagagttcatttggaatatgacctgtgaaattgtttgaacgaaggacaagaaaacgcagcgttggaagactttcaatccatcttggtatagtccctactaacttattaaaaccaagataaagaccttttaaagctgaacaattcttcatagtctttggtatttctccactgagactattattttgtagatgcaatgacattaagttgagtaaagatcccacagagcttggaatttttccacttagattattgttatccaagtttatcaaatttaatgatggccaatacatccaacaatcaggaatctttcctgataaaagattattttcgagatataatgccataacatttgatttagaactctttggatcacaaaggaaattagaaatgttaccagacaagtaattatttgaaagatctagcatgcttcgaactgggatatgaggtaatggtcctgtcaacttgttgtaactgaagttcaacatataataaccatcatttttaaaattaggaatttccccataaatttggtttcttgacatgtcaatatcagctgaagaaaaattccataaccaagaaggaatgatatctgaaattccagtattagacatgtctattctaaagatatctttttgtgattttagccatgtaggaaaatgaggacctaagttccaatttcttatttctatggttccaagagaaaagggaggagtccaatctaaacttactttaaagctcaagttattttcagaagcaaatatgtgcttaagctttttgaggttggcaaaatgaaactcacacacattaccttcaaaagaatttgattcaattgaaagatattctaaatttgagagagacccaagagtttttggtagaagaccactgaaatggttattggaaatcattagtgtttgtaattgtgacagagacccaagactttctggtaaaagaccactgaaatggtttctataaattattagtgtttgtaattgtgagagagacccaagactttttggtagaggaccattgaaatggttattggaaatgtagaaagattctaactttgagagagaatctaagctttcaggaagaggtccactaaaattgttataagaaagatctaaagacttcaaggatattatgtttttaaatattggaattggaatggggcctgaaaatttattagattgaagagagaaatcatctaaattttcaaaatcttttattttatccactaattggccaccaaaggaatcgaaaaaattcctccccaaattcagtgacttcaaacttttagaaaggcgacctgacaagctttcgaaaaccattgagacactgcctttgtaattattgcctcctaaatcaaattctttcaaattgcagagttttcccatagatgaagggatttttcctgctagagcattacttctcaagtttaaactgactatagaggtcaaatttgctacatcacttgagataactccatgcagtttagtattagaaaggtggaggtgttcaagattaggaaaactaaataagcaattaggaatgacagagtctatattattgcgagacaaatcaagatattttaaaaggctcatgttatttcgaa

SEQ ID NO: 49551 - DNA, 1338 bp, Cannabis sativa
taggactgggtacttctactttagccaggttggccaccagtggttgggtgacaccaacagcacaaccatgtcaaaagttggtgggcatgcctataattactttgttgcttgggacattcacaagatctaacactaacagttccagtgggtgtcgttttacaacgctccatccctacattacagatgagggatagggcaaatcacatcctatcccttcctacagagaagagaaacataatcagaattgccagtgtgggcaactttttgaggtacggcttgtgtcctcctgcctttggatttgtgggggcccagggcccatcatttggtgtagatggagccctagctggtgagggattttgtcctagtgatggaaaaatccctgacatggatatgatgatatgcctttgtctcaaatagcccaatgtttggagaagagagagagggcccttcaccagcacttggatcacgggggtacagttggtgatgcctctctttggatcaggcttggaggccagagctctgcaagacctactcacgtcttgcctacatctagaggcaagggcaaggcggttattgaggattcaaataattcttcttctgaggatgatggtagttgatagttaattgcaccattgtttttgtcttgcattgaatatttgtgacatgcattatgactttgctactttatttttgcagttatgtcttctaggttgataggtcttattggtggaccttttgatgagccttcgggttgcctgaggcccaacgtggctcagaccacccgtggtagagatgctttcaggtcatctcttcttcctcctcctccagggcctatgccagctaggcagcccatggttgatgatcctcaagctaggagggaatggccttagggtagaggtttcccgaagcctacttaggaagcgagcttagccacagggaaaagagtcgtggaggcagcttgtaggcgcctagagagagcccatccttctgtggatgatgagcttcatgggttcaatgacagcaagccagacaagctctagtgtgatgttctttaggatttatctatagtgagttgcacacttaactttgctcatttttctagcattcttacaggttggtcggccacaatgactgttgcattgagttggttagcaaatgttgtgtctttgaggggctggctggccttagcaactttatgggagggttggtcggctagtgttgccttctgacacaaatttttgaccttcttttgcttttaggcatttatgaagttgagattctcacatgaaaactccagagggtcctcgagtgctctctaggagcaggtaaagaccttgg

SEQ ID NO: 49552 - DNA, 2923 bp, Cannabis sativa
aaaagtcccttttgttgtagtgtcaccagctagatttgaaatctctttgaatacctgaatctctcaattccaacactcaagattcccttgagtaagctagataaattccttcacctggtagattcgaaatcccttcaaaccaaatttgaacctccgacaactctagcagcaagcttcacctcctttgtttgacaattcgaggatacattcacatggttaattttggacaccttcctaaaagatctcattctaatggagatagaatccatccttatatacctaagatctttcctatttctagccaatgtaaaattttagttgtacattcaacatgaatttatgctgtattaatcaaatacttttgcaattatttgagattgtactaatagattttattttttaggcatggccttgcggactaggagtattcacaagaatactgatacaatgtaaaaatatttcgtgttattttaatttttgtaatgttactgtttgcactatttttatgatctattaggtttggtttctgctggagtaaattttttattaagttcaaacaattttacaacagtttcacattaattaaaatatttgttaattcacttggtaattataaaaaacgtaatttcaagttaaaactgaatacacgaacattttagtagctaaagtggcaggccctgaggtgatcccacacaacaagaacgtcattttagttaggataaatttagatattgtggcattttaaagagaattgttgaaaggcatcacagatgcttagcaccattctcggcgtcataccactattaatgtaattaaatatcggacctcatataacttaagaaaatagtttttaagaaatatcgctaaccaattatagggtgctacctataaaaagtgttaagcactattttttttattgctggcacctcaaacgagagctcagaagcagaactacaaactagacactacaaagacagaaaataaaagggagaaaccccaactataaataagaaaggaaagtatgaaactcctaactgaaatcaaaaaatggactacaaaactaaaccgaagacaaaaccaaaaagactaggaaaataaaaaactactaagacgtcacagccatctgttcaaccattaagcagggagtcgtcaaaattgggcaggtcaatgttctcgaaatgcttagaactaactgcccatttagccacaccattcagccttcttgggatctagttaacctgccaaaggttcaaagacttagcatgcagttgaaagtttacaactacttcctgaatattatgatgcaatacctgaatctcgtatcttttgccaagtactacagcaacaatgtcagccgatccgctttaaaaaattacattgcgtaggtatagattactagcaatagcagtaccacagtaaaaggcagcactctcgcctgccaacgggtcacagtagatgaatctttcagtgtatatgcgcatgacagtctgttcctcatttctgaacacaaccgtgccaactgagtggcaattaccaaatgtaacatcagtgttgcaaattacccacccaggggggaggagaaagccagtgttgggggtgttactgtgtggggagtgacattcctcactctcactcagcctcttgtttgttattgcagttagcaccgtgagtggtgtaggatttccactatggatacgattgttcatttccttccaaaagtgttcaaagaagactgcatcgccttccaataacacgttgaacctcatagtcccaggcctattgttctcatccttgaacttcagcagccatctaccccaatctgagaaggagaattcatcagttttaaggtgccaaatactgcctaaccagatggctcttgcaaagtggcaagtccaaaagatatggatagagtcttccacaaccgaaccacagaaagggcagctcggggcattcagtttaaacatggaattctgttttcctcttgtaaggaggttgttggaaaggattttccataattgcatcttcaatctactgtgaaaactagctccccaaatgattctccattttgtactgttgtcgtccctatcatctatattcttaaccaatctgtaggccaacttaatactaaaattaccattggttttagagagccaaatccaagagtcttcaagaggctgatttggcagagtaatgttgagaattctcttagcatcgtctctataaaactatcgttgaaccatgtcctgattctaaatgttgttgactatgaagttactaaccagacttatccctgccgaggcatcaaacaaaggttgtggttggaagttcccgtttcataccaagggtggaaccaaattgaggtagattgccctttgcctatcttcttacaaaggcctcaaatgataagacttctagtatgcattatggccttccatagaagagagtctcagttgttaatctcaatgtccatgaagcagcgattcaataagtacttggcttccaccacttaactccatagactatcattatccgttagaacttttcacacccacttcattaaaaaagccttgtttgtggcattgatcgatcgaaatcccaatcctccacacacctttgggtgacatagcttttcccaagcgaatgtatgcatggacattctcccatctgaatcaccccaccaaaagtctctacgtgctttatccaccttattagcaatagttatgggaatgacatctgaggacgccacgtagttagagatggctgagccagtagacttaatgaggcacgatttccctgggcttgagagatgtaatatcccgaaagatatattgatattttaattagacatattttattaaatatgtgattaagtgggtattagagtaggtttataatcctacttaaactaattacgagttgatta

SEQ ID NO: 49553 - DNA, 1513 bp, Cannabis sativa
tgtattataaacaaagtaataatattgaaattaaaaatataattttaaattacataaaaagataacgattttgtaacaaatattaaatggtggacttaacaaaaaaaattgcatgcatttttatattaaaataaaagaaaaagataacaacttctgaaattaataaattgggtttgtgattgatgatgtagttatttttaaaataatttttagacttttttatagaaagaaacaatttaacatataatttatgaaagtttttacattttattttgtggatgtgaaatttctactttaaatgaaaagaaaaatcataattcatataactaattattttcataatgaaatgtcgtatgaagctggttgagcgctcgcgcaatcgttataattattaaaaaataaaatttaatttatgattatttagttatttcaaaaattcatccattaagtagttgttaatatttttaatatttagttatttcagaaattcatatattaagtacttgttagaaaaaagaaaattaaaccaaaaccccgtccctctcttctctctcgtttctcgcgcgaccccaaccggcgatcggcgatcggcgacccaacccctctctccctcgctcggcgaaccacactggcgacccataccctctctccaccctatctcctttcttgtctctctcgatacaagatcgagaccgagaccaccccactcgccctctcttggtcctctctccatctctctgtttgatcggtgccgccgccgaattgccgtcgaaggccaagcccgccccctctgcaattccgtttaggtttcatgtcgataaaatgtcttctacccatgtttatgttcgattgcataaaggggtataagcgaaggattactggaggattgtgctcagctcgtcaaagcaaatttcatacaagggctactgtggagcacatggaccggttctataaggagtttgacaatgaagatgtgaaagatagtgaggatgaaaacaaagaatctagaagtggcgaggattttggaaatttaaatcctcaagtcttcaaatccttctgatattgagtcactttttgaatcaacaatggctgattcaaatcctgatgaagagttttattttactttgggatagtgatggctgtcaaacaatggagtgttgagagttgagactattattttttatagtttcagcccttctcaaccgccggagggaagtgtgtggcagaattctggactaaggcggttatggtttgcttttttagtcattaatttgttaattacgtttttttttcttataagtccttaattacaatttatttaattgcttggtggagttttgttttgacttttaatgatatttatcattttaattatttcttttttctttccttttatttacattacagtaagtttctattttagttgctcttcttttactttttagaggtcaaatgctcttaatttagtattaataatttaatttttgttataaatattaataattatgtggat

SEQ ID NO: 49554 - DNA, 1556 bp, Cannabis sativa
  modified_base (1090)..(1094): a, c, t, g, unknown or other
attatttattatttcatcactttagctgactcaacattgttggctaaaatcgaggtcaacaataacactacaagaattgttatttttctggctcatttggtcaagtgcgtcgacaaaagtttctggcaaagggtacccaaaatagggccaaaattttcttaggtaagtgtttcctggcccaaaattgctcctgcaaaagtgacatttactggtgctaactctgatcaatgaaaacaaagattaacgacctaaaagcttccttctcctgagatagagcttaccttgctgacttgaattatctatttgagatgatattttgtgagtgtgtaattatgttgaatattttaactatttatttatttcttaatcacatggaagggagaaaagaaacatcttgttctttcttcaacaatttctgatctctagtggacctctgagtaggattcaaacgttgagactagttgacatgcatatataatttatgttatactattgaataataagccctcaattctctatctctatttatagagaattcatgtgcttgagagtccttagttggcattcataaaaaaaactttaatgaattatgagatcaataaagaattccctataatttttgaattagatcacagagatatggcgagctgtccgaatcccttaattagtgtattatgtatttatagccctcccaagcttatagccctataaatagtgattcatattcagagatactattgtaaaagctctaagaaaagggattattttccttgttcttaagtcaatacaaaccaagaggattaggctattactgaactgcttgaggctgaacctctataaaattcccgtgtctttatttactttattatattacatacacattatactacttgtcccttacaatttagactcactgtcgttggccaaaagagaggtcaacattttggtgctttcattgagagttgaactcaagatcgttctcaaatccaatctcaaataaaatggtggtacagacttgtagaggtctggttgatccggaaaatccacaggcagtggatcctacactgcagaacccagggaacacaagggnnnnnccaaccacaaatctcgaacaaccctcgatcgtaggtcacggtatgacgactcctgtgagtggaatcgcgtctcgtgtgcaagagactgggaataccgtttaggagctaatcagggcattcccaacactatctttctactcgtaaccaatgtccgaacaaactcccagggagaatcctacaaagtttactgcatttcctatcctgacagaagatatagaaagtgtgtacatggctactcaatagttagttagccccgtacaagaatcccgcacccatgaaaaaagatgtaagcaagagagacatgactaagttttctccttttcatgtggattatggccacgacaccaatgaatgcaacaatcagaagcgggaatttgaatttctaataagataaaataatccacacgtacataagtatgtcaaggctgatcaaaatcagaagggcgataacaacccagattt

SEQ ID NO: 49555 - DNA, 1515 bp, Cannabis sativa
tcttttctagttttattaatattaaataatcttagcaaaattttgtatattttcactttctcgttaagcacgtggtttttcttctcaaaaactaaaaatatatatgaaattttgttatatatagtataaacatcaatacaaaattgttttatatagtaaaaaaaaaaaagaataaacaaataaataaatccaccctatatatttttctatccatataagtaaacacactataataataagtattcttttttttaaaattacatagtacaatcatccttagtaatcaaattatgcttagacttagttgaggaggtgtttgtggtagtggtagtggtagattaggacgaaaatcaatgccttgaacaacaagaccagatttccaattgagtaccctagtctccttcaaacaagtctccacagaaccaccattatcctcttcttcaccattgaagaactctccaaccttcagctctaaccacccatcatcaccttgcttcaacctccctcgttcatcatcttccatcgatcccaagttcacatcgaattctggcttctcctccacaagaactcctcccggtccaagaaatctcatcgaaactcgaacgaattccaatccctgaaacccgaaagctatgttgtaaaccaagtaagccgcgtagttcgtgtttggggataacattttcttctcaattttcccacatatgtctagccaacacacgtttcgaagatgaatcacttcaccaaatctgtccaataaaaaaaaaattcaatttcagcaaaaacaatcaaatctccaacattttttttttgatagaagcgttttgtattaaatttttgagttacacagttaagattcgatcacattccctcacacacactcaataccctttatggacatttgacctagcctaagtggttatctccaacatcaattattaaattaaagttcgaaggtatgttgcttacatccaaaacgaccatactgattgtgcgtaaaaacctacttaactacattatgagctacataattacaaaaccgaactacatttgaaaaaacacaacctgcaaataaagaaaaagtacttaaacagtgactcgagtagtttgcaatttccaatctgaacttcactccattaaaagagttgatcacccaacatcaatttaattttggctaattatgacttcttcaacgaattttaacatgtcgtaaatcaattcaatactaaaattgtaatgtcctactaaagcacgatattcttaattaatgtataaaaataaattttactaattataagttacaaaagtttacaaattttccgtttcattttacaaacataatcaactattaagatggttgaattcaaatacttagtcaaattctgttcaattttactaatgacaagttctcaagcacaacttaatacgtatcaaaattcggcacagaagttattaaatctaacaatattaacaaaattatggtaattgtgaatctgataagaacctggagttagaaag

SEQ ID NO: 49556 - DNA, 1578 bp, Cannabis sativa
aatgtatttattccttttcaaagtaatatatgtacatggacatacgacattgcattacaagttagagcgatagtttcaaagcataaaacgacaaactaactaagtgtattttaattagatttaacgccagcgatttcctagagagaagccgaaatggacgaatagtatttgcaggagactccattggaaggaatcagtgggaatctttactgtgcatgctagctcagggagtgtccaacaagtcgacaatccatgaagtcaatggcaaacccataaccaaacacaagggctttctctctatgaggtttcctcactataatcttactgttgagtattacagagctcctttccttgtcatcaatggccgcccaccgaagaattcttcgaaacaagtgttcagctctgttaaacttgaccagttgcattggtattccaagtactggatgggggctgatgttttggtttttaacgatgggcattggtggaacaaggacaagacaattaacatgtatgtatttcctctatatatattaggaatattttcaatataactacttaaaagttttaaatttataatccatataaactcaattatcattttagcagcagtatctaatattaaaaaaataggaatttccctatatttcattttttaacattttttttttgatatttatgattttggttgatttgatagctaattgttatgtataactttcagttgtaatataaactgagtggatttctataaaaatatattgcgtagatttttataaaaatataaaaacaatactgctttaaaatatgaaaatgaaaaaaaaaatccaactataatttaactttattagagttcgtttggaacgtcgtattaggttatattatattgtattgtattatattgaattagattatttatcatatttttatataatactatgttaaactttaatttatactgaatattatatatttgtgtctataagaattaatactacatatagttttacacaaaatataatttaatataatactttataatacaatacggtgtaatactacgggaacccgttagtatcttaaacaaactttactaaattcattgaatatacatagtatgagttacttatatatgttatgagcttatatgttaacccttatttttattcccttttgtctttgaaacaccatgtgcacacaaatataataaattagtaatatctctaattgatgtttcaggggctgttatttcgaggaaaataaaaaaataaatatgacgatggatgttatggaagcttttagaagatccttacaaacatgggaatcttgggcaatgaacagtcttgatcctgaaaagagccatatattctttcgtagctactccccagtacattacaggcaagtaccataaggtaattttgattattaattataacaatatacaaaaacaattgagattattcaaataagatgaaaatcatgttacaattttgaaggaccaaaacttttatcttttatttaggagggcattcatgtaataaacttttaagacagaatttaataatccacatatctaacaga

SEQ ID NO: 49557 - DNA, 1306 bp, Cannabis sativa
ttttttaaaaaaaaaagttgggttagatctgatccgatccgagtatctgatccagcagggcggggcaggacagattcttacatgatctagatcaggtcgaatcatagccagatcaaatctgacaatcagatccgacctgatctatttacactccaaaatcccttagaaaggttctcattctagtgttctctttttttttttctaactgaatattatatatatatatataaaataaaaataaaaacatatgtacagtggaagacccaaaaactctgtcagtagggcaaaaattttacgaaaagatgtagtacacccccttaaaatagtgttttggtagactctattagtttcaacatctaggagagctttgcagtccaaacatttttcatgatcatatatgttgtagttatttatgattacctattaatttttaacaaaaaaatattgaatagtttaccgtgttaaaaagtaatgttcaaacagttacttaccacatatataagaaaaaatagtcacacatctaacaaaatatttaaatcttatttttaatgttgtaaactattcataactttttgagaatttgcaagtggtccaaaataactaaaacgtaaaaaattaaactaaaagactttcttgaatttcaaaacagatagggaatctactagaatctaccaaaatgttcctttagagaggtatactatatacttattcaaaatttaaaatacaattatgtaacttatttttaatgtatgacacctgtagtatagtgaaaaaagtctcaacatctcccctcaatatcgatgtttgaatctttgacacttcaaaatttaaatcaaataattatgtaaaagatatattagaaatcttgacatcttaaagtttaaaaaataattaagtttacttctgcactaaattatatatatatatatatatgtgtgtgtgatatagtatattctatgtctagtacaaatattttttattgatgcgatttttcgtcaacttgatcttaggagatcgtaatattaaagcagactagactaagactagcggttgccaaaaagtaaactggtttaaattaagagacagagaatttttatagttgttcaccttatttgattggcaataatgaactaatccgcttgttattttattaatcaatacctaatcacatcagagttatgttcctaaatgtaacgatctactagattaggcatgctaccgtatttttcttaattactgtgcactcatttactaatcaaagggtttattaaaacacgtagataattaaaattttcataattaaact

SEQ ID NO: 49558 - DNA, 1529 bp, Cannabis sativa
  modified_base (813)..(818): a, c, t, g, unknown or other
  modified_base (904)..(923): a, c, t, g, unknown or other
attaaattttatatttaactttgtattattattattattttatattttttaataaattattgagtgagcattaaatatcacaaaactactttttgtataaaatttaacttttacgtctcccattagagatggtctaagcaacactttcttcattttttttttaaatttactatttatgctctacatttatataatattattcattactctaaatatattttattaattattttgggttttagtaattaattttgtatgaggatatgtttatatactaatattatatatttgaaatgaataaattatattaaaatttaaaaaagtgagattttgatggtgtattttaaagaagttaatatatggtgtgatataaaagtgtgctgtaaaataaataaagtaaaattttaatgatatatttgagaaaatataactgatatgttgttgggagtgctaggctttgtttatttttttttcttaaaaaaacatttgttaaaacaaaattcttaagagtactagcatgtaaaataccataaaattgggaaagtttgaaaataccatttttttttaatttttggctgctgcaaatctcaaaatttggcccaatactgtaaattaaaagaaaagaagttttaagcttatttttgtaagctttcatctcaaaaatgaaaaaagacaatatcaaactatgatttctgatcctattaaaaaaaaagggattatgttacaaatatacaagaataataagaaaattacaaaaatacagtttcacggagttttaaacatttttacaatttttttttattttatttacannnnnnacggtctttttatgttgtacttttgttaatttattgttatttgtatgttatttttttgttgttgttttgatgttatttaaatgttnnnnnnnnnnnnnnnnnnnntagtttttttgttgttttcgtgttattttaatggattatcgtaaaaatatatataaaaaatttaaacgtgaaaatgtaatttttttttataaaaaatagtgccttatataattatactattatttccgactacttatttttcaaaaagaaaaaaaagaaaagaaaagaaaaatctaatcatattttgtcttaattataagcaaggtcctgaaaaagtagtggtgatgttgaattttatttttcgttttcaacaacctttgtttaatcaataataattgtaaaccacaagaagacaatattcatgcatggagtgaaagttagggaaactatttcttccaatagtctaaagattaagatcaaacaattatcattccaaaatagcaataaaaaaaaaacatttactacatttaacaacaaaaaacattaaattaaacacttttcatattgtatagtcaaaggtaggtttatctttgatgagaagccatcctaaagctttaaactaaagataacactataagtttaaatgttatatattgccattattattttgtttttctttcaaaattttcatgtttaaatccctcattaattattatagctatgtat

SEQ ID NO: 49559 - DNA, 1323 bp, Cannabis sativa
accaatccacaacctcctcgacatcttgcaggtaatgtttccaatcctgcattcttcacatggctgagatttgatcagtatctaatgcattggttaatgaactctgccaccgaggctatgctgggtcatgtcatcaacgctcaaagctctgctgaaatatggactatttttgaacaattgtttgctacaagatcgagagctagattgctcagatcaaggcttgttgcaatccaccaagaaaggttccttatccattgatgaatatatcctgaaaatgaagcaattcagtgacactcttgctgcttctggtcaatctctctctgatgatgatctaattctgtacattcttagaagattaggtgctgaatatgaggcatcgttgtcaatctcacttcaagatccgagaatctgactctccaagaagtacaagttatgctccaaagtcaagaaatgaggatcaaccagcaaactacagaatcactcaccaatgtttaagctaatcttgctaacatgtcactgaacaacaacaatcgaggttctcacagttatggtggccgtggttatcgtggatcaagcagaggtggaagagcaggcaacaccaactatggtggcagaggtaaaggatcaaatagacccatatgtcaactttgtggcagaacaggtcacacggttgtgaaatgttttcacaggtttgatattaactttacaggaccaccagctgaaatggagcttcaatttccaccaccccaactgaaaatcgccaagctcacatctcacaaaccaccacaagtcaagatttgtcaacttcttggtacattgacaatggtgctacgcaccatatgacaaacaattcagacaatctcacctcctctgcagattacaaggacaaagccaaagtgattgttgtcataagccttttgaaaatctagcttgatcatacaataaggcttagaattcttcctttcgtaatatcgcacaaaatcttgaaaaatcatgatgttatgggcaataaacctaccttgcacaaaccatccctgattaggagatgttagtgaaggtagaaactggctcagtttggaacatatcatcttataagtagcaactttgtacagtacattacaacatgctattggcctgaaattgctaacattttctgggtaaggaactttcaaaatcagtgtcaaggttgtggtattgagctcctttagaagcatgcctaaatgcaagaaatctagtacttccatacaaacatcatctagcactaaatcccaattatctgttggaatatgttttaccagtatctagatttcctaccatgtatgt

SEQ ID NO: 49560 - DNA, 1340 bp, Cannabis sativa
taaatgcatcattaaatatcattttttgcaacaacaaataaacaaattcagtttttaattgcaccatcataaatccaattattttaataaaaaaaatcaatatctggagaggaaaaattttattttacatgtatttacaaattttatgtttgtttttatttgtttctttttactagctattcaaatagtattaatttaatatatgtttaaaagtatacgagaccacacatgtttttgtactattttttttatatagttttgatacattttacgacttatgtgccttttatatgacttttgtgtcattttttatgatttgcccctatttgtttaggatagttttatgatatcgtcaattggtaagagaagtgatcctgtttgtgctcgtgatttctattttaatgactttttttcttaacaaataagtatttcaagtttaactctttatattaaatatatattagtttaatatcgttatttcacattatcctttccattatattgtgtggtaatagagttttattttttattattttataggttattttatggagggcgcctacaattacagagaattatcgataattttaattttaaacataatttgtttgatattgtttttcagcatttttatattagggtgctagtttgttgttactagccaaagggtaatacctttggctagttattcttaaaaattttgttatttttaagttttttagtaatgttgagagctagtgttatgaagtgtgtgttaatttctaaatttgtaaattatttttattttgaagattaccattctaatataattgtattttttagtttggtgttgtaattttttcagtttcgctttgctctgaagacaactagttaataataggaaggtatttttctaatgtgatgtggtgttgtttgaagacgttatagctttatacagcacatggtttggtaaagcatgtccttcggttagacgatgagctatcctggttcgaggaggtgccgccgccgattgtggattgctgctttgataatcttgtgtgattttgatcaccgcgtcaaaaaagatatatatgaattggtcttcttcaaaaaaaatatatgaatgggcccttacaaaaaaaaaaaaggaaatgtgcagtcaaagtccccaaaaagttgactttgatgcaaattagtccccaatcttgaaaaatagcgacaatagtccttaaggtcatattttttgtaagtccgtcgatactcagtttaacagccccgttaagtactaacaaaaatgctacgtgttaaagtattgttggtccaaattttaattttaattaaaaataatttaaaataaaaaa

SEQ ID NO: 49561 - DNA, 697 bp, Cannabis sativa
tatatatgtatttatttattttaagtgggggtggggtcatagttttgattgagtggttaagaacttgcatatacgtgtacgttataagatcacccaatttataaatatatgtcctgggcaaaatttttatagataagttttataattattgtacgtattttattaacttttaaagaaattcaataatttcccttggtaattttaatttatacgcatgaaaacactaataggatgtgtacattatgaaactctttagatatgcattctgggtttggtctagtgattgaagaaggttttgttaaggtcgacccataatgtttctttacactttgttaaatgatttgctaatcgttcaatctttcagtgcacttgacaatccaagtatttaagatgtcttctgaacttgatgttatcttttttaagtgatttgctcttttgattaatgagattgaacgtttcttctttttattgaaaataagcataatcatttcattaaataaacatagttagacctcacggtcattacataaaaggttctccggaatcgaagaaatcggaataataccatacaacttgttaacaaatgctcaattagctatattatgggcagcaaaattacaagttttacgagcatacacaaaattacagcaaataaaaaagggagaggatttagcacaaaaggagatatagttctcaa

SEQ ID NO: 49562 - DNA, 2728 bp, Cannabis sativa
  modified_base (1735)..(1744): a, c, t, g, unknown or other
  modified_base (1790)..(1791): a, c, t, g, unknown or other
  modified_base (2695)..(2703): a, c, t, g, unknown or other
ctgtgatccaaaaaattatctaagccgagcttatttgtggaagggagttgattcttgtgatggtcttggtaatgtctcttggggagatacttgtaaaccaagaaaagatggtggttttaggttcaaagacattgctctttttggaattttagtacaattaacggaaagcatgttcgagttgtaaccataaaaaaaacttttgggtcaaatgggtgaaagaagtgtatctcaagcaccaagattggtgggattataatttccctattaatgctagctggtattgacaaaatagagttgtcacacgttatgaaatggattcaaaagtgtaaagcttctcatgggaaaaaagtttatgtgtcattaatgctttgattaattgcatttgtcatagtagaaataaagttgtatgagatcactactctttacctacagttcaggtggttcatagaaggattatgcattttgtttgcaataggttagatcaaattaatgaacctaaagaaattgagtagaaaaagatagagagtgggtttgtaagtaattttatagctttgtagactgactgtgattaatatacttttaccaatttaccagaaaaaaatccagttagtaattagattggactggatgatgattttataaatttaattattaattgaaatgaattggattagaagaaaaatattggattgaatcagatggcccaccgtaatagaaatgacgtaaaattgtctatacattactcctatggaaagtgttatacttttagatcagattagatcagatgcacaatcctaataaaaatgacgtaaatattgaattagatcggatgccgatccaaatctatttttgtttcatttatcataatactttttagtagtgttatgaaaagtcacatttatcattgtcctactacgtattcggtactccctgcatgcatgtgcatggttatctactaatcaatttccaaaagatttacgtggaaaattaaacgtattaatttttttccactaaaagagaggtagttttttatttttcttcataatgagtttagtgctccaacaattaataaattagcttaattgtacatgaactatgacttaatatatttatttatagggataagttgatatatacttttttttatccattcattttaaaatactctcatattaaaacatacatacataatgagtttagtgctctaacaattaataaattagcttaattgtacatgaactatgacttaacatatttatttatagggataagttgatatatacttttttttatccattcattttaaaatactctcatattaaaatatacatacttttgtgagtgggttgtccaataccctcactctccacttaaatctggtacataatttacattaatctaagggtataataaggacatcatctttaaaagtgagtatatcttaaagaatatagaaataaagataaaaattaaaacagaggtaaagtaaaatgagtatacaaagtaattttctccttttgtaagatctttgaatctctccttgctgtcaactaccactacaaaaaattgttacttttagtcacaacataattttattgtaaataaatgtgactttagtcacaacaaaatgttacttgtgactaaaacatattgttttgttataagttgtcacaaatttagttttagtcacaataagtattatgactaaaaatacatttagttacaataaattgtnnnnnnnnnnactaatacctttagccacggaccatttagtcacaacataggaatannaatttataattagtcacaattttaatcacaagttttattgtgactaaaagtaagatttttataatgtacccaataccaactaattatcattggggtaagcccaccaatcttcctttatcccaagtaaacattacaaaccacttggtccacaaattatcttgttttgttgatactgcctgccacattctaattgactatgttttgaaaatggatctccttatctgtctcagttcattttactatctcttgaaaataagagtaaaatatatgcagtacattgttgtagaaatttatacaatatactatttttgataaaaaaaaaacttacacttttactttcaagtatatatattttttacaattttgcgatgtaaaaacaatattaaaaaagaaaactacattaaagtaaaataaaaataacataaaaataatatgaaaacattgcagaccgtattatatgtaaataaaatattaaaaatcataaaaatatttaaaatttattggtttgtgagttatatatactactttttaattattatttagtttttatttgttaaaaaggtgattagtgacatcggtttctaatttttattattattattattacttttaattaaattgttgtcgggtttttagcaattattttacttttattattttttattaaagtatttaacgttgattattattattttgaaagtactattatcatattagttaaaataatgagagttatattgttattttttgaaaatataatattattattatacgttgttattgttgttgttgttgttcactacaaaaaaactcctacttttagtaacaactttttagtcagaacaaaattagtgttacatgtgactaaaacatagtatttagttacaagttatcactaatttannnnnnnnnacaacaagtattgtgactaaaaata

SEQ ID NO: 49563 - DNA, 1895 bp, Cannabis sativa
  modified_base (1746)..(1748): a, c, t, g, unknown or other
aataaattatattataataaataactaattttcaaatatttatttttttaaaaaaaattatatttgttgtatattttgtattttcaaaattttatgctagcaaaccacataaattataaatttttttaaacaacctaaagtttcttatatacttccattttttttttcttacatataataaaaataatttgaagataccaaatgcataaaaagtcatattttggaagagaaaaataataaagaacaatataacaaataagtaatctgtaaaatagaagtttttatatatttgtaattataataaattaaattataatataattatcattataattaaaatttaacaatttaaagtttataatttaacacatacacagcgcaactcactactaaaaaattagtttttcccattaatttaaaattgtttgaaaaattacttttttttgtttataaaattgtcggctatgtgagtaccataaaaataggtctcttaagcgacagtttatgaccaatggaaaaaatagccttaagcgacagttataaactgacaataaataaatgtgatagtcataaatcgacggcaaatattaaaaaaaaaaacaaatatggtattctaaccagatctcaccactaccaaaatactcacaaattattttgaataatcaagaaaagagaataaaaaatcttaaaactaattaagcgatttaaaaaaattaattattttttattaaaaaatccatttagatataaaaaagtatattaaaaaatttaattttagtaaaactaaattttgtgttaacaagtactttgagtttatttttttctccaaaaatctaaatttatttaagtaaaaataatattttattagtttaatttctattttttaaaaaataattttacatttttattgatttttataagaaatgagtttgaaaatataaataaacttgattttttcttcacaaactgttagtttgtttaaattatttattaaatttttaataattttagtttaattttttaagatatatttttataaataaaataaaggttaaaaatatttgttttaggaataatttaaatatttaagtaaatttaatatttttttattaatttaatactttcattaggtcttttgattaatacttttttaagaattgatagaaatttataatttttaaaattaactatttattaataaaaatgaacaaaatttaagattagtcaaaatttataagataaaatattaatttttaatggtaatagaaaaagagcctatatatgtttttggctaataaatgagcctcattgctaggattagcatacttgtactataaacatgtgaaatttgtgcgagttaaaaattagttacaaaatgtctaatatgtttcatatattgaatgaagatacgatgaacattataaataaacaaagaaaaaaattgtaacgaccactaaatcaatataataaacttttacaaatcatatgaccattgcatactcgaatgtaaagctttctatttgtaatggctaattactgataaatgataaaagataaaagtagtataggttacaattggaagatttttgtttttcgaactgtaacagtattgtaaattggttattttaacaagttttgttagacacaacgaataaataataaaattgcagtttagccaattattatattagtgctacatgtataaatttacattaaaaaaattatatatttttaaaaaattattannntaaaaatcaattaataattaagaaaattatgtaaaattaaatttaaaaaaattatattattatttttaaattaattacaaatgtgacattaatatgacactgacatgacaagtagctaagcatgttagataaattaacaattaaccc

SEQ ID NO: 49564 - DNA, 1422 bp, Cannabis sativa
ctgaggcaatctcttggccaacttttcaatattctacatgcatggcaagtgtctgacaccaataggcattaggagcattcgcaatcgacaacagaagaacgacctgatcttcaccaaggctcaactcaccaacatgatggtggaaaaggtgatggttgatgatagaacatcatcacatatcctaattgaataggccctaaagagaatgggttagcccttgaatgatatagagcaatgcaatcaactcgtgtatgctttaagtgaagccgacatcgttccctatggtaaaatcaaattaccactaatagtcgaaattgtcttacgactaaacaacactgcgactaccttcatagtggttgacaacaagtctccaaacaatgtaatgatcggaaggtcaactagtgataactagatcgaagatcgatcttacagaagatggtctttccttgtaattgatcaatcgggtcatcaatccttggcaaataatacttgttctttactgtcaatttattcatttctcgatagtcaatacatcctaaatgttctgtccttcttctttacaaaaaaatcatcgcaccccaaggtgaggtactcggtctaatgaatttcaaatccaacataccctgtaactgaaccttcaactctttcagctctacaagtgccatctgatacgaagctttagatacaggttccgcccccggaatcaaagtcaatctcctacctcagtagttcctctagaaagacatctagaaactctcgaaccactggaacgtgtttaggtcccattggtacttctcttgtggtatccaccacattggctagaaaactgacacatccatcccactacaaatctcttgccttcagcatcgagattattggaattcaggatccttgaacccttcccacaaacacaaatgagtcctcaccctcatgttcaaaagtcaccatctttcttttacaatcaatggtcgtgttacactttgctagccagtccatacccagtataatatcaaaattttctagatttagttcaattaaatcgaccaaaaattctcttccctccacatacactggagggacctaaccaacctgctagagataaccaattctccagtaggtagtaaggtaccaaaaccactcggtaaaacatcactaggtttatgtagatttccagtcactctacctgacatataggaatgtgtggcaccagaataaattaaaacagtcaacatagtaccatcaatagaaatctaacttttcacggtagaaggaccagcatcggcctctgcctgggtcaaagcaaacactcgagcaagaactagagtgtcatctttcttttgtttttgtctcttcaatgattgggcaatttcttttcaaatgcccactaccctacactggaaacaggcttgatcttgacattcg

SEQ ID NO: 49565 - DNA, 1324 bp, Cannabis sativa
ttgccaccaagaaatgtcctgactggcagctcactagcgtcttttatttactgctccaactcttagactcttgttctaagtgcaaggttgttttcattagaagaaatgttattactttcgttgatgaacttgctaagagtgctagacactccaagagcggttctttgaactgtgaaggggagggatttccccctatgaatcccagtttcttttggtgatttaatcgaactgaggttccttttcaaaaaaaaaaaaaaaggtaatatgcaatttgctgatacatagaaaatattgttcttttgtgtcggttgacaaaatcaaagcatattccatcaacacaaactcaaaatcatttatgtcggtttcccgccaatgcacctaaggagtattttcagtttaaaatcgatggaaatgctgttaaaaatatttttacgctatttgcgttggttttacactgacaaaaacaaaacaaaaaaagttcaacaaccattcccaaaccatcttgccagagtttagttctaagattcaaattcaacaaaataaaacaaaaaaaaaaaaaaagaaattacaatatcaactcagatccaatataacaaaacgataaaaataaaaattccaaaatcattttagatctaagatccaccatatcctgtcgaccctaaaaaagaaaaagaaagaaaaagtagtcaaatctccgatctaagatccaccatatatcccaccaacagaaccttgagagagagataaaaatgagatagaaatatttgaaataaacaaagaattaccattcttcacctgtaatttggaatccatttgttgtaatgtgctgatcattgaagatctgatagtggaatcaagcaaatcatctagggcgagctcaaaagagaagtacccgacaatttttggaaacctatataaatttggtgttctctttctttattttttttagaattttgtatgtgttcgtgtgtgtgttgattaactttaatttgggaggattgtttggcttgatttgggttgatgcaaacttcgagtttttggagaggaaactcttacctttgctagggtttctttgttgtgtttggaggaaatgagttgttcttgattgttctaaagggttttgatattgatcaaaatacagtagttttgattggagtcaactagtttatttgacttggagtaaaggtgaaaattgaccttgatacctgatttgtgttatctattgggtgtagggactaattgataatttcttacatattgcatatccattaatagtgttgattcattggcagttcatttcctattttaccgttcactgctgcaa

SEQ ID NO: 49566 - DNA, 1025 bp, Cannabis sativa
gagagagaggaagagagagagatggtttgaaatgtgaggggtagtttaggaaaatcatttaagtggtcacatatgaccaattttaatgattatacatttaggggaaaaattatagggtatttaaagcatggaatttcaaatttcccatctataattgcagcattgaacataagactttttttctaaaaaaaaacaaataaaccaagattgagtacttatattacaaactcatgtgtcacttttatagttataatataaatggtctattttattggtaataaacatataaatattatttttaagagcaactctaacgcaaagtttgcgggagtagcttgacaagttttgcaccttttaaaggtgctcatgtaattttttttataaaataaaaattattaaatagaatgtttttataaattttttgggtacaaataaaacactcatattctcattttatctaaagttttcaaaatttttcaaatgatctcaaaatgaatgacaaattaaataattatgtacaactttgtggaccactcgtcgggcctaataggtagtgttatcatacttttttaaaggaatcgtgcgacgtgcatgacactctcacatcatatgactccatctcgaaatcaagacctgtgttcatgccgaatttttttagaattgtttagcattagagtaattttagaagtaaagcagcttaaaataatatgattaaaagaaaaaaaattatattttgaaatgatatgaagtttgttaattctttttaaagttacatagattagaattgctttaagaatgcatatatattcataatttattatgagactattatttatgtattttgttttttagattcttgaattaaattaaattaacatcatattagtggcgcatcaataaattatttaaaaaaaaaaagaacaaaatgtaattaaaattagggtaaattgcgtcatacaacctaatgttttagattttatacacttaaatacttaatgtttatttttggaggcaaaaatacataa

SEQ ID NO: 49567 - DNA, 1240 bp, Cannabis sativa
taaatatataaataaaaatataaacactattaattgcagtagtaataatattaaaaaatattatttattattgtataaaatttggctcatattatattttgtgttaaatttgatacactttttagtatgtgtcaaattgaatcatattatatcactattagaatgtaattttatcaacatggactaatttatatatatatatatatatatatatactattggggatgctctcaaaatgccaatgtgtaatattaaagttaagtacaataactatattaatttaacggcaaggcatataagttttttgcactacgtatacgatatataagttacaaacaacaagatattagtttaactttgtagtatataagttcttaatactatgatatagtattggagaacatttctcactttcgtatttcatattggttgtattatttttgactttcctatttcagctgaatatattttaaaatattgtgtactcagaatgttatgctattttaatgaagttgatattttattttattttttttaaaaaaaatattattggaggttgcatcatatactaatttaaccttgtttacatataactgttttgtactataatatattaaattttacaatagtatatgtgagttggatatgatatattagttcaattttattaactatggtatatcatagttgattaaaatatatatcaatatattaggttaatattaggtacaatccacatatatttagttacattctcaattttaattttagttatgtgtatcttttatgtaacatcttattagtttaaatgtgttatagtgatttttgtgtaatccaatactaatcaacgaatttgttaaaaattgtgattaattaaaatttcacttaatttttttaaattaaaagtaaataacttttatataaaccaggatctcgtatttaaaatatttataattgtgataaaatatgttgtctagcgactatacaaaatacaacctactatcccaaagatcgtacgctctacgtctaatcaccccgacatgtacaatcttcatccgctcgcactcactgctgttcatccttagctttgcccttacctacacatgcaaacagtaactgtgagtcgacagactcagtaagaaaagcataatcataacatatatataaatcggattacaactaggcacccatacactcagtcataatcctatccccacgtcccacgcgatactgagtctag

SEQ ID NO: 49568 - DNA, 1889 bp, Cannabis sativa
aaaaaaaaacaaaacaaaaattcagatgggccctttattattgtgggccttgtgcaattgatctggttgcacagcctttgggtcggccatgggtccaacattagtaggatttaccttttttgtgaggttattctcctcgtggacaggctctaccagagcattttcttcagagacctcttttatggcatcgcctgtcgttgcattaatgttttctgcatctaacaggagaactcttcttacgttgttagcttttcttgggtttcagcaggctcatcagccacccagagtacttcaagatcttgttcataataatatccatctttataatacccatctttaatctcgtcatcattttcacattcggggtcttccttcatcttgtctttgtcgatggggttctcattgacatattattcttgacattgggttgtattggtcaaacgaccataagctttagacgtttttccgtcccctacagtgcccagtagggcatgtattgtgggagacgggttgacatcgtccatgacagcgtcttggccctgggcagtaagttgtacgatgttggtttttctagtacccaccattgttataggcacaacttgccttcaaatatttcttcaaatctcaatgaaagtaccaaaatatttatcaagatttttggaagtcaattataataagagttgagagattaaataaagcaatagagatttttacatggtttaggtattaatgaaccctagtccacgagtcaattgtatttggctaagtagccttgatgtattacagtagagttcttacaagcttaagaaccctagttttttgctatagtgtttacacaataaatttctaaccttttgcataagggtataatgtagtatttatatattaggattcgagttcaggtatatatgtgacccgctagggtttgcatgaaaacatgacccgctaatggagtaaatacataaaatacgttaactttgggcccacagattgatacccagcccttggggcgaggatggtccgtacgcttggagaccacgcgatatttatagatggtttgcatgtgttgttcgtgtgtactacagtgtccgtacatttgggggtacacgcattcttaggctctgacacaggggataatcccctaattcagtgggatttggtgtcagagggttgccatgtcatcctggactaggtctccagggcgcctcttggaatgcccttctggatgtatcccaaatgctcatccgaaaggtctcagctgcttcgtcttatttgggcgggacaccctttcggatccagaaagatctgatcttggacataaacattatgacccttggatgggtgcgaggcccatccttttgtacaaactgggtctgttatcttgttagagcttttgaccaagccttgtatgattaattttgaattgggaatgtgatgtgtcccccttataaacagaggaataacaagtataaatgtgtgttaaaaatccatactttctgatgttttaataatataaaaaatatatgccaaacaagcaatggaagatgtttgtttttataatattttctattgctttagaaaatagcatgcactttttcaattttttaaacataataatagaaagatatatttttggtaactgcaataaataatgacgtcacaatagtgattctttaagaaacataaatacttcttcaattttgtttaaaaagaaaataataataataatagaaaaatatatttttgtagatatgtgaattgaaggaaaaaataataatataaagatatttttataaatatgtgcaatcaatttaaatttaaattgtaatattttatgttgaaaaaaaaaacatcttcacttatatatatttattataatatataaaata

SEQ ID NO: 49569 - DNA, 1822 bp, Cannabis sativa
ggtgttcctgatgtttggaatgagcttctctatgcttatatttttcgccaatgacaaaaaacctaaaaatactcgacgaacgaatttagacttggataagtgactttctctataccctttaatcttaaattcgatttagataagcgaattttcttataatatttctctatacttacaaatgaagaaaaataataaaatgaaagaaattaattgtctatattattaagagttttagaaagagtgtccaaattaacaactttatttttattcttgagtaggtaatactaaaagggctggcgtaatttgaagttaacatactaaaaaagtggcaatttgatacaaaaatggatcttaatttatataaactatgctgtcacataatgaatttttgtttgtattatttattttatttttttaatatttattttcaacaacctgacaactatgctaacatacacataatatgattctagaaaaataataaataaaatattaatatgaagtggaatctcaacctaaaaaaattattagcttgcttctaccaatgtactacccttgttaattttaagaaagcaaagttgattctcaaaagaatacaaattaaatattcctttttttaaaattaaattctcttgagaatcttgtaaataccaatttgattaagattttgttaccatatgacattgtgacacatcatataatataattgtatgtagtggttgctcatcttttatctataaaagatgatgatcatgttgatttataaaagtggtactaagttcaattttgacatcttttacccaaaatgtcaaattttaaaatcactctaagaaaatggtaaaactaccaaaatagaaagagaggcaaaaatttcaaactatggaaatggaaagtgaaagaaaattaagagattaagtggagtctttcaaattgggatgggtatctttcttacacttcttttgctattattattattattattattattattagtgtttaaatttagaattttttggtgattatggtgattataatttataatttatagtttggcactttttttctcacaatataaagttcacgagttcaaattactatatatacaaaaggactttctcattatgagaaaaagtatatctttatggccacactactttcattttcatgaaatttttttcattttcagtttagtcttgttgttcaagatgttaggaatttatttttggctttattttttgttgagttatgttttgttaaacgatctgcaaataagttggctcattgcttgacaagagactcttgtttctgtacaagttgtgtacttaagttggaagattgttcatctgaagtgcgttttattgttttgaataagtttattcattaataaatctcctgattttattcaaaaaaaaaaaaaaaaagagtaattaacttctaaagattatttaagtggatgttataaattagggaaaaaaaatactacatacattaaaaatgaagaaataaataagtagtgttaaagataaatttttattttagttttggtcttttttattttgtacaatcaaattgagaaaaatacttaattattaacacaatgaattttttttgtaataatatcttaagcagggcgggtcctaagcataggcgggctaggcttgcgcctagggcccacttattttaggggctaaataaaaaatacattttaaaaaatatacatattttttttaataatttttaaaaaataccatttatctttatagtaagggcccaatttttgttttttttacttatgggccatttcaactcaaggtcggtccta

SEQ ID NO: 49570 - DNA, 4696 bp, Cannabis sativa
taatttttgggaaattatatatattcaaagatattgaattaaaaaaagggaaataaagtatctaggcaaagattttacattgttaggaatgaatgaggataaaaggtgcatggtggttatggtgtgttgggcaatggggagctcgtaatgagctggtttggaataataagattgtttcggtggataatatagtggcttctgcaaatagaaatctttatcaatgaaaaaacgctaagagctctttctagagtcatcatggtctttgttaaaggaagatgataatactgagtgttggtctaaacctcatgttaatagtataaagattaacgtggatgccgttttatttggggaaggtcaaggttttggcgtaggagcagtttcccgagatgataagggtcttctaatcgaaggtacatttccatgggacagtggaacctcttttagcagaagccataggagtcaaggtagtccttagttagattaaaacaagagaatggtaacaagtctttgtggagaccgatagcatggctgttgttcaagcccttagaagtttgttagacatggtgtctttatttagttatgttaccaataattgtaatgttttattggctgagttgagaaatgtctctgttttttttattaaacgatcaacaaataaggttgctcatgctttttcaaaagcttccctattttacttagattgtacttttcacctggaggatgttctggtggatctactaccttgtttagtagctgagtttgatggataataagattgattttccattcaaaaaaaatcaacaaaagtagaagaattaaattttcaacctttttcttagggtatgatgctctaagagaagagaagatttttgaggttacaagggtcatttccaatccagatagaagcttaatctaaccccaaagccaatttcgccaatttgtgggcaacagtattagcagatagtgacgttggggaaatgagataaaacagatttaataagcctgatgagatcttcgcacagagaaatgtcttccttggaggccacaagagcgttggtgatggtcttgcagtcagtttcaacctagtgaatgggaaagttcttttcaacctttaacagtatagtttttgtgttacaatttcacaagaattttggctgacttggaatttagatcccttccattgtggtataatatggctatatttatgtgccgtcatgcactttgagccagagtaatctggatctgatagggatgtaattaccgttaaccctttaatggagttgattacaattgaatgaatgatatttcaatgttacaattttagacctaatggactagcccaaggcattttggtattgggagattatatttacatcccctaaaattataactacaccccgttattaaatttaccccattaaatattaacttttataaccacaccccactttatttacaaaagaaaattttattttacatgcttaaaaaatactccataataaaatttagacccctaattaattcatacaattaaatactattattttcaatttctacccaaaatacccttcctttcatatctttctctgtctcttcctcttcctcacaccaacgagacacccagatccaggcagcgagaccaccaaccaccacccaccaaacctcctctcctccgccatcgaacctcctcatctacccaaaactcaacaaaacaaccctcaaatctcaccaacccaaatctttatctcttcctcctcctcgacttctcaccgcccacctaatcctcccccaaccagaagctcattgagtggtaccaccacaccacgaactgagaccgagatagaccaccagaagctcttcctcactttctcttcctcttttgaatttgtttttgtttgagacattagatggtgatggagggtatgggtttccagccaaaatgtgattatcgatgggttatcaatactttatcgataatttatcgatggctttgtctgtgcactgctatttttgtgcataaacagaaatcatcgataaattatcgataaatatcatcgatatactatcgataaatgctattgataaactattgataacctatcgatgtatattaaattgacaaaactatgttacacaaacgtaaatcatcgataagcacgttatggccagaaaacaccataaccacaaccatctaaggtctaaaacaaacacaaatccaataaaaaaataaataaatacgaagatgaagatgaaggcaaaatctggtgagcatctagtcagtctcagagacgaggtcaccttctcagtatggacgacgctcacagacgaagacaaagacataggttcagaacctctgggttttttcgatgcttgagtgctatggaggttcgggtcttgggcctctgggtttcgtctgagtttttgggtagatgaggaggttcagtggtggaggaaaggaggttcggcgggggtggttagtggtcttgatgcctgggtttgggtggtctcggttgtgcgaggaagaggaagagagagtaaggaagagaaagagacagagagagaaggaaaatgaaagggagggtattttgggtagaaactgaaaaacaatagcatttaattgcatgaattaattatgagtctaaattttattagggggtatctatttaagcatgtaaaataaagaattaatacttataacttataaaaatatagagaacacaaagtttttctacatagttttgtatgagtcaatattatttttagatatcttttgagaaattactttaagtacaaaagaataaatataaatatttactcaatctcacaagatctctccttttaaaaatgatccctccctttccctttgggctttgtccctatatatagtggttctaagaataacagttattcttctttaatcttatctagataactgttcatgaaatatatacaatcgtcacgttttatatttataatatgtggataaaatgaaataactgttggtaatcgctttttgttcttattcgaaagcagttttgcttttactgaaatgatgtgcattatagttatggctcacgttagttggtgctgcttaaagatagctggttgtatcttgccaggtgttagtttaagtgtctgtcctcgctatagccttttaaggcatctttttagacttggtctctcgaaataagttgtataatgcttatttcttttagtctgtcaacatacttacgagtatgtgggtccatgagttgtaagctttggaagaacttgttatctaacttttctactcaactcattgtttcctgatattctattgcctcatttgtttcaaccatgtctcgacgacttaacttgtgttcttctcatcctcctaaatcattatattgatagtactctgtgaggttatctcctcctttattccatagcttattttcaaggtagaatatttatttattcctcgcattcattattttttttttctttcttttagatttatataacatgtgtcatgtctatatttagtgctcgaaagatgggcataacaattgctccctaaaatgtattttttctctttttgaaaaagacttttttttttaaacctttgtatgtcacttgtcctttgtgtgtcatgtaagctccttaaatttttactttggcggtttttgatttcccgatgcctagctaatcatggttttagtaataataaactcattttctttagatgtgtctaatgacatacttggaatttaaccttatttttaatctttcttgcaaaagttataaataatttcatatctaatgtattttgcattttttaacagtgttccatatgcaatatcctgatttttatctttatcttaatttttttattgaaataagatagctaaagaaacatgtacgtctcttttctttacttaaaaatttatctcatttagcatgagaattaacttaatgttgatagatataactaaaacatgagctaaaaagaaaccaaaataaacaaagattcataaaacacaataagtttaaataatggcaaatctcatcttaagatactaaatacactattaatatcaagtctttggatagtaatattcactgtaagtggtacttagcaatcaaatattgataataaatcatgtcaaacaatttgtcaatctttggactgtacatattgttcacatgaaaaccttataattgtcacacacttatcaccaaaactatgtttacactcaaaataagtataacatttatttgggtcgaccaatacttacataaaaaacacacacaatcatctaatattcctcattaacaatctacacaagagaggttactttgacgatcaacatcatgtttccatcaatccatttagaatgagagacaaactttaaaattttagtatgccaaatacgaacaaaattgatccaattttttttttttaacattagactttaataaattttttcggacatagtatataattatatgataacctatatacaattatatatgaaaactatataatatatataagttgaaatttataaacttattagtccaacacctcatgcatccagaatttgaatctttaaccaaactaaaaattgaataatctttcaagtcaactcattatccaaaagtctaaaagtctagagaacaatatcaaaatatatatatgaaattataagagaaa

SEQ ID NO: 49571 - DNA, 1266 bp, Cannabis sativa
aagagttagactttaaagaattattcacttcttttggtgtaattcattattattcatgtgtccaaagccctcaacaaaactctattgtaaaaagaaaacaccaacaccttttaaatattgctagagccttattgtttcaatcttacatacctttggtgtattgagatgaatgcattgctactgctatttatctcattaatagaacaccaaccctcaatttaaatttcaaaactccctttgaaaagatttattccaaaagcttatgaacaccttagagcctttgaatgtcttgcatatgcttgcactttgtcacaaggcaggaccaagttctaaccaaaggtttttccatgtctttttataggatatcctataggaatgaaagcctataagctgttagatttgaacaccaatacaattgtttgctccagtgatgttgtgtttcatgagactgtttttccttttgtcaattctgcaaatatcccaccagaattttaaaactttttccctgtttctgctcctgcttcatctgcagccccttctcctcaatttgagcccccttctacttcaactccctgtgttgaacatcaaaacactagacccactcaaactatctaaatgattatcattgctttcttgccactaatgatcttgctattttttctcaagatacaatgtcagtcactgcacgtgctctctcccaagtgcttcattactccaaattatctcctaagttttgagctatggtgttgttcatttctagtcatcttgaaccggtttgttttagtcaagctaaaggaatcccagaatgggataatgtaatggataatgagatagatgctttggaaaagaatcacacttggattgtggttaccctctctgtagatcagcaagtaatcagttgtagatgggttctacaaaattaaacacaatgctgatggctctattgaaagattttaagaaaggcttgtagcaaatggatataatcaacttgaaggaattgattatcatgacacatttgctctagtcaccaagctagtttttgtgaaacttatactcgcctaagctattgtccatggctggttcttaaattagcttgatgtaaataatgcttttcttcatggagatctccatgaagatgtctctatgactctaccttcttggtatagtcctaagggggagaacaaattaccaccaaatgcagtatgcaagtttcaaaagtccttgtatggtttgaagcaagcctcaaggcaatggtttgcaaagttc

SEQ ID NO: 49572 - DNA, 1124 bp, Cannabis sativa
cccagcccaagggcccaaaattttgttttctcttttaaaattatataatttttttactgattttgaaaaatatcacattttttctaacataagggtcccacattttttttttccatgtggcccactttgtttcaggaccggccttggttgtcttcaacctccaggcgttgctccaggtgggtcgcgcgactcggttttgcgccagtcgggtctggacgaatttcggccaaaaaacgtgacgaaaacattggaaaattgaggggttttgttcgggattgaatttttactctatctatgcgttcaatttggaataaaacaagtaaaacaatgctagatcttattcaaaccaattcgaaaaatataagaacaaaaaacaaaagaagaacccaattctcttatgtatttcatgcaattcgaaaagtaaattgtgtagaaatattgtggattgctcagtaatgaggtttacacagtcaattttactcaataatcaatataataaaaaaaatttaaatttaatttcataattaaaaaatataaaccctaaaagtttaatcattaaattcttccaatttaatatatcaacagaaagagaatttcacaattaataaaactcctaaattttcaagattgaaaaacaaaaaaatcaacataaaataataacgaaaataatatgtaatttgagaaaattaacatatatcaattataaaataaaaaataggtcctacattatgtacaattggcaatctaataccacatgctagataaattaaccaacccaaaataccgaattgtatataatacagaacacagtaataattaggtatgcaaacctgattgatccatagcaattaccgcaatttgatagtgcaatactatcaactaagtcttcctcccttgacctttgaatgagaagcaattttaattgctatttgattatcaaaagtatacaattgtaataagacaatatgtaattatagagttagcgaggggacctacataaccctagttggactgggcatgctcattgaaggcttcagttagctagaaaagcccacacttctgcttcacctagactttatacacacaaatactaagtccatcaactattgatcactaacaatatg

SEQ ID NO: 49573 - DNA, 1635 bp, Cannabis sativa
taagtactatattaataattaaatattaaatctcatataatttaatgtaatttcaagaaatattgttaatcaattatagagcatcacttttagaaagtatatattgagtggtaattaattaacagttttttatattatttatttaaataaattatgtgtttaacatcataaaattatatattgctacaagatatctatcggtatctaatacatttttttgtgtgataccaagtatcgaatcccatgtaaatttttagaaaatatcattatttaatcgtaaaatatgaacattagcatcttctcgacatgtcgcattgcgattgactagcgatacttcctaaaaactagctattatattaaattatatgagacccgatacttaattaaagggcgttaagcaccgctaagcaccactgttaccttttaacatttttcgtgtgcgcatgagatattaagagcaattatatcactatattaagctatttttataatagtaaaatatgccaattatataaggactcatgttgatattaagagcaatatctcggcgcccgacactaaccaacaaacatcgcacgtgtgacaaatattaaaactagctataattaattaagaatatgttttaaagaaataaaactatatttataaaataaaaattccccatagaaaataggatattttgtccattatatgacctaccttatttattgatatgaccaataaatttttttgaggataataattaagttaacatccaaagaaaatcaattagatgagtcgtgctcatcttgattaattaatttaatttcattggataatccaaagaccattattaatatatcggcgcctcacactaattaactaattaattaataaaattaattgtcaaaaattattcgtgactaaaatataatattttaatacaaattatcactagtttaatattaatggtcacaacaaatattgtgactaaaaatatatttaatcacaacaaattgtaatttttgtgactaatattcactacaaaaaaactactacttttagtgacaattttttaatcacaatattaaattttgtgactaaatgtgagttttagtgataacaaaaaattacttgtaactaaaacataatatttagatacaagttgttagtaatttagttttagtcacaaaaagtattatgacaaaaaacacatttagtcacaataaattgtaatttttatgactagtacatttagccacagactttttagataatttataattagtcacaatattttttttacttttagtcataatttttattctgactagagttcttgatatttcagtttacgacgtgtagtattcaaaaattttaaatctattttcggcactataaactaattaaatttttaaaaaaattacatatataattttgtaactataacaaacaacgtcataacttatttttttaatgaattttttttttcaagttgtaataaaaagttataacagatcgtcctctattttatttgatatatcagttcacaatttcatggatattgtaaattataatttcttaattaggtaagatgacgtacgtaaccctacacatatattccaaccgtacatgataagatagttgtcttcaata

SEQ ID NO: 49574 - DNA, 1428 bp, Cannabis sativa
aatattgaacaccccaaaaagctataaggggatgttagttatgggggaaagttttgggataagtgagatatatgagttttaccttatgtttggtgtaattttttagattggaatgtagtgagtgccaaagaattttaatgggtaatataaacccttttgtacactagaattttatattactatccattttaattctactcacaaattcttaagaaattctttaattaaaataaattcattaatatacccatctccttgtaggtatttgatattagatttagacttgatggtaatagaaatgtcaagcttaaattgaatgttaataattaaaggatttgtattttcaagtaggtcccattttcttaaaaaaatattttttgttgaacaaagataattttgttaggatttgaattctttacctctataatatttattagataacttaactatgtaccaaaattaatagtataatatccactttttaaattaaaatgttagtaatgttaatcctctacaacacttgggtttctatctaagtctactctttctagctcaaattcacataacaataaacatcccatatatggcctttggttgaaaggagtgaaaatataactagaatatgaatcacatttcagtactttaaaataaaactaagtaagtgaatgaaataaaaattatttatttactattttattctatttcattacctccaaccaaacaccacgaaataatttttcaacctcacatgtttgggtaaagaaccaacactaaattaagaaatcatgctagagcagcgtcttgaatgttgatagaaaaatttaaaataattactatacatctagctatacttataacttctgtggacttaattactttaatcctacttttttttaatgacgagttttagccccctttgatgtgtgtaataatatatacgcattactttcgtgtatttactcaattagtagaaattgtattaacaataatgccgatcttcatgggaatcaaagtacaatatgcaagtgtcattcctttttttttttgtcttttataatttccttatataatgaaaacaatgtggtatcagctttagtgatcaagatctaatttcagttatcaaatcaaagtatatttctttgatgggttacgccatgtttagggattctgttcttaaaaataaaaaggagatttccattaacttatatgaattttgtaatacatacatcatttcttgttacttgtatgagaattaaaaaaaagttataataagctccctaatttattaattatatatatatttaaaaaaggttacttcacatataagaaaatttatataaactaatgtaaatgttagcggtatatatgaattcgtgaacaaaattgatggtcggaatcttgtttaaaaaatgaaagataataaagaaa

SEQ ID NO: 49575 - DNA, 1402 bp, Cannabis sativa
ccaactagggttttgtagctaagtcccctccctaactctataaatacatattgtctcatcacaattttatattttgtgataatgagataaaattaaaatatttccaatttaaagatctagggaggaagacttagttgatagtattgtactatcaaattaaagtaattattatggattaatcatgtatgtatactcaattatttgataactatattgtattttagattatataccaattgtaaattagaattattatttttctaacagtatagagatatatacatgtgtaacagttttctcatacctctaatttgaaagttaactcagtatccttgatttaaaatcatgtctctctcaaataagtattacattaatgtcaccttatgttttggatcatatatagttgtgtgtgatttgtagagtttttaagctgattttcatatatatatctttcaggatatctttactgcaggaggtgagacatcagctacaactatagattgggcaatggcagaactggtaaggaatccaggaataatgaaaaaagcacaagatgaggttaggaaagtgtttagcaaaaaaggtagagttgatgaagcagaagttactaacatgagatacttgaaatcaattgtcaaagagactttgagactgcactctcctgttccattgttactaccaagagaatctacagagaagtgtgaaattaatggttatgagatacctgtgaaaaccaggattgttgttaatgcatgggcaaggaagagatcctaaatattggactgaaccagatagttttataccagaaagattccttgatagctctattgacttcaaggggaacaattttgagtacatcccatttggtgcaggaaggagaatatgtccaggcatatcatttgggcttataaatgttgagctaccccttgcatatttgttgtaccattttgattggaaacttcccaatggaatgaaacatgaagatttggacatgaccgagttgttaagtataacagttcgaagaaaggaacatcttcacttgattcctattgcttatgatatttcatgtgttgaaaaatcacaaggaggatgatcatctgttgttgatgaagatgatttttctattgaagcttaatattgatacttgggcactattaaattctattttagcatatttgttttaagcattaataatgatgagtatatatatatatatagggtaatattatggtaggacctagcaaaagttccctaccagtagggaacttttttgttgacctttgattttagatgttattattgtaaggtgtatattcttattataggactgcttgtatataattaaaactttatatatattataataatatttaataataaatttattttaaaaaataaaata

SEQ ID NO: 49576 - DNA, 899 bp, Cannabis sativa
aaaataatttccaacacatccttcaaccatactccatactttggaacttgacctccagacacattagattccatcaccaactccttcacacagtttgcttgatcatgcccccaaataccacaattaaagcataataaaggtagtttgtcaaacttaaattggacccaacatttaccaccatctacaggaatgtacctgccaacaaaaaccgcactatcaattgggaatgcaatcttaacccggacatagccatttaaaaacacttgttgtggattattcccaataacatcctgaacctctcccaccatgttcccaatcctcttgacattgttaatcgttaaagtcttgagtgggagtcctctcaacttaacccaaagtggaactctacttaaccgagcatccctccacagtccactttttggccaatcatcaaggaccaaaaaacctccattaaagagccagggttgcttctcaagtatcttcttagcatcatttttactctgaaaggagagaccaaagtacatgttttctgcatcttcttccatattcttaactttccattccccaacatatttccacatcctagtgaaaatgattttgaataaaccaagactaatactttgtttcgagacgattctccctatcaacaacttttctccaaactcagtagcttgttcttcattcacttcccattcctcctcttgttccattcccaacctatccgtcaattgcacaatctcatcaacaaaattagcatccattaccgtggccattaatccacaaagcagtaaaaaattgatcataatcagagtcacaaggactatacaaaatcgtttggagtcataaggaccattgatattttagttacttccacccgtgtatctccaccttcacatact

SEQ ID NO: 49577 - DNA, 2087 bp, Cannabis sativa
agggcataaaacccaacagcttcaccctcttaacaaaaactcatgaaacaattaaacatggccaccaaagttgttttctatacaagaagcctcctcccatcaagaagggctttagtaagagggggcatatctaagttctgccaattccataatgatttcggccatgatacaaaaaagtgtgcatttgaaaagatagattgaattcctgattaggaaaaaaattcttcatctacgttgttatgtgcaaaatgaccaagatcagacactagctgtccaaaacaaagacccaatgccaccaccagtggcgggccacctaagggtcataattggcagaccacatatatcaggcaaaacaagcaaaaccatggaatgttatgctcagaccccccttcatgaacaaaaaagtgacatccttgacgtggaagaaagagattccaagcatcttaagcttagagagcatgccatatccttcagagaaggagatgctgcccaggttaggttccctcataataacccctggtcataattgcacaaataaggaacatgacggtggcttggtgcacgattgacaatggagcctcttctaatattcttttcaaatcaacttatgaaaagatgggccttcaattaacagatataacaccctatacacaactaatgtatgccttcttcggccaaggccttgcacccttgggatacatccgactacctctaatagttggagaaagtcccataacaaggacattaatgacttagtttgaagtaatcgatgtgccatcagccttcaatgcaatgataggccagacagccttgtacgcctgaaggcagtagcgtcaatttaccacatatgcctaaagtttccaacaaggcatgggatgggatgcttaaggggagatcaataatctacctgacactactataacttggctttgttcaaagccaagaaagaaaatattcttgctaagagctttgaccaagagccaggcaaagggcaatgaagctcagcccaaagcggggaggcagactaggggatcttccagaaaagtttagatcggtagaggagttagaagaagtggagatcaacctcacccttctgactagaaacttaaagattggaaatggtgtagcgctagaaataaaatcactttagataaaaaatttaaaagcgaacctcgacgcctttgtgtggtcgcatgaagacatggtgggaataaacccatctgtaatgactcataccctgaatatagatccaaacttctcacatgtataatagaaaatgaggttattggataaagagtgagcacaagctctgaaagacaatgtcaaaaggccgagtcccaacaactttatcattgaagctttctatccagtctgggtatccaatcctgtcttggtgcccaaaccaaacaacaagtggagagtatgcatagattttactaacttgaataaggcatgtcaaaaagactgcttcctacttctaaggatcgactagctagtagatgctacagctggttatgagacctaagcttcatggatgcctattcaggttacaatcaaatcagaatgcacccaccagaccaagagattacaagttatatgacagacttgggcctgtactgatataaagtcatgcctttcgggctgaaaaacatagtggccacttatcagagacatgtaaataagatgttcaaagatcttattggccaaaacatagaagtatatgtggacacatgctggtcaagtccaaaaagcttggggcacatggaaaatataaatgaatgcttcaagatcctctgagagtacaacatgaagctcaatcccctcaagtgttcaattggagtacgctcaagcaaattccttggcttcatagtcaatgccaagggaattaagcaaacccaaaaaagatccaagcccttttggacatgaagtcacccacaaaaataaaagaagtacaaagcttgattggacgcattgcagcactaagcagatttgtgtcgaaatccacagacaagtgtttctagtgtgattttgttggaatttattttaccaggatcttagatctacttcacaagtatgttgattaacac

SEQ ID NO: 49578 - DNA, 731 bp, Cannabis sativa
gttggggccactcttaaaaatgtgaatggttcctagaatgaatctcatattaccaccatatttcataaaaatgatgttcctcatatttgggtttagctccttgtacctcaacgtatgagtatgatttggtttggtactgtacatctcaaggcctttatacgattaaaagtggttatgaagtgagctataatgtccattcagttcttgaaagttctcaagaatatctgctggtgtggtggaaaatattatggaagttggaagttcctcccaaagtcaagaactttacttggagagtttgtaaaagctgtacaagttccgtccttgtacaccgaggtatgaagattgatggtatttgttgctagtgtaagtcccctatagagtctatccctccatgccttctggttttaccctgctgttgttaaggtgtggaaacgcttttgctttggcactacttttcgaggtttcttttaaaccccttggagtttattcttcatgtgttctcaggtaggccaatatctaattttcttgaatttatgattattttatagttgctatggcaaagaaggaataaaaaacgactcaatatttacacaacttcagttgagaactgttggattgggctagctttgagcttaatgagttgttatcttcactaattaaggatcttcacagtaatagatagttaggtattgagtgttttacttgcaatctcctccgtcatgatgctttgt

SEQ ID NO: 49579 - DNA, 1149 bp, Cannabis sativa
accactattgactgagttgctagagtgcgaaattctttagtttcataagaaaaatgaaggagaatggaggaaagggcacaccgattggtatagaatcagggagaagaagaaagagaatgacagagaagaagaaagagaatgagggagaagaagacccaaaaatatgacggtggatgggtgttgttctcgtcggaatttcttccaatggtgggtgggagaattttgtcgtcttctcgtggtggtggggatgttttggtcgtgagtggtggagaaaatgggtttgaaaaccctaaactgaacctaaaaaaaagaaaaattacacgtgtcaaattacgtagactgcataataggagccacgtcaacactccgttattaaaatgaacggaacaagacagaataccacaaatttaacattatcaaaagtttaggggaaatttttaatgtcaaaaatagttcaggagacacgatttggtaagtgtcaaagtttctgaagaaaaaattacaaattagcataaaaactttgttaaaaaaaaataaaataaaaaaaaaaacgaaaaggacatggatgtaatttgggcttataatttccagaagcttgcattgccgtctccatttagaaaatccctagaggctaagacagggagcaaatgaaagcagtgtgacgtaggtataacaaaggcatttctttaggtatttactcattgtttcattctcaatagaatctaagtttagttgaaagtaaatatgtttaagaagtccatggagctgaagtcacaccagaggttatctggtgctgacaggaaaaagcttaagaggaccatcaaggacaggttccctgctgcttccgatcccgatatggattcgttactgcctcctaaggtaagggattaaaaagaaaagaaaataccctttgttgttgttcttgttgttgctttttatcgaaaatagtattttaccaaattctaggtagagattacagtcgacaaattccaaaatcgagttattgtttatggggtagaaggtgggcttcctatgtttttcgatgttgatggtagaggtactgaagttttcccaactggtaagccactattcgccatatttattttgttaatttcggtggataagtatatgtatatatagatatagata

SEQ ID NO: 49580 - DNA, 1005 bp, Cannabis sativa
gaaatatcattatcacatgtacgacatttgatcttttttttgtgttctggcaccaatttatcagagaactcaaacgtaaaagtttcttcgggctccttcgacacatttcgtcccagttttggcaatctccatcttcgctgtgacccctgttctggcaccaatatatcttcttctgttgattgttttcgaaaagatgggaagaaacttttacgtttattgtcagacttgagtacagggttgagtaatgtatatctgaccattgtagaatcttcaaaagcttaattaggaggtgggacaacaaatagtattcaaatctatgtcttgaataataataaagagataagagtaaagagagtaacgagaagtttaggtatgagcgaattgatattgaataataaatactcattttatatagatacacataaattaaaaagaagaaaactatgtcttgaatattaaattaaggaatattaaggacataaaagaaggtatatatttcaaaataataggtgcacacaaagataagtagttgtaatatttgaaatggaatatataatttcagcttctgcaagcagcgaataaattatcaaattaattagaaggtatagaaaaataaataaataaattataaatgaagaaaaattaagatgactttacacgtttcatataaattctttagaatcaaaatctcctgataaaaaagtggtatctcatactgtgttatataaattaattaaaatttgacacacattacaaaaaactgttacttttagtgactagtttttagtcacaacataatttttttgtgagtagtcacaacaaaatgttacttgtgactaaaatatagtctttagttacaagttgtcactaattctgtaggagtgtaaatgggtcaggtcggatctgatccgacctgatcaagatcatgtaaggatcagccccaccccgccctgctagatcagatactcggatcggatcggatcagatccgacccgactctttttt

SEQ ID NO: 49581 - DNA, 947 bp, Cannabis sativa
gtctaattactttgttttcactttcaaacataacaaactcatatttcatataatttacatgtaagaacatgacaataataatatacgtaaatactattttggattttatattttacagattttatattttataactatctattttgttaattgataatttaaatttgtgttcttaaaacctaataacctaaggagacagtattgtgacataaatagttatatttttttttttgtatttattcatcctaaaaactagtattaggttgttttgtttttaacaaaatttgacagaaatgaagtttagagtctattttgtaccactttaaaaaatatagagtatgaattattatttaacaaaagaaaaaatctaatgttaactcaaaaattcattaacattatttgaggcttgataattaatacttttgaatatatatcactatttaaacacaatgaatttaataattggataataaagaaaagatagagacttttaatgtggctttgtagttaactctacacggacaatctttttttttttgagattttatgaacatggatacaattcggtataatttctgtaagtttgaaaactgacattctttttcacaatgtgagtactgctatttataggattaggataacagttactacaatcttatctaaattacaattatgtaatgtagatattcatcacgttttatttatctacaaaataagtgggaatagtttatgtatctttatttgaaataaataactgccattctatgacatggatcttcatcatgctagttcaagatgacattttgtttctcgaggaatatgctaatggatggacacgtactgagcatgaacttaatcggggatcattgagattagaaagatagactctttagtctttatagtgattgtcgagagtgaggcttggataagtgatccctctcctcata

SEQ ID NO: 49582 - DNA, 1621 bp, Cannabis sativa
actatttcctatacactatgcaccacagacattttctttattgtatcttttccccagtttggaatattggctttaagagcaatataaatggacttaaatagtcctaaactcctttctttttctagaatatataatccattttagattcaaatttttcttctttctattaaaacctttatacaacaacaaataagaagaagatgacaaagagaaagaacaattcaacactaataaaatgcctaaaattttaaattaacattataatggattgaagaccaagttcatatccatttaaagtaatttaagaatttctgagacataatttttcttgtaaacaaatttttctttcagcaatctaaataatctacactaattttgttttttctatattttcagcaagaaaatagaaaataaattgtgttttatgacaccaaaattctaaaaaaatgaatagttcaaatttttctaaaaaaagagaaagcaacattctttaaaaaagaaagatggctacagatcaataaaaagaagaattattatctgaaattagcccctagtaattctttctttgcttgttgcttgatccttttctctgaaagacattgcacaaatcaagtggattgcatcgccaactatttgcctttcaatttgcagcttgctcaactcccatatatatacactatgatatgatatgtatatatatatatatatataataataataatatcttggatttgatattagaattggaaaaggtttctctgtattttattgtaatttattgtatcccatcaatatataactgaaagatcatcaataacctttaattcatttaaccgttagccttatcaaaattgtaaaataattaaatgtgaggaataaataaaaacgttagtcataataaaaaaataataatgaaaaactcaataaaattaagaaatgaaagtttggagaaaacatccatataagctgccacgtcaactcctaaaaacactcctttatgttgatatattgatattcaaaataaattttatttattatttttcatataattttataaaaaaaattatcaataataaataattaaaaagaataaatttatatacaaattgataatatattttataaaatataaaaaaaataaggaaaatacatcatattttaaatatttttatatacattagtattcatatataacaaaaaaaaaaaattaaaatgcaaaagtttgtgtttgtcaatagcattggaaagtgaaaactacattttcattggattttccttgccagccaaactaaagtccaccactttcacttagccaaccttaaaatattaagaacctaaccaaacatagaaaactttcagattctcattcccacttctcccattaccgcataccaaacagccccttaagaacaggaggagcattctactcgaaaaatacaagaataatttgtaattttgttccttgaacttttgacaatactaattttagcccttcaaatatatagtttgttaagaatcccctgagctattacatttgcataaaggagaaattttataaatatgggaattgagggtatagtttatttttttatggcataaataaataacagtatagggttat

SEQ ID NO: 49583 - DNA, 1224 bp, Cannabis sativa
ataaaagactaattacatcaactattaaatctgaaaaagaggaatttggattgaagggagcagtcaaagcatttgtcaccatgagggcatcagtctcgacttgtgtaaccggtaactgttgttgaatagcccaattgagactgtggaagagtgctttgccttccatttcatgaaatttaaaattaccaacaattggcattgacatagccgccacaacgtgtccattagaatctcgaataacagcccccacacctgttgtattcattgaaggattgacagctacatcaacgttcaacttaaagccgcctggagttggaggggaccacgattgagactgagtttgtgcacgttgctggtgcgaagctgctggtgcagaagttgaagctgtcgtcgcctgtggttgctgatgtggcgctgctgatgtagaagcagttgaagcatggtgttgttgagctgctcgataattctgaagccaaacagaggcaaatgtggccaaattctgggctgatcgtgcagttgaaccatgcactaccttatttctctctgtccagatggcccacatagtacaaaaaatttgttccatctcaaacttagtgtatgtggttgaaagatgcagcaagtaatcaccacttcgcatcgaggtacaagcatgccaattgaacgaaaagttctgagatcgccaaacagccttggcatatttacaactgaagagtgcatgccccgttgattcccaagcttgtctacagatcgagcaagtcgaatcggttatgatcttcctcctaacaagtgaagtagctactggtaatgcgtcatggagaactcgccaagcaaaaattttgacattctgcagtatgtgtagggaccaaaagaatttccaccatgacttgaatttacaacaactatatgtatatgatttcctcaattttaaaaaatactagtaatgaattatacttacaaaattaaaaaaaaatatgtgaaaaataatatttttattatatatattataaataattatattgtatatcaagtaatatatgataaataactatattattatgataattaatacaaaaaaaataaattattttactaatgttctttcagtgttgatcaagtttatacttaaaatatatgcatgcaaatagtttctattcctcaatacaaatagttatgaaaataatttgcttggtgattattatttaatatataattattcataaagag

SEQ ID NO: 49584 - DNA, 826 bp, Cannabis sativa
aaaaaagttaggtacggtattgatcggaagtgactattaaccaatgcttgttatataatatattaatatatatatatatatatatatataaattaggtacatataatacaccctgaaaattaattagtaagcaattaatctgactaattttatagatcaatatatagttgataaaaaaaaatgggcggtgtaagagatgatgaaaaagctaaaccattcctagtgaagataaggaaggaagaggttgtggcaccaatagcttctacgccagagcaatggttaccattgtccaacctcgaccttctattcttatcaaaaaccgatgtagcaactttcttcgtctttaagaagcctgttgtaacaaacacgccaaacctcgatgctccttctttgattacgaatatgaagaagggcttggctcaagtgttagtgccattctttccagtagctggtgaactagtccacaactcggttggtgagattgagatttggtgcaacaaccgcggtgttgattttgttgaagcttatgctgatgttgaacttgaaaaactcaacttgtataaccttgatcaaagctttgccctaggcaagttggtgcctgagaagattagtggcattcttgctgttcaagtatgtattaattgtggttttgtggtgattattatttttttagttcaatctaaagtaaatttatgtgcatatttattaccacaaataaattttaaaaaataaaatagctttataaaatagagaattgatagggagttttttttaatgaggtttttttatttttacacttcaaacatttttttattttttttttttt

SEQ ID NO: 49585 - DNA, 724 bp, Cannabis sativa
atagctttgagcatattatataagctttttatgcatgttgttcaagattgagcaatgttttgatgcttaaaaaggaaaatgtttgtaacgtgtatgatgatttctgcactacagtgtcttttcgaaatagagagcgtatcacctttgatcatttagtttctatgaagaaacccaatgaaacagctctaattagagttctgagaagtggtgaagaacaagaatttagtatcatccttcgacctgtaagtttttatattggatatgtaaccaaccttgtttttggctaaacaatgaagttattggatttgggttgggtaatgaatgcaattatgtatcactttgtgaatgatgcagttggacccactagttccagttcaccagtttgataaacttccaagttattatatttttgctggattggtttttattccactcacacaaccatatcttcacgagtatggagaagactggtataatacttgcccacgtcgcttgtgcgaacgtgcacttagggaattgcctaaaaaggctggggaacagcttgtcatcctttctcaggtatgcatgccttttcttgttcgaatatggactaagcagattataggtatctaatttcattttggtacatgcatccatgaattcttcaggtgctgatggatgatatcaatgctggttacgagcgccttgcagaaatgcaggtaccgtcttgatcatccacttgttt

SEQ ID NO: 49586 - DNA, 557 bp, Cannabis sativa
ctctcgatcgaataggctattaagcttatgaacatcccacccaccatctgaagttaacaatttagccacaaatctgtgattccagtattagaagagcggggctttggtctgaactcctttaagtggggaatccaaggatcctcccaaattcgagtatcccttccaaccgccaccaatttgcatgcacctttcttttggatgttcctggttttaatgatgtttttccaaaacctggaatctgaattcttggaaccacagttaaggaactctttaccttttaggtatttcacagtaagcactttgcaacacagagattgacttccattcaggatgttccacccccacttggctagaaaagcttggttcatttatctagatttcttgaaacccaatcctcccagggattttggaagatacaacttgtcccaagctttgagaaagagcccgcggttatccttctcaaacccccaccaaaagtcacgcaccatactaccaattattgaggccattctattggagtatttattgtgttttgtgccctaaataaaacccattac

SEQ ID NO: 49587 - DNA, 1787 bp, Cannabis sativa
accatttttgtcttttaattattactggttggatttaactgcttcgcacgtgacctgtaatataaatttttttaaaaaaatttgtaacatgttgattttttgtcttagtttttcatgatttttgtaaatttataagggccaaatttatttattcattttgtggctctaaaaatatttatgatattttacacatattttatttttataaaatagaatactttaatttttttaaaaaaaaaaataattaatacataaaatacttggttaattttataaaacaaataagaaataagatttttattaagtttaattctttttaattatgaggtctactaattattttatagggtgtaaataattttttttttaaaattaatacacttttattatagttatagattgatagatattgtctcaatttaataaatttatttgttatatgtgattattattactatctaaagaggttatataattatcaaatacaaaatattcacttaaaaaaaataaagaaaccttattaatttaaaattatatttgtcattgagagactttgataaaataatcacctccacaaatatttcacatgagacaaaatataaattggagaacaagcttatttagcattgaccttaataagtaatgtagtgtggtacttgttttatcaattgggagtttaactcttttttttttgtaattaatttaatatgtattgaaggctatttatataatttaattagcggaattttaaaaatactctcattttttatataggttatagatatatatttttttacaaaaattaatatcgtatatatatttatacttgtataaataaactttttttatttattctttatttaataaaatattaaataaatcatttctaattaaatgtgaaataaataattataaaataattttttatttttgaaagaataacaaaatgttaatgagtttgttgttcataaaaaaaaaaattaatgtctagtaaaggctaattatgtaattcacatagtagaagtccacagacattctcacttttataaaaattatagatataatatttcgaatataattttatatataaatattatattgataagttgagtagatagaataaagaaaacttttcaagtggaagaaaatatttatttttccactataattattcggctgataagaaaaaaattagattattttgaactaacagttttactgttatattggtgtttaaattactactaaaaaaacatattagtaattaaatattgttaataatttaaaaaagtttttttacttacttttttttggtataaaaagaattgtatagaaaaaaaaaattgatccaacaaaaattttcatatcaaatatgaaaaattattatttttttattattattttccacatttttttctttaccactttccttccccactaaaatctaacttcaaaatataccactaacaaaactacatttaatataatattgcggtaatatgataataatattattttcttttttaaaaatctcaaaatgataaaaagaaatttcgtaaaaacattaaaaaaaatagataatttgtgtaattttttttttgttgggctatttcaaaaatatgagaaaaattattaagattatgataaatatggtataaaaagtaaatgccactaaatatgtgattatttaaccaatcaaactaaatatatggtttttaaaaaaccatataaaatattaaaaaaaaaactgaatttaaaattaaaacttaattaaattaccataaaaa

SEQ ID NO: 49588 - DNA, 2099 bp, Cannabis sativa
  modified_base (27)..(40): a, c, t, g, unknown or other
  modified_base (1498)..(1503): a, c, t, g, unknown or other
aaaacagataggggtgcatcaatatannnnnnnnnnnnnngtgcattgtagaattttccaaaactatatatatttgaataatttttagtgtgcttcttattgcactttgaaaaaagagtgtattgacacatctcctacaatttcaacatcatgaaaatattttggttcaaattttttcattgagaataatgcactaattttgaacaaatttaaaatcaaataattaaaaatataaattcttttatcaaaaatcttttattttaaaaaaaaaatcttcaaactatatatgttttcctattttaaaaatagaccaccgatatgaaaaaagttgtacaacattgtttttataaaattaattgttttcattaattaacatttaagaaactataattggaagatgtttttgtttcataaatagtaaaaaattagtttgggatagacttgaaaaaaaaatattaaaaaaatcatataaagaaatatcaataaatatgtatgttttgttataaaataatatagaataaagatttattgtcaaaaaaaaatatatatatatatatatagaatagaaaaagaaatagtagaagaaagaaaacaaagagaatgagaatgagagattgaatgagaatttcccactagtttattccaatagagtgaatttttatttttacaaaaatatgactagaataatgggaaaccaaattaatcaaataaaaagaaatataatcaagcatttatggtggtaattaatgcattgatttggacatccataataatattttataacaactcccccttaaatgtccatgaaagttgcctcattaaaaaccttgctgaaaaactcgatcaaagaaaaaagagtgtagtgtaaattaacttcccctcatttaggcattcgtggagattttctaatcgacgaattccgatcttgtgaaccatcttctcaaatattgatgttggtaatgactttgtgaataagtatgcatgactgacacttaattgaatatgttggacaccaatatgcattctcttgaaatgtattaagaagaatttggtgtaatgtgttttaattctatctccttcaatgtaccatctttttagttgattgagcaatgcatgaaatattatctccataaaaaactgttggtgttgatactcttttattgagtgtaatctatatatttcctaaatatgttatgccatgatctcactctcacaaattctctacttgctacataaagtacaagtatgttatcatgatttaaagttgtcttgttaaaaatcttgtcaggaaaacccagtgggataaaatccgagctaagagaaaagagtgtttcacattcataattatttgaaagatgcctcattaaaaaccttgctaggaatattcagtgggacaaaatctgaactaaggaaaaaagagtgcaacatgaatatgtctcccctcatgcacacataatctataattattttggtgataatatatctcataagattattnnnnnnacttttaaaatatcaccatatattatttatgattatgtattatctataactccttcagagtgtatgtgtggactctaaattatagatgacgagttcctgcaatatcaatatttatctatctaatagaatcattcatgtgtgtatatacaactttgttcataccaaagtttaaatttttaagtaaatatgaacataacacattaatgataatataaatttttattcgcgacaataatggtactccaagaccatatatttgttctattcttgttgtatgatcttaaataaattctataattcttgatgtatatgaagtacttcatgacttctctacttatatacaaactatatacatttaatatttctcaatatacaaaagaataaaagtctattcttcaataatttataatataatcaaaaactcttatagagtctatcacaaaaaataatttacaaatttatattgcatagacaatcatgcgtgttttttaaataataatttacttacatgatttcatacaaaagatctttgttatatagtacgtgcgactttgaatttatatcactttgacatgtattaaattcttctagaattt

SEQ ID NO: 49589 - DNA, 1729 bp, Cannabis sativa
ccacttggccaacttgtgggcatcacttagcttgtaacgtcccctcttagcacgcacgtaacactaggcattagcgttccaaatcctctttcaataaaatcacatggcctacccaaaagatcgatcaccggttttgccacatatgagtgtgtagctcctaaattaaataacacactataaaataagttgttgacaagaagctagcttgttaccatagaaggactggttgcaacattagcttgagtgatggcaaacacccgagcaggtacgggttttgcctttggcttctgctcttgtttcttaatctaagggcaatcattcttgaaatgtcccaccatggaacattgaaatcatgtcttccggttgcactcacccggataatgtttcttacaacgtgggcactcagggtaagagtaaccttggcgtccaccgttgccttggttcccacggaactgcttgctctgcctcgaaccaccaaatgtcgggttagcctttcttttctaatcagtggtggaatcaccaccattgctgccatagacaggagaaggaagagtgggggtcccattaacactcggagtcacacaaggctcctgaagaaacttaaccgcaccctcggctcgaaaagccttgttaaccatctccgcatatgatgtgttgcttcattagtaataatcacccggtcgtgtctaattttcaaattcaaacctaccagatatttctacttcatggtgaagcccgtaggcacaatacctgaggccagcttggccagacggtcaaacttttttgtgtactcagttactgacataccgtcagtttgcactaactcagtgaatcttttcgcttagcactacagactgcctcattgtaatacttggtactgaataaatctcagaactcttcccagatcataaaagtgacgtctcaggtgagggacaccaattccaaccacatgagggcgtcttccaaaaactgaaatgtggcgcaagtcacccgatcattttaaactactcccatgaaattcataattctttatatcattgtgagccactgctcagccttcatcacatctggacctcccaagaacactgaagtgcttgcttacgcaacctctcatatagtggctccatacagttgccagtaacaggttgttttgctagcaccgcatgaactacaatagcctgagcttgcagtggaggcactttaggaggaccctggtgccttaatctcttaatttcttcatgttgctggcggatacgatcttgtgtttctacaaatctctgctcctagtctggaggtgggttcacatgatgaccaccctgaactctgccacggcctcggccgcaaccacggggattctggggaatttgatttccttgaccacctccgatcttgaccctattaccctggctccttgtattttgttgggcgtccatttaataggacttagcctgcgaacccataagccaggcaagtcagaaagcgatcataaaaacttaatactgctcttatggatttttaggcaacacatttaaaataaataaatataatctaatatacttcctaacatgctttcataatcacatataatactaaacaagtacgggcttactgaaccgtgagccgagctttctctgatgaagattgtacatgtcttggcgtgctttggtagataaacctagcggatctaatacgaaaattgtaatgccctaatgctaaggcacgctacagt

SEQ ID NO: 49590 - DNA, 1309 bp, Cannabis sativa
tagtatccaattaaccactttgcaagttgggattactgcaagagaagagctaaaccaaaatcagccaacaacctaaaccaaaatcataatatccaaccaccacctattgatggcaaggatattcttgtggtaatttctaaagggcctcatctgaaaagaaccagtagaaatgcacagaaacagtacataaaccaagaaagaaatcaaaattcagctcccattattttcaccgaggaagatgcatcacacgttcaatttttgcatattgatccactcgtgataatagtctagctcgcgaacaagtggataaggcgagttctagtcggtaataccaactctattaatatattgtataaagaaacattaagaaagacggggttagagaatgctgcactaaagtcatgcgtggtaaatttgtatggattcataggagatagtgttgcgagcttgggaacaatagaacttccattaacaatgggagagtcaccattgttagcaacataagtgcaagaattcttggtggtagattttccctaagtaaataatatgataatggatcaccttactttgactagaatgggggcaataagctctatagagtacctgtctttgaagttcccaaccagtccaaagtgttaagggggatcagttaatcgcgagataatgctataacgtatagctaaaagaaagtgcaatgacccatcaagcaatgatagttataactgacgcgaacaatgaagaatttgaagatctggacccaatgctcattgatgaacaatcataacttgggcctatggaggaattagaggaggtggtaatggatcccaataaccctactaaagttgtaaaaattggttaagggttgggggaagagttaaagtagaaattaatttgtttttttaatggcaggatcaatttgcctggagctattctgacatggtagggatcgacctaaatgtcattttccaccacctcaacatagatcctaactttccaccaagacaacaaaagagacgtttacttgatcctgagagacagaatacaataaaggaagaggtcgaaaaattttctttttgatgaatcaagtgaaataggtcgacaaattattgactaataacttaattatagaggcattttatccaatttgggtttcaaattcagtattggtctcaaaactaaatggcacgtggagaacttgtatggacttccctaacctgaataaagcatgtccaaatgattattttcctttgcccataattgattagctcgttgatgccatggtagggcataaactcatgtcatttatgga

SEQ ID NO: 49591 - DNA, 1378 bp, Cannabis sativa
acgtccttagagctttaacgaggcagtgcaatttgaccattagataatatggtcaaatcaattattattggggatcatattgggtatcaacgtccttagagctttaacgaggctgtgcaatttgacaaattgatttgaccatatacgtaagtgcacgtgaattgtagttttatcaatgtccttagagctttacgtaattcgcttgatacccaatatgatcccgaagaaaaaacgttctattcacaaacaattattattggcttttataattgtttgaagttttgtttaatcgtttggtttgtggtcttcattcaaatgagctacttcatcacatgtctcattagttacatgtatattgtaatgaaattacttcaccctgatgcagttgttatgccactaacaacaatcaagatcacactaactaaataatgagaatcaaacaaatgaatcaacttattgatttgagtcagcaataatacaattcgagatttaagtcccaattacgcaacaatggtgatcaacacatgggaattgcatgatcaaacacatgcattccctttacacccctcctcactatagtatttagctgccttgactttccaggaatataatctccaataattattaattcaatatgtgatttagtttcaaattcacatattttcataaccataataatttatatttatacaaaagctttggatataatccactgaaaaatccatatggtacataattacagaagctttgttcccttgttctgatatatgcctatttctttatgaaatcaatcgaaataatgaagaaaaccatgtcccctgttaagaaatgcagtgattatttgttaaaatgaggaaaatgccactgaaaggcagtccaatgacccaagaattttatgatacgtcgaacaaacttccatcgtgatatttgcaaccagaaattgaattaatcatctctgattcacatgctcacgggtgacccctcctcccaagtttattaaaagctctcacttatggcagaggaaaaccgtggttacaagaatcataaataataagagaagaaccaaaccaaacaaaacaagcgtaaacccccgaaaaccgagacagccaaattacaatctaacacgaacactgcttgtttcaggttgtggaagctaccactttcctgcctgcattagaaaagcatgatttgggtgaagttgtcaaccatatgataagtaattaattagaacagaaaatatataaataaagctttaatttttattttacttttttaaaaaataaaatcaaacattcattcaaaagaaataaagaaagaaaaacaacagaaacatctcagcagattacaagcagctttcctattataaataaattaaaaa

SEQ ID NO: 49592 - DNA, 1103 bp, Cannabis sativa
atccatcaaaatagagtcctgtcctttggagatatagaagtcgtcgtctggttacctgatagcttcaagtaaagagttataagaaatttagccaactcctcaaagagaatgtccttttaaattcgaaaggcaggaatctcatcccactcaactaaaaccctcagcgaatgggtggccaggaacagagaacctcagctagtgggatgagtcaaaggacagaccacataaggagacaaagtaagttgggaagtctgggaagtcttaacatgaagggtggagatatgagcaagcgaagataaaagaaaacctagggatgcatccaaatgtgcggtcaagggatctatattttagggaacgcactcaagggtgctcgacttggttggcaccaaaataagggcatcatccctagaagccccaggaaccgagacggagtcctgaggagaaccgagtagccccccaatagagtcatctaccaccgagtcatgttgagatgattggccaacatctcactggttagcctcgtcaagcctcgccgccttactcctcttgcctttgccttttctctcaggtgactttgccttgagcctcttccgatgggtggaagtttgagccttaagttcctcgatggataactcatatagtttcattttaggaagatgatgagggtaagtttctgcatagcgggaagggtccttagaaaattcgatcaaaattggcttggccgtttgttttaaatgctcaaaggcacattttatgaaataaagccaaatgaaataagaaggataaggagtggggatacctagggggatcctgagctcgctagactagacagatgatccaatcaaggcttcgtccgatagaagatatttaatagaccaaaactttggtttgagagcagtcaccttacaaactttactggtgaaaacttccttaatcacgacttctttgcaatccatagaaggtgtatatttttttaaaaaaatcagagatcagaattgcaataggaagatataattataggtacgatgaataaattgcatttaagaacacccaaataaaacaaaggaaatagcatactaataatactaaaaaaaatgggaggc

SEQ ID NO: 49593 - DNA, 624 bp, Cannabis sativa
tcaagctgtagaacaattgaactagattaaaaaatggatatttgttcaagaatgttatcttaatggaattgtccataggttcatccttcgaaaccatatcatatcggacaataacagaaaggcatattaaactaacacttctcattagtaagaccgattgattagtaactatataaacatctgttgtcacatcaggatgttcttagaatgagtccccaactaaccatagagaatatgctatacattcatatcacattatatgcaatgtagaaggagtttggccaaaacaccgactctgagagcccgactaatgaatttttggctgagggaacatagttagaataaaaaagttgcatgtatctgtgcctgatattctgtaagatctcatattctgtaatttcaattaaaataacctaaacaataaggcgtacatattcttctccccttttctctgttcaatcgaatagtttgggaaaaagttaaaataattaaagctatatgatatgcatttgtactgggttgctatgttaaacgattttaaagaaattgccacaaacagaagggttgtacagaaataatgtcctaattgagacgaagagtggtatggagatagagcaaatgctt

SEQ ID NO: 49594 - DNA, 734 bp, Cannabis sativa
tcaatatttaattaacaataataatgatttgacaatatttcgcattgtgcctattagcattttgtagcaatcaagacatattcagttgaaaattgagctacaaaattaatgttccttgaacaatttattagtttttcatactagtactgatggaatatatttttattagatgataatccattcttattaataataataatatattttattgtgaatttctgctgcagcttgaccaatattctgcaacaagcttggagaaataagaattggcatccaaaagctttgaaggctcatcatactcaaccaacttacctgtgagtgagttcaagtacacaatccccataagttattaaaaaaaaatccgttctttatttctttgaatagagatgaagtggaaaaaaacataccaaaagagaggaccatgaccatgtcactatctataacagtaggaactctgtgagctactgttatgactgtacattcagaaaattcttgcctaatgatcctttgaagaatggcatctgtggaagaatcaatggaagcagtggcctcatcaagaactagaattctattcctctttaatagaactctgccaagacaaaacagctgtcgttgaccggcactccagttttccccttcatcactcactattgaacccaaaccaaacattaatatttttgtaattagaaaaaagagagacccaattaatatatttggactcacctgatgaatcc

SEQ ID NO: 49595 - DNA, 2974 bp, Cannabis sativa
aaaaaaaaaaactgcaaattaaagaagcaataaataccaaaaagcgttattttctaaggaaaaaataaaaatattgtacagccaagaataataaattcatatttaataatttatgccacatgtcatgaaaattttagaagaagagaaaaaagacaagtttatagtatatgtcccaagcgcggaacatgggcgtggaactgtgagcaatcacacaccaataacagcacgttaatggcagtgtttttttcctgattaatatataattttaaataattattttccttttgttactgatttgatgataatattttatcttatggcaaatattctcgttaacaagaacggcaaacacgattcgctctcatatgccacgcgcttatgggttaaagtacgtacacaccacgcgctttattgtgacagaatggatccaccaaaacaaaaatttcacatgccttgagcctcaccaccagtcacaacaagccacaaccacgtccacatggtgacataataggacagatctaatcgttcattgtaattttaccttactctagtttaatacaataaagttaattacagaccacccatcaaatggcctaaggataatctttctctttccgataattagtaatcataacattaacaatacccataaaaataaaatcacctaaatatagcgcaatagcaggtaacaaacgaagttataaaatcacccaaatggataaatacccataattgagggggtaaaaatcatgcatctttggactgagactttgcgtatgagacagattgaataccaaccataaaatacattatcatacgtaaactaataacgctgctaataacaataccgacaactcacaaattttctttaaagcaagtaattaattaaaaccagttggacagtaaatcggaatattttaccaataccataattggttacttactttttttcaaattaatcctaaaatgaatatccctttataaacgaggttaagttaaaaatttaaaagagtaacaaaaaacacaaattttatgtagaatcctgaagaaaaagactaacacttttaaaaggacaatataaattcatggggggttggtggtggtggggttaaatgggttattgacttaatgatgaacactacttagcaaaatcatatgagacagtggaatgatacaattaacactcaacaaccatatagtattatggcctctgtaatttgaaaactataccagagcaacgactttgaggctagctcaagtggcctcaagtgattataaaagggtgagtataatatatgaacgcttaaataaataaaaatactatgccagagcctaatgacggtattgtatcttattaagtgtttcattactacgtgacagagtactaataccatatcacttataattacaaaatattatatttagacatatgtatataatcaagaaaacataaatggaaggaaccttaataatatatagtaatcagaatggtaattaattatggctgacaagctaagagttttggggcagagtgaatggtgagaaattaagaaaagaaaaggcagaaaaatgcataccttaccaaggagcagccttgtggctgccatctgaactttgtgtaaatctgatcgggacggccattcctccggcaggtgaactcgtgctcaataaaagggcaaacagatgggtcgtaaagaggataagattggtcaaaaacccaactccctttgtaaaaatcacactggttactgctactcttacgaccacttttgcctcttcttttcgtggtctcggttaggccatggccatgataaggaacgaacaaaagtagaagaagagagagcttgaagaaaacagagggatccctctgaatcccaaaacccatttgtgaatttgctttacaaacccactcgagtgaagagaataagaatttaaatggaagaatggacctgctagaaagtactaacctctctcactctctctctctctcaatatatataggcgttaaagagagaggaaggagtagatgagcaatgtatgagtagggagttttcttttttttttctttctttcttcttttatattgggtatgctagcacattcaattatgtattacatttggctatggtttaatgaggaagaggtgaaaatgggattacgcattaaatggtccaatgcaaaaaacttctccttttctgtcaagttgtcagcttttagatttgcaagtaaattacctacctttttagaaataaataaataaataaaatagaaagcaaaagaaaggaagcgcgggatttagatggaaagtaactattgggtatgattttgtgtttaaaattcccgcttttaactacgactgtgatacgaggtcgtctctcactctcactcactcactcactaacttttttttcttttcttttgaggatggaaagaaaagaatatatatatatataatttaattatcttaaaaaaatgtgatgatttttgagagaatactaatttataggtttggcctattaataacaaaatatttagttatcctataaataagagcagtctttaatttacttttactaaatatgaatttaccacttatcaaaaaatatatataaaaatttacttaacttgattactattttaacaatttcttggttattaacaaaataatttgtcaaatttgactagtggataatgaatacggttaaattaggttgatacgattgatattatttgttatgatttcataacttaaccgtatttatagatcgtagacaatgtatatatccaaaaatcataacaaataatatatgtatttaactctttaattatttgttataattttagaacttacattattaacttaactatatatacgttttataattttagtattgaattaacttaaggaagaggtttcaatagttacatttttattgtaaccattatggttacatttttttaagccattggatta

SEQ ID NO: 49596 - DNA, 1752 bp, Cannabis sativa
tcgtaataagtttgaggcgtggtcatagtaataaatgtccttctaatacccgtcttttacatagtcatcaccatcaccttcctattccttaccttcaggattttggccttcgtcgaggtcatcgagcacgttctcggtatcctcctcgattctcggcatggattgtgcgttcttctctaacaccattcgcttggaggccagaggcgtgggagtcaacttccttcataactgtgtctaagggagttttcttgctggtgttctttcgagtattcaccatagtcgaagtgaggcaacaactaataatctttcattgtctctcaataaaagcaccaaaatatttattgagattttcagaaactatttacaaagagcttaaggaagagcaaaataataaataacagacaaatatatttttttacatggtttgagcgttaatgattcctagtccacgagtcaattatattagcctttttggcaagtatttgagtatcacaagtgtttacaatggtaactctgtattcctcttatttctctcaaagaagaaagctctttggaaatttagcatagttttgtaagtaaaaattatccctcctttgtactaaaaaatggaggtatttataggcacacatgcgggtaagggcgtaccatttacccacgtagggtttcttactcaacacgcaagaaatgccaaaaacacaacaagaccatctgaccgctagtttggtaggtaactttcccattgtgtggtgcttgatcaatgcgagatatcttgtaaaggtcttgacacgtgttattcaaaggtttttcctttaaaagtaatcacctagacaagttgttggacaagaagcactatagaggcacgtacgcgtacaaccacggtctgatgtaggggataagatctgatttgatgtcaaacgacatgcaactatcaggcctagctacggatttgaccttaaggagtttcagggaggttcgactaaggtcttccttgaccaatccattcacaaccatcaagggacgtatgtgactcttatttactcccgattacgaaagcataaggtgaaaatccccagaatcacctcggccttcgctagagaagcattctttcgggtactatagtatctttcgtaaccccgtttaggggaaggttcgtgatatcaacgtttaatctaatgtggcacccttcataactttcgtgttgaactcatttgggaacatggataacaatgtattttattaacccacactaatccttgtgtgttgttgttgatcaagaaaattgcagtatgagacataccgttccttggataggacctctgaaaagatcgcaaggataattgataaatcatcaagaggtaacattcttgttcatctttttgtttcctaatttaatatttatacatatggaggattctagagtgtggtacgaagataatcatattaaaatacttatgatgcatacctaatttagtaccacaaaactaacatctggacctcaacgcagacttggatccagcttcggtctcaaaccccgaccttgaaccctacctaggaccccagctccgaatctggggtcatggtccaaggccggggtcaggactgaggtcgagtttatggtaaatatagtataacttcacacaatctataaatataagtcgatacaaaatatagtgctatactaaataatactaaaataatccaacacaatgctatacagtacaatacaacacggtgtaccaaacaagtccataa

SEQ ID NO: 49597 - DNA, 1280 bp, Cannabis sativa
aaagtaaaaaataccgcctggcagtatttttgtaaaaaaatggcaaaagttagtataccatgtaaatttccctaagaaatatggcgcgttgtgttgggccgaactcacttttttaaagtttaggtcagcacgacccataagcacaaattgtttgtgttgggcccttattatgtctgtgtcgagctataccaggctagcccgtttttgttaagtggtccggccttttttttaatagggctattatgggctaatggcaagtattagtactttttttttaaaataatttttagtttttgaaatgtaaatgaaaatatttttgtaattttatattttttgaaatacttttttttaaaaaaaaaatatttatgaattatatttgtggatttacaaataaaaaatcttttatttttaattttgtgctttgttttcgtgctttcatgtagccctgtgtttaagcctatactttttatatcatgtctaagagcatctttgttattgttttctgttttttgttttcaaaaaagtgtttttagaaattaaaacaaaaaatagtttttaaagtttttaaaacacaagtcatgtttggttagtgttttctaaaagcaatattaaccaaaagtgaattattttttgtaactttattttctaaaaattgtttttaaaaaacaaggtcaaacaagcttaattattttcaaaaaataattttctgtttttaaaaataaaaaaacaattttttaattacgatgtcaaacatgcactaagtctttttgtttttttgtattatgtcaaatcttataagttcatattttctcgtgttgtgttataattgtaacatttaattttgtgttagtttcgtattgtgctaaaaatttcgacttaaatgtagaactttagctgtaactaagttgtgaaaactggaaaacttgaattttgctttaacaaaaagggaaggaggctttggcttgtatatatagaaagtattttcgaaagtaattttcagtaaagttctatgttgttgaaaaccactatgttgacactatatttgatcatatctttaagatacaataacataaaaacaatttacttcacaaattaataatatataacatttttttaagaaaaatgagcacattgcatatgccatgccacactttttgtagtatcatattatcaagagcttggtttaggaacatttccatagaaaaattattctatacacaaaaatgtaaggatattcccatatattctttttcccaatcaaaagttgaagaagagcacaa

SEQ ID NO: 49598 - DNA, 1305 bp, Cannabis sativa
ataatagtatgattttttatgtcttataaatgtttccttatatgttaatattttgatagttattagcattttctttcattgtaatatatgtgattaattacatatatattaaaggaaaattttcacaaattaagggggggccagggccactccaccaattcaagtacatccgcccctgcttgtgtcttctctttgagtcttcagcagaaagaagcattttatgaagggtgaaatagttagtttgctatgcatttttagtaaactattaaactattaacatttcattaaattttgctttcattattttagatatatatatatatatatatttatatatatcctaatcctaatttatacataaagatcatttatttaaaaaatattttttttattcttagaatattattctctttggatctttcacatatgctacgttacaacactcaatatgtatatatatatatatatataattataagcaattgtattatttaacttttttataagttgaaattttaattttttaatttatatttgtgagatcattgaaaaagatttgagttcttgttgaattattttaatctggtagtataacaaactaaataataatggagcttcatcatgagtgatagagtgttttttagaattggacatttttgagctgattttctagctaggatttcaagtttatttcttttcaatttcatgtgtgaaatcttccacgatggcttgggaactaatgtcaatgaagagggcattggttattacaataatctcattaatgctcttcttcacaaaggtgttgttatggatcatttctttctggttttcacttcataatttggattttattctattctattctttaaatttaatacatttttttttttgggtataatagatatagatctagaagtttatgtaactttgtatcattgggatcttcttttgcatcttgaagagacaatgttggggtacctcaacaaagatataaccgtgagtactaactaactaatttataattattcatgtatgccaagtgtttgattaatttagttatgctattcttttccaatgtttgggcttggaaatactatagaaaatagggaaatttacaaaaatactagaatttgagttaacttttataaaaatactgtcacccgaaaatcttttcaaaaatactaaaacaccagtaaaacacaaagcagaacaactcaaaacagcagtagaacacctaaaaaaataccagtagaacaccagtaaaaacttaacacagtatactgcaacatgaaacttataaaaaaa

SEQ ID NO: 49599 - DNA, 907 bp, Cannabis sativa
tcatgaccgagcttcaaatagctcgtgattgagctatctcagacatcccttgtctgaaggagtagctgaccgagctagctcgatcaagatggatgcatgcagcctcatttcacgcccatttcccctgttgcacacacgaggagtatgcaatgcatactcccctgtgtaattttttattttgtgatttttcaacttttaaaaaattattttttaatgaaaaaaaaaataaattttggcagaattttgtgtagaatttaaatttttaaataaaaaaataattatcaaaataaaattaattttttaattaatttaaattagttttaggtattagtagtctttgaatttgataattgatttttccacaaacttacctttacggttatttttgaaatttgattatttgttttgtttgttttattaattttaattataagatcagatatttacttattttatttatacaatttgaaatggtcttattttgatattaaaatattaataaaactaaaagataatctatttagaatttcaaattgctaaccatatcagattttcaaaaatttattatttttaaaatatatttatacccgaaatttgcagaaggagacacgtgtcaatctgagggaatatgaatcaacaaatatattgataattatatcaataaatataaaatgaaataactcagtaaatgcggaattaatagagcatatttctaactcactgactgcacagtcttaagcgagacaaggatgtacaaactattgattcacgtattaacgcatagcgaagcatctacctcgatgtatgtaaagaggtattaacaaggtgaattgactattataacacttagcatataatatacattataatagctaagtgtaataacttgaaggacatgattgtccag

SEQ ID NO: 49600 - DNA, 2827 bp, Cannabis sativa
agtctctagttgaggctagagtttgagatatagagggtttttttttgtttgtttgtttgtttttgctctgataccatgttagaatttggcatatgatgaataaggttcattctcttaaaaactaattggcaatgggggaggagtagctcattcatcttatatatttaattatctttccacactttaacaatgtgagactctaacaataataataattgttgactctaaatataaaacctacaaataaaactaacaaattttgctctatataatacttatctaactatactttttttctttttgatatgtaattgtaaaaaaatgttttattttgctacttactttattttccttttcaactttaaatactacttttagttacatcgctagtcaattgagctcaacaataacacaattacaatctactcttgaaaataattatgatatgcgaaaatcatatgttttctaagtgtcttcaaaattaaaacaagaatttagttacttatgttagtatttagttacatttctacaaaaaaaaaaattattatttttgttaacaattctagtttattttttatatatatttgatcaactcttttatgtacattaaaactaattttatagttactgtttactgagattttcagaataaaatataaataataagaactgaagaacaaataatcaaaagaaaaaaagtaaacagagacaaacaattttttatgtggctagggcgttaattaaccttaatttacgagttagtattatttagtagatttttagcttgtaaaatccttcgagaatacaaagaatatatgttctctaattcaactgagcaaagttcgcaaaagagttcaatccctaatccataggattcaaggggtatttatagtagtttgagaattacattaggtttccctttttcctccagtggagagtttacagaaaataatacccttaggttatctcataatgtcttgcccataaaagaagacaatcaaatgaatagccagatcggatttagattgattgggtcaacaccgtgtatgttgattctcgacaattaatctgtgaattaattgcataatatttgttataggacgttttcctatttatcttgatacgatactctgtcgtgatctgacagctaaaatttccttaattgtgcaggaatgaaaaggaaaattggaaggatcttccaggaacacgctgtctcaaccttctgatcttgtgatcataccactcatgctttcgggtacgactcacagaaggcagagggctttgtgagggtggagctaagattcatttctagaaggacatatcaacgtgggctcgacctacttttcctttgctgagggttccactgatgggccttggatgctaacttagaatctatgtgtccaatgccaaaaatgtaaataatatttatccccaagattctagagtgttgcgtatggtcggagcttgcatcattctttcaatttggacatgtggaaattaaaggataaaatcgtgacattttgaatgctactcaccgcaggaggtggctttcgtctgagatgattatttatttacgtgtcaatcgcatgatagtagaagggcacaatcatggaggagtcacttttcagaaacaactatattttttacggctattcattttttggtgcgaaaataaaaaaagagcattttcatcattgatctacggattggttttaggaacattaattgggaggatacacgcagattgttgaactctccgatcgttgaatgaaaacttgagtttttagaagtaggatcgtggatcgtgtatctcctttcacgtggattgtctttttagtataaatacccttaataacttccacttaccacttttccccatttttcaaaatttcaaccctttgaagctcataattttctctgaactttccaaaactaagaatcaaaatcaaaataaagttttcttcttcaatttggaaaaagtcgtagactttttccttcatctattgctgaggattagggcatcagagttcccacatcatcaacccccaatgatcgagacttttacagcaggagaaattatgagcctacttttcaatgcaaaaattgattcgttgatcgctttagcatctggtcttcgttaaaggtgggatcaactttcccatctacatccaacaatgattagcttaacatctctgatatcagtatctggtatgttgctctttcacctatggattgtgttttctgagttagcctttataagcgatattttcatgttttgttttgggatacgattagggattattacatgtgtgattgccgtcttaagtagaattaagcatcgcgagccatactatttttcaaattcactatttagaaattcttagaattggtggatttgcagcaaaggtgctgacaaaattttgcatttgtccaaaatccttctggttttgggttcgtcattaatttttgtcatttttctcttcgtgttgttcttaacttccaatctagaacgaataactcctgaaagttctcgtttctagatagttagtctagttgggacctctccaagtaatttacaggggaggacccctagctccctttctatgctaggtagttagggtggctaactgcttgggttttcttcttttgtacggaaattatgtctagaaaaaattattgagaagaggagataatggagcaagaaaatgctctaaaattaatcttaaatgactgtccatgagaaatggaccagcacgtcaacaagttcaggaattataataacctcaagaaatacgatatcttgcgaggtttgaaaagtgttctagga

SEQ ID NO: 49601 - DNA, 1318 bp, Cannabis sativa
caaccagatcatgaggtggaagatgaggtagatggcgagggtagtgaaaaatatttatttgacaatggtcaattagacgagcctttttcctgcgaggacctagtctcgtaggttaagaagtatgatttaacaacatttgagtggctgaatctgattcatactgctacctcaaagcccatatcaatgcagagacctcatcttccatttaccgaccccgcgatcatcctaactcaaaatattgtggtttccattcccattctttcctacggggtgacacttcctttccacccttttgaaaaggccatcctaatccactacgtcgtttcccctttttaacttaccccaaagagttatcgcataatcgttggattctatgcgatgtatatggaatacacacaagggtaaccaacagtcgaggattttagcttcttttgtgatataaagagtgttggtcatgataatggcttctactgttttagtaaatgggtcaactttgagataaacggggtagaaggcacggttttcaatatgggggattagaaattaaagtgattttatgtgcttaagatgctatggatcaggattgacttcaaccgtcgacctcgtacatcacatacttttacacttagcttttatttttgttattttgcaaaagctaatatccacttctatgttcgcaggtagactagatcaatctgtactagattaaaatcgtttggaaatcgctaaagttttaagtggctttctagtttgagatcgcgactggcactttctgtgtaccttcgcaaaattgcaagagcaaaattgattctagcctgactccaaactccagtgagaaccaatatataaagaaccctctgagaaacaaaatgagaagatagacaagaatcttttcaaacagacttcgacacaaacatcaggtaatacgatttagcgactaataataatattgtctttattttttaaattcttattctcgtgctttttttcacagatatgatgttcctgaagcaagctccctccttcaatcgcaaggcaaaggtcaacatcgcgactccttcagctgtgacacctcaaaagaggaaaagtgaatttgctaccactactgtggtcaatttgttgaggaagcagcagaaggtcacacataacaaagggaagaaggttatgatagaccatgcaaacatagctcgtaaattcgtggcattccaaaagacattcatgagcgatgacattgttgccaaaggttagggggctcctactgaggaccacctatctcgctcagctgaacgcacatcgcagttcatgacgttattttcgg

SEQ ID NO: 49602 - DNA, 770 bp, Cannabis sativa
gtcccaatgcatggacaaagtttctttatcaattcaaccctgtttatgcgtggaggagcagtctcgttccatttgtcataatcggcaaattcagcattgcgcttggaagagatgacaggagacaatttcctcatctcctcaaccttagagttgcacctttattgataaaatttatccactgcttccagtctggcttcctccccttccgttaactatacgaacctgatagaagtgtgaacggtgccggtggcaacagaggaatttcagtccttagccttgataattgggtcgaagtggccgaaatcactttaggcccagggggtgtcggaggaaggtccagcttgtcccttgacgaatgagtacttcaccttggagtcttcccatcattgaaagaggatgttcccttcaaggatcgagattatgtaacctgcctcctcaagactgtcagctgcgggactttatttttggcttccatcttcgccttcttatttgctccatcatcagaagggccagccagcttcttaatgggtttgatgggcccatcacaatcaaaactatcttcttcaaaatactctagggaacttggttcagaggctccacaaataggcaggtttggtaagatccacgatggtagtggatgtcgtctccatgaccagagccttcagaacagcttctaggtttagtactgtgggtgctagcttctgggctccacttttggaggcctggttctttctaccaacattaccgccttggacaatctccctaacctt

SEQ ID NO: 49603 - DNA, 690 bp, Cannabis sativa
ttatgtaaattaatatatagttactgtatatatgttttttttgtcgtgtgtacgtatatttgttgtttttactacttttgtgcatttgtaaaaatttcccaaattttaactatatgacctttaagtggaattcggtcctatagtgtattaagtccaagttttctattttaagtccatctcattttaacctaacttaagtgatgactatataaagaaagtgattggagaaaacttggtaatgctactctaacctaatttctagatatgacacaagaaaagctctcctcttttcttctctttatattttccaaattcaatagcctttttctctctcaaagtatattccaaaggtgagttgagtatcaggccacactattcaaggtgatactcagacctttgtagaagattatgaaaaactaacgctttttgggttaaggaaggagattccaagtttagtacatgttgttactctgcaatagattgaaacaatagttagagtactgaacggaaggacatgttatatttcattgcaaccaatgtaagatttttctaatctcttaagtgtttatttatcgttttaggattattcatatttaggatgttagattatagatgaataatcaaatatacataattagtaagttaagatcctagttaaataaatttcaacaagatgcggttatgcattat

SEQ ID NO: 49604 - DNA, 1365 bp, Cannabis sativa
tgatgatgatgattttgctcctgaataaaggtatttcagcaacattattgttgatgttaattaatttatagattatgatgattgatctctgtgttctgtttaattttggtttggtattctctctgtgtgtatgtatgaatattgaatatgattgagtatgatctactttgaatgattacaccaacgctttttatagtaatcgtctcctctcactaaaaatataaatagtttattccatattaaaatattccatttctaattttgtatagaaactattcattaggcttacaatatattcctaaaaatttttaaatagtttacaatgcccgaaaatacgtttgcaatttttttaaacatgcataataaactgtgatattatgaactcaatttttggtattgtaaactatttgaaatttttaaaaaatttacaagaataatactgtaattataacgagtaatgctataaaaaattttaaaaaaatattcacatataatttgggacgtgaagacaaactaagaatttgtaataagaaattatatttaacacttctaaaaaaaaatatttacatagcatattgtgtgcttatgcatattgatgctggtgcagtaacaggttgggaaggctcgtaaagtgttttggagctaagaaggtgaaagtttcctcttctttccaaggggagctggaggcgcttgcctttggcgcggagatggctcggccttttgctgatttgggtgtggacttctactctgataattggcaattggtgagttctctgtcgacgggtcgatgtctgtggtggaatgtctgtttttctttcaataaaattcacagtgagttagaaggttttaactgttctgtttcgtggttttgtcgttctgttaatgttgctgcccatgctctcgctaggtggggtttgtctcataattgtaatggcgtccttcggttctgggacgtgagtccccatgtgctcaccaaactgttatttttggcttaatgaagttgtttttctcaataaaaaaaaaattattccatgatgacattggatgaaacctacaacactagaattattagtgtagaatcaattttttttttttttttgataataagtgtagaatcaattgatttaagaaatatggttggttttgctactgagagtttcctaatctaataattttagatcataaaagtttgcaaattaagcaactttttaagagtgtcattaattagttgcgcatgctttggatagaaaaataatttgtttaattagataattttttatattttatgtaaaatgtatatttatttataacttatatgattttattttattttcaatgaaatttttctaaaaaatcatatacctt

SEQ ID NO: 49605 - DNA, 2383 bp, Cannabis sativa
tcaaagaggacatagaattataaataatgtcctcaactgtaaaatgcatacacaaaaagaaggcaattcttaaagggagatgtgtttggtttatatatatacatatgattgataattgattgttactctatatcgctaaataaagattttggatttggcttaattaaattggttggcctaagacttccattttgacacaaacagggacaattatgactagaaaaattaatcataatgtataacaacaagagaaatttaaatatcctcactacaatcaatttcatttttaattataacaaagcttgtaacttattatgcctacaagtaaaaaaaaattatgactaattttaatattataactaaaaaatccgtgattaaaggttttaatgacaaaaatcataatttgttactaaatgtatttttaatcacaatatttgttgtgactaaaactaaattagtgaaaaattgtatttgtattttagttataagtaactttttattgtaactatttattcgtaacaaaatttatattgtgaataaaaaattatcactatgatttttttattgtagtacctgtcaaataagttgatatataataatatgtacaactaatctatggaaaagggctaatgataattgctaggacaatgatacgtaaaacggtcaccttattgttactttgtaagtacaattcatatatggaaaatttgattttttttatgcttacatatactaaatttttttccctaaactcataatatttaatatttgtggaataagacacattttataatattcctaaaatacccttcccccatttacatcaccctctctcttcttctctcttttatttcaccacattgtcgagtcatcaggccccatcgggctatatcaaattctatttttttttacacaggcatcgggctccatcgggcccatcggacctttgtcttcctcaattttctagtgataccatcggactgatgtcaggcttgcatcgggctgcatcgagcccgacaaaatcaaaccctaaaccccgattttgcttaaatcacatctgacgaaaaaaaaaagatttgaaagcttacctttgacatctccgttcgaagttcggtggtagagggttggagtcgcatctcacggtggtcggtggcctgagtaggcggtgatttggtgctcggtggtggtgatttggtaatttggtgagggtgagacggtgagagaactacgagagagataaaggaagagagagagttgaggtttgaaaaatgagagaggtatttttgagtttaatgtaaagtggtcattttttttaattttgaaatgcataaatttagggaaataatttttccccattaatatgcatatataatcaaatttcttttatgtattgggcctcctatattttttaaaataatatatgtagagcatacttgcaccaatcaaaattaaatgatgttgtgcaccttgatttcagtataaggatgataagggctcgagatatataaagggtcatttctaaggtggttaacaaaaataatttcttaattgatctcacctaatatattttttaattttttaagcaattagatgtttttttaattaaaaagataaattgacatcatgtcaaaaagatattttttttttttgaaataagttgaaaaatatttttttttatctattaatcaaaaatactcttatattatatttcattaaaatataacgacttttgtgagtggcttcccaatatatccttactttccacttaagactaacacaaaatttacattaacctaaaagatgtaatagggatatcatctatagaagtgagtatatcttaaagaatataaaaattaaggtaaaaattaaaataagtaaagtaaaatgaatatgcaatgtaattttttctgtcaaaaataatataaaatacagaaaatcacatttactatgggattttaaaagttgtttagttaaatatgacccttttaagtttgactaatttatatggtatttcttttttttttttagttatttttatggtatttgatatgccatatatatgtaaatttagttttcaaattccatatttaatgtttttatttgtttaggtagttttatttgtcactgatgctgaaaaagtcgtcggagtttgctgccgatactagaaaaatcattggagtagctggcggtgccggaaaagtcatcggagttgctgccgacgcctattaaaattgtcgaaattagaatagtcactcgaaaaattacaaaaaaaatcaccaagaaactgttttcttgataaaaaatcggtttcttgatgatttttctggcaataatatcaattccgaatttttttttaacaccggcagctactccagcgactttt

SEQ ID NO: 49606 - DNA, 736 bp, Cannabis sativa
cctcgcccacatgttttcgtacttaaattgacgacgcttgcagttaactccagccatagtgtcaagtagcaacggtctatggtccgattccgagaccgacaagtgattgactaccgcattgggaaaaagaattctccagtcagtggaagccattcctcggtctaaccttgccctcttcatcttctgtatcccattcgaactattgccaccctttacccaagtgaacatagggccttgaaagccaaggtctatcaaacccactcgatgcaccattcgcctaaaatcaaatgagtaacgggctacatttccattgtaattgcaacattcactatcatggagcgtaccgttcatatcacctagaagcaggataggagatgatgaattgagtactaagtcactgacatggatccagaacctctctttatccgccttgttatggggtccgtaaataccgaagagcagccaagaaattcctggcgggtccgaggatatctcagcagatatcaggtgcttcgaggagtgttgaatgttgctttttactcccttcatccaacacattcccaatccccccgatagaccaaccggaggcacatagtggactccctcaaaatgaagcctcacacaagcagtagtgaacttattaagtgaaatccgaatttcagaaaggatcaatacctcgggtttgtgatgacgcaccagatgcgccaattgacgaaccgtcgcggtgttcccgagc

SEQ ID NO: 49607 - DNA, 1013 bp, Cannabis sativa
aattctgcatgtatgagcaactgcggataggatataagatagcggtacgtgggaacggtaattatcactttagatgaaggtacttaaaagatccatggaaaaaaaaacaccctcttcatacatatgaagcaattatatatataattaatgatttttcaatgttacatggggcatattttctttttccagcggaaaattggactagagatatgtggctggcgaatatttcctaattgctatttcagtgcatttccatctttcttggaagataatcctctagttttgtaattctgtaatgtccaaatgccttgcatctgctataaaaatgatcaacttacattttatgcaggcacgaagagagttgaacgatcttgaaactgccatgattggcgcatttgctggtaatattccctagacacaacttgaatgcagaattaattttcggctgccattctcactctgatagacccaacttctttcatatttcataacactctttttaaatttcaatattttcctttcattttgcaggtgcaatcactggagctataaccactcctcttgatgttataaaaacccgattaatggttcaggtacagattatcacttctttgagaataatttgtacataaacctttttcttaatcttccttttgaacttctgaaggggtcagcaaaacagtataagggaatttgcgattgtgttcggagtataatgagagaagaaggcagtcacatttttttcaaggtttgaatgtccctttaatgtctctttccttttctttattttcttttcttggttaagactctaatgtattgttatcttattcaatcttttaatcaattgctcaatcaaaccagccaaatgctagtatttttttttctctctcccaacaattttatcaatatccctttgggtgtatatttctctatagggtactgccccaagagtgctttggattggtatcggaggctcgattttctttggtgttcttgaaaggacaaagcaattg

SEQ ID NO: 49608 - DNA, 2457 bp, Cannabis sativa
tataattaacattaaacagatataataaaaaaattcattttaattttttaaaataatatataagattcatgtactcaaccaaacagtacaattcaatcaatgggaatataattacatattatcctatacaaccaaacacagtttacacatttccctacaatcatattctccttcataatattccctataatcaaattattttgaatacttcattctaaatgcccccttagactatatgtattgcaaattatttattaattaacttttaagtaatactccaagctccatatgcttataaatttaaataagcatattagttaacttgtgataactaaataaagaagctgacaaaactgcttgaaaagttagatagcacagttagtatattacaattattatgtggaattcaatgaacagcttgtactatctcggaagactggagagataatagatagtaataacttctcaattgtgattgtaaattagaaaaagaagataatttttgagtcaattactatcaaaaagattgcttttttaagttggaaacatgtaataagcatatttcattttggtcatacatcatgcttagtctctcttcgtcataacaagtgatcaagaactaaagatttttcaattacttaggggcatataaggtctacaaaaaatgatgatgaatgaattgattggtgagaacaacttaaaaaatgatgttatgtttgttcattcacatgctcattaaagagaatcaaactaatcacttattcatgaagaataaatgaaaacaaattaaggtcttccaagttgttcaaaagtgagtatattcatttagaaaatgattagaacaatattttaaacatgacccattaattgggtataaaaaaaatatcaaggctcatgcatctagtcgcagtacatactctcatacatctggctgcaatacatatttctatctggtcgcagtacatactcccatgcgtttagtcacagtgcatactcccatgcatatggtcgcagtactctcatgtatctaattgtagtacatgttctcatgcatctggttgtattacatactcttatgcatctagtcgtagtacatactcttaatgcatctggtcgtagtacatactcctatgtttctagttgtagtacgtactcccatgtatctggtcgcagtacacaccccatacatctggtagtaatacactctcccaatgcatctggttgtagtacataatctcaagcatctggtcgtagtacatacttttaatgaatatggtcgtattacatactctcatgcttttggtcgtagtacctactcccatgcatctgattgtagtacatatttctcatacttttggtcgtagtacatacttccatgtttttggtcgtagtacatactcccatgcatctattcgttacataatccccaagcatctggtcgtagtacatactctcatagttctggtcgtagtacatactcccatacttctgatcgtagtacatactcccaatgcatcaggtcgtagtacatactcccatgcttctagtggtagtttatactcttatgtcattggtcgtagtacatactcttgtctctggtcgtagtacatactcacaatgcatcaagttgtagtacctatactccgccatacattaatcacgagaaacacaaacaagctactcgtaatacacatgactccgaacaaataacatgcacccaactggtattatttttatattccctttataattcaataaaaacttaaaagaaatattttttttattagaataataataataaaaaaaaaagaaaataaatcagtcaaaataaaaaataaaagaacaaataaaagagatattttttctacttatactacttttacataaagtgtttaaaaaaaataaataataaaaaaaggctataaagaaagagggaacagataagttaagggaattgatatttttttttagcaagaaattaatacgcaagagtgaaacaagaaaaagaaaaaagaaatatgagaaaagaaaaaaatctgcattatttaagtcattctataagctttacaagagtaagtgaagatccataaatagatctacctctttttcttctaagtttcttttatttatttatttatttatttttactgcaattaagagtcattccaatctcctttgattttctgaaaccaaacatattttcactccaaccaccttctccgcctccaccaatcccatctcaaaatttcccagcaccgcattctggaacgcatccaatgcctccatcattgacgctgccgcacacccatcccttgtctcgttgccgatgttgtacgataccagcatgaccactaaagccctttttcaaaaaaataaaaaactcttattgtcttgttatattttcaccttgatttaactaaccattttatcagaagaagtagaaaaaaaaaaaaaaaa

SEQ ID NO: 49609 - DNA, 771 bp, Cannabis sativa
ttttgttttgataaatatttaatacattactctaaaaatatatataaatcaactaataatcctaaaaataaaatatgtatggtgatttaattaaggtgttaaaagacttaatttaatactacccatattttcttgtaattaatttctgaaagaaataaatgtgtatccactaatactaatttaagagtattataattttttttaacttttaatacattaatttatgtacatttacattaagatatgtcaaacttatatattaaattaaatatgggacccttaaatataatacaattgggaattttaaaaataccatcttttatgttttatttaaaagtttatgacctaaagttattatttacaaaaatacacttgttaaatttaaaattacaaaaatacactttgttaaaaaaaaaaagtcagaaaacaactaaaacaacgaaaaattaacttcaagataactataaatcaactgtaaataaaacataatacaatcaaaaataactttatgacactatcatacaactataaataaactataaaacaactaaaaaatagtttattatttttattgaagaggtattattgtaaataaaaaaaaattctaaacgtaaaagtaaaaaaaaatatcgtgttagacatatttttataattttttttaaaatttttggtttattatataaatttctctaacacaaataaggatagtataatataattatacatttagggcatttttgtttggtatgtcatattgtattgtattgtgtt

SEQ ID NO: 49610 - DNA, 1464 bp, Cannabis sativa
agatcctggtaaaataattttcaacaaagttctcttaatcaatagagttgtgctcaagatcaaacttttgtcatctcgttggtttctttacaaccaatcgatgggagtgagcactggattacacctattgtatgaatgattaagattaatgttgatgctattgtgtttgagaataaaaatagttttggttttggttgggttgccaaaaatgatgaatgctgacttgtggtggctaagcttggtataaaattaggcttggttagttcggtgctggcagaagctcttattgtgaaagaagttttcagttggctgaaggaaaacatcatgcgcaatggggttgttgaaacagatagtgtggttacagttcaagctattcgtagcttagtgcatatgacttttgtttttgggttttgtgtttttgagtgtcaggagctattgtttggtttacataatgttgttttatgttttgttaatcaatctactaatcaagttgctcaatatttggctagtacatcttattttaatgctgattgcagccatagtgagtctactactcctattgctttgcatgatataattgataaggatctgttaataaattttgcctatttttgttaaaaaataaaataaataatttatagcattttttactcgattattattttggattttatatttttaaattttttattttgaatcttgtgtgttgtaaaagattacaatttgaacctaaggacaaaatatataattgagtgttaaagcattattattcattcatttataatagttttcattataccctatattaaaaggtactttgattaagtctggaccaaaattataatgcatgggtataatattgaagattttaaccatattacaacaaaaactcaaaagttcccaatttttttctgtctttctcgtaatttttaaagaaaagtattaattcaagttcgctggaatagtgagatctgaatctctctctgccactgcctcatctctcacgccttcgtcggagtctttcctttctccactgtcgtttcaatcctttcgttgtcgtttcatcatcatgttgtgttaatctttgttctcttctgccggccgatacgtacgtacgtatctttcttaatttcttcaatgttgcataatattattatattaattcgtcttcgtcttatttttctttttcatggttaattactccttaatgtttaatgtttatgtattatatattatatataatatatatgataattattcagcaaaatatatatatgtatatatgtatattatttgatgcccttcatttgtttattatcctttataattataaaataggacaatttaatccctaaattttcctagcccgtgagaccccaatttctccgtaggaaacggatttctaaaacatagtccttagtttattttattttatttttcatttttgtgccacagattgtatat

SEQ ID NO: 49611 - DNA, 1482 bp, Cannabis sativa
  modified_base (93)..(97): a, c, t, g, unknown or other
ataatcatggaataaatcatgtgaaccatgcaacattagatgttatttctgatctatattaataagtaaaactgattatattgaaatgagttnnnnntagggcataaaacccaacaacgtgaacccaatagtgtgatacccttcggcatttgcaagcaagttttatgtttgcactccttgcgcacttttagcctttctcattgaaagccaaaagattgctgccatgggattcaacatggcttctgcttgagcaaaccgctacgcaaggaaaattatttgtgcatggatgcaggcctagctttacccctaagaaatcaacggcctcccacactgcaaatggcctaaagtctcccttacggggtttgcacggtgaaaaggatcgttgggatatacaatctagatcttgcctaggagtaaattttttctatttacagaagcctaagggtggctgtgcacttccgaggaaccccccgaaaggatggtacgaggtagggctatgcccaacactcttctttggaaattgaagaaagacccaagttaaactccaagaaaatgaccaagaatttgagtcccaaaattcccagctcatttggggggtatgataatccgactgctgacagcttcaacatcttacttccatttgccaaaatcattcagcccaacatgcaataagagcagggaacgtactcaaccaaagtcttcccgagagaaatacgcttgagttcttccttcaaaagctaagatcaagagtgaacccgtagataagaagcacattcgaccaaaattttccaaatcgaaaagacacatctgaatccctttttatacatctccactagcttcgcgtagagtttggcccaacgagttgcataaaaggttagaatgagaagctgacaaggaccaaagtaagaaaaatgtctaagtctaaggcaatcgcagacaatgctctcgtgatttgactttgtgaaaaaattagacccgaaagaggatcgcgaaagaccgtgtttcatggagaggggccacctcctggccatctccaaacaaggaaatttccaggtagcgagccaaaagcacaagcacagcctcaagaaaagaagggtcaaactaaaaagcggttcttggattgaccaagagacaattaaggctaaagggaaaaaggtgaaacactggctggaaccaagtgcttcagtaaacacaaccagcccctagatagtatatcgcaaagaatcttcaagaaaggaacatcaaaaaggaagatcatattccattactaaaagccccctgcggctagggcaaagtttaaactgtctctgcggctaaaaaagtataactaagagggggatatacaagaaaaacaaacaaaacaaacaaattttgaaatgggtcggccagaggttcatgattggacattgcctgacgaagaggatgggcctgccccaaacatccactctaccgtctctgtgtaaagtgttggaaattatttta

SEQ ID NO: 49612 - DNA, 824 bp, Cannabis sativa
tcggcctcccactctcatccccaatcttcaccttatctgacccacacagtcgctggtgacggaaccaattggctccaaaatcaactttcctccatagttcttactgtttctctcttgcacacctctcccaccccgaacaaaacttagaagtgattcgcttgttttgttccttttctctcccacgagcttcgtcggattccaaacgaccaaatggatgaccaaacacagacgtttatcttgtcttctcagatatggtaccaattgtcttttagatctcatcttctcatttcagatcccatcttctcatcttcttgtatcttagatctcatcttcacgtaggatttgagacttgaacgacaataatggcgagggtttgctttgcacctgatcaagatgtggggtcttagttcttgacccttaagtgagcaagcttctccactgtctcacctctctctctctctttcatttattttttttttttacagatttaattgttcgatctaagatttttttcttacggatttgaatggagtttgtttgtttctgtgggatttgaaactgagaccatggtagatgtttatatttgtttaattgtgtttgaatatgagttatggggttgtgtttgaatcaggatggaggtgatgatagtagtggtggtgagcagctgtggttttgacgctggtgatggtgtgcagttgtttcgaaaatggtggtgatggtgggcagttgtgagggttggtggtggtggtagtcaccagttgtggtggatggtgatggtggcttcgacggggatggcagccaagtttagagcaatgagagagaga

SEQ ID NO: 49613 - DNA, 2441 bp, Cannabis sativa
ttcaataagctgttttttaactgcttaccaaacacgtttttgtcacaacttttttgaaaagctgtttttagcttttctaaaagctgtgccaaacggacccataatcagtttaaattattttatgtaatttatttgtattcattatgttatagaactgaatttattttaattataacttgtttgcgttattctgtgttgtttgtctttattcattatgttatagaaccgattctattttaattataaccaatttgagttgttgtgtcatttatttttattcattatgttatagaattaattctattttaatttatagatgagacatctaactctggtaactttttcgacgacgacacaactttgttcacttttctaatgatttttccaacgacgtaactttttcagtgccaatgtcttcttcaacaattttctggcaatatttttattagaggttttatcaaatttactaatggttttttttatttgtcatattttaaactttgattatttttaaatctcatatcttttacattatttatttatgtcatataaaagtaaactacattaatttttctcatatttatgaaaaaaaaaaccccataattttaacttaaattcttaaaaaaaagcaattttttttttataatttttcccactttttaatcattagttttttcaaaatgtgctaaaggtcaagaaaatatccttatggtataagaacaacataggtgtacccaccataaaaatgatatatatttacaattataactaacaaattgtatatgccaaacatgttaaaaagcacttctcatactaaaagtacttctaaaatatactatccaaaaaatcttgaaaaaatagtacttttactttatttctacttaaaagcttacgtaaaagctataacaaataagccttctatgctcccactaacattctaaaatgaaacaccaagcactaaatattaaattagattagtgaattgattagttagttataaagttagttaggttgttggttgtcagttagttagttggttagtgtgtttgtttctcttgtaatctcagctggtatataagttgttgaacactttgaatcattttagttttgatgattaaaagttctgttgattcaattctctcttcctctctttctttctttcttcataactctgtttcaagctcactcgtatcacaactagcaagctcttcttcctgattttggatatggtttgttgttgatgtgtaatggcacgaggtggaggaaatcaagcacgaggaggagttcatactcatgctaatcgtgaatctgaaaacaattctaatgactcgaacatgttctctgttcttggagaaaattctcgatcgactaatgctaatgatctgtcgaatccatactttcttttcaatggcgacaatccaggtattgttcttgttcctagaattctcaaaggcagtgaaaattacagtaccaagagaagagctatgctaattgctctggttgctcgaaacaagattaaatttgtcaatggaaagcttcctcaacctgatgaggatcgtgaagactatgatagctggtttagatgaaataacactgtcatttcttggatacttcatgctatctctgatgaaattgcagatatagaaaaatcacacttggattgttgtctccctacctgctgatcaagatgtcattggctgcaaataggtctataagatcaaaattaatactgatgggagcaaagaccttatgcattacaagtgttagaagaccttggatattcaggaagtaagcctatgaatacaccaatggaagccaatctcaaacttggccaagatgaaaaagagaagttggctgatccaacattgtatagaaatattgttgggaaacttcagtacctaacagtcactagaccagacatttcttacttcgtgaacaaactgagttagtttttatccacacctcgagtcacacatatgcatgtagctcaaagggttctacaacatgttaaaagctaccctggacaaggaatcttctttgctgcaaacacagaagttaaattacatgcctacactgactcatattgggcagtatgcccaaatacaaggagatcaactactggtttctgtatcattgttggatcatctatcatcgcttggaaaagtaagaagcaacacaccatttcaaggtcttctgcagaagcaaaatatagagcaatggctaatactacttgtgaagtggtttggcttctctcagttttgaaaaaattgaaggttgaacatgtagggcctactctataatactgtgataacaaatttgcctagcatatagcaaccgatccagtgttccacgagagaacaaaacacatagaaatcgaatgtcatttggtcaggaaaaaggttcaacaaggtatcattaagacagttcatgtttccacaaaa

SEQ ID NO: 49614 - DNA, 537 bp, Cannabis sativa
ttgcaaatatctttaaaataataataattttatttgctttgtcatagagaaggatgttcttaaaatttgggattgtagggtaaggtgtatgggttttatcacaaaactaattggcaatgataagaaactcatgcatcttataaatggtgttataatatgagattctttacacacattaataatacgagactctttaacaccgaatcacaagcggctctttttgttgtctttttgaacctgttctcccaaagtgtttggtaagatacatgacgtttcatctcaaaactaatttgtcaataagaaaagtagccaatgcatcttattatatatgatatttagtgtacacacctctctaacaaacgcatatcgaaaatgtagttgtgaacttgactcaatctttattctactaagaagttggtagttcgaaccattactcttgacattaaaatctaaaactactttcgacatcaagctggtaactgaaggtgttagtctctccccaatctatcttgtggggtatgcctttgctgcattttt

SEQ ID NO: 49615 - DNA, 974 bp, Cannabis sativa
  modified_base (55)..(61): a, c, t, g, unknown or other
tacttttgtttctttattgatgttcaatataatggattacattgaaatggagttnnnnnnngggcataaaacccaacatattctacttccaggcatgcacctatacaaacccattttccttggtatggagcggcacaaactagttgttcttccaaagatttttaatctcatgatttacaagtgttcatgagcttaaactcactaagtaaacccctttctcattttcaggttgatggtgtgaggtcccaagtcgattgtgtgaggttccatgatctctcgctaccagcaacgtggggtgccttattggtgatggtactattcgcgttgactcgccttcaccctctagtgtgatagaagcaatcaattcattttgttgtatgtccactgggacctactctggattgttctcctcttacctcacctaagatctttgaccatgatcaccttcttctccagcgacaggtgctagggggtttcgccttgaggcaataagttgagcattgtataggttaatccccacaccttaaagaccgtgagagcatctagacattttatgatgttatatgtaaggaagaaacttagtttgagcttgtcattgccacaaatggcaccaaactgttgatggttgaaactcgtgaacgagcttacggccacaaaattaaaattaaaacacaagattataattaagatgaaagtgtgaaaattcaaaaacttaaaagaaatgtatagaaatggtggaagaggaatgcttgtatttcttggagttaagtgttacaataattatccaaccccttctcacatcaaagaagagggaatttataggctataatggcctggtacacaatagtggtcctaagggacatggtgacatccatggtgtaataacctagaattaataaatggattagcaaaaccctaattagataattattaatacttgaggaattatattattatatagttcaatatatgag

SEQ ID NO: 49616 - DNA, 1076 bp, Cannabis sativa
accgcatcattgtcgcatgcaccaaaagaatccatatcattcatagaaacttcaaggtcgggttcaatttcaactgaaaacggagaaatgaataactgagtttggttaccacggcatcttttcaaagtttgcctcaagttaataccctcggaatgccttttggaaaatcgatttggagacaaattttccttacccccttgctgttcggcaccagaagcaacaatagattgagataaatgataagtcttggcaggtattgggaagtggagttgtccagtttgattgttatggagagtattaattgctggaggataagtagcaaacacacttggatcattgttcatgacagcgaatggagtgaaaactcctgacagatctgagaaaacatcactggtttgggactttgtggaagcgccagtagtagcagcaggaagtgaatacatacttgtggttgcaacatgtgaaaccaacattggtatagtacgatttggtgatgaaatgaacttagatgctacttcattttgtaaactgacacctgctgtattataagcatttgttgcagtggtgatgtttgtaccagccattgggagattatgaacattatgaagtgggacagatggtgtgtgtgaggcatgtgaataagtagcatgtgcattggatgtaatggcagtagtttgagaggattcgcctataagcagtgatcgtggatgtggagaatctcttgtcttcaggcttggaattgcagaaatgagagagtttttggcgaggcgagttagcagtggccatgcatcaccctttggaaaatcagtacggtatttgtcataattggaaatcggtagagcagatccttccattgtaggccgatattctaaatcaggttctatgccattatccaatttttcaaggtaaatagagcatttatcaaggtaaatagttataattttaatgtaaagtaaataataaatatttttataagcctccacagatcaaaaattctgggtccgtcactgactattagtcataatttttccacaaagctcttattttgcatggtttgtttttgtttaaataaaaag

SEQ ID NO: 49617 - DNA, 2636 bp, Cannabis sativa
ttttttttttttggtttcttagttagcttggttggattgctatgtgtgttttgttgctcgattgatgatatatatatatatatatagttatgttagttggtaaataatattagaaatatcaatgtatggttatacattaaagattgatattaaaagacagttgctgatgaggctctgacattttgttcattatatcttgacggtgttgagaccaaatttaatcgtcctgatagaaatgaggatattgtcattcaaaaaagacagttgtctgtatttgaatcacaaagtcgaccaattagcaagaagaaaattaaacctcttgactattctgatagaaaagcagctgagtggttcatacttaacaattgtcctgaaattcaagtgtacatggagtaagtatctctatctacacattttttaaacgaaatttattattattttcgtctcttaacaagttttttaaaaacaaccaatttaacgaagagatgcaaggaagaaatctccaaaaagaatttccatcatggttttacatgaaggtaagcacattaaatctataaatctattagtctgaattataaaccttcataacaacttatttttctctttcttttatagatgtgtcatctacgtcaagcaggaaatgtcgagtgcactgaagaattgttttctttagcacacggttcaaatttcactgcgttctcttatgatgcttgcatcatcaacggtgtaaaatttgtggtagagagtcgtgatagcaaacgtaccacacaaaatagcggagtttctgtaccaggaactgatggttttacattttatggtgttctaaaagagattgtggagttgtattatttaggtggattctcagttgtattgtttcgatgtaagtggtccaacactgatccaaccaagggcaaactcattactaagaataacatcactagtatcaccatcagttctgaatggtacaaagacgaccagtttattcttgcttctcaagcaaaacaagtcttttacattgaagatccttcacagaatcataattggagggttgtgcaagatgtcaatcatcgcaaaatttgggatcatccaagtatcgatgatcgtaatgatattgatgttgttcatgataacatctcatctaattttgtattgactgttgactcaagtgaagtacctgttatgaatctacaagtacctggtgaatcaagtataattagtgatgttcactctcaatcaactgctccaattagggacaatgaagatttcattaatgatgatgaggaggaaattgtcaatgatgatgtagatgatattgatgtagttattagtgatcttgatgatagtagtgataatgatgtagttcaatattgttctagtgatgattccgattaattagttgtaattttgtagatttttttaatatattaaactcttaatttttgtcatatttgctattgtttcaaatttaattatttcaatatatatgcatatgaagttatgtctactgatgttgctcgatctcacggtggagatggtgggagtcaacctcccccaggccctagtaggatacccacaacgtgtgaggcaggtagtttttttttttttttgttaattaattacataatgattttttgttaatattctaatataattattcaaatgtagcgcaagcaaagaaaacaagatcaaagtctaaatcgctaaatttggaggaggcctttgagaataataaacgaaaacctcttgaggtcacttttgatgtaaaaggtggaacattgaaagttgttggtgataatggaaaattgtttattaggcttataggaaacattattggatttaatgtccctccatattatggttgttgggaaaatgttcctaaggagtacaagatgccaatactacccaaacttgatgtaagtatatatttttaaaatatttatttcttttttaatacaaacatttgtcattcattataactaatactctgtatttttggttgaaggaatattttcacttggatcgcagttggccttattggcatgaagtactttctagtatcgataacgagtgtaagacacgttacaaagaccgaaaatcaaggcacaaacaacactttaaggatgttggtggttatgatgatgtggagaaagctaaaaaaaatccaccagaaggactagatgctgcaacatgggataaattaatttctcattttttggatccgaagcacatagaatgatcaaagaaaaatgctgcaaatagagcaaagcatttgtatcccagtctccagggttcatcatcttatgctagtcaccgatataaaagggtaattgagtttaacatgttttaacaattatgagattattaatagtattataactatactaaaaatgcttgttttgttttctgtagatgaatcaagagactaaagaattgcctagcataatcgacacttggcatgacatgcaccataggactaatggaggatgggttaatgatactgctagggctcattacgtaagttattattttaggtttttctttaatatatcaattgtaactatattaattatttctctattaaaatgtaggaaaaattatgtgaagaaagaacaactcagacacaaaatactttacct

SEQ ID NO: 49618 - DNA, 774 bp, Cannabis sativa
  modified_base (725)..(730): a, c, t, g, unknown or other
gttgctcttatatttttttttttttttttttttttttccattttacacattaaaatcggtaggatactttttcaggttaccattgctttatatatataactacacgaaggttgtctttgtcataatgttatatattcttctttctctctctaataattaagcaattatgtagtgaaagaaaaagtatatataagaaggatattattgccttataaatagctatgaaatattacttgatgatgagtacagctatatatccatatatattataaattttatgtatatcaccccaaagaagtgcctagccttctctgctgagtataatattatttatatatattatagttaacacatagtattaactagtttaattaacaaacatatatatataaattatatatttgagttatgaacaatattcttgaagaaaagggttcggagtactcattgcggtaagtatatattaattttcttcttttttttttttttttatatatatatataaatataagaattctttacatatgtaaaaattaaataaaaaatataatatatattttttttttctttttctgcctgccgttcttcttgtcacttctaatatataaatataatataaataaaaatataatatataattttatttttttttctttttgatgaacaaatttcaaaattttgtatatattgtgatgatgaaaagtgtaaataccattttggacccnnnnnnttgcaaaagttacagattggaccctgtgttttgttaaatgacaa

SEQ ID NO: 49619 - DNA, 708 bp, Cannabis sativa
atttaaaagtcttgtgataagtgcatatgtatccaataaactttaaaacgaaggtgtgaaacatgccttcatcatttccttcaagaaaatttattacacaatactttgttttttcatgatcattgtccgaacaatgatgatatattattgctttcaattctaaaaatcagaaaaaaaaaattgttcaaatttatatccaagtcctttatgttgtgcttcaaattccatcccacaaaaaaatatcatgaacttttaatagttaaagatactataattggttatctattacagctaaagttgcatgtgcgtttaagaactttggagatgtcaaatgcaatgatggtatgtgttggccattcaaagagagttgcttttgggtgaactaaagtgaaaaatttaacgattgagtaaaaattttcatggtaaaaaatataatgtgtttcataggagaatctcttagatttaggctaatctttatctatatggtcaacaatgaattggtcctttttcacaatctattctttctcattcaggcggaaaatttaagtacacattaaatttgtgaccattcggagatttagttggactctttgatagttgaacaattttgaagttgttcttgcagctttcaaatcccatatgcaaataaaatgttgtaatacattgattgggaagctctctcaacttgcctattgaagggttcacaca

SEQ ID NO: 49620 - DNA, 1001 bp, Cannabis sativa
gagtaacagattgaagcaaccaagacatgaccatgttgttgcacctggtccaagaacaaaaaagaggatcagttggaaagaggtttaggaagactaccatcaaaaaacgcagtcttgtctttcgcagcaaaagccatggatatggcttgacgccaggactaaaaatctagtcctgacagaggagcagatacaagaacaaggcctggatgatctcctgtgctcagaaaatatggattggacaagtcttcatgagcaagttgatcgtgggatctatgacacttggttttgtcggaagagatgtgtgttcagcatggagaatgggatcaacagagatgaacccaaactcgaatttataaaaactcgtgaaagttttgaacaggttcgggtgttattattcctaatccgtaatatgtgaacccattaaatcctattcgtgttcccatctactattagacaccaaggaggcgtttggtataaggtttagacttgatgggaatgagaatgtcaaattaaattaaattttaataactaaaggtttgtatttccaaatgaatcgtactttttaaattaaaatggcggtaatgttaatctcttctaacacttagtttcaaattccctccaagtctatttattctaactctactctatctaaatcaaactcacataacaaacacctatttatataaaaacataattagaataagaatgacattctaatattttaaaataaaatcaaacaaaaaaaattattttcttttcattttattaataaccaagtcacctgatagtataattgtgaatgatgagtgatattttataataataataataattaaataaaaatatatagatatagcatagtaatgtgataaaaagaaaaatagtatgttaaagtcaacatttcatcacaaaactaataaattattgagatttttacactaggtaccaaatttaattacttttttacatttttaatacttatcaatttattaaacattttt

SEQ ID NO: 49621 - DNA, 1762 bp, Cannabis sativa
tagaaagtccaaggagtagagatgaaaatcgggtggaagcgggtaacgtacctcctagcaccgtcctcgtttcttaattatgctcatattccagcccctaccttgcttttgggttcggagtggaaaaattcccattgagtatgatgactaattaagtactcattaataagattaaaacaataaagggaatcaccctatttattattattatttttttttaatttttaagatttgagttgtttccgtaatttttatgtgaatcgttatgtaattttgggttgtaatttaaattgtttcgttaattgctatgtaaatttatgtaaaaaaaaatatactttgaaatgtgaaaatgaaacacccccatataataagaaaatattgtactctaatttaaaatgaaaataaaaaataaaatattgattttaaaataaacaaatattctacctattaaaaagtttttagcatacattaaattaaggaagattattagtcaactttgttagtataatcgatgactttatttcataataattgaaaaaactatatatatttggatcgatatgaaatgggttagtatcaccctaaccccacttcgaacttgctttgggtatataaaattgcaccctaccccactctatcacctattaaagtggataattctcgctcaatttagggtaggactgttcatcgaaattggaaaatcgaagtttaaattcagagctcgataatttgaaccacggtagaccgtaactagggaaactgtttttatatgtctggttaattcgaaccgtttaccgcataatggttcggttgcggtttgtaataaattgttaatggttaaaacggactggaccaaacagattataataaataattaatttatatatattttatttatgactatatgtatataattttgaacttttttatgtgtacttattgcataaattttaaattttaatgttatgtttgacttttgaaaatatttttatattattatttctatgttataaatctactacttatcatgttaaatatgtattttgaaaaataaaattaaaaactaaataaaaattaatacaattacttaaaattatgaataattataaatttcacttaaaccgaacagtttgttaatcctttggtttgaaaaatttattagtattgtttagttttcaatattcaaaaaatcgctagtttggttcaagaaatataaaagatcagaccaaactaactcgtaagtaaacactcctaatttagagtgggtaccctgtacccatgagtacggtcctcgcccgtcaaatttggtcactacggaagactagaaaaaactatttagacccgtcttttacgccatatatatattgaaaataacctataagttttattggtatagactatagacttacaatataaaagtaatcaagttttgtcctatcttcattgagatcaattaatatgagaagacgcggcccagtgaagttgacacagaacggaatagacatttttgacagtcaatatgatatgccgtgaagacaatatcctatcaattcccttttttctttttctttttttcatttatgtatatatatttatatttctatctacgggtcctctcataattagtgttattcactaatattattattagaaaattttactttttatcctaatttttttatttaattaaaaaaatttctaaaataaaagtaaaaaaaaaattaagtgtaactataaaagtacaaaaaaaaaatatatatat

SEQ ID NO: 49622 - DNA, 1850 bp, Cannabis sativa
  modified_base (1778)..(1781): a, c, t, g, unknown or other
ataaaatttaataataatttgatctagagatgttatgacaaaactggttacattttctgtatctattcgtgttaaaaactatcttaaagttggtcatattaaaaaataaaattgttgaaaattaagctcagggtcctattttttaccattttagaaaatatagggtccattttgtcatttaacaaaacaaatgattcaattggtaacttttgtaaaacacaagatccaaaacagtatttacccttattattattattattattattattgtgtcaataattagatgattcaattttaatttatagggagggagaataaattttgatgcacagattgataactttgtaaatacaaagcaagacattatctcccaaattggtctcctggctaccatgcaattgtttgaaaaatctctcttctcaattacaattggctcaaatgacttcaccaataattacttgggaccaaaacagatgttggtgtctccagacaaatttgtgagagctatgatttcaagaatgaaatcacaacttaatgtaacaaacaaaaataacccacttattgttttcatcacatttttttctttttgcaaagaaaaaaaaaatactttgaactattatatctcacttatatttgtcacatattgtagagactttacaacttgggagctaggaagattgttgtggttaatgtgggaactattgggtgcataccatatcagagagatattaatttcaaattaggggacaattgtgcagcattgcctaatgagctagctcagtcattcaacacccaattgagaagccttgttctagagcttaatgccaatctcaaagggtcaaagtttgtgtatgcaaatggttaccatgttatgaaagatatccttgacaactacataaaatatggtctgttttattattattttttctcaagatgtttagatgtatgctcaactatttgaactatgctttatgattttgttgtattttatttcttttgttttttaaaaacaggttttgaatatcaaaactcttcttgctgttaccttgctgggaggtttggaggtctgattccatgtggtccttcatcaaaagtgtgtttggacaggtccaaatatgtgttttgggatgcatatcatccttctgatgcttctaatgtcatcatagcaaaccattttctagatggggacactactttcatttcaccaatgaatattagaaaactattctcatcttaattcttaaaccaaccacaaaaggatcaccagaattttttaataaaatataataataaataatatgaccttcttccattatttgttaataaataataaagaacataattactacaaaaggtcattattattttttttaccttcttcagttatagaagaaataaagacaatgtacatgtaatcatttgatgataatgaagcaaaacgttatttctacgaattatgatataaagtcaaatcattgaagtaggttgctaaaggaatctgaaaccagattcttgagcaagagagaatggaaatgtgaaaatggtttgcttaatctctaactgattggcgaagcttttaatttatactcaggatttacaagctaaaaaataacaaactaaagcaattgaatacatttgaataacagaaaagggaagctaacaaatttatatttctaactaacttatgttattctatcattccctcaagtttcactggtttactttagaccaagtgctaacttgtaataccctgaggtttaataattagattagcaacnnnnactagattaattatgtattaatagtaaattatattattatataatttaatatgtgaaactatattgata

SEQ ID NO: 49623 - DNA, 2020 bp, Cannabis sativa
catctcaatttctttggtgacccaaaaaaaatgcgagtcaccaaaaaaggataagtttgtcgtggtatgaacacattatatacttatttataatgttaaggatcaaatactttaaaattcaacaccctacgtctcatggttgttattatctattaattaggtgtaaatgagattaaatgggttatttagagattatgggagctgatagaaagtatcaccattattaaaaatgctcatacaacaaagttgacaaaatagtaactagttattagttactaaatttttcaaattttgtaaataactttccaaagcatttcaaaccattctcacttgattatataaaaatatatatcacttatacatattataaataatataaataaattctcaacatctatattttcattatatttgaattttaaaagattaaattgtataacttttctttacacacttaattagatgataatataaaaaatattacaaaatataagtaactttacttatatgttacaaatatttacacttgataattagttacttatatatttaatttaaatgttatattatttaataaataaatattataacatttataggtatatgtgaaaatcccacattaatttattttaactatttaattaactgcatatgtactatatgtaaataaaaaattataggcactgattgattttggaaaagcagggcacacgagttaataaagtgttaattctaattaatatatagttttctagttgtcacataatgtcgcttgtcctcttttggtatataggaactattccttttagccttaaccaaaggccaacataagtaccaaaacaaaagattaatgtgattattttattttattttattttattgagcacagtattattgtggacattgtcctacatgaaataaatagtagaatattgagctatatataagaatatggactatttcacccatcactaattagttttgtgatggaactctataattttcaacaagtcatacttagtactacttaaaagtgacactttatgattagttagtgatattttttaaaaactactatcttaaatcatatggaatctaatacttaattgtactaataattttagacgctaagaaggatattaagtattaccggtgccttttatcattttcttttagaaaacaaccatacgcaacttctttgacttcactacacaacttctttgtaaattggagaattttcacacttacggttttttttttttaaaaaaataaataaatattttatggaaaaattaaaaaataagaggaaaacagtttagagtaaccagaagaagggtaactatttaccttaatactgttttttcatatacttttaattttttaactttttttttttttaataatgtttccaataaaataattgttttggaaaaaaaaaatcatattttcacataaattgtataaaaatctataaaaaaaatatataattttcacttgtacatttgatatctttttctccaaagttgacaacatattcttttttatataaattatctatgggtagaaagatttttaaaatatcttggtaatatggtagggcacgaagaaacaaacttcaattactatgacttaaggaagacaaacaaggcctccactttggcccagaattttctttaaaaaaaggtcatatttgtttttttttttttaaatttttttccaaaaaaaaaataaaacacttcaatttttactatccgtaactaaagtttacaagtttatacgtatatttttacaatcttgtgaacaatatctacagattaaatacaaaattgtatcaaattcttacaaaattgtaaaaagcttttgatccgtatatttgtaattaattgtaaatactgcaattttatttctaaaaattggtaagtgtataatttttccgaaaatgttgatacctctcttttctctttttaaaggagttatattaggggtaagttgaaaaatatctcttttattaatcaattaa

SEQ ID NO: 49624 - DNA, 1116 bp, Cannabis sativa
aaatggtttaagtatattttgcataatgtaaaatatgctagcatatttttagtgtaccatttatttttaagcatatattgtcaaatttcccaattaaaatgtgatggacatagacaatgatgatgtcattgtcatcattgcaaacatagattgagatgctatattgaaaaaaaacaattattttaaaaagttatagaagaaagtatatattaagtattaaataaaattacaatatttttgaaatttaattgcttttaatgtttttaaattaaaattttctaatattaaatcattagattttgatccgataacaaataataaaagaaaaatttgcatttttatgcttaatttagttacttaattaggaaaaaatattaaaaaatacgtttttttttacactatatcaaaaatatatttatataaaaaatatttaagtcaaactcaaatttttttttttatcattttttggccgaaaaacttcatttttattattatttttttcaactgatagaacaatcgcaactcatataatgtaaaaataaaaaaattttctaactaaatagaaaaattaatcataaaaacttaaatatttccaatattatctattcatagataatacatattaagagtgcattacataagtaagtactaaaagatttttcagaagaaagaacattaatatacgttcccttcaaatttacatagctgacacaaaataaacttattacctctatagtgtatgaagataacaaaatggcctattagctcagctggttagagcgtcgtgctaataacgcgaaggtcgcaggttcgagacctgcatgggccaattaatttttcaatttttaaatattgctgcgaaggcctgatcggatctacttgtctggcccattaaatttgtagtaattagatcagcaaagcccagctattcgaattcaatatgtgaatttttattgaaagcaatgaataattcatgtaaaattacattatgggaaattgtaaagagaattttttttatggtattaagtaaataatgctttaaggttaaggttatgggttatataattttttacatttgtatgaacttttttatgccatacttttgtaaagaaatat

SEQ ID NO: 49625 - DNA, 2499 bp, Cannabis sativa
actcgtagcaatttaccgaatactcagcttaacttttttctacagttctgtttttttttttcacaacacggtcacaactgttttttcttaaagaacaattatactaaattagcccttaataatgaaaagaattattaattattaaaaaaatatatattaaaaattatgacaaatttgtcaatactaataaaaaatatgataaatttgtcaatactattttttcttggaatgaaaatagaggctaaaatcggccactacaacgttcttgatagcaagagaaatagtgctattagaaaaatgacaatttgaccataaacaccccttgcgagtaagacagtaaataatatcattagcagatcatttgataaaataaacttaaacatcgataatagaatttaataaagatttgcaatcgtcaataagaatattaaaaataaaagagaaagaaaataaattttgaatcgcttgaaccaccaaaagagaattataccctaggcttcctgttgaatccaactaagtgcttctttaaaagccaacaacttcagcaacagaaagaagaacacttccataccaaaactgagtgaaagctcttaacacacgatctagctttataagtttgattgctttaaatatagctccattaatgttaattttgattttattaaatgtccatttagtccattgtcaatactacttaattatatgtattgctaaagtaaaatttaattgtcaaaaattaataaaacttgaaatacatatattttggatcaaatatagttcatgttatattttgtatcaaatttttttagaaatttgaccataaacattgtgcaccatattaagaccttcatttttgaatcaaaatatacatggtaaaaaatggtaatacactacttataaaacattctattgataatgttgttatatattttttaaaaatttaggatgtcataggaaaatcaccttgacatgtttatttgaccaataatattatatggtaatatataattgaatgcatttgcgatttttcattacactctttaattctcaattaaattaaataattatgaaatatatattataatttattactcacaatatattttttttaatatttataattgttacacatacgattctaataaaaaagtatattatcttacgattttattgcactcgtactctttttaagctgttaagtgtcaattacactcgttaagtgtcaactcaaaaacacatgacgacatattttagcttatttaatacgtgatccaataatatgtcgtcacgtgtttctaaattgataatttacagccaaaaaaaagtacgactgtaataaaatcgtaaaataagctatttttgccactattttttttttataagagtcatatgtataacaattataaatattaagagaatttcgacacaatttttttttattattatatacctcatcgccattggtaacttcaattaatgatttctaagctcctcacattattaaatataaaccaagtggactatatttatattagagattcatactgttaatgagtgaaaataaaatataattggttacttcttttattgttaatttgtattaagatggaactcatgcatcttaacatcttaactattctaaatttctaaattctaatttttttttttattattatataaagtaaatgtgtaaggatatgatgtatgcttatcacccatcgtttattattttttgatataatattattcttcattacatattgtttgatgatcaaatttttatttacttttatataaacagtattatgaagtttatatatagatcaatacagtttgttatatagaaattttttttagttcatttgaacaaatgttctgcaagactgtaactgtattttatttattaatattagtattatttgtaagaatgctttgtcaccaattagttgttcgtatatttatcaattttgcagttaattaatgttgttgactgatttaaatattaatggtaaatatatttatttatttattattttttatgtatttattttcattgattaattatctgcaccattaatatttttggatttggtgaacttgtatcattaatgtaaatataaaataaaattcatactctgttcaaaaaataaaataaaactcatacctgtcccaatctatcttaccaacaataaattgactcaaaattaatgttatgtaataattaatattaaaagatccactcaaatctgtcttaattaggcctgattttatatcgaacacagtgccagcttagcttacccaatacattaaaaaaaaattatatataaattacaatatgtgtaaggatgagtcacctggcaaaatattaggtctaagtgttaaaaattgtcaaatttgagatataagacaacatgatgatgcctctcaaagatgatgcaaaatttgtactaattaacaataactattttaatttttattattttatatttatatttatat

SEQ ID NO: 49626 - DNA, 2717 bp, Cannabis sativa
caccttttgcactctaacatgtttaaattttgacattttattcatctttagatgctctaaaaaaacacctttttcttgcgtaattttaaacattggtccatgaatatgattctcaatttctccggagtctggtgattggcgctagtatatatatataaacgtctcaatattacaacccaaaaaaacaaaaaaagcaagtcaaggactcaagacaataaaatcatgaataatatatgccaagagcagagcagtaaggaatacataccgcacctctctgaacggaggtaactgcatcattgagtttgtgggccttccaacaaaccatcactctcctcaggaatatagaatattcttaatttatgcaccaacaattagtgagtaacgatgggtaccccaaaaaatttaaggttgatgtcttactggtctttacaaatgaattcttccagaggcattggttctggtcatcttcgcaagaatcccattgcctggtagacattactaagagtagcatctgctatatctgaagcttttgtcgcaccttcagccaaaatttgatccaaataagctgaatcagaaattatttccatgtagcgaacctggatgggatcaagatgatcaaccaaggcatcagttagaaggggtttaaactttccccagctcatatcttgacattcatgggccacttcctctttcgtccttcccgaaacaagctgatatattgaaagaagattgttgcattcaggtctttcaggattatcaaattctaggcctgaaaaagagtcagttttgcagcgctttatcttgttcactacaacgtcttttggatcaagaagattgatccgagattgatctgaaggggcagacttggacatcttggaaagaccatccgtcaaagacatgattctagctccagctggtggtataagaggctcaggaaccttaaaaagggaaccccctcgccctcctaatttcttccacttccttcctccatataaatggttcacacgttcagccagctcacgtgttaactctaggtgctgcttctgatcctccccaactgggacaaagtcagactggtataatagaatatcagaagccatcaggacaggataagttaaaagagcaacccctacattttcatctcccgccttgagtgatttctctttaaactgaatcatcctgttcagccacccaataggtgttgcagaacttaataaccacatcatttcgacatgagctcgaacatgagattgtacaaaaactgaagcctttgatgtgtcaactccgcaagccaaatatatagctgctgtatccctggtggccttagataatttttgtgcatcatacgacaatgtaatcgcatggagatccacaatgaaaaagagagtatcatatgtattctgaagtgaaatccagttcttaattgcaccaagataattccccaagtggatggatccagtaggctggactccagacacaattcttttcctcagagaactagatggagttttttcaactgcaggttcagtaggcaaaacactacaaacgcatcgaaaaccctttaaattcctttggcgatgagcaatgatggcaggttctttccagtacttgctttgaaacctaccattgcacagtgaagtagcgaggcaaggagatgaggtagagagattaaggaagtgtgagaaaactgagcgactcatcttcttctccgagtttactacatttatattgaaacaaatttacatcaatcctttccctcttaatccacactcaactagatagccaaacacaaaaacacaaatatcgaatacccaaatgattctgaaaattaaaacatacagatccaaattatttaaaaaacaagacctaaatagtaaaatggaagtttaaacagaaagaattcaagttgagctgaattcccaggatttcaaagcactaggcaaaaataaagggacagaaatctttctacaaacaccaaatgcttgaaaagttaaagaaacatcttctcaagcaagcaacctaactgagagtattttcacaattaatttacttgctgatagcaacaaaatttacattcaagaaccaagacagacaataatactatccatgatcatatgtaaaccattttaaaaaaaaatatagttaaattctctatagcagaagaaataagtctcataacctacctgataatgttagttcctgctataaattgaacccaaacaaacaaggctaaaataatatttaaagtgattcgcttattctaatcactctaaagtacaaagaaaatgaaaaaacaagcaatcaatttcatttagatatgaacaagaaagcaaagagagaaaatgtaagaccatcaaagaacagagaaactgaaaaactaaaggaagctttggctttatttgtcttctcttagcatgaaaaataaatgggatggtgagaggagtatgatttcttcagtatactgctccataaaactaaaattccaaggcaactacacagcagtatcatgttaaatactaaaagcaatgctgaagagatgcaaatgaataaacctagagaagtagccaaaagagagtgccttaagagacatagagggactgccttgagtagaagagagactagagaggatgagaccttgctgtctgcgtgagtgaagtggaggcgacccttctgtgttggtgttgctgctgcgtgcgtgaagagaaggagagagagag

SEQ ID NO: 49627 - DNA, 980 bp, Cannabis sativa
  modified_base (656)..(656): a, c, t, g, unknown or other
taaaaacaataataataaatagtcatataaccaatcaataactcaattcacaataaagacccacattcttaatatcataaaatatggaagttataagaaaatgcaatatatatatttttttttgaaaaaggaaaaatgcaatattgataccatcaaataattcttattttccttttctcctcttgactgaagactcgaaaacatacaaactttgtatatatgggctcacatgcattcatttagtacttgaccacttattttctttaatttggggcatcaatatgaatcaatcaaaaataaatatataaattttattgaaattaattacgtgagcattcaaatatccatatacctcattaaagccaaaatctatccatgagagcatcaagggcaaaatgcacatacatcttatactatccatgagagctattattcttcaatgtcttcaaagagagtcaccaccaagatctttgagcaaaagtttagagagcactttgtggagctaacccctttttcatttactagagaaactcatatatccccttttccacacataacacacatatatatacatgctattactgttataaccctaaggggttattaaccaatagggtttagtgggtcttttatggtgtactataatttaatgggcnaactatagtattaagggtgctctcatgtgcctctaacacataattaagttgttaaccattccattatgattattagcaatattaggcatataattaataattgtgtattatggaattaaacctatgattgtattaatccattataataattctaacattctcccacttggacagcacaatcaagccaccataacgatgtctatcctctcatataacgtaaacaaataaaacatacataacatcatatctagaggatacatatatcatgttgaattgaccttgtagatattcaattcaaagcaatcatcaacaattaatccaaac

SEQ ID NO: 49628 - DNA, 2132 bp, Cannabis sativa
ttcattgtctcgaaggagcagctcggagatggttctgctgggaaaatcggagctatccttttcaaacgtggaatgaactgaaatccctactgcttcgtagattccgctcccaaactatgcacgaaggttcagtgtatgatcgtggtgttgttttccatcgaggaaagaaagtgcaagagtatcatcgaaggtttaaggttgaagatgacaaagatcttgtgttttcagatctcctaaaggatattgaggctaagagtaatgaagagaaggatgttaaaagcggtgaagagatggacatggcgataaaagaacacaaacgagcgtttgctagactggacagcttcagggataatgtcactggttctcaaacctacaaacagcgagttaggggagtagcaccaccgatttcaagtgtgacacagtgggtgtcaaatgttaatggtgatgaggcagttatacgatcgaagcttttaactgataatgaggcggaggttgatgcggttgtagattttgttcaataggagccatcctttgctgacgaggaactgtcgcagaaggaagatgaggagatctcagaagattgggaaccagttcgctcatgttcatccgtgatggagctccttgaggaggtccagcgggtataccgaaaggaaatagaagtaaaagattccactccatcagtgacgttgtctggaatgtttgaagctgtgaagatcaccttcgatggagaagaagacaaatggccaaagaaaaaaatgccattgaatacgatgccagagaagaaccagcaagggaaaacgtcgcgggccaagaaatatttacaggagttgacatcggaggtgttggcggcggaggagaaaatatcgctagcagcggtaccaccaccggcgtcgaatgggaagagtcagaaatggtcaaggtaccccacggttcaggcagaagagatgatgttgaagatggtgcctgggagagatgagtttggtgaaacaaacttctcaaagccctatcacacaaggcctaatcccttaactttttgttcatacccaaacccaccaaacttggcccacctaagcaagacccttaccctaattcattacttcaatgggcgggtccaatgggatccttgcatagcccatttaatcaatatttcttcacataaaagacccaaacaatacaccatcaaagagcatgtgccatttaatgaaaggtcacgtggcattcctctctaccacaaatggcccaacttattccaatttactctaaatctagcccattatgacacatgtctcaacctaattttttcaattaatggatctggcctttgggacccaagtaaggtacaacccaatatgttggcccactttcctatctcctattcatcttcttgtcacagtagggcaccttcccaagtatctcctcttaccatcaacgtccaccatggatggagggacccaagctcaaactcgaatactttctttttggtgtcgcacatggcaacagcagctaccatgattctagccagggggaagaaacaacttcagatttctcaagttttcccttctgtcaactcatcaaaatctgtaagttccatgtatgtttggttcttccatgtgtgggatccgggtcgagctctccaatctcttttctatgggaattttttcttttgttcttcattattttcagcttgttgggaaaatagaacgggttctcttgggtctgactatctcttggaaattcttctctcatatctctcattcttctcggcttgttgggatggatttaattttcacaaaggaaaagtaatggtggacttggatgaacttcttctccctcttccttcctcgtatagaatttatgggattaatggagttcatgaagaggagcattttgctatatgtcactggatatatacgaaagaaatgctcaaattccttcggtggcttttcgatagagagcgccaaatacaactccaacactctgattgtgcatccaagacatcacaaaataccactttactagtttggttctttgacagaggtcgcgcacagcatggggctctcattggtgatttcatcaatcaccttgaggacaaggtgaaactcgggcgtccggtaatgttaggccttgggatt

SEQ ID NO: 49629 - DNA, 2940 bp, Cannabis sativa
  modified_base (1159)..(1161): a, c, t, g, unknown or other
  modified_base (1977)..(1994): a, c, t, g, unknown or other
  modified_base (2097)..(2106): a, c, t, g, unknown or other
  modified_base (2196)..(2196): a, c, t, g, unknown or other
gaatttcttgttatttttttttttctagcattagtaatattttttaaaaattattatcttatcaataaaaatgtactaaagagattattaaacacactaaagatataatgctatctcttctttgctataaaatttgatctagttaaagcttataatagactaaactggcagtttattgatcttgtttcgtagttttaaggcttaggacaagttttgtggatgggttcgtcagtacatatctacgacatccttcaatatttgccttaatggaggaaaaattttggttcttgtctgttttgtttacttcgccgataacggttgcgccccctgtttggtttccccttccaaaatattgggtcaaaatcaatttcgacattaaaattggttgtgactcaatgtgcgtggtgattttggctagagattacaaagagtcagttttgtgagtggttatcaacacgctcaacttctcagacccagaagttgtgacctgtttattagccctaaaatcaactattctttgaaagcattcatctgtgataattgagaatgattccgcgacggtgatcaacacactgaagggaacttgttccgtttgggatattagtaactatgtacttcaatgtaaaaaagttttcaaaccttttaattagttaactttcgtttatatctagactgtgtaattttgtggtccataatgtagctaagtggactttatgtattgatcgtgagatctaactttatctagttttaatatatttactcattttattaaaaaaaattgttattatattttcatttttatatgtttgtaaaggttatgatttataaccacataaattatgataatgttcattatgtttgaaacaatgatgaagaatcatttatatacattagtaaattatcgagcataatatttttacttaaaaagctttttttttttgttgttgttgaaggtaagatttgagcagttaaaatttgaagagaaattcaacatggtttgaatttagcttattacatacatatatattttttttttaattttcaaaggtagtaccaatagtttccttaatatacaacttacataagaaaaagaaaaataggccaatatgtcaagatattttatatttattgaataaaaaagggtaaatagcggcataannncccaaaattttaagtttgtaagcatataaactcaatgtttatttttagcggcataagtacctaatatttgcaaaactgtaattttcctccagttttgtcagtacaaactctgctttgaatatattaaaggaacatttggaagtaactaatactacatgtttatgtttagacccaataatcaagaatctggaccttatatgtggtctgtttaagaaaataatagagtttgtactgacaaaattagagaaaatttacagttttttcaaacattgggtacttatgccgctaaaaataaacattgggataataccacttacaaacttaaaactttaagtacttatgccactatttaccctataaaaaatgtaagtcaaactattgattcgactatgttgactttttcttatagtaagtttgtataattaaatagagctacttaattattaatcattaatttgaagttccataatatgccattattacttgctatttaaggtgcacataattataaacgtcctcataaaacttcttaatagttttcttaaattggggaaaaaataactaattacatttttataagaactaatctaagggtgtgttctattattatttaattaaaaaaataaaaatatttctaaaaaacataactctcaaaattaattcacatttttaatatgtgaaaaaaattatactctatgtatattctttttgatcaacatttggattccaacccaatatttggatcacaacccaacactacaaaaaacagctatttttagtgacaactttttactcacaacataaattttttgtgannnnnnnnnnnnnnnnnncacaataaaatgttacttgtgactgaaactcagcatttagttacaaactgtcactaatttagttttggtcacaacaagtattgtaactaaaaatacatttagnnnnnnnnnnttgtaatttttgtaactaatacctttagtcacggaccttttagtcacaacataagaatgatatttttaattagtcacaattttttttacntttagtcacaacaaaagttgtgactaaatgtaagatcttttgtagtgttgcaaaatcccgactctcagctgcaaccctagtcctaactcagactttggcttggatattcggatctcaactctggaccccaatctttgacttaaacctcaactcaaaatttgtttaaaaccctatcttaatttgataattattaattttgaataaacattaattaatattgtgatataacaatttaatgtagttcaaatattagatgagtagccacatatattaatatataaagtatgagtgtaagtagccagggccggctataagcctgtgcatcctggtctattgcacagggcccatttaaatagggcctaatttcttgccttctttttaggttgatttttttgtttttttattttttttttatgaaatgaaatattaaatgaagtaaaacagtatgaaaaataaataaaaaataattattactttctactttttaagtaaaaaagttgttctcaatcccacatttaatggtaatttataactattttatcaaactttttttattccattcatttattttttaaaaatgcatattctattcattccaaagatattatttttttatcttatatataattccttgcaattagctatcagaagttaaaaattaagagaaaaaaattatgaattttaagtagaaggttaatgttagcttaaagttgtaatgggatttaataaaatagtttaaatttt

SEQ ID NO: 49630 - DNA, 2164 bp, Cannabis sativa
  modified_base (28)..(30): a, c, t, g, unknown or other
taatcatcatacttgttagtaaatctannncctagtaaaatattcccaacacttctcgatcaccttctgaatgttatcttcctgacacatctttaggatcccttgcctttatccctcacaataattattccaaggatttaagtggcatttcctaagtccttcatctcaaacttagactttaacatctctttaaccaagtttaccttagatctttctttgttgattatcagcatgtcatttacatataataacaggtagattacatcattgataccactcccatggaagtataaacaaggatcataataacttttattaaaaaccctactttttcatgaatgcatcgaaccttttgtcgatataaggacttaaaaaacttgcaaactaagtgcccatttcctttctctacataacccttaggatgttccatgtagatgtcctcttctagttcaccatgtaagaaggttgttgttacatctatttgatctatctccacattgaattggtttgttaaagctaacattaaccttatggtcttgtacttgactatgaggaaaaaaattatgtgtagtcaattcttttttttgtgtgtgaatccttttactaccaatctagcattgagtcacactgcttcatctttagttcaacctcctttttgtctaaagagccacttacagtgcacaataccctttccttgggtttttggaacataaacctaagtcttgttcttcctcaaaaagtccatctcctcatccattttcttgttccacttcttttcatccttgcactttatagcttcttcataagtttctgatttatcttctatacttttggagtgcttaagagtgcgtaggttgtgtcatcattccaaatgttaaagctgtatttgggatctggatcgtcaatttgagagatcaggtctggactgttagatcgtatttttatgctttgataccaaatattgcacttcgacttgggatccaattttcgatatgatatcatcaatatttctattagggttttatgccctaaataaaacctaatctatataatcttatttattcatcagtaaagaaatagaaatctctttccactttgtcaatttcttaactcacatgtttttgtttacatgattatatgtttaaattttattaaatcaagtatatatagtcattcacaattacagttatgtctttatagtgaaaaataattatgattataagttccgaacttatttacttcctaatatttaccagtgtactagatttacactaacgtgataatcagtgacgtggttacactaagactaatggtatgcttctaaggaattggtaaaatatacttcaatcgaatgtacaggcttacattggattggactggtattaacaataaaaaagatatcataatcttacggttatatctattttaagttaattaagatataggctaattctacaatttgattattggagattatgccctgcaaagcctataaagacattattgattataaatattagttgaacatcttcatataagcttgaattgaattataatcattaatagtttaattctatatttatagaggattaattatagaattaataaataagattacttggttaatgagattcaataaataatctaacttattggagctcaatattataggtccatggtccccgaattaccaccttatacaatactgtcaaggggatggataaaactatataatgatgttcagaaaaatttattttgaattgtcaaaatattaattatttattttgcaataaataattaattttaaatttattatttaaaaaaattagggaaaagataaagagttgtctagacaaagacatcacaattatcttgttaatacaatggtggtgccagtcactgtattaggacacagtgataggtgcttatgtgataagatgggccccactatatttgttttttttttattcgttaattaatttaaaagataaatatttatttaaattttaatttaaaaagtagttacagatatttatggtggtttaaatattcactcaaagtagttgagagatctctccaggtagttgagatattctctcaagtggttgagagattccctcaaccggttattacatagttactaattgttgcccctgattttgcc

SEQ ID NO: 49631 - DNA, 927 bp, Cannabis sativa
gagtcaataatatgtgtttgtagatacacataaataagtcaatccctttgttcattcctaccattatcagagaaagaataaataactcattcaataaatttgagtgaaaagtgggtaaagtcttgtcttttgacatggtttgagtatttgggattttgttaagggtataatcaggttttattcctattgttcttgcggctgtttcactgttctcagagatcatgagtactcatcatagacatatgtctaatttggaggatcaatatgagtctttaaacattgcggatgaggaggaagaggggctgttattggatggagaaaatgatgatgtatcagaaatcgatgataggtggtgcttagtcgggcgttttcttaccaatcgatctattgattttaatgctatgcaaaacaagatggctcaattatggcaaccggggaggggagtttatgtgaaagaattggaatataatctatatttgtttcaattctatcatgaagtggatattgagcgagtaatggaagggagtccatggacttttgatcgagttcctctaatctttgaacgactgaaagttggcgaaaatccacgttcggtggttcttaataaactcgaattctgggttcaaatacacaatctgacaaccggctttatctcggaacgtgttgttcgtgatcttggaaattacgttgggatgttcctaaaatcggacccgaataattttattggcgtgtggcgagactatctccgtgttcgggttaaacttgatattacaagacctctgaagaggaagaagaagctagaaaaacagggggaataatctgttatgcgcacttcaaatacgaggatcttccaactttttgccttatttgcggaatacttgggcattcggacagattctgtgaaaggctttttgacactcctagaga

SEQ ID NO: 49632 - DNA, 1034 bp, Cannabis sativa
tatgtggggtttcttggggaccaattggaattctggttcctacaggtcccactgaaccggtcaaccggttcagtgtaggaaacacaaaaaataacacaaacaccacaatttgaccccaaatgctacgaaaccttccagagtacctatttacattacactaagaagaattcatgcaataaaccaaccaataacctctgtagcaaaattcaccatgtgagagcaaagtttgagctctaaagttcaaactttattccaacacaccaaaaaacacccaaacagacttaaaccagcttaaataatattaaaataacctatgaatactaaatcaaacaccaacaacaactacataacccttaccctaaatatcatgcataaaacttagcttgaaactaaaggaatcacaaagagatgaggttgggaggttaccttgggttaaaatcactacaaacttgctagaatactcagaaatgagctgaagaaatcctcaaagtgctgctggtttctcaaggatttgagagagagagagagagggtttgaagagagagtgtgtgtgtaatgcttctaactttgaataattaattaaaatataatgtttatctagtaaaatcctcaaataacattcagcttaactaattttaataatattccacaaaaggacaaataacatctcatggtaaatgactaattttcccttgtttaagccaaaaaataaccatgccacctaggggcattttggtcaacttattacctcgagtaattttgatattcccaatgtctatctttattgcactgttataactaaaatactaaaccataagaaaatgtgattctatcggccaatcgtcgccttccgatgttgtcgggcataaaatatgaaaaacatgcaatttcatatataacgtaaataacacatctataattcaaatatatctccataaattcatatatcataattataaatctaatttcataactaagccttaattatctactaatttatcatattaaaatcaagcggtctttacaattatccc

SEQ ID NO: 49633 - DNA, 1697 bp, Cannabis sativa
gacaatatgtcgatgtttacgtcggctctaccattttgggctgaagtatggggacaagaatgatcaaatgctatgccatgatcagtaacaaaccgagtaaaagcctgatattcacctccaccatcagtgtgaaggttcttgatcttcctatcaaattgattttcgactaaaaccttgaattgagtaaaggcaagtaaagcttcagctttagtccttaagggatatatccatgtataccgactataatcgtctataaagtggatgtaaaacctaaagtttgtgttggataggacaggtgcaggtccccatatatcggtatggacaatttcaagaggagctttagcacgataagtattaagcttgaaaggcaatcgatgagatttaccaagttgacaggcatcacaaaaactttcattcatgtggacagcttttacatttaatttctttaaaacaaggtctaaaacacgtgtggatggatggcctaatcgcttatgccatgtatccttgatttgagacactaaactaccagttttagactggtttacattgtttttggaggaagtagctaaaccagaaaaataacttgactgtgaagaagaggcagcagtgtgtgtttggtgatgtgtggaaggaaattcgagttggtaaagcccatctttaagtctcccttgaagcaccacctgctttgtcaccttgtccttaacatagcacaaatcagagaaaaattcaacaaacacattgttgtcagtggttaattttgagatgctaacaagatttttagcaatatttggaacatgtagcatatctttgagagacaaaattgcaccagaattagttgataaaagactagtaccaatgtgttttatggttagttgatttccatcaccaaccatgagtgtttccttaccattgtactcgtccttctgctgcatcttgtttgagtcagctgtgatatggcttgttgctccactgtcagcataccatgcctcatgatccagcgtatctggtgaggctacaaaagcttgaggtcctgctgggcctttgttttgattactgttgtgaccaggtgaggagcccatgaaagtttcatcatacctattgtaacaataggctgctgaatgtcctatttgccacacacttggcaagtgggcttggaaccagagttccttcctcctcctcttcctctagatctgccacctgagccacgatttccagggtagtttcctctgttgtagtttgagcctctgccattgttgttattgttgtgactactgttgttgttattgtttctgtttgccaagttcgcagaaggattgcttggattacctgggttatttcccagtttacttgtggttgagaaggatgtaagtgttttccattttgctatcaaagctgagaagcatatcttgtaactcttgccatgatgttgaaggtcttgcttcaataagcaaaacgattgggaggtagtccagatctagaccagacaaggcattcgagaccagtaacttttctgggtaaggatctccagcaagagcaagagtgtcggcccactgccgtttttgtcgaagatagtcggccatggtgagagatcccttcctagatgtttgaatcttggttctatattcatccatcttggcctttgagtgagagccatagagagcttcaagagcagaccaaagggcagatgaagaatcgca

SEQ ID NO: 49634 - DNA, 1381 bp, Cannabis sativa
cctcagcaacaacagggtcaatttcacctcggagtttgacagcagcagcagcaaagcacaacccagcatgatctctggcaatccatcccaacccatcctttctccagaaaaaacgagcagcatcacaattaaccttcgactctcccaaagacggtttaatacagtgctcaacaccagcacgagactgaccagaagaagatgaagctcctccattgttactttgagcaaatttccaaagttcaaggtacgtaattgcagatgaaacaactctttccacagaattagccttatcattccaaagtaaatcattgcggaccccccaaacactccaaagaatcattgccagcttctcaatattctcagacagctgagtgttacataaatcctcaaaccagccaccaaattcctcatccccattattaaaacacagacccaaacctcgctccacacaagctttggtaaaagaacaaccggccataatataaaaagtggtttcgggttaaaaattacacaaagaacaaatactgtaaacacgaacccgcttagtttgaagagagactagagttggaagacaattggtaagagccctccaaagcaaattcataactttaggagaaagtttcaagtaccaaaactttctccaaaagagttacattattaattcttagtattatagttagggatgaccatttgtgttgatgtatcatattctaattaacatatttaattgattaattctaaccatgctcatatatattttgtattaagaaatttttactttaaccaaacctgtcatgttttcgtgtcgatatatcgtattcgtgtgtcgattctatatttatattacaatacatattgatcaacataattggtaccacatatttaatttttataaaaataatttaacactaattatcaatgcaatgaataaaacttttaatatcaagtataaataatatgttttatatttttacaagtacttttttttatatatataatttataaatttttttaatgaaaataaatagtaatttgactatgaattaataattttaatgatatattaaatataaatgtgtctattcatattgattttttgtcatatgcataaattttaattcaatccaaataataattgtgtcatttgagtttcatttaagtttgacctgcgtttaatttttataatcctaacctacaataattcgtattaaattcgtatcgtgttattatgtcataacctaaattatcacccatatatagtctttccaatatacaaatggaggatacatggtgtcaaattgtgaaaaaaaaatgggatgatagcaaactaataataatcatttaaatttttttcatatcactttaatatatatatatatat

SEQ ID NO: 49635 - DNA, 732 bp, Cannabis sativa
gagagagagagagagaatattattaatgtcttttaaacaagtaattgtagttatgaaaatgaacatatacagaaatccaaatatgctaagagctaggtacctgctcaatgagaacattaagagttcctctagatacgtgatgagtttctccaagaatagggttataaggtgcaactccaaagtttaaaggacgcaaagtagagatgttccatgcaaggactgctttgaatctctctattgaattctctccaatgttgcacttacccaacaaatcatcactaacacaatatgctgactcaccataacactgtaattgtgattttggaatgttgaatacgggtggcaactgtcaaacaaagtcaacaaatttaagggagagtaataatatcaatggcttagataatttttttctaaggtgtaaatgaaattttcattaatgctaagatagttcatataaaaaattgtaatgaacaagatcaacgatatatcatgccttcataatgctcaaaagctcaaaaggaaatttgaggtaaagttgaggtattaacaatattaaatacattaaaaattaccaatgttaaaacattgcacaaaaacgtgtcaggccgagcctgccttgtgtccaatcatattaataggagtgtgcataaatcgatccaatcaaataaatatcgatcgatctaattacaaatgactgtcaaatattaaatatttagttgtgatcgaattgga

SEQ ID NO: 49636 - DNA, 1387 bp, Cannabis sativa
gtcgacctaagcatatgacagtttagattattacacaatgtctcttatattaaaagattctatttttttagtatagtatacataataaaggcccctatttttttaataaaaataaataaataaatattcataaaagtaaatatgcacttataaaaaaaccctcacaaatattgtggtcccaatacacaggactctaaaattctttgactattttacgcccaaggcttgggccacccctggttgtacacccaacaaatacagtgggtacaatggattcttcacattccactaatgtttatgtttgataagtttacaataatactaagaataaaagttgttggaacaaaagaaatatattaactaacacacaaaacaaacacaaataagcttaattaacattatgattacctgcatttctagttatgactgcagcatgtagtacatttcttccaaaagggccaccattagtggcaagtgaggaacaattgtttaatatttcatcaaccagatctaagtactctgcctccacagccatgtaaagtggtgtttcatcagcttcattacccaaataagtgaaatgagggtcttgtttagtcaaaatccttacaaccttaagatggttgaacttcacagcctcatgcaacgcagtgtccaattccttgttccttcggctcatcatgtatttaccgaactctttatccacaccaagtgtggcattctcaagatcagactcttgaagtagtttagcacgattaataaggaactcaacaataagatcatggccgtaccttgcggccatgagtaagggagtctctcctcttacattggttcgtgccaataggggtggacataactcgagtaccccttctagaaaagaaggtgtaccattttttgaagcaatgatattgacatgggcaactgtattcttttctggggttaataattggtcaaggctaaattggttgttattgagtagaattatattcttgaacacttcaatttcaccattggctggctgcagcttggaacaccttagaattaataggctgagtagtagaagaagccatatatatagtttgctctctctctttgttttaaacttttcagataattttagtgaaagtgctcaactaattttcgtcacgaataattttatagttccttttcggcaattttgttttgagaatgcgtggttgcgtgagcccatgtgtctacaagctgtgtctgattattgggagcattgtagtgggcagtcaatttgtgcgaagttgaagtattgtggtgagaggcttgcggtttggggaaaagagtatacgggtaatttcaagaaaaaaatctctcagtgcaaaagagagattcgacgatggaagcaagggagggattctct

SEQ ID NO: 49637 - DNA, 931 bp, Cannabis sativa
caaaagtaatgaaattgggcttgggcagtacaaaagttgtttttgccgtgtcccagtaaaaatgtaaagttttggtcaaaaagcagtatttttgtaaaattccctatgaaaaagtctcaaacaagtgaatattggttaataataatagtaatttattaggtaatttgcggttatttttataaattaaaatttaaatatttataacgtaaattaatctaaattatattaacttttgccaaccaaaactttattattttgtattgtaaagaacgtttggcttataggtatgatcacactgatatgtacatgtctaacatgggggaatatataaggaaattatattgtatatttattttttatttttatttttaattttaattattttttattttttaatttatatccaatttttataaatcatgtcgttattatgttgttagggactataattttaataagttatataagattatatttaatactttgattataaaaggtatttattaattaaaattattttacacgtatatttaattaatgtatataattcttaacttattccttacaagattggtccataccgacttgttctgtttgggcctaatgtttgtattttaggcccacaaagattatacactatattgttgggatatgttgaaaaatacttcttttatttatcaattaattaaatctacctctaattttatatttaattgaaacatatctctttttatatatattgtacctaaaataccctgacataaaagagttacacggagagtatattgaggcgataggggtaaaattgataaagtaattaaaaaaagaggtaaaaatggtaggctttaaaaaagaaggtaaaaataaaagagaataatataaaaagggtataaaatctaatttcctctatattgtttgtatatttgtacca

SEQ ID NO: 49638 - DNA, 1792 bp, Cannabis sativa
  modified_base (117)..(117): a, c, t, g, unknown or other
ggaagttttaccggcgcagttactatacgcgccgataaaaagtccttaaccgaccaagcttcccagataatctttgccggcgcacaactacaccggcaaagctttgccggcacagtnagggtacttttgccggcgcaacaatacgtcggcaaaagctagttttcttgtagtaacacctagcactaggcacagtgcccaggttgacattttgtcaaccttggctatttctagtcattcttccaaaaaattattctaggaatttattccgtcattaaaattaatgatgattaaagtaaagtcggggagaaaatgagaatcctaaagggccaagaactgagcccagtgcccaggttaaactggtgcagggcccattgcccaagttgacaatcaacatggtgcattggtttctatcactaaaatgtgaacttttctccaggaattctctttgttatggtaaaaaatggggtaggatacctcgtcctcaatttcaaagacattacatgcatcaaaatgatatctcataagctttgtaaagagcacccaatgccgaggttgacgtatgatctggagcgttagattctacttatttgattcttattctatcccgagagtttatctattttttcatagtaagcgagagctatgaactcacacaagtcaaattcccaacttcatattttcacttttttggcaaaatgacttagttacaaatcgggtagttacgagtctcctgattttgcgaaacagtaacatctttgagaactagcgaacaactttaatagaaattgactaagtggtgtcaaaatataacttatgcatcaaaaaatttcatccactcacccatcatcaaggttgatgtcatatgtcaacttggacgttggtatcagagcagccttcaataaaacgattataacttactcaatattgatccgatttatgcgattaaacttttattttgaagctatttcaatgctctatgaattattgtctcatactctaatctagattctgaatatattaggtccatattttatcctcaagggagttacaaatttcatcgacatcttacccaaaaaagttctcgcagacgctattcaagctccaaaaattgacgaccaaactctagagtccatttcactattagatcaccatcaatgatgaaaaatagcttaaatttattttcactgaatatttgattattattttaataggacctcattccctataaaaggagagctcctctagcttattttttatattcagaaaagtccccataaggtcagagcatctctctctagaaattttagctctctccttagtcaattctcttgtaattcttgtgagaaataaaaactcgaagtagacgtaactctattaccatcgcgacatggggagtgaactagtagaatttatgtgtgtcactctttagtatttacttaactcttatttcatatctctaatctagtgggtcagtcttggctatttcctaacatcaacattttggtattttcattgagagccaaaatttaagttcccgattacagttctatttctttgctaggagctttgttccgaaaggaattcataagttaaagcaagcaattatccatgaacacgcaaagaaatagtcccactcttggtagccatgacactacttagtgagcagcgggcaatgagtgttgggttttatgccctaaataaaactccatttcagtgtaatccagattattcaatatcaataaagaaatagaagtatttttctttcatttgtgtatgttttggtttaccttat

SEQ ID NO: 49639 - DNA, 1805 bp, Cannabis sativa
gattctattggatcggttgggattggatcggtcagttgtaattggattagataactttctgtacacccctaaatgcaggattgtcaatatttaatataaaatagttgttatatctaaatgttggagattgttagtttgtttttaatattttttaatttgataaaaatattttaatattttatttatttcagttggtctttgtgtaggaaaaatatcattgaatttattttaatattattataatatgttgtctttattgtattgtatatttttggtaagtattagggactcactgttcagagttagttaaaaattgttattggtagttacagggttgttggaaggttgttagttggctactctcgcttacttcctttcatctctctctgttctttgtatataaatatgatcctcttttgtactctgaacacttgaacaataacaatcaatgcaattgatttctttctctctctttctagtctttcagatcttctttctctttactctttctccttcttctttctatgtttctccattgttgtttctttggtgtttcagctatgagtagaaggattaacaatcctaatatggtatcaaagctcgatttccccctgaatgctaacatggcgactgtaggagctcaaaaccatgctaatccatcgaatctgggaaatacagcaaattcataccctgcttctcaaggaaatctcaatcgtgtgacagatgagttctctcctgtgtatttctctcataatcttttggttaaacttaatgatcacaacttcttactttgaaaatagcaggttcttgcagcaattcgtggaaatcgtttgctaaaatttgttcaggatgttgctccacctccgtagttcttgattgatgaagatcgtgcatcaaagacgtacaatcctgacttttgtgattgggatgttcaagatcagttgttggtttcatggatcttatcatcaatgtctgaaagcctgttgacacgaatggttggctgtcacacagctcgccaaatctggtacacccttgagaaacacttcacactgcaagtatcatcaaagattcttgaattcagaaccaagctgcaaaatctcaagaaaggcacccaatccctcaatgattacttactcaaggtgaagcagcatgttgacttgcttgcctatgttggtgaagtcctaagtgaccgtgatcacattgcagcccattttcaaaggacttttgagtgcatatgacacctttgtcatatccaccaacacacgaattgaagggtacacagttggagagattgaagcattgcttcttgcttcgaaatcaagaatcaaaaagactgatcaagaacctgaaattaatgctaatcttgctgtttctgatgttggccagtagcctgaagccaatattgcttatcagaatcgattcaaagctggttttcctcccagaaatccatttcaatttggtacttatgcaccaaattttcccaatccaagaggcacttctccctctcatggagctcaatactactatcccaatggctttgctccaagaggatatcactaccaaatgtctcagtacaactcttcccagcctcctcaagctaatcgcagtagtactaacagaggaggcagagtttctactccctcaggccgcccacaatgccagctttgtcacaaaatagggcacatggttattgattgtttttacagattcggcaagagttttactagtgttcaaccaaacaatgttgccccttctccccaagctaatctaatgcacacttcgaatcacagtgacactaattggta

SEQ ID NO: 49640 - DNA, 662 bp, Cannabis sativa
agagagcgaagagttaagctttttgttgttaggttagctccgtcttactatcaatttttaagaattaattagaatttttattgtcccaaactatgatagttataggattttgtcagtttttctaagaaaaataaataaaagaattcactcacattttgaaaataattataaatttccctcttcgcctttcattcattttttgttcatttggaaaatttaatttattttggatatagcttccgttgttataatatttttaatttatatttagattccttatgtatattttagggtagatgtcttgttaatttctaattgagtatattttttcagtttatgttatgttgttttgtagtgtttcttaggtatattataagttgatttatatattctttatatcaaatcaatctaagtttctttgttaagagactccaatgaacaaaaagataattttttaatttcaacatcattatcttttatttgttaatttcaacatttaataaaatgttattttacgatgttaaaacattatattatatttctgtaacgtgaaaataacattattttcagcaaaagaaattaaaaaaactacaatctgtaaaaatatattaaaaagaaaatctgtaaaagattaaaaaaaaaagtgccacctaaagttttgt

SEQ ID NO: 49641 - DNA, 804 bp, Cannabis sativa
caaggatcggtcacgagatggtgtacgaagccatactggttttggtaatggtgttaggattatttcaaatggtaatgaaaatgggtctgctaattttccatgtttggagaaaatgactaatggtaagggtgttgtcaaccctttgactcctctgccgtgtgttgagatgggacccacgggtgtagtaaatatcaaagataatatcacagttaatgagagtgttatttctaattttcatgggccacaggctgggcttaaaaatcttgttaggacagcttctgggccgactattgttaatgctggtgaaatggtgggcctgcccaattgtagtgggcctggggccggttctttatctgggaaaattctgggggccgaattaactacaaagcctaatgaagagaaagatcttttgagcccacttccatgtaatgtcaagcctttgagtaaaacctttgataaaaacaatgcctctttgaagattggtggacctataataggtgaaggaagctctttaggccatgtgggaggaaaagaggccgagcctaatggtgaagaagagagggctttgactatttttttccaatgctcaagaacaatttctttatgatctaaagcactttggaaggatggatttgtttgaaataaagaaaattggtggtgatattggtgttttgcctacttcagaaactaatgagagaacaactttttctaagaaaaggaagtttgaaggttctgcatcgctgtgcactagacctcataaagtgcacaggaaatacccagatgtagtacgagattttccttggg

SEQ ID NO: 49642 - DNA, 2521 bp, Cannabis sativa
  modified_base (1161)..(1170): a, c, t, g, unknown or other
aaaaaacatgttaacataaaccacttcaaaattctaaattgataactaatcagattgtaatgggtttagggcacaaaacccaacaggacatagttcagtacttcggaaaataattatcgagatttgccttcaatgtcattggatgggtgcaaaagttaatatatttgtaatgaaaatatatatttactatattgaattgaaatatggtgagaatttattttggtggtgtagatttagttccgacggtgagatatgatttaagatctgcacttttttaaagagtataggaaactatttcaaacagttccttatactgctcagtattggcaatggttttgcacaattacaaaaaaaaatcgtgacatttttcattgtcacttattttatccaaattgtctaatagaaccaattttctagtagtatattctgatgttactatgaacttctatatatgtcatacaatcatttgattcatgtgttagggtttgtcatgatgataaggctaaaaacaattattttgaagactttgtggtgtatattgttgggaatatttagatatgaaatttatattttctctaaacaaaacaatatttctttaagggactgtttagaatgggttaatactaacaagggaatggtaatgtgaaacattcccttgtttgtattgaggggttagccttggaatgttattcccttagtaatataactactttgaggagtgtaatattgataccttaaaaattgtaggatattgaattattacctttcattatattaatttcataatttgaatagcattttttaattaataaataaatttaaataccaataatattatcatttattataaacaaaatattatgatatatatatttagtctgtgggatcggttttttttaatcgagttatttttacattattagcaataacaaatatatattcattatacataaattttatgcggatggtgtatataaatgacataacgaacaaagataactaacatagtgataaaatatatagaaatgtttattttaattaataaaaatacagtaaaatttaatatttactaattaataaatatatttctttaatgaataattattttaattttatgtataattaacataagatagatataataaaaaatatttttatttnnnnnnnnnnaaataatatataagattcctatacataatcaaacagtgtaatttaattaacagaaatatgattacatattaccgccaaacacactttacatattttcctacaatcatattttctttcataatattcattataattaaattattttgaacacatgaaacgtcgtaccaaacaccccctaaatgattgatgtttggtaagtactgaaaagattatgttcaagtcacaatgagtagtgacacaagttcactagtaacgtcggtgataaattattggtcgtacagttgacgactgtaaatttgtaactcctttgagtgctgtagtttgtgattgtgtacttgtgtagttttctgcttttcttcttcatttaaatttaattttattcatgctttgaaaaaattaattttattcttagtttaaatatataaattattccaaatttttttcctattaaaaatcatggtgccaactaacattgacatgcaggtaatatatttaccgaatcatgtccactagtgacaataagaaaatacaatactctaataatttcattttatgaccaaattaatcaattatgaactatattatgcgtactaattaaatacattttcaaatgtcaagtagtttagttgtagctagcgttgatgattatttcgaaaagtactaaaggtcccaataatataaaaagaatgtgtaataattcagaaactaataaattttaacgttgctatttgctagtcgaaaggaatggaatttatctaatattcaaactatctagcatgcatataaaactagtgttaattattcaatatatatagccaaaattattggttttttttatccatataacaagaacaaatatatatatatatatacaattaataaattgataattaagtaaactaatgaatcgtctatgatcacaattatatgcattatatttatatgtatgtgattaattgagaagattaattaaaaaagaagaagaaagaaggagagaaagcttactaagaatcaaggcaacttgtggaacagttccaagcaagtggaatatagttgctccaaaaaaaccagttccgaaggtctcaaagaaaaggttggaaccagccgtaatatactgctctcctaacgacagcaaaacctcatacacgattatcatgaaaagcatctcccacaaactactcgtacaaggcaagaacccatacattggctcacagtgctcacactcaaaaccagtactcacgcccaacgctgtcgttttcggactcctgatcatcatgcccatcgctgccattgtcgtttcgctcacacaagggataataatgatcaggagaatcagaaacagcaagcttgt

SEQ ID NO: 49643 - DNA, 1105 bp, Cannabis sativa
gttgtataatagttcataggatgttaggccttttagtaaggcagatggtgtcctatttaacaagtatgttgttgtttgaactatgtaagaccaatatactagaggtatgttagattgaaaacatagagcacgagctatgtttaaaacatgttgatgttttctttccactaccgagttttgttgaggtctttctacacacgaatggtagtgaataattcctttagaggcaaaaaaagaagccaagtttagttctttggcattgtccgatcggacagctttaattgatgtggaaaattgagtgcagatcaagttgtaaaaattcatgagaaccatgggaacttcagctttagtttttagcatgaaggtccatgtgaatcttgatttgtcatctacaattgtaagaaaatgtctatatccttcaatactaattatgtggaaagggccccatatatcagtgtgtatcaaatcaaaaatattttcagagaaattattgttggatatgaagggaagccgtttttgtttagctaaatggcatattgagcaatgctggtcagattttggagcaaaagaagagtcaatctttttattgaaaacattagaaatgtacattgaagggtgaccaaggcgattatgccattgatctacattatttttgaaagaaaatacagaagattgacttcagttggccatagcagtagcttcatgtggcagcaagtatagtttgccatgccttttagctgtcccaatcacccgattctgagagtgctgctgaataacacaaatttcaagttgaaaaagaactgaattagtggtgttatcgatatattcatttacaaattagaggttgattttaaattgtggtacataaagtactttatgcaatgttattgcatcagtgattccaatatcaccaataccatgaactggtgtatggtgattattaggcaaggttacctgtgcaggaaattgattactcgaaagggagtaaaacatgtttttgttaaaacacatgtggtgagtagcaccactgtcagttacccaataatcaaaaaagttaagagagtgattaccagccatattggaggttgctgcaggaacagtaggg

SEQ ID NO: 49644 - DNA, 1045 bp, Cannabis sativa
cggaaattctataatagacccctcaaaaaggggcacactgaaatggacaattttatgctctgtgattggtttagagtaatttttgtgggactagatatggtggattcacacgcataggattacaatctttggggaaaggggtgcatcagtgtatcctaattagttaataatagtttaattttttttttttttcagcaagtgaaactaaagatatatcagatctggagggattttctttgttttagggtaatagtttgaaacaatggtaatagttttgaacatattttataaatttgattaggtttttttgttttgtaaattgatgtttatggattaagtcaatctgagttgaacccagttcatccttgttttcctcttggtgcgaacgccggtgcaacattctccctcctagtgcgtgaggtgttccctctctctttcttaataaagtctataagtattactttgttttatgtctaatggggttcaaattttacaagtacaagattgttgggagtatggttggaatgagtggatcattcgggtcggcaattgaagctctcgcctgagacctttagaaaaatttgtactttgctgttagtaaatatctcaaatagtatacaattatctatgggagtgtacaacataatacgatgtgcttcatttaacacctaatgaaaactggtaaaaatagggttgcatcagtgtgaccctttttagggtgtccactgtagaagtctccaatagtatatatattttgataattataaatatggctcgggtttgaattgtggtataagatctcaagggaatgtaattaaacttaaagtcccttgcttttttatccttccaaataaaaagatactagtaaaaaaaatcacttattgaagttgaaagtttaagaatagatctgacaaaaaatgatagcctttaatcaattatataaaaataattagtatttttttatatcaagaatactaattataatatttaatcaacttttacacttaaaatcacttaatggaatattgcagttaattttttataa

SEQ ID NO: 49645 - DNA, 1301 bp, Cannabis sativa
  modified_base (223)..(224): a, c, t, g, unknown or other
attcttttgtttaattaggaaggaaaaaggttttaaagtgtatattcatcataacttacattactagatagatagttgaaatgaaatatttgtacaaatgagtgattggttttgttctgatatatatgttagggaaacacttgcattattaccgaaaccattattgtacatgttgaacgaaaaaaagaagaagaaaggtttattatttttattattattattnntattattattataaataaattatctctttttataagccatttaaaatataaaagaataatttgtttaattaaaataataataatatgaacaataaaaaaaaaaaagaagaggatcagtcaaaataataaacaataaacaataaaaataataaacaataaaaagaaaaatgatctctattaaaaaggaagagaagcagcatagtaaatgatttttttttttttttttagttttggaattaaacgtaagagtgaaataaaaaaaaaaacatgaaagaaagaagactttgtgcagaaaattgtcatttttaagaatttttccacagtaaatgataggtaaaaaatttctgttttttttttttctcctcattctgaatctttttctttaattgattttctccttttatgtatgatctactttgacctaggctttttaagccataaaaggtctccaaaagtgagatatataaaaggaaaatcccacttttacatacctgctaaaataaatccaatatttttcttatatttttttatggtccactttgatctaagctttttttagccataaaatatcttcaaaagtgagatatagccatggaaaatatataaaatctcaaaagaaattaaaattgtcatgctgccaaaattattgtgtgaagaaaaaaaaaattaataatttatgcatattccaatcgtaacttgccaaaaatcaatactcatgtgtgtactcgatttaccacataaaaaaatagtaaatatgtacattatagaagaagaagaagaagtatatatgttttttatgaaaagtgtgataatcaagaaaataggtgtaatatatatctataaaggcatgtttggtgcgcaagagtggattggattagacagattaatttgtccaatccagtgtttgagcatgttagaagtctggataactaatccagctaacctcatcagtctgagattatttatcccatccagtagggtatgataaataatctcatgcaggagagatttttttttatcgtgtttttttttttaatttaattttattaatataatttaaatttaataagaatttaa

SEQ ID NO: 49646 - DNA, 1490 bp, Cannabis sativa
  modified_base (26)..(44): a, c, t, g, unknown or other
tgtttaggatgttaaaaacatacttnnnnnnnnnnnnnnnnnnnggtaaaatatattccaacagtatcctacccacgacattgaactggcagcagtcgtttttgcactgaaagtttggcgtcattacctgtatggaaaaaagtgtgaaatctacacagagcacaagagccccaaatactttttcactcagaaaaatttaaacatgaggcagtgatgatggtaaaaattggttaaagattatgactacaagattctctaccaccctagaaaagtaaacgtggaagtggatgctctaagtcaaaaagttccagggcaagtttatggattgaagaagatttcaccaaagctgactaaggatatgaccagagcggggatagaatttgtggttggaaaacttgctaatatcacgttgcagtttgatttgctagcaagaataatcaaatagctcaacagagtgaccccgaacttcaggggtataaagaagatgttgaagttgggttagcaaaggactttttcagtatcatcagatagattattgcgatataaaggcagggtttatgtaccagccgacgacacaagtattagttaggagattctagatgagtctcacaccacaccatattccttacatccgaggacaactaaaatgtatcaagatgtaaaagccctgtattggtggtcaggcatgaaaggtgacattgtggagtatgtatcgaaatgcctaacctgtcagcaggtcaaggcagagcatcagagaccagcgagtttacttcaacatctgaagattcctgagtggaaatgggaatatataacaacagactttgtggttggattaccaagaacagtaggatcctatgattctatttgggtaattgtggacagatatacaaagtcagcacactttttaccattgcagactacgtacacggtggaccaatatgttgatctgtatgtcaaagaaatagtttgactgcatggtgctccaaagtcgattgtctcagatcgagatccaaagtttacatccaagttctgggagagtctaccgagagcaatggataccaagttaaaattcagtacaacttttcatcctcatattgatggtcagtctgagaggactattcagatacttaaggatatgcttcgggcgtgtgtattggattttgagggttcttcgaacaaatatctccctctgatcaaattttcgtatagcaatagttatcagattactattggcatggcaccgtataaaattctttatggaagaaagtgtcgttcacccattcattgggatgaagccggagaacggaggtatcttggacttgaggcagtccaaagaacgagtgaggccattgagaagattcgagctcgtatgtttgccttacagagtagacagaagagctacgctaatccaaagtgtatagatattaaattccaagttgggaaatttgttttcttcgagtgtcccgaatgaagggaattcagaggtttag

SEQ ID NO: 49647 - DNA, 1498 bp, Cannabis sativa
ccaagattagctactgcagatgaacgagaggccttttaaataccaatgttgcagctgagttgaaagacccgaacaccaactgtcataacagacagttggttaatatggttaagttcggtaagggcactttaggaatttaatatttggccaaccacttcaacaacgataatcacattccagaaacgattggaatataattatatattattttacaaagctaaaaataatttacacattcttttacaatcatatattttcctttataataatcaaattattttgaacatatcaactatattgaaatttcaatgttattattatattttcccataaaagtcaatcaatcattctccagtcattgttttcttattatatatacatatatatataaataatggattagtaaattagtgtgatctccaaactaatggtgtacaccacttaaaacatctataacgagaacccatatatgcttgctaagtttatggcaaaactaaaaagaaaagaaaaaaaaagtttaaaaaattataataataataataagtactgaaacaatatgttataatctgttgacactaatgcaaattccgagattaataactcttggttagagcttagaggtgagctggttcgagtatcaaggtcgtcttcctcaaaattagcataaaaataatcacataataattaaactaattaggtacttttgaagatcttatatgtatattattggtgtttgtggtcgagagcttctaattagccaatagctatttagtgcttcctgagttgttattgtctgtcaaaatgtttctcaaatcctcaaattatgattaaagcattatacaaaaatatgtagtgtagttgcttatgaatagtatagtggagtagttggttttatgttgccatgtttggttccctaaaaaccgggttttctcgttaattaatgtctgtttttatgtattcttagctcgctatatgcagttttagtcattattatgctatcataaatatatatgtatatgattatgtatattggttaaacataaaccctacacacacagacagcttagaaaaatatataaagtatagtgacgaaatgtaaagaatgtatacgacacaaataagtgtgatgtatgtgttggcttcgtattattgcatttggtcattctccaaatattttccattaatatgtttggattcaagaaaagggtgaagattaaagaaattaaaaaaaaaaaaagattatggacatgtatttggtatttatttatatttttctcttctaatatgtataaatattttattagttttgtataattccatataaatattggtgtactacatattcctttgattttagttgatttcggtgtgtatatatgtatgtataaacataagaatcataataatctttttttttttttcgtagtttgttaaattcaatcaaaattatacttactacttactagtcatgtaatttcttcgtaacttaatactcaag

SEQ ID NO: 49648 - DNA, 1457 bp, Cannabis sativa
gtaagtattttgctgtagcttaaacgtggtgactactgactggtgaagtgtgattaacgtttggttatatccaaaactaatttttctttatgatgtgttgtattcaatcacagggattagacgttaaacttctatgcacgaggtcccttattgctgctctctgcttccatgcttatcagcaggtatatagacgttttcttcctatattacactggaagacgtcactggtcttccatagaaatgaactcgtttgtcattttttttttcaatctaggacatgcggctgcctctgtgtctgataggacttaacagtttttaataagttagtggaattgttctaatgtgtaactagataatagaacaattttttgttttcttgctccactgacacttaattgcacatactccttatgtcataattgtaagctgaccctttatggattcaaccatgcaggtctcttatatgatattgcagagggtatcccctgtcactcactcagttggaaattgtgtgaagcgggtggtggtcattgtgagctctgttattttcttccaatcacctgtctcgctgatcaactcccttggtaaatagattgattttgatttttcggaaacatgttaaatgcaactgatttggatatggtttaaaagtccagttctggaagtttttctaaaacttgatctggtgcaggcactggggtggcactctctggagttttcctctactcgagggtgaagcgcattaagccaaagcccaagactgcttgaaagtcttccgtagaaattttgctgggtaccgttgatgagatgctagatgaaaaaactcccagattggctcgttgaacaaattgtttgtaggtcaggcaagaactgtgattgttttttgtttttttttaatctttttggtgttacttttgttgttttattatcaggatacagtttcattcttttcgtgaaggtgagtaaatggtgggagtaaaaaaaataaaatttctgctgtcgtttttggggtcagattgaaatgtatcaaatgtagtttaaattccaagcaattgtttttcttttcaacatgctaaaatcaattttcaaatggtatgtagagagatttatgttttgttttttatgcgagaaagttataggggtggcggggttaaattgtgtttcgacggcattactcgtagtgtgtagatgttcattcatttcaattcgcatgcactaactgcaaattttatattttaaatttaaattcaattctttccccaaaagtattgattggataaattattttagttactttttaatatttattaaaaatgttttttttttcacatattaataaaataaaacaaattattattattttatatatacacataataacaaattcaaaaaaaaaatatgtaaaaaaatatttaattttatttaaattatatgtactatatagacaattttctttt

SEQ ID NO: 49649 - DNA, 647 bp, Cannabis sativa
ttagccttaaagttttcacaatactatattatttctctattaattaaaacaaaagaagaaatgttcatactgagttttgctacatcactatatggtatgtcacattagagtactttctttttatttaatttcttattttttttatttatatatattttaaatctcttttagtgacacaatacagacagatggcacctttggcaatggacctaaaatgtttaatataaactcttaaattaaataaaacaaataatgggatcccttacgtacatttcccactcttcaagcaaggattttcttttttcttttaaaacaaattttaaataattaataatccaataaggtcataattaactacatcttgaccactaattataatggcctatatgtacgaaactagacaaagattgaagagtagtgattatggcttaagcatctttattaataaccacttcaaactttccaatgtatcttttaaaaagaaaaaatctaataagtcaaagaaaaagttgcaattaaaaaaaaaatcactcactcactcttcaaccacccaattcatagctatgccgacccaaccattgtataaattagacatatatatataattataattataataaaccattaattattatgttatattacaa

SEQ ID NO: 49650 - DNA, 1379 bp, Cannabis sativa
  modified_base (1316)..(1317): a, c, t, g, unknown or other
agcatgtaaaggtatattgtcattttaatgcataaaaacaacaatggatatatatctcaaaaaaaaaaaaaacaatggatatatgtgaaagcgaaccccataccagttgtattaaactccccaccattctcatcttttcagattcaatcatttttcactttaaaatcatcttttaactatgtttagaatttggatttgttgggggtatcaattcaacccaagttgttcatacaaaaaaaaaaaagtaagaattatcttgaatataataagtgttgtacctagtataaagttttttagaagttatccaaaaataaaattattcaactaagctcaaagtgaataatatcatattaatgtaaaagtaaagtgagcttcctgttagacattattatttaaaaataataaagcatatacaatcgatacgaaatgtagaataatttaaccatatcgaacatatatgcaaatcacatcgtaatacctccagtttttgaattttaagtctaaatcccctgtataatttctgattgggtaatcgtgcttccaagctctctctactccctttagatagaatttgttgttcacagaatgagtgatgagctcggagaccaggactctacattataagtgagatactccactagtatctgtgtcacattaatttttagattattttgataattaattcgggaaataaatcaattagtaaatcataatatgactatatttagaatattcgttcttatcacattttgatttgtgatcatatacagtcagcgaacagtcaacgagataaagcaaaatcaattcataaatgattttgtaccaatattagaaatattctaatattctctcacttgatcaacatttagatttaccacttaaatctaacgttactcattacataataaatatatgaattatagcgatatatcctcattttatgacgagtattatcttccatgtattacgatatattcattacataacaatatactttttgtggcaatatatttaagtgaataaatccaaaaccttatgtttattctggttctttaaaattttctcaaatgtaaaattaagatgcacataaatatgagaaaaaatagcaaaataagagtttcattaataattttagttgtacaaccaaaaactgcatgagggtaactgaatcccataattacttatgatccttgaatttgtgttgcgacatgcctttagttaaggatattgcaatcacttaattcattattgcgtgtttgatgaccacttatgattttttatagttaaatatttaatgtcaatatgctagcttcgannagtactcttatagttcttagccataaatattgtagctgatttgttgtaaaattttcttaatg

SEQ ID NO: 49651 - DNA, 733 bp, Cannabis sativa
tttgttagagtgtttataagaaataatcttatttaaataacaatattgtgtatcttaatgagtttggtattttttttaaggataaatactcatttgacattgtatattttattgaaaaaacatatatgtttctgataaaacttatttggcattttgtattttgtattttaaaattatatttactaccgttaaatcaaatttagtaataaattttatcaagatgactattatgcatttgattataggtacttagataattaattttaaaataaaattaaaaagccatgtaattaagagcaatttgatcatatttataattcttttattaatcttgagttgagtgcatttttttttttttttatcaaactcatgatattagataaatattatcaaatatataaagtactaaacttatatttggacaaaacaaattctacgaaaagagtaaccaaattttttaacttttgataataaagcgcgtcataacattgttaactagactaaaccataaacttactgggtaccttttggttaatacgctatttccttattcaataaataattaaatgatcttttctttctcttgttcttcttatggctctatttcttattataatttatttttttctaaggagtaagctaatactcaaagtttgaaaaatttaaatacaattctctattttttttttttgagagaataagagcatgtttggtatttttttttgttttttat

SEQ ID NO: 49652 - DNA, 1297 bp, Cannabis sativa
ttcttttagtgcattctatctctctaaatctgaaggtcgtcatttctgacgttttgaagggtaagctgggtcgatgttgagatgatggcatatcacattcgagttaatccctaccgtgtttgaatggctccaagaaaattgatcttagtttgccttcaaaaaaacaattaattactatcttggatgtatagaattccttgtggtggtattagataccacctagttgagacagttcgacctgtggatattagtgtggtacaagagttcttggatgtattttaaaaagaacttttaggattaccactacaacaaagatagactttgttcttattttggcatttgaagtataggtggcttctaagacaccttatagtataactccaacagaatttaaggaattaaagttatgattttagggggatgcttgatttagggtttacctgaccctgtgtatcgccgtgaaaagttctagttttgtttgttaggaagaaagatggctcgcttcatatgagcatttgttatcaagaactaaacaagttgatgataaagagcaagtaccctctacttaggatcgatggttggtagatcggcttcaaagaaagatagtcttctccaagactaatcttcactcaagctatcattagtcgagaatctgagtggaggacatcttaaggactggcaatcatactaggtgtggtcattataaatttctagtgacgtctttagggactaaccaatgcaccgatagctcttatgaatttggtgttcggggtactcatggattttcttgatagatgtgctatagtaaatatcgatgatatcattgtgtattttcaatcagaaatagagtatgagcaacatctatagatagtttgtagttactatagacgcatagaatgtgtatatcatattaagaagtatgaattttgcttattctgagtgcctttcaagggcacgtaattggtaaagatgggatcacagtctatctgggaaataattaatttgatgaagactggcaaaggccaaagatagtcactaagtttagaagttttctagatttagatagttactaccatttcctcgtctaagggtttctaagatttcaacgccctttacagggttaatcaagaagaaacgactatttgtatgaccaaacaattgtgaaaattagattcgagagctgaagcaatgatgattgattatgattttagtgtaagcttagacattagatcaagaaaacacgtggtacattgtgaggcatccaaacaggatctggagtgcattctgatgcaagatg

SEQ ID NO: 49653 - DNA, 1603 bp, Cannabis sativa
tatttttgcaaaaattattaatgaaagtatttgttttgttaaatgataatttaggctctgtttattttaaattgtacaaaatagatcatgaacttaattttcgttagattaaaatatagtaataacttaatatgaaggtggtctgaccaaattgattacaatttttgcatttattcgtgtgttggaaagtagaaagtagaaatataaggtacaaaatagtattttgcctattttaaatatctttatgttatattaaatgtgtttatacaataatgttatttatttaaaaaaaaatattacaaatcaaatttaaactcactgtacatatctcatatattttgttttaaatttttttctattatcatattttttttatataatttacatatcttaaaaaaatattttttttattatttttttgataaaaaaaaagaaaatagaaaaattgtgatattttaaaaaatatatataaaaaattaaaagtattacggttaaattaaaactgtaattaaaaataaattttaaatattattataattttttttataaataatatataaattaaatattttgtaataatatgtatgatgttgtttattgaataacattaaaaaatctaattatatgaagaaaaaaaatatacataactaaaataaaaactaaaaatataagtaacataatattttagtatatataagtaatatttttttttgctcttacacatttttaatttttcttactttaaaataaaatatattaattatttttatacgatgttatatattatttattttcaataaattctaaattcttgaaaaaaatatccctataataaaaataaaagtgataatatattcactacaagtacatattttttgcatttcagtgttctaagaaaaagagaaagtagtaacattatgttatgtgtgtttttaactgagacaaattaaactttaatttggggaccaaccctaccttgcccacccaactcaactcaccttattatataattccttattttaagaaaaatgttagggagagaagaagaagagaaagggaaattttgggttttttcttttattcttttttaatttttatgggctgaaaaattttaattgtcctaattaaattataacacgtgtgctgacagaaatcacccagctgtcacttgtttttggatggagacatagagtatagagggtactgagtggcatccctatcaggagggggttttttggctttatttttggaggttaattggtcatcatacttgaatcaaccaaccaaggaccacatgaagacatgtatttatttgtaaatattatgagtggattgatattgggtcctcacaagtatcatttaaaaataggtcttgccattaattagtaatattttttaataattattatattaaattatataaaatttgatatttaattaataatgatataatacataaaagggtgttaagcactactaatattatataatattgtggcttattgtggcttttttattttaatttttggtagcttatttattagccttattatttctctctaaaaaaacaaagacatacacacacaaagtcacattatttttg

SEQ ID NO: 49654 - DNA, 1241 bp, Cannabis sativa
taaaataatttccaacactttgccgctcagaaatctatgagatcctagagtaaaggccatctagaatgcaattatttgcataactcgaattttcaagaaaatcaccctagatgactaattcagcgcaagattagcatcattaagaagtcaaactgttctaacaacccatttacctaagaacataaagtgatgattgtgcactgcattgtcacatcaactgcacatggggaaaattttgtctcaccaaacccctacaacggaggctaggtactgcctaaagaccaaaaggagatggaccttttcgttccttcaatctttatttttttccctataaatacctaggaatgtaaagaaaaagggaaatttagaatcacacacaaagtgagctcttagactgcatactgaaattctctaatcaaaataacattcccaccataaataaaagtgacttgaagactgcagttcattgataccagaaccacgtaaaaaaccattctccattctttccaaatcattattacttatactaaattattggttaccaaaagtctcagtcattattttagtactttcattaagatctgtaggaatattgcaccaaaataaactttcatttaaatggtggtcataagaaacaatcagtggccttcgcaactgcctgatgacccagcacgtcgaaaggagggagtggccttttgagtggatcgtggaggtgatacaaatgatccccagtattcgttaaaaggggaggcatacgaagatggtaaagaagacgagtatgcagaattcgtgtcgctaagaaaataggccacaaagcatgatgcagagttggtagaacaaaaataaataaataagagaatgcaagaggtgttgagtgctatgcaccaagccatggctcaggcaggccttgaagttaatctcgttcctgttgattatgaaatcatagggtgccttttgtattactattatttcacacgatccaggaacttccataatgttggcgtgatttggtttgagcaatggatcgtgacgtgatacatcttcataatgaaaatagagttgcaccaacacttggcgatgacggtgaaggcccctcacaacttcaagaaaatcatacacaaaaggaaaaagtacctagtcccatccaatggcctcccaaagatcctcctatcacaagagaaaatcctacgctagtacctagggggagaagaacccaacgcgatgttgggttttatgcccta

SEQ ID NO: 49655 - DNA, 6468 bp, Cannabis sativa
ggaacactcacaatgtattctccaaattccttatcctcagctggttcaggtttctcctcaggtagataggttatagatgcatcaagctcaaaaagtctcaaagccacagctgcacaggtaaggggaatccatggaagtatggaaaccgatccgtggtctgaataatcatgtaaagcattacttgaacaattgcgggaccccaacaactcgtccgttgcagcaaaggtcgatgaaagaaagtctcgccttatgctgccctcaaatatagtcaatatctgtatcaaggtaggtccatatcagcactcagtaaacaacaagttacaataatcacatagaaggggaaaaaaaaaagccatcagatcttaatcataagatgattaaaccacagatgaatttcttgttaaatgaacattttgatgagattcgagcaaatttaattagtgaaactacagaagcatcctggtcattaagtacacaacaattattgttataactaaccaaatacatgtacatgacaagatatatacattagaacaatatagaaaatagataatcaaactgtatgaatttcacatcaacactttagaggtgctcaagaagtaagggtcactacctagggatgcatacaccacaatacactgatctgtatgaactcaatacatgaaccatcataataaagcataaaacttaaaaggaaggtatacctgtagaagttgttcactggagaaagaagcatttaaattccgaccccaagactttcgatggtctaaggtccagaacgaatgaagagcttctggtggaactgatgtctgtaaattgcataacgaaaagaaacgttagtaactaaataccaataagaattaagaataatatcagcttgttatattaaacatggaagtactttcaaaagctttgttatggttttatcatctcacctcaaccacggctaataaggccttaagtagtctgcttcccagtggaagagaagtatctaaaacatgaatattcctaggatctgactttctttcctctttacattgaattacgtgttgtgagaactttagatcgttgctggtggtatgaaaagtttgatggcaagaaacacaatgggagtcctcaaagtaataagaaatgatacagaaatcacagatttccaaaagttgtgcagacctctttttcccatatttcagggcacgaagtgttgatgaatttaaacattcgttccacatccacttctgaaaatcatgataccttttcaaggcagccttcttctcagagtcgcttctgccaagttcaattttgaaagatgttgatgtttccaaattatctgaatcagaattcgtaccacaaatgatgctgccagggctgtcaaaaccagtatggtaatcaggactatattttgtgccatcagtttcacattttacagcagtcagacctctgcctgtagtacttgaatactggacactcctacgaacattttctttgaaggatgtctcaatcttttgcaacattaagcgcaaatgagattccctgattccacgtgcatccaaagacgtcaaaagggtatcaaaggcctacatgtaaaagtaagtcaataagttataaggaatgattggaacaatcaatcatatcatatgcatttctcacattttagccaaaaaaaaatctaacgccaatgaaaaacatatattcagccaatgataatgactcaaatatcttaattatggaggaaaacaagaaagatggatgcttttgtgagaaaatagaagataccagacattgaaagttaggaaaagaaaacacaaaaaaagaaaagatgcatgtcagaactgtagttgaaatatctgaaaagattcaaagcaaaaacactataaagaaagggggaaaaaagaaaaagaaaagattcgaagcaaaaaagaaaaggaaaatataaaaagaggttgtcgattttggtgaataggcaaacccttgccctatgtgaattttgttctattgacattgaatataatataattaacttcttcagctgcagaaaaaatatactacaagaaccatctcattaaatagattgaccataaaatagggttaccaaatcctcttcacactaatttacatattacctagaagtttggaacataatattttactttacaccacatgaaaaatgtaatgttatcaatgcaaaaatacaaacaaaatattctgtcaaagaatggtgagtaacaaacagaaatatataacaccaaattagaacaagacaataaatgcatacctcttcagtgtcaataatcctccaatttccatcatgcaattcaacaaagaccctgcctgaacctggatcattgctggaagcagacgcaacaaattgccaataccgattgcgtctacgatcttgaccaagaggcaaggacctgtacacatacatttcttcagctctatgggcaatataagatttcaattgtgagcgtgatcttttagatgcaaatgccagctgctgagttagaaagttgtcaggaccagtggaaaattcatgagctactgaggctttgtcagcaggcaaagtgttgaggtcagtctgtaaactattcaaatcataaactgatctttgattttctgcaacactgagggacatatcagtatttctattatcaatatcaggtaatggactttgactgccatctgcagcagaccttgcaaggtgcatttcagccttgcctcccacttgagatgagaaatctactttaattacattctcttctttcaggcgacctttgtcaacatgtgcttctgcccacatttgctttttgagagcattagctgcctccaagcgatcctgccaaaaacgggatgtcaaattccagtaaagcaaatgatgaaatgaacatatatttttttttttcaaaagatggtctcaaatcaatacctcgagaacaagccggatcgagtttccttcatttgcaataccgattagtgtaacaatagcatcaagacgctcctccacactgagatcagagtattcaccttctgtgagaccatgaatccaagattcacccgaattgctttcatcaatttcaatattttcttcatcgggggcactgcctcttacatcttcactaccaacaaaacacacaggcgtggcacttagacattttgcatcctgggaaccactcaaaggtacagataaagaatccttatcaaactcagtttgcggaactagagcaacatcattgcataaattatcttttccacttccggagcaagtatttaattctttgtaatcttcagttattatgtttacactagatggagtagctaaatcatcaacttcaggatcctcatcaacatcttcacattcagagtcttcatccctttcaacctcatctacatcttcgacggccaaaaacccattttcaaatacttgtactttctttcgagcagctgaaagtatagcttcagcatcagcagggtcttttctgtaagcagctcgaacacgatatgttgaaggtgctattctctcaaaaagcttcgcatcccttgtcaaagcaactgaaattgatgcctctggagttttgcttgttgtcaggtccctaagcccagatttcttagatccaaaacagaaaagaacaggaaatcaaataattgccttgcattagactaaatgcgagccagtttaataaacatgatctgttaatgttaatgaagatcttacctgaattttttctgctagctccagcactgtcaaacccttgcttccctcaagtgaaagaacatgaaaagctgcaaacttgacagttccaggagtcaatcgatgtctagatcttcgtggaagtaataaacctttttcttgcatgagggcaaatgcattttcagcagctgaaccactacgaatagtagaaattacatctgcacaactttttccctgacattatcaataacacatatcatgcatcagtaaaagcaatgaatgctaggccaagtggcggagagaaaacgagaactagcatatttttttctctacagaaggtttaacttcttcttcattgcgttcatttataattttggatgcaaaatatcctcctctactcattttcatctgtacacatgaaaatatatatttttaagagtttgttcctaaaaaatttggctcacattctatcatggttgagcagcacaaagatgcataccttttttatttggaagatactcataaaaagcgtactgtgagaaagaaaagcaaaatagatagcaaacctcatcattatcaggcaagtatgaccatgctatactcctcttcttcaactgtggcccaaagcctgcagaaagtgctaattgccggaatatctcaggccatgttaacggatttaagtgccgctgccagttacgtatatcaaagccccatgtgtacgcctgaaagagagaatgaacattaaattggttttacaataatcagtaaaaagttgaatgcataagcacagaacagaagttaccccttcaacaatctctggatgtccaccaccaggattagctgctccattttggctcattcctaatccactagaaggtgtcctagcaacatcttcaatatcttttattatcagcttcaagagagaaacatgaatctcacctaataaccttgaatcctgatagcacaatagtccaatatcagaaaagaaaaatggcagaaggaaagatgaaattgccaaacaaataaaccaaaccataaatgcaagtgacttacatagtcatgaaaagattgaacaaactcgtcaatagtaaaaggccataacccaagaacatcggcaaaagtaattaaaaatctccaaacctaaaagagacaacgacaacatttaaacattaaaattaataaatgaaaacttaggaataccacttgatgactttccaatgcaagaaggatgggatcacctaaagtttggagggagaaacatataagaacataccattagaaggttgccaatattcttctctgaattggtccatggctgaattgcaaatggtcttttcaactgcacagacttgggtgggaaagcaaccaaaaaatctaagcgcaacagagtgcagaagaattaccgttagacaaaatagattttgacagtagatataacaaaagtggaaaaggaggccaaataatgatgatccataaatgatgaataataaactacccaagattaagctccgacagtcatgaagattcaaacagctttaaatttacaaaaaattctacaaagcaaagcaagtctacctctgagtgattcaagactttgcaaagtgtcatgatcaagagagactatggagggtaaccccttttgtgcagctgctatctccatcaactcaagttgttcatcctcaatcagctccattgactctctagcaattctacgtgcagtagctttctcaagggcagctttgcgtctcactgcctctttctctttgcgaagctcttctctctgcctcttcttctccaacttcaaatatattcataaaacaaagaataccaaaaagaaagagtagaaaattatcacctgtcccaaacaaaaataagaataagaagcactaaaggctccttacttactctcaaacactctttttgcaaaaacttttctcttcgttccatttcacgcttttgttcacgttttgatctctcctcctcgcgctgcttctcacgcatcaacctctcttcctccttccgcctttcacgattttgcctttccatttctttcctcaatcgttcctcatgctaaagacagaatgttcaaatatcagtacaaaaagctctagtcgcatataataaacatcaacccacccacccacccaaaaaaaaacaaaggtatacctttctccttagattttcttgtttctcaagctcttttctcatccgaatctcctgaatttcagcttcttttgtaattctagcttcttccaactgcaaaaggtcaataataatatgatcaatccttataggaaagatacaccataccatacattaacatacccacaacactttgcataccttgcgttttctctccaaccttaaaacagcttcattaggacaaatttgtccatcaggtaacatataattattttctggtgaaataattgggttatcactgatatgaggattcactctaatatttgtgaaagaatcctttggcagactggtatcatcaacagatggtgaagggaagggaattatttgtttgtctggtccagatgaatggcgaacacgagaaccatgaccttgagacctgggtagctgttcatttcccgaattatgaatatgagattgggaaacttgtccataggcatcattatggccactgcttggatcaggaagaaaagcatattcgtggacagctcttggagtagcctgaaattaccctcaaattagttacctgggaaaacatatttgatacatatgggtgcatgttaatcaagacaacataaaacaca

SEQ ID NO: 49656 - DNA, 1046 bp, Cannabis sativa
aaatatatttctttttatgagtactatacctaaattattctcacacactcacataactaagacataattttaaacataatatatttgtgttttttgtagatggatgtgtagttttgtggaaagttagagtaaaattttgaataggggtaaaattagtagaatgattgaaaaaaaaaatatatattttttgaaaaaaaaaaagagtaaaaattgaatcaaattaaaagagttattattatgagctattaattttattttattttttgaaatcatatgagttatcaattagataacttataagaaattaatcaaattatgcgtatgtgcaatgaaatataataaggtgtgtatgtatcatgcaataatacaacttttttttcttcttaattttacgatgtttaaaattaacataaattgcatacaaataagtccaaacggtgactagtaattagttacgaaattattctaacagtttgcagcttaactaacgtaccaaacctttccaccaatttatatcactttctcacattataattagtctccatcaatagcttttgaatttaaaaaattaaattgtataacttttctttacacacttaattagtaatattatcgagttacaaaatgattagtaactccacaaacatatgttaccagataattacacttaattggtttgttacaagttttctatcctctcagatctacgagatttcaaaaataccatgattcgaaacttatgcaataaactcattcccaagcataaaagaatattataagaatagccaaaaacaaaatagttggggtatttttgttcaatccctacctcaaattcaatttgtttggtcctttggtcagtgattgttggatttaggctctttaattcattcaaatctactattctagttaaaaacataacaaaatataaaatctttcaaatctcaacttttaaataccatacatcttagattccaatcaatccagaccattaagggtgcgtttggaaagccacgatataattggatttgtgtgtaattgaaggtaat

SEQ ID NO: 49657 - DNA, 1262 bp, Cannabis sativa
aattataattagtcatgcaaagctgctaaaaaggtcttaataaattattgtccaatgagtgggtatatactaaaatatattaattgtaaaaactacagtgactaaatttttacttgaaggttaattagattatataaataaatatacatatataattatatatgagaaaaaataaaggtcaaattaagcagtaaagcgtgccaacgttgaataatttaaaataatctcagaatgtacaacgagttaataagtcatatgttttcaaaaggttaattaagtatagtgaatggaaagttaatttgaatatggactatggaggacatgtgttttttattttttattttttaaggaaaatatggagaaattatttaacaagtcacaaggcaattaaatcatgctttttttattgcttaatgattaagaaatcaaattttattctgtgatcaaattgttttacagcatatcatatatgttatataaaacttttacatatgttttggcgtttttatagaagaattagttaaaatctttgatttcagcattctaatcaaagaaatttcttttcttttactttcaatcatataaatttttggtaaaataaatattatgtatatagttaaaatttatcatataaaaacacaataaatttatagctaaattacattattatacctgtgctatcataaaaaagttgtaaatacaacttattaatgaaaacgtgttgtgagaaataacaaaacactaagagagaatttaagttgagctattttagcttctcaaactaagcacaagaggcttgttatgtaacttgcaaaggctggaacatataaatctctttagtgagatcactgaaagtattttttacatcaaattgcttgattgaccactgtctagagagagcaacatcaagaacaatcctaatggtagttgatctcacaacaagactaaaagtctcttgaaaatcgaagccatattgttaaagaaaaccctttacaactagtctaaccttatatttttcaatggtaccattagagttttcttttattttaagcactgatcatttgaaacctatagctcttctcctttttaggcaatttaaccagagttctcaagttttattcttaaccaaagaatttactcactgttcatagtcttattccaattcttatcttataatgctttagttacataaagtggtgtagtaatagctagcaaggctttagttttagaaatgtcaactctggctctagtaattatcatgt

SEQ ID NO: 49658 - DNA, 1386 bp, Cannabis sativa
gcatggtttaaactcaaatcagaaccatagtggaaagtaagtaacagttaaaggatcaaaccttttgatcaagatgacagatgataccatttttctttacaccagccactcatccattatacttagctacaaactagctgtacatatgtttttatcattattctaatacagcatgagtttttctttttaacatttcaattgggaaatctgcatgtgcatatgttttaaaactacaagaactgcatcattttatgtaaaggatttaaagcaagattaacaaataaagatagagctaatagcctgcaaaccgagcgcccggtcactaccttagaatgtaaaaaatgttttcaaggcttgaagaaaacaatatggcttgcatgatttgtgagcagaattccaataaccaaaaatggaaaatacaccaacccattgaaaaattaaaaacaagcaaactcctcctactttcattatctaaacttagaaacaaggctttatctaaaaaaaaaattccgaagcaaacccaaattctttctctctttcctttcctgagtaagatgatcaattagaacatgtgtaaatctctgttgctagaataaaagtacaactacttaggtcacattttcattcacatttcatatggtttaactctcttaatccaactttttaataaaatatctaaatactttcttattaaatttccccaatttttttggactttcctttcatatgattcaacatagattctcgaagttaagcatagattcttcaacgctgctaaactaaaccctaacactaaacccaagcaagaaacaagataaaaaagagcattgtactatatagccatataatacatataaaacacaaaaatattcaaagaatttcccctatatatacacatttctactatccattattggattatcagagagaaaaatcaaagagtaagtaagaagaatacctcattttgtcgaatgaaactgagagagagagctttcaatttcaaccaagccgaaaaaacaaaacacgaaatgaagaaatgcgcggagagttaagttatatactatagaaataaggggctttatgtaattttaaagagttttagggacgacttatgaattaatatagttaaaggttggcttttggaaaaaaagaaaattattaggatttttggtacttagcttttagaattggctaattaggatttttattcccaaactttaacatgtaccaaattatgcccctaaatattttttgtcattaaaaattatctttgaactattgagattgttacatttaaggatttttgtttaatttcattcaatttactatttcagtgattgattatgtattaaatcatgctcccaaatttgattttctatacttaaa

SEQ ID NO: 49659 - DNA, 1109 bp, Cannabis sativa
taacactaaaataaaatccatacaagctgattgggggggggggggcgtgaatatagaccattaaaaccaattctctgtgaacttggcattatttttagacatccatgtcctcacacacatcaacaacaaagtagggtggaaagaaaacataggcacataactgatatgggccttactcttcttgcacaagcacaattacctttttcattttggtgggatgcctttgttgcagctacatacctcataaaccgactccctattcagaaaaaccaatatatatctccctatgaaaatatttttcattcaaaacctgattataattttctcaaaacatttggttgtgcttgttttcccctacttagaccctataacaaacataagtttgatttcaggacttctatgtgcatttttcttggctacaacccatctcatatcgatgcctacatccttctggcagaatttatattgcccgcagtgtcacttttgatgagtcttacttcccttaccctcacttctttccatccaaatatacctcagcaactgatgctactgctgtacatcagattcctataccagctggcctcttttccactcaaactccccctcacagatttatgtcacctccctcccagcatgtttctgccccatcttcctctcccccacaaaatcctcatatcacagatctcccaatctccaattccctaccaagaatcaatgtcagttcttcaagaaatccacctcctacttctgtcaatgccaatttccaaccaatgtctcaaaccagctgccccactacctctgctatgtcctctgatctacccaccacaacatcatctcacaccatgattactagatcgaaatctggcatatataaacctaagattcttgcagctgaattactatatgactgctctttaaaagagccaacatctttaaaaatggccttaaataatcctttatggaacaaagccatgggagaggaatactatgctcttaaaagaaataatacatggatttttgtaccttatcaaaatggaatgcatgtaattgacaacaagtgggtgtatcgaatcaaattaagagctgatggcacagttgagaggttgaaa

SEQ ID NO: 49660 - DNA, 1613 bp, Cannabis sativa
ggaagaggtgtactccttttcaccttgtctatcctcctcatctgaaagtgcgagttaatgaggcacgagtgctttttgacctttactttctggaattagaccatctcagttaccccgttcccaatattttcttaggatagatgaaatagttgagattccaaagcactttatactactttctcaattcattagggtagacccttttctttgatgcactacccaggtttctttgagtatggtagtttcctagctcgggatgacatataactatttccatagggagatgtgaattgcaacaatgttgatgtttaaacctggaccagagtcttatgctttcttgttaacttctttatgcatttcttgttatttctgagtttctaaccctagtctttatttctttagcacggaagccccacagtttgcagatggatattctaaacactatcatcaagaatgtggactcaaggagcaaggaggtgcagaggattgcagggaaaaggaagagcaaggcttctggctctaggccacgaactaaggaggatgtgtcattcaccaaagtggtggaagctactactacagttggtgcgccggctagttccgcctctcttgccatttttgcagttccactaaattaagttctaatatcctcggaagcgccaatctttgaacaataggtgatcctagtcgacaacgatgatgatacaaacgggctagtattctcgctgaagaggccaaatgagaatattgagaggcttagaaagaaggccaaggtataggcagttcaaaaaccaactgtccaatagctggctaaccaacgaaaggtggagagggagaaagctcaacgacagaaagccaaaagggaggagactgagaggaactcacagaagggaaatgattctagaatgcaaaaatccaagctaactattacccaacaggtcatccaaacatcatataagggaaaggtccatcattttgttgatccttttgtagatccctctttccccatcagtcctctccatatggatgatcagtattaggccgtacaaaaagagatatctcggatatttctcaagagatataaagatgcctcaaaagagactaagaaaactattggcctgatcgcctagaggtggaaaagggaagtagcagccagaagtccagatagactatgagggataccgagccaaacttagaaatgacatggctccttttgttgttgatcttcttcaatagacggctattaccttcagtcaactgacagcggatcaatgggtcactactgctaatgagaactttatgtttttagccactccctctgccatcaaatcgctggggtaagtattcccatttaacttattaatttcacaccgtattgtagacaacttattagtctcactgactttattctttccatttcccaaggaccctccatgttgaacgttgtgcagatgctgccgccaagacgaccctaaagctagaaagtcttagggctgagtatgaggcaaccaacaacaagaagatggaagccatggacaacttggaaaatgccaaggttgagctggagcggaccaagaaaaagatgaaaggccttattgaccaacaagttaaggcta

SEQ ID NO: 49661 - DNA, 1700 bp, Cannabis sativa
  modified_base (195)..(195): a, c, t, g, unknown or other
tgaaactaattaaattccaacaacaatataaatgtacaactaacatactttcagcaatagattaaaaataaaacaaacacaaacttccaacgagggtttgtgaagagttacagattcaaaaccgcaaactgcaccgcatcgcgcggttcgagaaaaattcaaactgcaaccgtaccgcgaagaatttcaaaccgnatttcttttgcggtgcgggcggtttgagcggtttgatgtacacccctacttttaattttaaattttttaaacataaaaataaaagtaaaatttttgtttttgaaaaaaaaaaagtgttctaaaactatttttatcttgtcgcgtcaagctcggcccaacatcagagagtgtctccagtcatccatagaaaaagtggaagctacaaatggtttcactgtcacttggaggcattaattttgtgatcccgagccgtgtgcccttggagttttttgaacttgaggacagtgatgcgtggtcctctcagggcgtgggtgatcggagcacggtggtcccatgcagaaagaagagagagaaggtgggtgtcgagtgagggtgaaagaaaaaagaaattaggatttttattatttttaatttataccctttaaactaaatttatttttaagtttaattattttaaggttttagttttagaaaatatatattttctatatttaattttttaatcttaaattaatatttttaaaataatgtattatgtacatcaattaaattatgcattgtgtacactgtgtctatgtagaggtacaaataaataatttaatataacacttaacatatagcaattgtaaattactaacagattcttaattttagaaattttaccgctaaaatttgaattttaaaagttaaatagaagcaaaatagaaatattaaaccattatgttataaattttatttagtgaaatagttggtttattatttaatatgaatcattgttgcaccaaatagaagatatggtcttataaaattagagtaatcatcttcaaaaatctcagtgagacaacaacccaactcaaccaaccctattgctctaaaccctctgcaatggcgaaaaaccaacctccactttctgtcaaagacgccgtctacagaatccaactctcccttctccaaggcgtggccaatgagaaccagctttccactgctggctccgtcatctcccgctccgactacaacgacgtcgttaccgagcgagctctcgctaacctctgcggcaaccctctttgctccaaaccccttccttccgatcgacctcgtaagagtcgttaccgtatctcactcaaggagcacaaggtctatgatctccaggagacttatatgtattgctcctccgattgtgtggtcaatagcggtacctttggtaggagtttgaacgaagaaaggtgttcgattttggattcttccaagattgatgcggttttggcgttgatcggggattcgagttcgaaaaatgaagtgggtttaggtaaagatggggatttgggtttttctaagctaacgattaaggagaatacagaaacccacgatgggaaattgaatttggaggattgggttggtccttctaatgcgattgaaggttatgtaccgcagagagaacggaatttcaagtcggtgggttcgaaaatttccaagaaaggtattgaaagtttaaactctttatgtgg

SEQ ID NO: 49662 - DNA, 1737 bp, Cannabis sativa
  modified_base (279)..(301): a, c, t, g, unknown or other
  modified_base (1217)..(1217): a, c, t, g, unknown or other
actttggctcctttagatctacatctagaagttaaccaaaagagcctctctgctagaccctttcgaatccaggagagacatttctcatccaactcttgggaagcacatgttgataaaagtagcctcccacgtgtcttctattggaaattattttaccatgatctagatttggtaacatgtacgttgactacaacctataatcgaacaccctaaataagaatattctgatataatgaaataaacacatataaagtttagaagaccttacagtgggtgcannnnnnnnnnnnnnnnnnnnnnnatctctagcccttaattcctttttatagcagagctttatcagttctaaacctggatcttctctccttaagtttggttaaccaccgtcttccacactatgattgagtacttgacttgctatgagtgggcatggtactctatcactaaaggctgaaattgatgaagagcaataataaggaattcgaaatcactatagaaggaggctctcaattttctagttgtctggcaaagaaataaactaggttctgagttggatgagaatgagagcatcttatttcttttatagtatttcaaatagggtataggattttaaattatatggattaaaaaagataaaataaatgtctaaaaattgctttagtagccggccacttaatgggcctcactagttacaattttgccacattatttcataatttatcttttctttcaataatgccatatttttcaattttaatcctataaatgtcaaaactgtttatttaataattataattaattatcaaataatattggcatttaacttatttttaattagaccttacaaagtctctcaaataataaataaaccccaaaacctcttttcttcataattatgccgttgcttagtgaaaattatgtataagacaaagtctaattttaaaattatatttgattaattaaaactaattaacttagtctataagcagtattatctcaacgagtgtagggaccatggccctatgtaatcaggctaacaataagtagatctgaaatttaccaagtaaatttcgtaactcattaattcctcctaactccactatagatttggaattgaactcttaattacataaaatgcactattaccaaaaataaatgtgatttgattacccattatttcaatccaaatagttaaagatcctctatagatgatctanatcgaatagggacaaatttaccgttcgacccttcattatattttatgtttaaaacactttgctacttataaatgatattttagtaaactaatataattactataatgaggcgtgaatcatttatctccattaagccaagcttgaaggaaatcattatttcacttctaaatactaaaaagctatagattccatatctattattagcgctcccactcaattatactactatgtttccaagatgtaagtatttgaccgatccattggtcatctttaacgaacaactctaagaacataaacaacacagttgagaacgaatctaaccatatcaggattaagatctattgacctaatatcaactaactaatattgacttagatagatataatggtaagtttatgatatcttatccaaacttaatatcgacccaattcggtgtatactccatacatccgattctagcatactttgctaataccctggaaatgacataacacttatccaaggtgtaagtaagctctat

SEQ ID NO: 49663 - DNA, 1872 bp, Cannabis sativa
tgtgatgctgatcaggctactgagccaaatgacataaggtccacatctggttttgctatcttctttggtcaaagtttgattagttggcgatgcaagaaacaacacactatttcaagatcgaacacgtaagcagaatataagtccttagccaatattgtaaatgaattaacatggctaaataacttgttttttgagttaaaaattatgctaccaagaactcttacggtttggtgtgacaatatgagcacttgctcacaaccaactctgttctacatgctagaactaaacatattgaacatgatttttactttgttaaggagaaagtttagagcaaagttgtccatgttaagcatatatctgatgagatcaagtagttgatgatcttacaaaagctatttcaagacaaaggtttcatttctttagaaccaaactaatgcctcaattctaagtttgaggggacattaagacaataaaagtttgttagtggtagttagttctttttgttaaagttagttagaaaatgggttagtatccaactattttaattgattatgttagttcattctctttccttcttattgctctagattgtgtataaatgtatgatacttttcttatcttaatgaatgaagaattcctttctttcttcttctctctttctcaatcgctttgcctattttttctttccttattcatcaatggctaagacgattaatatgaatgagtgttctctacttataaaataatgaaggaattgatttgtatataaaaaaagatcacaaattataagaattagttatttatgattgccaacttttgctctcttttataaataacgtcaatttatgttttattaggtgatcattaaatcgagttgttcatgttatatagcacgatattctcgatttctttctaatcgtaatattttttgagtttaatgtttggattgatttaaaagttttattgtactctaaatgttaatattttaatgaagtttttacaaaaatactgaattttgggtaaaagtttacaattttactgtcacacagaatttatttaaaaaataatatctttttataaaacaactgtaaaacaagaagacagaacaattaaaacaacagtggaacggctaaaaaataaccgtagaataactgtgaaaacttaatactatacacagtataaaacttacacagtatttttaaaaaaaaatttaccccacaataaaaaaaattaaaaatttcaatatataatgtgaaaatctctattttaattattttttatacaaaagaatatatatagcttgtaaattatctatattttttaaataacattttggcaaattagcattagtgtccgtaaattattctataaaaaataattgagaaattctatttgggaataaaaataaagaagttatattaagaaatgagtgttagttgaatacataatttcggtggtcaaagtcaagcctaagttagatattgtgtactataaacggttgcctagtccaatctcctaaaattgggcttgtccctcactctttttttttttaaaaaaaagcatttaatagtgttcaatgccaaagtcaattttgtgtacttttagttacttcttcaaacttgtacttatatgattttatgtttgaatttgcatgtcttattatgtaatggttcattccgtaggtaccatttatgaaataaatatttattaattctttaaaaaaaaaagtagtacctagatttttagactagatgagaattacgtggggaaccacgtaaatattaattttattttaaattctagtggtttttgtttaagaatttagtgactaattgtaaattatgttataaacgatatgttttataaaactaa

SEQ ID NO: 49664 - DNA, 1503 bp, Cannabis sativa
actatatatcaccgacttctctccctgattctagaaggaggatcgaggcaaagcccagcgtcatcggcctcaatttcctcgttggagttctctctccctcgaggtatccgatctcactcagtctggttttttgatttcgaaggcctgcgagatctgggtttattggttttgttttcggtgttgagaatcttcttaggttgttggtacttgagaaacaacatggtgggtcactctctcttctgttcaagtatctaattgtacgtggttccaagtcgaggtcgaccgtgtttgaagctcgtctgttgtttcagtttcctttcatggtcgtgcttgaagctctacggacattaaagtgattttaaatatttttaggggttttattcattccaatcttctgtacagaaatataatattattgttgcgtttatatttttaggtaaatttatgttgattcccactgtttgtaaaattttagatccaaaaaattatgtttactttttattgttattatattttttaagttgtattgttgtaatattttcacattttttttttgtttcattttgaaatttatttttaatttgtatattatgtagcattaacattttttaagatggcgttaacgttgttctttattataattataacatttaataaatgtaaatttattccttttaaaaaaaataataataaatgtaaatttattatttatttttttttaaaaaaattattgtattttaagtccagcaaagttggacttgttatacatatctagatcatgtcccattttctagtccaacacagttggacttgaatagtttttgtagtccaacaatattggactaagaaaatacactttttatgtccctagatactatgtccaacacaaaactagactaggaagacattttaagtccaattttgatggacttaaaaaaggggtttttgtagtagtgaagtgcgctaaaggaggcttcaatgtctagaactgggctcatatcgagatgggtgcacacctgcctctgaggtgctattttgtaaacttctatgtcgtggccagaatagcacctttttaacttattccccaggcgcaccgcttgctgttaggttggtatgtcttttgtgttcaacacgggaagtctgtgccaacatcaaaggagatcttgtacttttataagattaagtcttaacccatgaggggccacaaggagaaggtgggcttttataggctagagtgctatactaggacatggctcaccttttcgtgaaggacactatctaggatgctctttgaggggatctgaacgaggttaaagaggctatcacagttattactgttgaagagggtctgaaggcaatgaaagccgatgagtagtgactggcagattggaggagacaattcctagaaagcctaagcgaggccaaagaactcactatcaaattcaaggaggtagtgtagaatgatggtgctccgagaatgagcacctccggtagtggtgagac

SEQ ID NO: 49665 - DNA, 853 bp, Cannabis sativa
tttttttttttttctttttctcctttttctttttctttttctttttttttttttcttcttctttcttcttcacccagccctcacagaactcctagccctctccgaccctcttgtgccccttgtgcgacgaagtgagacgaagaaagcagtcgtcttaggcccttcaccgcttaggcctcatttaaaaaaaaaataaaataaataaaataaagttaataataaactaaaaagttatacttatagtactaaatatatattgcactttagtgataagtaatttaaataaaataatatctaaaaagttcaatgtttaataaccagtagcttttttattgggtctcatttttttatttttacaagactcaaattaacatagaactggtcatcgataattgggttatcctgaatcgtcggattgttctttttttagacctctaaaactataatcaagttgttcattgtattgccaaatgggcgttcaaattttacgtgattggttggtatggagatagactctaataccagctgttattttgttacaagagtaaatactattatgaaaaatgacaaaataatagactttgtattttttaaaatagtacaaataagagcttaaattattttttttgctaaaataaaacttaatagtaacccgatacagaggtgttatgataaaattagttacattttctgcatatatttgtgctaagaattattttctagttggttatattaaaaaaattagaccctgagttttacaaaagttaccaattggaccttctgttttgttaaatgatataatggaccccgtatttttctaaaatagtaaaaataggatcctgagctgattttt

SEQ ID NO: 49666 - DNA, 1826 bp, Cannabis sativa
  modified_base (1760)..(1762): a, c, t, g, unknown or other
tttcaacacaccacaccctaaaaggaaaaatgtcgatgggtcgaaccaggcatcatctgatttggagagacgcgtgcgtgagacagaggaaagcaaccgaaaactgcaggataaagtggatgagctcatttgtcttattagttcccaacatagaagtgttgcgtctggttatggtgttggaggatcatcaaatgaacaactccatgctgaccttgcctccaatcgagtagcacaaccactaggtcctaccaatgtctactctacaccagatcccataacacaaccgtcgggtgctgccaatgtctactctccaccagatcccatagcacaaccatcgagtgttgccaatgtctctacgccatcaccactgcatttaagagaggaaaatactccagcaacagcactaccacctattggtggtaattcagaagaggtaatctcaatgttattttacgaatgaatctaatgcaaaattataaatatggtcaacttacaaattgaattgttgcttgtttgttttagatttacagaccttaccgtgttagatgcactttctgttggagcttagtgggatggtactgaaggttgcttcgggccacattatcatggagaaatatttaaaagatggaaagttttccattaatatggatgaatacctacacaaagattatcgtcgggtatttatcgaagaagccaacgtagataatgcactgctcctgcgtcccatagccgacgattcattgacaacagtagctcaagttataaaatgttatgtagcatggtggaaagactatcttacacctgttggaaaatatttggtatgtttcaatttatttacttaacttattgtgtttattcattaatgacattgctaactttactgtttttttttttcatatatatagatacaaccaccaaccaagaaactttagaagaaactcgtgaagagaagcaaaaaagcctctgaagatgtactcggtcatccaacacagcctccaaaattccctgagaggccaagtaacacaaaaggtcatggtcgttatgtccaaccacactaagcttcctcaatcattaccttttggaacttcatcaaaaggtgtctcaagtcatccataatccaattccaagtgtataatgagctatttggggtcgaagatgactctattttgcttgttaaaagtgatattcatgaattgtgcaccatgcaatacttgtgggagcccaaccaataggagttttgtgcaagtataatttctaactcttagtaataaacttgataatattcttttgacaacgacggttattaattattaatttttatcacgtacatgaaagaaacattgttggacattggtgggctgaatcgagtatataaatttctgaatctaagtgcgattcccaccgatgcaggggctgatagtaattgttgtcaagcactagtgacttaaatgattatgataactaattcaaacaaatggcttattgcctcatataataatctatatatgtagatttaaaataaataatttcagtgtttataactcttcatagaatttattattatgtatatattaacagttttacacatatttgttcgtgcaggaagatgtttcactggatgcttgtactcatccagccaagtacgcagacgacggtgcacttggattcaggcaacggtgacataccaaatgatctgaattccatcatatcacatagtttctatatcaaacatcccaatatgtaagcgtgttctttatttnnnaatttatatatgctaattaactttactttttgtgtagattgttcaccatatataaccaaatgat

SEQ ID NO: 49667 - DNA, 1012 bp, Cannabis sativa
gttttattattaattttcttaggaaatggatttctatgtttgtctatgtttatatataaaagtaacctgacgtgtctaaatttatacacttgcattggtgttgttttgtaagctgttgatcttatagttataggtatagaagaacttatggctggagtttgtatagactactttctaaaatattagacattcaaattttttactcctattgatctaataaaatttaattatcgtatcaaaaaataacatttagttattgaatataactccacacaaacttgtagtgagatttcaggaaatgagaaggtagccgcgaaaaaaaaaatcagctatttacatctcaaggatctttgacttgtttcttttgtcccttgttctctttctgtttgcagttatttctgagttgatccattatacagcagccgggagctacagtggtgctcctgttcatatgcctctaattcaagctattgttccacaagtaatgaatctgaagggacagcttagagattcttcaaaggtagcgaatttgtgcagtccttaaagctttcgcacttgtcttcttaagagcctaatagactaaggctatgtttggtaggaaggagagagagagtaggatggatggagagttttgaaaggatggggagtaggaatgatggagaggatagttactctcattcctattgtttggtattagatataaagtttgaaggatgaagagtaaaataaatattaaaattactatttatcatttttaatataattatatattttattttgaagggtagaaaagtcattttagatagcttttttgtctttttcttcaattcttccgtttttggagggattagaaatttgtttatttggagggaaagggtctccctccaacaaatacaatcctctccctcttgccaaacaagggaattcatcaatccctctccctccctcctctcccctctaccaaacatagtgtaagactttattcattatttaatatttttctggtttgcaa

SEQ ID NO: 49668 - DNA, 1457 bp, Cannabis sativa
tgtaaattgaaaaatgaatcacaccttgctaataagagttagttgagtctatttatagataaaccaacataactaacttaaccataaaaccggtaaagcagttagaaaatcctaagtacattcactaaggcttagtttctaggccactttacaacagaatgaataataatctaatgcacccaagtctttaattagtattaatatatacacttgccgttttagcacctctattatcaattattgaaaaaaaaaacaataatcgagagagaagatcaagagaactctaactggatctgtaaaggacaaatcaagaaaaacaaatcaattatagacacacactggagagctttcctcgtctaaacctaaaattagaaacttgtttatgcaattataaaattaaattagtgtaaaactaacacatgaacagtatataaatgcccatgattttggaaaatactatatcaaacaaatcaattgaggtattcaagcaatcctagatttattttatggttcacatataaaaaagattgattctttatcacccaagataccaatttcattgctaaacattatcttaaattatataaaagttaaaaaaattattttttattaaaaaataaattttatgtgttcataaatataagttagtaattttacatttttgcacggtgagaaccgtgagtattattagaccatctttaatgagagatgtaaaaattgtgttatatttggcacaaaaaataattttatggtagatttacattaaattttagcattatatttcaatgcacacttacaaaagtttgatgtaaaatttaatatctaattaatatctttattaaaaaaaataaactaataattatattatcaattttattattattttaatatttaagataataaaaaataataaaaatactttacaatgtaatgttatagttaattatagtaataaaataatacaaatgccataaatataaatgaaaaaatagtacatttattgtgaaataaattttacattgtaataaatattgtgtcaaatttagatcactttttgacacactgttaaagtacacttttgtttaaatgaactatattttagcctaccacttagtaatgatatgtggaaacaattttcacataaatgtgcgttatatttatgtgtgcattgccgctaaattttattacatgaagacaattcagctctcacttaaattttactactggtgaaatttaaatttaacattacccctcacttatttttcttatattttattttttgaaaagaagcctcacttattttactaccacacttttatggtgttgtaagccgcatgtgcctcaatcttaacaattaacaattaagtaattgaattgtagccggcgaaagacaaacttcaaagtcaacacttccttcttcagccccaggaaatggcgttagcttaccatcaatctta

SEQ ID NO: 49669 - DNA, 1301 bp, Cannabis sativa
  modified_base (1260)..(1275): a, c, t, g, unknown or other
gagagagagagagagagaatatagagagataaatgggagagaagagatgggcaactgagtgttttgtttgttagggtttggtttaatgtgtatatatattagggttgtgtatagaaatgggctttaacttgggttttttaagatttttttaacctctttcgcttcgattgctaaccgatactaaatgcctatttatattttttgaaaaaaaatcatcttaagaatcgatttttattttagtatcagagttacaactgacatgaattactcattatttgcatcagttaccaatgaaagaaaaaaagtgaggcttgaattttgcgtcaatcaacaactctgaccagatgcattgaccgaggcaaaaaaaaaaatttgtagtagtaatccaaggtacctgctatgtatctcagtattcttttgacagtaacccagtgactttgtaatggagactgcatgaattgacaaactttgttgacataaaatgctaactctaatctagtagtagtagcatattagagaacaccaacaatagacctatatagagttgcatctttcactggttcactgcaataattggacaattttaggtcactgttcatatgagcattttgagtattgacattgtgcatattagccttacataagagatcttgcagatactttatttgagatagtaaaatcccttattcgattttagtaacttgtatccctaataagtagtcaactagacctagatctgtaatagcaaaggttttgctcagatttgatatgagtcatgaaacaagatagacatcactacccatgacaagaatgtcatctacatataccagaatatagatgcaactagctgaggaagctctaaggtaaagagagtgatcttccttttagaactgaaacccaaaacttataaaaaacagtagataatttttcaatccaagccttaggagcctgttttaagtcatacaaggctttcataagtttgcaaacatagtcaggataggcagaatcaacaaaccatggtggcttatgcatgtaaatttcttctttcaaatctcaattgagaaatgcattattaacatctaattgtcaaattggctagcccttggcgataacaattgttaaaaccaccctaatagttattggttttactataggactagatgtctcagagtagtcataaccaacctgttcatgaaaccccttggccacaagtctgaccttgtatctatgaaccctacattgtgttggaaatattttacnnnnnnnnnnnnnnnntaccatgtatgtttcattaacatcct

SEQ ID NO: 49670 - DNA, 1834 bp, Cannabis sativa
ttctcacttttgaaaacacaattttaaaaactaaaaacacaacaaaacacgctcttagattctgaattctagacaagatctggcctgtttatggttaaagttgacttatattaaaatagtattttagagctaaaaagccgaaataagctgaaaaatagcttctgcaacatgtttagagcttgctcagcataagaatttaatatgagaaaaatactaacctggctgaattggtgtttgtttttcattgaagtgtagatagaaggaattacagggtgtccagcaaaacaaactatgtacaaactcacagcagtaggcaatccactcactttaaccaaactccctttttcatgaaacccaactccaccaaaaacaccaacacagaaaattgaaccaagaattataagacaagaaaacacaccagttgcagacacatatgacagtatactcaactcagttaacatcatagaaggtaagataaccaaagcagtgatcaacacaaatgattgtcttccctcaataactaataaatctccaatctttatcataaagtttggaaaaagttttcttaagttgtcactttctaagatcataagtcctatagccactaaataaagctctgagttcattataatcatcactatgattctaccctttttcccaaatgctctctctgctatgtctaagtaactttttattgttggatcagtatccatacatgtcttgagtaaaattccagtgtagaaagtcatgattgtgattaggaaaaacaacactaaactcaaccatcctccacttgagagagcataaggaactgttagtaacccaattcctgaaaagtaaatcataacaaattagtaacctttttcattaataaaaagaagaagaagaagaaaaagttgtactaacccaaaaaggcatttgttccattgaagcatgcttttaaaaaactagatccttctctttggttttgagctaataaaggtgtgtttgactcacttgccatttggtttttgctttagttgaatctgtaaccagaattgttaatacttatacaatattttcagaagacttgaagtacataataaattgctttattttttctctataccaagttttatcacaattcacatgtggagatggcaacatattggaatctgtgtatatatatatatatctatatatatataaatgaagtactttatattagtagtgctatgttattaaatctgatttagactccctttcaaaataaaaataaatgattcatcttgtcctttttgtctacatttattatatttatgcctattgtgtacttaaattaaataaatgaccttgctaggtccaaccacataatttaaatactttaaacttatctacttaatttactatatattgattaatttttaaattagtgctactaattctatttatactatattctcaatagggtcattatgcatggtaagtcccctccttgcaaatataaatgagagagaaattaaagtctgaaaatgaaataaataaattgagggatttatcttcaaacaatgaactctaaaacaataaaaaaattaccacgtcaaaaaaaaattataataaagaatagatagggaactctacatgtaatgagctcattatttttttttattaaatttttttaatagcattttaatgatactgttacttttttggaataattacatgaacattaatagttgtaaaaaaaaattatatttttatatttttacgatattttataaaattataaaaaaaaaaaatacataaaagtaacaagaaataaaatcaaaataataacaaagcaacataaaaaata

SEQ ID NO: 49671 - DNA, 762 bp, Cannabis sativa
ttaatacacattaaaacctccacataagattaatttaaattgtattctaattttttagcaaaagtaaataaatagttgtattctaattaagaaattatactatattgaatatggaggttggtacaatttttttctccaaagagcctaaaagaatcaactttttctgaaagcaatctaataataataatagtaatggtttgaatatagaagttttttttgtaccatatttaataaataattccgaaaattactaaaaaaaattatatagttatagctataggtagtcttaatattagcactctcttcacaaaaatgtaaagtggaataaagtaatgaatcattaaatatatttgatatctttcttttaaacctgatactctgtgattaaatgggtgcaaagtatttacttgaaaggacaatccttctagcaacacatgacaagagagaatcctaattggtattggagaaactcctcaagcttatattattgaccaattacgagtccatgatacaagttgctagagtaaatggaagattcaaggttatcaagttttatgactctctccttgatattgagaaggtagattatgctcgtgtggtttggagtaagctctcaattctcaagcacagattcattgtttgacaagcggtgaattctcagttgataaacagagacaagcttcaaagattaaccttgtctattaattctccactatttttgctaagagtcacgatcacttgttttttctctatccttttttt

SEQ ID NO: 49672 - DNA, 1053 bp, Cannabis sativa
gtaactttcttttcctcctcccctctctatattcttttttcctctcctggagatccctcgatttaaacgaaaatggtgtgttttcatttttttcgttggagaaactatcactgtcaaccaaatcgtttcttattttgtttttgattatatttactgtcaaaacagaaccgttgatgttggactaaattatgtaagctagaatcctaaagaactatgctacaagagtctcagaactcgagagtattcataattgatattggactaaattaaattatctttgagaaacacaagtgctaaaatgttagttcatacataaaatgaagcaataataacaatttaattacattgctttagtacaactttacatgccctgttgattaatttttacaaatttacatgaagtgtgaccgatctccttttttatccaaatgggactacatctcaagcttatataattatatgcatttgtgtcattgtatgtgtgtgtgtgttaattcatgagtgatgttaggaagtacattgtgttgtgcagttctgactgtttgttatatagatctgtagagtcttcaagacaggtcgagtcgcatagattgagtgcagttgtaaaagcgatgaataatcttgaccaacaggaagttgatatctccttaagccctcgagtaaattctttaaaaccttcaaagactgttgctatatcagatttggctacaagtcttgctcaagctggtgttcctgttattaaattagcagctggagaacccgactttgatactccaactgtaatagcagaggtaccttatctatccccggtcttcaagtattgtagcattttctatttgtgaaaaataatagttcttttctttaagtgatgccaattcgtgatctatttttccttactgaaaattgcaaaattaggctgggataaatgcaattcgtgaagggcacacgaggtatactccgaatgctggaactttagaagttcgagaagcaatatgccataagcttaaaggttagcaactgcaattgtggagataaatgttcaatatttttact

SEQ ID NO: 49673 - DNA, 1678 bp, Cannabis sativa
aggctttcgacttcattatggacacccttcaaggatctaacttcttctttaagtagacaaatcaaactctgaataactggagttaagaacgactcagccatttttcttcttggctttacaatataattcctctaattataacaaattatttcagcacaaaattattaaaaagaaatatatgtgtgtgtatatatagggaagaagaaaaaggtacctgtaaaataagcggagagctttttcagtgaatattgaagaaataacttgaaatgagaaagaaagctgttgcttgtcaaacttggcagatgtaagaacataaatattaaatatccaaaggttaggtatggaaaagaaaacaaaggtaagcttggttttttctcttgtccttttcttatctaaatatttgatcttacagtcactgattgaacgattttaaagtggttgattgattcaaacaaaaccaatttagaattaatacagtaatcaatattgtatgtcccacatgcaactaaacgtaggataactcaaatattgaaccatatataatggggctacacttgtacacattatccgcacataaacacttatcaccaatttgtaaacaagatattatatgggaaagaaataaccagaagaatcactgacaaataatattaggttccgtaggggtttaggtattggattatatatataaatttatgtaattgaaattatttcatatatttaaaatttaaaatcaatagatatatatttttaaataaatattattttttcgttgtataaatatcaaaatattaacttttctgaatttaaaatatagattttttttttgaagtaataaaatatatctttttaatttatatatctgttttaaaacttttaaaagaagttcagaatcagataattattatttttttaaccaaaattaaaataatttataattttaatatattgataaaatataaaaatgaatttaattaattagttttttttaaaaaaatatatattaaaacttatgatgtatatatttatagggttcttcttattttattgtattctaattggttaagtaataaaagtgaataaaattaaaataaataaattgactatcatacacgtatgaaatggtattatggtattgtataacagtaaaaaataacaaagacaaacgagttagtcatcattattggaaataatttgaatagggaatcaagttgaaataatttttattggaaacaatgtaaatagatgggcaaattactctaagaaaataaaaacttggcaaattaaaccaaatgtaggctttgtaaagactagtttgtggaaaaatgatcttcacaattgactttaagttgaagaaagaaaacaaatatctattactctttttatataaaagataaagggtgtcctcacatttggtactctgtgttttatttaaatacaagtttggtatcatgtatttttaataatacttatttagtatcttttattttaaaatcatacctatttggtaccctaaattcaaatttttttaataaaattttatcaatacaatcaacaatttaaaatttcattaataccgaattaaaatttaattatttgattacatataactgagaactgtttggttaaattgataaaattgtattgattaaactttactttagggtaccaaatatat

SEQ ID NO: 49674 - DNA, 826 bp, Cannabis sativa
actatcaaagttaataattcacctcgtgacgaacaatgggatgcaaagaaagatcatttaaagcttctatcaaagcagggacagcctcagcatcttgcatttgacccaaagcaaatgcagcctcatgtgccaacaaattagaagagtcccttgtagctgaaagagggaacatattcaaaattgcagcaaagggtctaaatctaaaccaaaggagagttgactagaaaatcccaaataacttcactaccattaaaataaaaataattgagtaaaacaaagtatatacatttgctattttctctcagcattctcaactctcattttctcccttacatgattaattgtttttcctcattctatttcaaatttaatccaatttgtgaaacattatacattgtgttattacagtttataaacataaattgcagaattagtctaatatctatacataaatatgtatatatatatatatttctaattagtaattaacagaacaaataagtgttgggtttcatataaaaacaacaaaagatccaaacttgtgagtaataaatgaaacagagaagactgagagagagagagagaaagaagcaaaccgagtatgagggcatttcgaggacgagaacctttgaggttgcggagagagaaaagagctctgaagcggtctgagatgggctgagtcgggtcaagcaattgatcgcagaggaatttttccatttctggtgttgaagactgaaaaacgccggcgttgtggttcgtcggagaatccacaagcgttgttaatcagcttttagggatttagggctttggtttggttaaagttagt

SEQ ID NO: 49675 - DNA, 773 bp, Cannabis sativa
  modified_base (324)..(324): a, c, t, g, unknown or other
cttgttaaagaaaaatgattcgaataaaaagaatgatgaaactttttattaattactattggaattgataagaaatgggcggtgatgaggtgagttttcataaattgaccttattttcatggctatcatatagtctcctactatatattgaatcatcatataatgtttgaaaaaatacaaaatcaaaatgaccacaaaattaattaaatttagtttttcatacatttttcgtgttcaattgcttcttcatggaaattcaaaagattcttatatatatgtgtgacgtttggtgatatttttgtttttaaattttttaatcacaanaataaaagtaaaatttttatttaaaaattaaaaatgtattctataaccacttttatttttcaattttaaaaataaaaaatgaaagtatgctttgtaaattttatttttatttttatgattttatttaagttgggtctctagggtcgggcccaggtccaagtctgggtttagattagtgtctgagtcggagtccttgtacgggttccaaggtctaagttagagtgagagtccaaaatattgataagaaaactgtgtacaaaagtgacttttttttttgttttttaaattttagaatattgtttcttaattaaaaaattaaaaaataaaaaataaatttatagaatataattttgaaatttttttaattttaaaaacaaaaaattaattaaaaaaatattactaaatacgtcctttggattttttttaatatacctctttatttaaataag

SEQ ID NO: 49676 - DNA, 758 bp, Cannabis sativa
agttaccaactgtgaatgaagttagaccaatgttgatgcagctttgtttaatgagaggcatatatgggtttggagtagtagggagggatgagcatggactattgttagagggtcacacagttcacgatctcgattgcgtcgaactggtctttgtcatgggaacatgttactttgagaatgattgtctctcgggatccaagctttatggagtacaacggttatgatttctttgtttggtattattattcaagattgtaaagcttcacttattgatttgaaggatattttaatttgttttgttaaacaatcagtcagcgaatgtgattgttcatgagtttgtgcaagcttcccattcatgttacctaatttggttgcggaagttaaaattaataaagttgattctctattcaaacaatcttattagtttgaccaaagggtataacgtttttagtgtaaaatgacgtatcattaaatattaaaccacttgttctttggagttattaatacaacgaatcaattttgactaattataacactttattgtacggattagctattgtaactttttttttttatttaggcgtttatatattacaacttgggactcgaacccaaaacttccaacacatacgcactcttttatggccacttgaggctactcaagtggttgattagctattgtaacttaatattagtaaccaaaacccattggaaaattgtgtgcattaaacacgaataacccatatatgagaagatgc

SEQ ID NO: 49677 - DNA, 948 bp, Cannabis sativa
ttctccttcttaaaaagccaaaaaatatgggatattgagagagagtgagaaagaacacgatcatgtgtattaaaagtcttatatagaacaatccatatatttctttttatctttaccggtaatgtggtcatattaataaactaaattaactattataggagcatttataaatttaagacaaatatctgtccaaatatgaattcttagagaactagtaacataatttgttagtgcatgagtcacactatttgtatcaagcaaaatagtacaatactaatactaacaaagaatttatctcatcaaggtctgaacataataaaaaatactttttaatttcaaagccagcaatttaacaacaattttatacaaaacattgtataggctaataagacgatactccttcaccactaaaggttttgtaactttcgtgatgcaccacattagccttattaaattgcttgaccaatttttcatcattcaaaatagctaggcgaaccgttgtagctcggggaccttatgatatcccaatgctacttttaaaaaaagatagcgtgaaaccatcaagacccggtactttcgtggccccaatggccttgaccaaacgatgcatgcacttcctcaactataaaaggtgcaaccagcaactcattttcaggcctaaaaattctgctctcaatgccaccaatacccatctcgacttgctgaagattaggacaagaagattgaaagatagttccaaaatatctcaatttccctaacaatatcgtcctcaatactcaactttcggtcatcctcagtcataatcttagaaattgtattcttttctacattcctaaagctttattatgagacttggcaacgagtccattatagtgaagtgcacaagttaggacttgaaaaaccatgtttttgcaaatgtcagttgtatatatgaaaatataaaaactg

SEQ ID NO: 49678 - DNA, 2405 bp, Cannabis sativa
  modified_base (1646)..(1646): a, c, t, g, unknown or other
atgacagcgagattctctaccaccatgggaaaggaaatgtggtggtgaatgctctaagtcaaaagggcccaaggaaagtttatgaattaaagaagatttcagcagagctggctgaagatatgactagagcgggaattgaatttgtgattggaaaacttgccaatattaccctgcagtctgatttgctggaaagaattaaaatggcccaacaaggttattctgagttacaagggtacagaggaaaattagaagctagtatagcaaaggacttttcactctcatctgatgggctactatgatacaagagcaaagtttgtgtaccggtagataaaagtatcagacaggagattcttgatgagtctcataccacaccgtaatccttacacccgggaacaaccaaaatgtatcatgatgtgaaagttctatattggtggccaagtatgaagagagatatcgtcgaatatgtgtcaagatgcttaacctatgagcaaattaaagcaaaacatcaaaggtcggcaagtttgctttagcctctgaaaattcccgagtggaaatgggaagacatcaccatggattttgtggtgggattgccaagaacagtagtgtattatgactctatttaggtaattgtggatcgataaaaacgaagtcttctcactttttaccagtgcggacaacgtatacggtggaacagtatgctgatttatatatcaaagagatagtttggcttcatggtgccccaaaatcaatagtttcagatcgagatctaaaatttacatccaagttctgggaaatcttacagcgagcaataggtaccaagataaattttagtacaactttttatcctcaaattgatggtcaatttaagaggactatttgaatacttgaggatatgttgagggcatgtataatggactttgaaggttcttggaacaagtatctacctctgattgacttttcttataacaaaagttatcagagtactattggtatggctccatatgagatgctttatgggagaaagtgtcgttcacccattcactgggatgaagctggtgaacgcaggtatctttgacctgaagctgtccaaagaacaagtgaggctattgaaaagattcgagctcgtatgcttgcttcacagagtagacaaaaaagctacgcagatcaaacatgtagagatattgaattccaaactggggattttgttttccttcgggtatccccaatgaagggaattcagaggtttagaaaaaggggaaagttgagccccaggtttattggcccgttcgagattcttgagagagtaggtcaggtagcttatcggttggctctacctcttgctctatctggggttcataacgtgtttcacaccttgatgcttcagaaatatgtgtctgatacaactcatgtattaagttttgaagatatcgagcttcaaatagacctgtcatatgaagaacaaccagtacagattctcgacaagaaggaaaaattattgtggaacaagactattccgctagttaaagtactgtggtggaataacaagattgaagaagccacttgggaattagagtcacaaatgcaggagttgtatcccgagcttttctagtaaatttcgagggtgaaatttctataaggaggggatngttgtaatatcccgaaaaataatacggtatttataattgggcatattttattaaatatgtacttaatctagtaaatgaagtaagattataattatacataggttgatttgtgtgaatttagtaaatggttaaataaagcgtaatttattaattagggagattttattagactatgtgggtatcgtaaatactgtttctgaaattaaatggtttcaggcccaacaactgtggaaactcgacggagtggtcagaaatgtcatgacaacataaaataaattaagttgaaagtataccggactagattaaaattttgagttatcagtttggtggttagttagaaattacaaatttacccttaagctttgattaatttaagtaactagggtaaagggcaaaatggtcttttcatatgcatgggattttgtctctttatgttaaatattgtcaaaaaaaaaatttatttggagggtatatatttttggggatatattattagtttaaaagggaaaaaaaaaatattaaattaagagcaaaaaaaaaaacctacccttatttcccctcccccttcgaaccctaaggaccagcaaccccaaggagttttctccttcaattatcttccttcagctggtcttgcaagaatttaaggctgctcaagcattagggtaagtttcccttgtgattatttattgatttcttgagttttaggttagtatagattagggttttaagaacctcaagaacgtctttatcagaatattt

SEQ ID NO: 49679 - DNA, 729 bp, Cannabis sativa
agaaggaaaaaaaaaagtaaacttcacctaaaactagcatttacgtgcctcgacacgtaactcctacctagtatatatatatatatatattttggtgtagtgataaaataattttaaaactcttaagaactccaaagttcaatccttataattacacataattttttttctaaataaaaattgtgaaagtatagattaagaattgatctcttaactaaatactattttgttacattttattttattttatttatatactgatattttttttaacaatctcagaaccctgagcatgtaagggctcgaggcgcacgtttggctcgtgccacctcaaggtcaaccctactattagtatgaggtcaaaaaggtgccgaaaacacatatatgaattgttattgttaataacaattcatatttctatatatatgttttttatctttttattattttacaaattaacttatacatatatttataacacagcttaattcgtccataaacaatgatttaatttcttaatgtttttttattaaagattttttcttaaagttatatgaagaaaaagaaaagccctaatatttaaacaataaataaaaaaaatacaaatataaacaagataaaaaaaatatcatatttttcaaaaaataaaaactcatataattaagtttaaatttcacataattctaaacttttttattgatcaggttgttgtgattttttttttttttt

SEQ ID NO: 49680 - DNA, 2636 bp, Cannabis sativa
attcgaacaccaaatgggcatttttaataacacatttgtttgggagagttggcttggaattggattaaaagatttatataatggaaagagaaaaatctagtgttcaataaaaaaatgaactttgactttgccacccattaaagaatttgctggcaagaccctactttcacaatatcacacgcttacccatcatttcaactctgtaatcaagtttcatcatcttattcttttagggtcaaattttcaggttccattgaaacaaaatcatctctttcgtaaagaaaaaggaactctttttattgttagtttcaatgtcttccgcgccatttttgcttctttttctgtgtttattattaccatactttgttctttctgatcctcgagctaccgaagcagctctaatatgttccaactatgacactgcctcaatggcccaaagaagaccctttatcacaaacttcttagccactttggaagctgtgagtccattaattgctcgacaaaaatacgcaactgtgattaatgggactggtaataccacggtttatacttttggggagtgcatgaaagacctttctcaggacgattgtaatctctgctttgctcagtgtaagacccaaatcttaagatgcttaccttttcagagggcagttcgtgggggtcgacttttctttgatgggtgttatctaaggtacgattcctacaatttcttcaatgaaagtttaggtaggcaagacagaaccctttgttctaatggtgattttagtgggaaccggaccgtttttagagaaaatgttttgaagttggtgaggaatttgagcattgaagcaccaaacaatgatgggttttttgtggggttagtgaatcaggggaatataagtgtttttggtttggctcagtgttgggagtttgtgactggaactgcttgtgggaaatgtttggctgcttctgtcgaaaacgttacttcttgtgctccaaaagaagaagggaggatcttaaatgctggctgttacttaagatattcaacaaaaaagttctatgacaattcaactagtagtgcttcaggacaaggaaatgggggtgagaattttctgcttatatatggattttggtgacaatgtaattggggcaacgacaatcaattttgtattcaaaagtgaaaatttgatgtttttgtttgttaatgtgaaatcttgatgctttattgaaatcaattccattggtccaggctcatactatatcatcataaaatcctaatgtttctttcttagggagccgacccttggctgttatcttggctgcaacatctgctggtttggcttttctgttgactatagctgcagttattttcttcttgagaaaaagagtactgagaaagaggcgaggtaattgaattggtttgatatttttcagttatgacaatatgaactgagctgcttcaattgtacattaaaatgaactatgattatttcatcagagaagaaacaactaggtgcacttttggacactgtgaacaagtccaaactgaatatttcatatgaggttcttgaaaaggctactaattactttcatgcttcaaacaagcttggacaaggaggatctggttcagtttataaggcaatatatgatttttcaaaataccattctttattttgcatttcacttcatgaaatgacaccatcatgttatgttctcttgctttctttttttttcagggtgttctaccagatggcaaggttgttgcggtaaaaaggcttttcttcaatacaagacaatgggtggatcatttcttcaacgaagtgaatttgataagcggaattcgacacaaaaatcttgtggagctgttgggatgcagcattacgggccctgagagtcttcttgtttatgaatatgtaccaaatcaaagccttcatgataacttatttggtggtactgaattctcttaaagctgaactttttcaatgttgaagcaaaatgatcttttcaattcattttatttacttatcctttgtttgttatctttggatgaactcagctctaaagaatgttcgacaacttaggtgggagtcgaggtataagatcatattgggtgtagctgagggtcttgcttatcttcatgaagaatcgaatttgagaatcattcaccgggatataaaactaagcaacattatgcttgatgaagatttgacaccgaaaatagctgactttggactagctagattattcccagaagataaaactcacatcagcactgccattgctggcacactgtaagtttgaaataacttatttggacttggtcatgattttgattgctacccttttggaataccaattctgatatgaatttcaattgactcttttagtggttatatggctccggagtatattgttcgtggcaagttgtccgagaaggcagatgtttatagttttggaattcttgtcattgaagtagtaagtggaagaaagaacaattctttcaatgacaacccaaactctattctgcagatggtaagttctttgtttcaaaaatagataaaacagtctcaaacattaggtgataaagatttacaaaagccttgttttcttatatcttttttaacccttgtgttaaggtttggagccattatttaagt

SEQ ID NO: 49681 - DNA, 2640 bp, Cannabis sativa
  modified_base (50)..(59): a, c, t, g, unknown or other
ccactgcaaatgtacgctggtaaaactttgacctctttgccagcgcagtnnnnnnnnnncgctggtaaaagttacttttaccgacgaagtagcgaactgtgctggtaaaagtaacatttcttgtagtgcggtgtgggattgcatacttacttgatatttctccttacgatcacgggactactaacggtcacaaaattgacaaaatatttgctataactatacgtcatatataaaattaaataatataattttccaaaatattaataataaaaaaaatcaataaatatgaacaaaaaacaatacccttatataatttttccatattatgtataaatatttatgtgagttcagatctacctgctaccttaaaaatttgaagatatctcaatagactttcaatgaagtttaattatgtacgtatatatataaataacatttttaggtctaatcggctgaaaacacgctttaactaatttatattcaaagtttgaccctaataataatgacacaattttccaatgttgaattgcattatagttgttattatatataaatgaaattggagcagaaaatataggatatatatacaaaaaaaaaaagactttaaagcacatgcatccactcaacacactaccctttatttacttctcgaccttaattaactcataattaagtatataataatttaaaatgaaataaagaaaacgaaaagaaaaaagacaccatgcttgcatcataacatgacactatgcttgcatcataatggcttctcccaaggttggaatgccttaatataaatggaaaatgggagaagtcgttgggtctgcagtggtcgttgggtccgtggctcgtgagtggggtcgcggtggtcgtggagagaagagatcgaggtggctgttggttgtgcgtggtggttgtgggttgattcgttagggttagggtagttctgagagcgagagagagagagaatgggtgaagagagagggacggttgttcgaaatgagaagagtattttggagcttaagataaataaagtgtaccaatttttaacaatttagatatatttaaatttagcattttaatctaagtacataaaatattatacataattagtcaaaaatttccttttaaaaagtcccacaaaaatacagagctcatgaaaaaatataggtcatgttgtgttgtttcacatgtcaataattttatagggtaaactcagtattttcatgtcatgttacactcgggagatccgtttctctagaccaactcggtggctcaaattcatatttcacgtttttacatttttatgacaaatattgagctacttattaagctaaatgtgatagtttcaattaattacttttatataatttctcaattacaattcatataagaaataattataattattaaattaatttttagttttttttttaatatattgtgtttttatgttagtttattcgtgcttacgtgtccatatataaatctatatgtttttgtgtagcatgtcggcatacccgaccaagtccatatattttcatgtcgggtcatactcgtaatttcgtaccatctcaaaaagtcggtatttatatattactaatataaagtagtattttataaataattagtaattaacatcatgcatttctctatattgtgtttggtgtactttaacatataatttgttgcatcgatcgttgactcttaaactaaaatttatataaataatggacttcatcacatatttacagactgtgttaggcttgtttgagatggaagttttatttatgatattgacttccttaattaattaataattagtaaattaattaatttcacatggctctcttgaattgatccagtacattatgcataataatgcatgcatactaacaactcatatagctagttttcattttattttttaaaaaataattacacgtaaatcattgaggaaatttcctactttcacaatatatattgtctaattattattatattaagaataattactcactcaatcaattatgtctataaatagtcataccctttggattataaagattttaattaagtacaaacaagtgataattaatcataatcttaaaagagtattaattatttggtactgaaaaagatggccacagttaagatgaacaactttggttctctatctctaatctctttcaacaatataatccctaagccaacaatgatatcatcttgtaagtagtctcatctctctagttcatcatttccattaattaatatatttatatgtatagataaatactaatcatgaattgataaattaattagcagccaaaattagtccatggatcaaccatagtagtttttggggacagaattataagcttcaaacaacgcatttttacaaaggaaaaagtcctctccaacataatataatgaggtatatatatatataactattatgttgatattttctctacaaaaaatgaaattaatttgtattattaataaattttatttgtttgatttggtgtaattcatagagctgagaagatgattgccattacagcaagggcacctactggagacggtttaacatttccaacatttaatggtaattgattcatatattcaacatatatatta

SEQ ID NO: 49682 - DNA, 1729 bp, Cannabis sativa
  modified_base (28)..(37): a, c, t, g, unknown or other
atgttaaaaacatacatggtagtaaatnnnnnnnnnngtaaaataattccaacactagtctgctgagtgaaccgtgagggtctctcccccatttcatctattggtgtctttgaaaacatgcccacacacgaattcctgaccgcccaactctttatgtacaccatgccatctaaaagtgcatcccacaggatgtgactctcgagtcaactatctcataaagcacacccatcgatttctatatgcatgcattgtcgactcaaccatccaactgatttacactagcatcatgcccttttggcttcctcgatgtacaaagttccaatgctgcaatcctctagccttcatgcaaaatctagcaccctctttacctttgcaggctcacatgacttctaagatttactgtcatagccctctggcccccactcaaactctagcgccatcttaatgcttgctctcaatcttcttaaccctactggcttctttgatgcattcattccacaactccgcatctctatcactgcctttgtgtgacttatgcccacttgcatttttacaagccaacacatcccactcgactatctcagtgcttcccatctggatcaaataaaagtcatatgcaaatgcctccaagtacgatcatcctgtaacgattgcggcgtctgcccttcttggtctccatgtgcagccctctggacacacacatgtagcaactaaaggattccatgtctatcccaattcaaatcatctcgatcatcaactctcaaccactgttgtgactaagaatctgatggcccctctaatacttccacacttatgctaacaagcttcattttcaataaaaacgcctcttgcggtttacgatgtcactcaagtaaactcaatctagtgtaccaagcatactgtatggataacccaatcaaaccatgtactacgccaaagtgtttcaaacatacctgcaagcaacatactggagagcgaatgcaaacatacctgctaacttctagcagcattctttcatatggccaccctactagtcccgctgactagtagtaactcacataacaccaaggatccagggggtagtggagagctaacaccagacactcccaccttgagcatatcataagccttctaccaggaacatacatgatttttgctctgtaaacatatggtcatcaccatataccaaatcacaaagtttttcgaatctgcttgtaccgttgtattcatagaccccaataaatggcgaataccaagttctgtcccgatccgaacaatattgaggatgtatttgcaaaaattccactgtcgtacaaactaaacatcagcatgtacaccaacatgcgcgactacttaaccaccacttggccatcttgtgggcatcacctaacttgtattgtgacatctttgatcgcacgttacatcagccagagtcatgaatcttcttgatatgagtctatggatggactctaaacttttaatttttactattacttttaaaaactcaagttgggtgtgtgtggatgagctagaaatagttgagaaagttagtaaccttattttgatcacgagcgtccgaattaatggccaatgcagaatgcacaactttttattgtcttttgcacatatatgtggttataatctttttggattacttattatatatatagtacgactatactaaataatcacaggctgacagcagtgttttttttcctttttttttttt

SEQ ID NO: 49683 - DNA, 2457 bp, Cannabis sativa
atttggtaattaatgaatatgattatgagatagatgtttggagactcgtttgttactttccctgatactctgactaaggtcttttggatactcgctatgttggagggttgtcttgcctggacggatcttctatccaacatctggaggacatggcttggataacaaacatggtccactatcttggttgggcctactattgggcctaaagtaattgaattgtaccacttttggaattacacgtgttctcatacagaaacacggataacaatgagtattctatgttggaatgcccagggtttggggaaccctggtgcattcactgctttacgagcaattgttcgtatgtactacccaagtttagtctttttgtcagagactaaacttaatggcggttgaatggaggggttaaaatacagattggttttgcatatagttttcatgtgaactattcggggaaaagtggtgggttaatcttgatacggaatgatgattgggatgtagaggttaagtcctttacgaagggacacattgatgcacttgttaagtgtcctgacatggacttatggcagtttactaggttttatggtcatcacctaaaagctcacttacagggtgaatcatggcgtctattaagtaagcttaaggacatgcttgctctcccttagatttgtggcagggacttcaatgagatcttattgctaagtgagaagaagggtgagaatgatataagtattttaacaatgagtgcttttcaaaatgtgttggctcattgcttgttcgacgatttggggtacaaggttccaatttgatgaataaaagaaatggggaagctcatattcaggagaggctttatcgatttgtgtgtaatcagagttgacatgaattttttcctatctcagatgcttgccatgttgttgttgttgtggtagagaatgtggtgggatagccaactcgttgtagtagaagatcatttagattcgagacacactggagtgaacgccatgatatgtagctggtttgtggtattcgtcaacatcaaccctcgattgctaagaggccttgcatatggctattgatacgtgtgctactcgactatcccattggagcaaaaataaatttgggtctatttaggtggctcatacacaaaaaaaaaatattaagttctttattggaagttgtcacccctttggtcaatatggatgacgtgaaacgattagaggaggaattagaagacttgatggttagggaaaagctttactagaagcaaagatctcgtgcagagtagatgatagcacgtgatcgtaatactaagtattttcacaataaggcgagctcgaggaagaagaaaaatgtcatcaaagaaatcatgactaaagtggggcaaatgataggagatgaggctagtattgtggctgagatagaaaggtattttgttgagatttttcagacatcatggcgatagttgaagttgtcgaggagggtattcctagggttaagtcccatgttggccaggcagaaaatgatcttgtagtggctccatttacatctaatgacatttatatggtggacaaggaaattggtgcaactaaggcgccatggcctaatggttttcatgtaatattttttcataattattaggatattatcggtcttagggtgacatctatatgtttggaaattttaaatgacagaaagtcagtacgttcttttaataagtccaatgtggttctagttcttaaagtagccaaaccaaaggtggttaaggagtatcaaccaataaattcatgcaatgtaatatataaaattgtgtcgaaagctttggcaatagggatgaacaatactcttgttcctcttatttcctcttttcaaagtgcctttttgctaggtcgatcaatacagacaattaagattattgggtttgagttgctccatttgctttaagaaaaatcgagagaaagagttttatggaactaaagttggatataagaaaggcctatgacaaggtggagttgaattttttgagagaagttatgaggaaatttggctttgcgaaaatattggttagtcttattatgaattttgttacaaccccaggatatgtgtttggaaattttaatgacaggaagtcggtacactcttttaatatgtccaatgtggttctagttcctaaagtagccaaacggaaggtggtcaaggagtatcaaacaataattttatgcaatgtaatgtataacattgtgtcgaaagctttggtgatacagatgaaaggcactcttggtcctcttatttcctcttttcaaagtgcctttgtgctaggtcaatcaatacatgataatgtgattgttgggattgagttgctccatttgatatttaagaaaaataacgagagaaggagttttatggcgccaaagttggatatgagcaagatttataatagggtggagttgagttttttga

SEQ ID NO: 49684 - DNA, 736 bp, Cannabis sativa
ttaaactaagcggtctttacaattagactatgaacaatagtctcattataacgcaattaaagagaatagatatttttttttcttattttcaattaactatctaaatttgttagatattggaatgaatgtgagtgtatggtaaagtgcaaagagtaatatctcaaaactaattggtaatgagaagaataactcacaaatcttattatatttccacacattattaatgtgagacgatttttaataaaactaatcatagaaactcaaatttctattttattaattaccattggatcaaaatttaatagctaatatttatagcatttataatggaatattagcggtaacactacctaaaccttatggtttgtaatccttaacctttaaattcattttttgacggtaaaatctactgaactgtcattttattttggtttttacactttcatctaaaagtttctattaagtgtcatggcggactgtccacgtgtaaacttttagtggtctaaatattattaattattaaaatattataaaaataatttaaatattataaaaaatcaataatatttttttcttttctaaaaaatatatatatttttttgaaaaggaaataaaacttcattgaaatcttagtattcagagtacaaaagagattcaagattagatcatacattgtactaaaaaacactacgaccagagagaaatcaagagtgcctagcaacaacatgggcaactc

SEQ ID NO: 49685 - DNA, 1604 bp, Cannabis sativa
ttctgctacagctgctttttcccacagcacaactacagctgcttttccccacagcacagctgtgccaaactggccctaagaacttttagtttcttttctcacatgttaatacaagtaaaaggagagtagactataaccactatcacggggtcaaacctcaataacaaatttgtgttcttattgctcaataattattagtaattgtttctaattactttaattgacttattatcgttggctaaaagcgaggtcaacatatatatataatctatatattattttgcatattgtgttaaaagttgtgttcataaaatctatcccataatttgtattaaaaagagttggcgagagtttggaagttcgtttacctacactacttttgttcatcttttattttggagatcgaagctaccaagatcaatagttggaggtatcacgatcatctattttttttatatgtgcaatttatatattattctgcatatatatgtataaaagtgttcatatatctaacatggtctcatccaagatgtggaatagttaatcacgtttaatatttttgggaccaagatgctaaacgcagacacgcagtcaatcaggaccacttccaaattcttggtttctttgtttgcatgcagattatgcttcttacttggtaccttttgaatcatcagagcagttcttgggccttcaccgcataaactgccattttttcaccctaagtttcatgatgtcccaatatttagttcatcactagtttagaatcactatgcacttcaatatttttaactcctacctcctggataaggggcaattcaaccatgagcgtctcatattctacttcattgtccaaggccttgaatcggaagtgaagatgtaacgccccaatagctaagagttgttacagagtttaaaaatgtcctaaccttgataagcaagacattttggatacgaaagtgtgaatttaactaaacatcgtaataattaaaactttttagtggaataaacttcttttataaaatttacgagatcccaaagattagattccaaagtttaaacttaatcataagactcaaaagtcgacctatgcagcaaaacataaatttctgataaacaatcttccaaaagggtccaaccacttgagtcaagttggtcgaatatgtacatcacctgtcaaagtgctccaactcatgattgttcaattttaacatttcctttatctgcatcataaagatccgtgagtcaaagaaaagcataaataacaacttaataatatacttgtaatacagggttgatgcccagtttcatcttctaagctatagattgatgtccataaccattaatacaattaactattatgtcattattggacaatattgtctcacatggatcaaatgtaaaaatattgagccatatataaaaacatgagctactccacccatcaccaattgattttgagataaaacctcatgattctcaacatggtatcagagccatatccctagtgggctttcgatccacacctattagatagttagccagacacaagcgagcaaaatggtactcccagcctcgaacaagaataagcgagcaaatgaaactcc

SEQ ID NO: 49686 - DNA, 608 bp, Cannabis sativa
tttttataaaattttatatttcatgtaattttcacttctacttgaggtggttttataccaagttttgttcaagatttattgttaagatatgggataacacattttcaataaagcgcttcatgaagataagtttactttttataataatttttgttcttcatttataatttgtaaaaaagtaatttggatatatatagtgatttatgttttacgtttcttttggtttaagagaaaattaaatataaatattatcaacaatagagattttacagataagttacattataacaataatcttcacatttttattatttatttaatttgatatcgatatgttttttttttctttttttgtacattggtttgtgggacaacgacacatctcgtgaatttcttttctgatatggagtttattgtctaatttttttgaggcatatctttttatgtatgtcacaacgttattattgtggcccaaaaattggtttagcattctcttaagatagacagtgaacttttttagatggaaaaaatctctttatttctgtctttcaatatttttgctctaacctaaaatggttaccttaaaaaaaaaaatatgtattgccaca

SEQ ID NO: 49687 - DNA, 1118 bp, Cannabis sativa
  modified_base (1046)..(1070): a, c, t, g, unknown or other
aaaggttattagattattaccttattaattttttttagtttccatcaatgggtattacccattaatatacacacaatatatatgtgataattttacacaattatatatgttacatatatctcagacatatataatatatatatactttaatacacatatatgatatatattatatacacataatgtatattatatatatgtctcatataaatacatagaaaataattacttttacacatctaatctcacaatgtgtatttatgttatattatgctcatcatatatataatacacatactcatatttataatatatatatattatatatctcatatatacatatataaacatgttataaattcaaatatcattttatatatcactatatatattaatatgatataaatttatgatcatatatatatcacatatacatatataattctctaactattaacatataaaactttcttatctcaacaaaatagggtaatacataaattactattattcaaatagtaaaacacaaaatatatcatcatgctcacccatgaatggcttttgcacaaaatttcttatttttacattctcaaaatcttgatttacattgaaaatggttaaacttttgattgttagaaattttattataatttaataaaatcaagatattattattctattacaatataatacaaagattaacaaagagattaaataaatgttacaataacatgtactacactatatataaggatttatatatatatataagaaaggtagaagaataagaatatgtatataaatactcactaacaactttgagtgtagattagtagggatcaccatgacttaaacaaggtattacacttttgtcaaaaaaccttatttctcctatctctaagcactaagggaactctctaggaaatatctttgagaattatcaagccttgttttttttagcaagtgcttgttgatagaaaattaattatcacaaaataagcactttattaaaactctatttatagttgtaacaccctaactaacannnnnnnnnnnnnnnnnnnnnnnnnatgctgtgcagctcgttgctaatctacgaggtttatggaaaaacgtga

SEQ ID NO: 49688 - DNA, 841 bp, Cannabis sativa
cacataagggctcatcagaaagaactgaacctgaacatcatcagccacatatggaacccagctctttccagaccactcgtagatctccacggaaaagtcctgtaacgcagtcaaataagaaaaaatgaagacaattgcaattcagcaaatacaagggtaggtaaattgaatgaatgtacaagcatgatcgcataatacatgcacagcaataataaccctcaaacatgcttaccaggtcatcattgatcctatatattgctggttcgtctgtttgttcaactttgtggtgcttcatgttgacagcctgaatttacaaaatgagttatatgtcaaaaagaatatgatacaataaaaatatatataacataaggaaaacatgatatgacagcagcatttacacttgagtgcatattcaaacctttaaatggcccctttcatggaagacccatttgctaagttcagtcacaaactgttcattgcctgatttctcatatctgtcaacaaaatttcgacataatgtcagcatgttgctagaaaagtcacaattggaaaaataataaaggagtttgttaagcataacaaaaatatagttctttcgtaacattaagaaagcttgattatttgtgagttgcatagcttgatttagcttacaacagtccaagtacaactaataatcagttcttcaacaagtatgcagggacgtattttcttatgtgtgtctccgaggaaattgttcatcaatgccggtttatcattattgctacacagtatacatgagagactacaaaaatatcatgcattaatgcggtgaagttcataaactaaatactacaatgtcaat

SEQ ID NO: 49689 - DNA, 679 bp, Cannabis sativa
attaaaaaattaaaaagtaaaaacagttttataatatgtttttgaaaaatatttttactttttcaattttaaaaacaaaaaacagactaaaaaagtattatcaaacggtacctaaggagttgagcttaactaatcgtaattgagttgatttaaccgttgataattaattattgagaactaaagtatatcaaattaagtttaggattgtggactgtgggcctatgtatttagaattaagccctcataaatttatttttggttattttttgaaaaaaaatcatattaatatgtatctacccattgatttttatttttaatcaacatgttattttagttgtacatccaacaaaatcaaagtacataaaaaagaaaatacttttcaaagagaatggaatgtatttttatattatatatgaacaaaatccattaggaatattataaagggtccatgagagtattaatagtaaagtggtagtggttcaattttgagttgctctttaataatgaagaggaattacatccttaaaacactcggatctctctctaatattattgctactaataataatttgatattagtaatcagacaactaactaaccgtgggtttggttaaattatttgttgtcttaaattgtcatttagtgacattatactattatagagaggttaccaaaaagt

SEQ ID NO: 49690 - DNA, 994 bp, Cannabis sativa
acatcaatctccttcactaaattcaaacaaccagcaaccagccaattggtccagcccgtaaattccacagcccaagctctcttccccagccaaagaaacacctgctgtagcacttgaatagagaaagaacaaccaaagaaaatgtgcttatgcacttcctcaactcgttcacacactgggcaatttgctgaagtcaacactgcatgaaacttaagcaaattgtctctaattaggaggtgttggttcacagcctaccaaagaaaaaatcgatttttaggcagcattaaggaattccaaaccgctctatgataatacacctgctgctgaatgagaagactgttatagagtctacttgctttgaacttcacagctctcacgactgcaaggatatccacctcagaaaaatttaagcctcaacctacaaagtttgcgccaatacccacttgtatcctatttcagctcataggtctagaaagaggaattctttaagtaattgttattaatccatttaacccaaagaatatctcttctagaagataaagcccaaacatactttgctagactagcatagttccatttagctccctctttgaacccgagacctccataggccttcgggagacaaactttctcccaagaggccacatgattttgcttttattgcctgacaaaccccaaagaaaacctctacatagtttctcaacctctttggtcacactttgaggaagcacaaagatgctcatccaatagttacgaagaccaattagcacagagtgtatcaattggactcgaccagcaaatgagagatgactggttgaccatgtaaacagtctttttctgatctttctaattataatttcacaatcttcagctttccacttagttcgtcttagaggaactcctaaatacttaagagcaaagctcctttcagacagcttgagctcttggagaatgcagactttttcctttaaatcaactgttgggttttgtgccc

SEQ ID NO: 49691 - DNA, 3455 bp, Cannabis sativa
tctgggagtacgtggatccctcattccttctccgggaggtatgtttcttgctgatcctcttgattaaaaagacttagtcgaattatctcaaaaccttaatcctctaatccacgtgtcgcagtagcgttggtccacgtattttggacaaaattaagggaaacatttaccccccaagccttgtttggtgggaagtaaacgaggcttgtttagatgcctctagttgtcttattaacgttctggcacgtgctttgggcgcgtgggggtgcatttatgaccatcatcattgcagtttttactttttgcaggcaacgattcatttcctatccatttaatgatccgacacatttaatgggtgtcagtcgagtactcaagcgtttccaactgcctttatgacatttggcccaaccgttacatctgtagaatgcgaatcgattgctattctcaccgtatgattatgcctgatcacagctacttcacacccgttctggcctataaaagcgtgccttatcatttcatttggttactttttctattttgccaaattttctcagagcttcctgagagagaaaaaattccagacacaatagattatctgctcctttttcttcgtcattgccagtcttcactatattgacgatcgacaccaacccccatcaaacttcatgtatgttttcaggaaactttatactcgtctattgtttgttcgtattgcatgtttggagtatttgggttgaatgttgagtttctgggaaataatcttgcctaaatttgttgtgtactgcgtagaatctctcttatttgtgcccttgctgtttctctttattgccttttctttttgggaaacgtctcttctgttgaaatagtgctcttagggcataggatgattcctgtttccttggcatttttctttttctccactgtcgctgcctttgggatttttgcacccgatgcttgttaagggaagtcttttaggtttccttatttgacaagcatccggaaggggcctctttccaacagttaggggagccccattccttttttaacattagggtttggtttggggcctaacggctggatttcttctttttacagaaaaatgtctgctcctgtctccgggactaaaccttccaaagagggggcaaacaccctggctactttggaggaggtcatgaaaggaccggttgtccaagagaactatacttcttgtgctaatggctgggaagcggatgagctccattctactctggtttgccctcaccagcttgagaagattgtgaccgtggcaggcatcaagccgtctgcgtctggggtcgttcatcgttttcctcgcgacgaggagatgcctaaccacaactacggggggtttcggagcttggtgccaaacccacctcatgtccggggccatgctccctcttcaagactacttcattaattttcttgtttttgttggccttgcgccttatcaactcatcccacaagcttaccgcctgctctcaggtttatttattttttatgttgccagaggctgggctacgcctagccggccgagattttatatttttacgaacttgtttctgtccccaagaaggggaacaagtttaaggaaagttttttcaccctccaggcccatcctttgaatgagggctcggtcccttttaatcaccaaaagaatgtcaaagagtaccgccatcggtttttcttttgttctggcttccaggtcatggatcgcctggagctcctcacggagtgggttaggattccacctattctccacaaggctcctacccggttgtttctccaacatgccaagaccttctccacttacgacaagaacgatctcaacgttgggaacttggtcacaacggagaactgccggaaggctaagctgatctccgggagcctgtcggtggatgactttaatctctccaaggtcctctgtccaaacgttcgcaccccggccgcagataaggagctctgggcagagattatagcttcggcggaagactggtaccaaaagtacctcttcaggagggaacatgagctggcttatatcaaggcccaaaccgcagccgggaggacccttcgcttggaagcaggcacagatcggatgccttccaggcctaaatctttgatcctagttcctaacactggggctctagacgccagcacatctggctccggtaagactcctttaaaggtcgatcatgttccttcggtccaagagtattcccggtataggcctgtagaattcgacaaatgccttcttaagtttaggatgccccccactcggtggggcgatcacgccaaggctttttactttgcccacttaggtcatttcttaggccgatccctgatgggtctcagacctcctgcacccatccctttggatcactcagcgtacttgtcttctagctggtttctcccctcggacagctttcctggggatgatgaagctatcattgtaattcaagactttgctagggctgagttagagagtcagggtaggactagttttattgttttgctgttaggcgcatgctttcttatagtcgttctaacatcttgtttatttctttttgaagcagccaggcccatggaggatcttttggcaactcttgctaagacctatagcccggactcttctcttcctccgccccctacccaaatgatgaccccggggaggtcgtcttctagtgcccccttaggcacaatcgtcttaatcgacgaggaaggggaggaggaggaggaggagggcgagattgtggctccccttgaccgcaagcacaagggtaaaatggtcgaggctgagtcttccaagagaccaaggaggaaggacaccccagctgttagctcagactcaggcattcctctcgaggcagaggagtacaccgtgccccccaatattattctcactctggttcccgcagatgaggagaggcaacaactttgcgttgccaaacataattacgccgtggacgagtacagccggggaaatgctgaggtggaagccctgaagaaggtcttgcgggaagctcaacaagattcattacgcgaggaggccttcaaaaatgcctgggacttgaatatggaccccctgacggattggtttaaccggttcgtcagtcctgctcttactaccttcacttctgagctgactagccaggttgtctcccatctgacccaactcctgcccaagagatacgcggcctatgcttccacgaactctatttacttggttcaggatatcagtgcttctatggctgttgtaagttcttgtgattcattcctctcttgttgcttgtattttgtcttaaggcatttgatctcattcttgtttctatttttagatcactgtagagacttgccgcctctcaaagaccctgattgaccatgggtacgtcaagtctgaatttagggtcatggacgaggcaataaagagtctgcgagacttggcg

SEQ ID NO: 49692 - DNA, 1430 bp, Cannabis sativa
tgctgtcccagccatttcaaggagaccaccaccacacccatgtcctcttctacagggagaatcttctgaaaacaaacaaagagaaaataatttttctgctcttgtacaaccgcgggtctcggccatggattctaatataaatgtaactactacaattacatcaccacttttgactatgtacgataaatcagcaacaactgctatgttgtcatcttcatttgtgaataccacaccaacaactactgtgaagttcacaccagcactcttaaatggactcatcaacaaacaatctggtgcaaatcctaacatattgggttcttctacgcatgttattccaacaacaacacacatagttgaatcggttgatgtggatgacctctttgacatttttatacctgatgttggcactattgcaacttaccctccaaatcccacattgtcttatgcgccacctcatgcacattgcctcaagccgttgcaaatttcaacaaatgcagcaactgatgctgttatttgttcatctgtcaagcatgccgtggacaaagaaaatacatccccaaaccgactcatcaagaggaaatctgacaatatttctctgaggaaaacactgaagcgatgcaggggaccaacacaagctatgttctctccaactttatctactagggaggatactaaccagactgttttcgaacaaacagaggatcagtcgggtttcatggacaattcagcggtggctggttcacagccccgctatcagccatgaaaattgttagttggaatgcacgagggctggggaacccgagcgcattccgtcatctacgtttgcttgttaaagagcaatctcctcatgtactatttattatggaaactaaacttatttctaatgtaatttctcgttttcgtcaagctttacatttcaataatggacttgaagtccctagggtaggtctaggagggggtttattacttctttggaaggatgatgtcaatgtaacacttttgaattttaatgcaactttgtttgactgttatatggcgtatggtgatggtccttctatgcatttcactgcattttatggttctcctgaacattcgaatcgctgtcattcttggacaactttaaagaggcttcgtgatgttgctccacttttgccatggcttgtgattggcgattttaatgagatactttcaaatgcgaataagcaaggaggtgcgttgaggaatgaagtgcaaatggatgactttagacaagttttagatttttgttccttctctgagttacctgttattggtgatcctttcacttggtttaaaagcccacataaagctgacaccatcaaagaacgacttgactggtgctttgtgaatgacaaatggacaacaacatttgaacccttggttacaactcacttggactttttcagatcaga

SEQ ID NO: 49693 - DNA, 1114 bp, Cannabis sativa
tgaagataaggagagagatgaatgcatgaagacaagaataacattgggagaggaatcaaaggacaagacatgcaagggaagagcgtacaatcatgccttttgaagactgagagcaaggaggtacaagtagtgccgacaacggacctgcgaggcttgaagacccgaccaaaggtacgctgcaaccaccctagtacagcctgtactcgaggaccaccccacatgcaaccaaggaccacgcgcatgtccccggggaccaccccgcatgcaactggggaccacgagtgtgtacccaaaggccacacactgtaacctgcaactggagaccaccttgcaccatacaagggttcgaggtgccatactacctccatcacctgcaccctacaacgagaaagcaatattttgtccccatgggaccactttgtacacaatgccattggagcctataaataccccacatctcagatgtgagggggttggaaaattataattgtacaaccatattgagagtaatagaaatttttccattattgtctttacttcaagaaagcaatttgagttcatattttattttcctctatctctcatttccgagcttgaagcataaattggttttccggccacaagttggttgacgatttctcaccgtcaatagtttggcaccgtctatgggaacgacaagcttaagccaagtcatttctttacacaccatcgatacaaaattcctagacgttctcgatgcctacaggatggagattttccttgacaacaaccagttggtcgcttcagggctagacctcccttgacccgtcatcggataagaaggcgctaatagtcatagtcctcaagtaagagaaaaaaatgagaacgttgtccaccctcaagtaggcagagaggcgtgagctggtaggagcctcaagtaagacaaggagactgccaccgcgaaaagaccctaacggacaaaaaacgcaatagagctaccgcctccctcacgaccaaaggtaacagtgtgacacgaagaaaggaggtcctattgtcacctatgcaccctccaccaccaacaccatgagtcccagtaccttgcaacattgcccaagaaaggagaagcgagccaact

SEQ ID NO: 49694 - DNA, 1482 bp, Cannabis sativa
attgaaaaaattgaatgagcttaacaaatcatagctgttaagtgaatggaatatgtagtagagagttcaatataaaataatctctgatagccagagttcctatttcatagttaatgtaatgactttcatttcatctcaaatgtactacttgaaaaattggtcttatttccaatgctggaaaactgcagtatcctactttagaagtggtctattggtacatttcaattgcaattcaagaatgaatatttgatgccataccttatcaagaatagggcttaatattaatttgtaagagagttgattaaaaacatcgaaaatcaactggatccctacaattctatggaatagttagtaggttagtcaaatataacaaatgaggatatgaacaaggctttaattttatttcaaagccgtcggacgacctaacaaataaagaaattttattgtgattgttcttttgtcaacaagcatatgttcaataatataagatgacatcgtaatagggaatcatgtaaggcttataacatataataatgtaagacaattttcagaaaattcctttattaatttgttaatagcaacacttggttaggtttttgatcaaaaaataaaagttatgagcttttgatttgcatgcatatttaattcttaatggatatttcacatgaattattaattagtgatgagtagagtagttcatgttcttgtacatagcttaatactttgacatcaatatcacataacaaaggctatattttgcacctacgatgacgagagctaaagaaagtatttaccatcccacggcaggcctttctatgtagtttcatgcaccaatgtaaaacacacaaaaatatgtaaatgcatggttaaaatttgtttatttgcttaagaatacctttttactttgcatttcaattcaagtcatctacgtactcatgttttagtctagtagtctttggattaaaccccttttctctctaatgctactttctaatttattactcgcaaattgtaagagtagacaaaagatagctaaaatttgaatgataagaccaaggtttaggaagtagaagaagcgattgtcacataaaatagaatacagcacatgagaagatttgtggagttgtactatttctaaatcaattaacaattactaacccatatggtcctcgttgcatctctaaattttttttcataaaaaatctaactcgtagtcttataagtggattaatatcttctaagcacttccttcagttcatatatcaaatatctatcatttaattcatttttcttccactctgtacattttcccatacaccataatttgtactcatgtaagaattgttgaaagtaactattaataagctatgaaactatttttatcctttttccttttaactttatcttttttttagtataaacaaattatttttgtattattatactaatattaactgtaataaaattaattgcttaagtatt

SEQ ID NO: 49695 - DNA, 1664 bp, Cannabis sativa
ccattgagactgaaacaaggccaaactgaaaccatctagccccggggccttattaccttcaaatctaaaaactgtctctttgactcgctctcatcaaatggcctctctaaatgcctagcggatacatctaaaattgtttgccaatcaattccttcaatactcccacccagccttctttcggaagtatgtaagcttgagaaaaaagagattagttccttaacttttgatggaacacagcttttccatagggtcttcgtccaagccaagcccccagtcgatggatttgatgtcaactagaaaaatgctgatttacaagaaaatcccgacgggtccagtttccaaattattcgactatcatccgaaatatactcaacacttttacatgttccaccttttgcattaatgaaataaggcttggcatctctctattcattaatttccttctaaacttgaaattccaactctccacccatccacctcgtaacccctcgtcaactattatttcctttatagaaagcattccttccctttgatatcactgctaaatcagggaatacactaatcaaaggagaatcataaagccagatgtcttcccaaaatcgaatcctatcccctcttccaattttgaaataccaaacccaaatactcgtcatacaaatcgaaaatatccctccacagaccttaaagagacagacgacttcctttcttaaagtcccagaaattatcagccctaccatatatgcttaccaccactgccacaacgaatttttctctaagggaaatctccacaaccacttcatagtcgctgttaattaaatgcttccctagacaatcaaaggtcaccattgtatccaccggcaactcagcaagctccggcaccgtttccgttacttgattgtggagaatcgtttcagcttcactgttcttcctactttctttaatgaaccaactttcaaccactggccgtacaaagttgtttattccatcatcaccgccacctctgactaccttaaagatctcttctccttcgtccctaccgcctccaaccgcctctactgtcacatcaccttctgtactttctttctcttctatcacagagttttttccatccccaaacatcttgttatggtcaaaatcttggtaccaacaagtactaaaatacccgtgaaatctatagcttaaattgttaaacttgaaaagcttcaaatcaaagctaccaccttcgtgttctaagaccaatgagtccagtacaaaaccgtactcgtcgcccatcagttgaagtctttaagtgcgaaagcatgctagcttcagctgtctctttatccacgtccaagagtccgccacaacagtcacctattttcctgaaaatattcatatgccaaagattcaaaggcagtccttgtactccaatccatgaatctctgcattcaactttaatgtttttcttttgtaactcccaactccattgagagaatgaaacaacagtttgtgcccctgaaacactcattttttgaattttgttaaactcaactctttccctcacatctttgcaccaaacaatacacctgtcaccaaacaattgactgaccaccaatttcctccctagctccctagagagattatagaaaatgacactccatgaggcatgactattatctcgggta

SEQ ID NO: 49696 - DNA, 3507 bp, Cannabis sativa
  modified_base (3460)..(3482): a, c, t, g, unknown or other
caccttaattcttgaaactatcacatctggatgttgaggatcctttccatgattatcctgtttctataactttataagtaccatgtagagataataaacaactcaaagtctatctcggacaacacttcaaaaactcttaatagaacttgttgaaaactcacttctaccaaaactctaccaataagactaaaattgaaaagttttcaaatttgtcgaaaaatactacaccaaaaaattgcatgagtatttgtatcctcgtcaaaaccatccactcttgatcaaccagattaaaaatagaaccatacaaacgtaaattccaaccccttctgtcatttaagataagatttttcactagcattttagaattttgatctactgaagttataggtaagaatgaatgaagtcgaggtaatcatgtatctttaaacacatagatactatctccatattctctacatgaggacccaaccctttagcaagtagaaaaccctaagcaatacctttctagacataattaggatgatgccctatatgcaataataagatctaaaaaataaagtattatgctggcaacctaaataaagtattatgcttaattttttatttaattagaaaaatatctcatttttatattatatgtgcagtattatacttaattttttatttaattagaaaaatatctcatttttatattatatgtgctgagattgtttcttcaactgaaaaaaaaaattagcaaaaaaataattaaaaaaaaataagtttgacttaaatattttttcatataaatatatttttgatatagtgtaaaaatatgtattttttttttatattttcttttattaagtagctatataagtaaagtaaatatttatttatttaataatagaattgcaactacacatgaaaataaatctgaaaattttagtaaatgagagaaaaaaaaaaagattctggtaaatctgtaaagttttagtactactttggattattgtaatgacatatctatttttaaagtgaaaaacttgaaaaaatactcactcaaaaattaaattcataaatagtcctacctcacctcaaactgtttattttttttttttttttgaaaaataattaatcaacctatcttgctcttttagagttgaaaataaactataaatgctatttaatttatagtatttctgtttttttttttttacatacaattttaatttatttatatgtttttatatagataaaactaaagcttccttaaaccttataattaaaaacgacaatattagaaagataaaaacgacaacatttgcaaaacgacaacaaatatataatgtatctattttattcgcaaggtactaatgtttctatttaacagagtttagtcataacagaaattcctaactcaataagtctgatcagttcttctctttcttcttcctagaatcaacaatggctgattcaaatcgtgatgaagaagacaatttaacaatggaagaggtagaagtaatgtcaacccaattggctttagacctgaaaatgtccattcaaaacttacaacacaaattcgacaaaattaatcatcacctgtcaatagtttctgaactcaagaaagatcatgaactttacaagaggtatttcgaagatatcgagtttatccgattggaggctttagagaaagtcaaattaaacacctcaatgctcattcttttgaagaatgatatggagactttgaagagccaagaagaagatctcaatcagaagctgactactttgatcaagaaagtacaagaatctaacaaagatcgaatttcgatcacattgttgtcaaggaagcttaagttgatcaagtactattatgtttcttctggatggaaacatagaagagatgacacacatttcgaagaggatgtttctaaggattcgagagtgaggaataagcttgaattggaaagcgagattcttgaattgattaaagaaaggcgaaacgaggtggaaaaagctcgaaaagaagggaataaagtgtcatatattcaatggattagttgtgcaaggaaggctgtatctaatgtgaatagaagaagaagactaaattggattcaagcaaccgtcactgagatttttaggctgatttgttctcaattggttgagatcatgatgtttttttttgccttaaaagaatggaaatttttgagtaagttaaggtacttaaaacacatatttcggctactgattttgctgcagcatcagggtgagaccatgttgttggggaagatagtatctgtgatagattatgttgatgaggaacagagtcagttgaacaatgagtacatgagtgtaaagattttacaagggagagctgaaagagttgatgatgattataatgaaaatgataatgatggagattttgatctgattttggagttattgttaagggaagttttgtgtttggagtctattgtgacttaccccatattttctgttgagtatgattacacagaagagttagttattgggagtagtcttaatcattgtatggaacaagtgaaacagattgtatcaaaagtgaatggtttgccactataaattaatccaatcacatattttgacattgtgatttttctgttctgtttttgtctttgtttttggttttcaaagtcattgttattaatattattatatacatcttgattggtcctatgtttccttcttaagaacatattctaagaatcatccatgactaagaagactataaaagttagatccattgtgaacatttattatgaaaattgcattctatgatccttgaatttgtagctaatcaataacaggtaaagtctgcatttgggacatttgcaaggctaaatctatagtctcaaatctattgtctttacttgagaaaatggtttcatgtattacatattcagctgcaactgcctcatgttgtattggaattatagtcagcttagtctggtttgatattcttgtgcttgtgcacttctgattaagaactctcagctctctagtactatatagtataagtatagttgttaattctaagaataaattaagggactttaattcatgaattgaagagcacaatgcatctccattctccatcttatgattatgataacataacgtgaagtattgagtacattgtttatactattacataatttccagatacatgagtaccattgaaaccacaattcatcacttgttctttcaatgaaggcttcttcctattgttgttattcaatgcccactagctgatcttatacaatcttaaatatatgattccttccaactcatttttcaagaaaaacaacctcatttcgaaatccactaattacaagcttcacctcatcttccttccaacaaggatgaaagcttctccactagatcaaatattttatcctgaatactcacatatatatataaatatatatgggtgactattcannnnnnnnnnnnnnnnnnnnnnnatatggttacatttttctttaacct

SEQ ID NO: 49697 - DNA, 867 bp, Cannabis sativa
gagtaggcaaattgtcaaaccacataattctgcgtgttttattatttaccgctttgatatatatatttatcgctatcttttactatttattgcttccacgcacaacaatttagtatgagagccaaatatagcaacattatatatcaaatcgaagctcttggcgagacaaatccaacgccgcaaaaatttcctcaatcggatgtctgacacaccgccagtagctgctagagtgttgctgccagcaaccgatttaactcagtccaatagtgatttttggatcggtccattccatttttcacctgttttcagccgagtcgaatttgttcctagctaattggaccattctgaattcaacgcaacatctgtttttcaaagtaagatgcacaagttgacgtaaaaagttttggcgcattaagaggttctatgaggtgaaccatattatcaaatgcacaatttgaagtggagaaattcgacggtaccaataactttggcatgtagcaatgtaaagtatcagatctatattgtttcgagaatgaactaatattgctttggagtccaggcatgaagattattttgacgaagattggaattttgtcaatcgtcaagcttgtggcacaattcaactatatgcctgagaaaagatcagaagtattttatcacgaaaaaaagtgtagctgcagtttttttttaagaaaaagatagaggacaagtacatgacaaaaagtgtagagaatcgactctacctgaagaagaaatattttcgtttccagttcaagaaaggtacccctacgattaaacatttagataatgttaacaaaattttggcaaattcgtaaaatttaaatgttaaaattagtaatgaagata

SEQ ID NO: 49698 - DNA, 862 bp, Cannabis sativa
taagaacacaaaatagagaatgaacacaatcaatttaaagaggttggaacttccccaaataactttgggagcctaatccccttgtctgaactcccttgattacaaggttcagtagttcttagctattgatcttgatgatgtcttggagagataacaaagtaagagcaagccttcaacaatagcttctcaacactatatacttccgtacagtaatcgtgggttccttggaaggatccaaagcaagtacaagatggctttagctatttgttgtgtgcttgaagcaaaatttatagccatctttttggttatgaacattgcagtgaagaagagcatttgtaatactaacattgtggtttagaatactaaattaaaacacaaatatagcacaaactcatggcctaaattcaacacaaattttagatcttgacttatggaaacttaacaagagtcaaggaaatacataaatggtcttcactttaacaggactatgttcatcttcatgttcaagtttcaatatgaaaatcttcttcttcttctatctcctattaatattcttcattttcatttcttcatattactcagtaattgaagctgcatcagacccttactacgaatcttatgcgaggacaccaatggcaagtgtggattcctttctcatattaatcgtttcacatgcttctgcccagataagcctcaacctcttaagtgtattccgcccaatgttagttttctcaaccactccattttcatggcctcttcaaccattagaccatctattttgagttaaatttaacatcatttttgtatgtgtgttcctgtaataccaccattaatattcattaaaaaatgtggtatttattat

SEQ ID NO: 49699 - DNA, 1452 bp, Cannabis sativa
tagggcataaaatccaacaggaactgttcgaggaaatcaaagggaaataagaataatgctatatgtggctacccagcaagctactttcatggttcaagcaatcgaaaacacaatcttgccaaaaggacaagatgagttggatcctcgcattagctatgagaccgttttggagcctatggaagagattgaggaagtaggaatttgtgatcaagacccaaccaaagttatccacttagggaatggcttgggtcctaacaaaaggaatgaaattataagtcccatcaaagaatcaacagacgtatttgcatggtgtcatggagatatgaccggaataagcccgcatgtgatcacccatgtcttaaacgtcaacaagaaaatgcctccggtacagcaaaaagacgccatttagatctggtaaagttagaagcctttgagaaggaggtggataagatgctattgaacaccttcatcaaagatgtgtactatttagaatggctggctaacccatttctagtaccaaaccgaatggaacatggcgaatatgcattgacttcacggatttgaataaggcctatctaaaggattgcttcccgttacctagaattgatcaaatggtggacaccacctttgggtttgagctattgtccttcatggatgcgtactctggatacaaccagattaaaatgcatgtggcagatcaagaatataccagattccaaaatgacaaaggggtatattgctatctagtcatgccttttggaccaaaaatgcaggagccacatatcagctcatggtgagtcggatgtttaaaaatttgttaagaagaactatggaggtatatgtcgatgacatgctggtcaaatttaaaacgagtaaaggtcactttgatactctcaaagagtgttttgaagtagtaaggaagtacgcgatgaagctcaatcccaagaaatgcacttttggtgtcaagtttggaaaatttctgggatttatagtaagccaacaagggatagaagcaaaccagagaaaatacaagccttgctagatatgccttcgtttaagaaacataaggatgtgcaaagcttaataggaaaaatagcagctttgagccagttcatctcccaatctactgacaagtgtatcccatttttcatcatcctgaagaaaagtcaaaagttcgagttgactagggaatgcgaagaagtattcaagaaattgacagaacatatggccaagcagccaatcctatccaaaccagtacacggggaggatctatacttatacctagccatctctgagaatgcagtcagtgcatccctagtccaggaggaaggaaaagtttagcacccagtatattacgtcagtaagcgggtgataggggccgaaatcccataccttttaattgagaagttagcttttggccttttgattgcatcaaggaagttgcgatcatac

SEQ ID NO: 49700 - DNA, 1329 bp, Cannabis sativa
ttgatatatattttaatctatttatttaactaaaattactagtttagataattttaaatataaattttaatttaatatttataaaattataccctaagaaaatttagaaaataaagtttattttccatccttagtattaattttctaataaatattatctctggaaatgacatgcatattttggcttacaaggatctaataatgatactaatgtgttggaggcatcccatctttttgcaaatcttgtttaaggtattgcttcacctgctaattatgttattaaaataaagaatacaatatggattattatttagctgacggtagatatctaaaatagtatactcttgttcaaactatccatgatccatatggtccaaaaaaaaattatttgcaatgaaacaagaagcatgtagaaagatgttgaacgtgcattaggattattgcagtctagatttgcaattattgctagatcgacatgtatttggaataaaacatttttacatgatataatgactaggtattattatgcataatatagaagatgaacgtgatctaaatgcatcaattgaaaagcaagtcgaagtgccaagttaagaagttgagatggtagaagataatgctcggtttcaagaatttcttgccaggtagaaaaattaaggataatgaagctcacattaagcttagaaatgcattaatcgaacacttgtgggacgaatatggtaacttacaaaattaatataatttaattaatttcaagtgtgtgttttaagtttgatttaatttaatgtaatttatttcgtcatgaatgtaattgttctctactaatgtcatatttatgttattgtaatatgatattttaatttatccagtttcactgattttacaatattattctctttaaattagttagtaaatttatttaaattcttatttaaatataataattgtggtgatttttgttaattaataagatatttttttttattttattaaaaaattaatatgataataaggaatatttttagtgtaatttttcgtgttgtggttggagtgaaaatactttttgatactaaatttagtgatagtgtaacaccaaattaaagtgacgtttggtaacatttttttaattagttttatgtttttaaaattagaaaaatgaaaatatttttcaaaaacatgttctataaaattattttacttttcaatttttgaattgagaatcaaaattttaaaaacaaaaaaaagaagttattttcaatattttttttaaacaattttttttttcttaatcaatattgggctatttacaaaaatatgggaaaataaaga

SEQ ID NO: 49701 - DNA, 1151 bp, Cannabis sativa
gccatcgaagctgcatcaatggaggtgttatgcttggtgctactaatgaaataactgaaacttgagtttggtttcctacttcccctattataacagcttcttcccatctttccattccaacaatcacttctaatttcttttcttcaatcatattcttagctgaaacgaaattggacaaagctattagccatgacttaaacagaaaatcaatgtttaaaggtaaaaaaaagtttcttggagaacttaccagaagaagctgctttgaggggttcctttattgagtcctgaaaataaagtaacagcttgtggttcttgttctttgaattatggttgaagtttagagctgcaatttccatggcagctttttgctctttcccaattcgagaattaagatcaataataaatccaacgttaatgatattttcttcattagtaccttcagcttgagctccataataagttgtaataagaagaaagacaagtagtacgtgaaacatggaatgaagagttggaactttggtaaggaaaacaaaggaataagtcatctgttagctttaataatattctaaaactagaatttcattcactactttatggttcatgggaaaaaatttatgccttcgttataataaatatttatatatgtgtatgtatacttgagccttattgcttgttagaaaaggttgtaaattgattccctcaaaataaaaaaaaaaaaacaaaaaacaaaagacgtgaatttgatacctttgactttacttggtctcaatgttgtacaaagggagtagaggaagatagataactggacaactatgaaattaaaaaacaaaaacagttttttcctttgaatgcttaaacgttattttcttgaaactttggggaaaaatatctatagctttagcggctccaaatttctttggggattttgaagtcaaatattgctgctatataacaatgaaatcttgcaagtggatttagtcttgatgcgtgctttctcattaatttattcattcaaatcatataaaaaatgctaattaagatttttcaaacttttgatatgtagcaaatcattttcacattaaaaattctaccaaattattcaatttaaaaatatttatttaattctattcaagtttattaattttgtgatt

SEQ ID NO: 49702 - DNA, 4087 bp, Cannabis sativa
cagagaaaataggatttgggatttgacccatccaacagacatcttcatccaactcaagagcatacttagctaaaccatgagcagcttggttaacatttctcttaacatgagaaacattactcttgaggaaaaggataaaagacaactaacatccataattaaatcattaaaactagataaattcctagatggacaatttagagctgatgaaacacgcaatgcatctgtctcaacattagtaaggtgtaattgcaattgcatagcccaattgagagaatgaaatagcgctttggcttccatttcatccgacttgaagcaaccttgaattggctttgatatagcagctacaacactgccatgatggtctcggatgatagcacccacccctagtattttcttttcttggttgacagcggcatctacgtttaatttcaaaccagttaagcctggaggggaccaagatatcacagaattttgatgctgaaggggaactgttgcagaagcttggactgatgcaggaacattactggtggggactgttacagaagcttgaactgtggcaggaacattgcagttttgaaactgctgctggtttttacttcttgcccgatgatattggtccagatgtgtactagcaaaagaagcaatgtcttgactagacttagacaaactaccatgaatgaccttatttctttcatgccatatagcccacattgtgcaaataattaattcaagatcttgcttagaatgtagagatgataaatgtatcaaataatcaccattgtacatattatgtgtatgtgtgtgatcaatgatgtatttagtttctctccaaaccttccttgctgtggtacagttaaataaggcatgaccaaccgattcccatgcattattacacaatgagcaaatagcagaatttataaccttccttcggaccagaccagtagctacaggaagtgcattttacatcactctccaagcaaatttttttactttagatggtagatctaagttccaaaaggttttccaccaggtgctatgagaagaggagccgtttgtttgctggttttctgccaggttctcagcaagatggaagcccgagttcactgagtaacagcctgtagtagtatggtgccaaatcaaacggtcactgttaggaaaaaagctaagaggaatggtaacaattttgtcgacatcaataggttgaaaatattgattaagaagagacacgttccattctctttggtctgttatgaagtgagatactgtcattgaagcagccccattgaaactaactggtttaaaatcagtaaaacccagaatccatttgtcaaaaccagctaacacattaaagccatttccaatcttataatgcaaaccttcaataagtaactccctgccccaatgaatgccttgccaagtgagtgaaggcgagtgaccaagccgtgcttccaagaaattgttatttgaaaagtatctatgtttaagcaagcgacttagtagtgaattaggcatctcaaagattctccaagcttgtttagctaggagtgccttattaaaatgaacaaaagagcgaaagcccattccaccttcaaatttcgacttgcataacaatttccaacttcgccaatgaatttttgagccatcttttgttgaaccccaccaaaaattagccatcatagactccaattggctacaaaaagtagaaggcaatcggaaataactcatagcatatgtagggattgattgtaccactgctttcaataggacctctttccctccaactgagaagagtttgtcattccaagcatgtagtttttgccatattctttcttttacatcgctgaacatttcttttttatcacgctcagaataagcgggaaggccaagataacgttcatgacaatcactaatgggcatccctaaagtatgatggaaaaaatccttagcagcttgtgaagtgttaggcgagaaagacataactgactttgttgtattcaacaattgaccagaggctctgtgataagtatccaaaacacggttaagtgccatggctgtgctgttagtagcttcacaaaacaggagactatcatctgcaaagagaaggtgagaaactgatggagcatgacgtgttaaacgtaagccttttagatgattgaccgattcctcatactgtaatagtcgtgataatccttcagagcagattaaaaacaaataaggtgacaatggatcaccttgccggaggcctctagtaggtttgacataaccaacctcttcaccatttagcatgaatgagaaacttgtagaacttaggcaactcatgatcatatcaatccatcgatcatgaaatcccatcttacgcatgacttcttgaatgtaaaaccactccactctgtcaaaagctttactcatatccaattttagcgctgagtagcctttatttccccttgtcttatgtttcaagtggtgtaccaattcaaaggccacaagaatattgtcagtaatgagcggattagagagaaaagcactttgcgtttcagaaattaccactggaaaaacatctttaaatctgatagccaaggccttggaaacaattttgtaaatgacattacataggcttattggtctaaagtctcccataccttgaggaacattgatcttgggaatgagagtaatgagtgagtgattaagtgaatccaaacagtgaccatcattcaaaacccccaatacaactcgtgtaacaacatccccaacaatagaacaatatttatgatagaacattgccgacatgccatcacttcctgggcttttgtccggattaattgttttgagagcattgtagacatcatcattggtaaaaggccgaagcaaagactcattcatatcagctgttactgttgttggaatggttgataaagtgtgatttaaagcttcagggtcgatctcagatgcagtaaacaaatctccaaaaaaaccagaaataacatctgtcatgccatgctttgaggtgactacagtcccattgttgtccactagagacttgattgtgttatgctttttgtgagacgatgcataggcatgaaaaaatttggtattttgatctccattttgcaaccaatcaactctcgaacgccgctgccaatatgtttcttcttgggctaacaaatcatctaggatattttcaatttgtttcaagtctgccatggtagttaagtctcggtctaccacattgtttaaattcgcaaccttcttttgagctttagaaattttcttcttaatattgccaaacttttgtctatgccattgctgtagagaatcggaacacctttggagattgtttttgaaaagtgcaacagtattttcggttgaaccttgctgccaactttgttgaattaaagtggtagcttcatcttcttgtaaccaaatcttctcgaaacgaaatctggtgcgtcttatgggctgctggtgtgatgcattctgtagcagtatgcgaactgcaatagctcgatggtcggatcggtaatagtccaggtggtgcgtggtgatggtttgaaatgtctcagtccacaaagtattgacaaagcaccaatctaaccgttcctttattgtatcggctgtggttcttcccttagtccatgtgaatggatctccttcaaaagcttgttcatgtaaatggcagcgatcaagaacatgacaaaaattatccatttgagtctcattacgcaaggctccacccgatttatgacgatttgacaagatttcattaaagtccccaattatcaaccatggcatcaaaggtgcaacatctttcaatctttctaaaagtgtccatgaattgtgtcgattttgaacagctggtgctccataaaaagtagtaaaattccatgttggaccatttccacaagccatgtaacaatcgaaagtatttatattataatttaaaagtgttacatcaatatcatctttccaaagcaacatcaagccaccactaagaccaacacgagggacttcaagtccattattaaaatgtaaaatactacgtaaacgagtaatagaattaggagctaacttagtttccataataaat

SEQ ID NO: 49703 - DNA, 1182 bp, Cannabis sativa
tacatattgtcttcttttttttttcctgtcgaatatgaagtgaaaaaagaaaagagggaaacaaataaaaaaagagaagcatggcattgcttcttctgtacagataattatgtgcgaaaaaaaaaaacaaaattccagtaattacaggacaaaaaatatgagcttctcttctctgtatgacacaactacaagaatgatggctgggattttggcctctacctttgatgttctggttacaggcagaatagtttgtgagggctggctgagctgagagagatctatgaaagaaaaaagaaaaagaaaaaaactgtggactaaaaagtgaaagttttctcatgcctcatttactctgttctctctactattcatgctgttttgggtgaacaaatctgtactgtaatcttgactgccaaatgccattctccgaaaccatcttatttcttcagactgctgcgttgagttaaatgcctcactttctcctactctcattccattggttagatctgaagcagctaaattatcgaaagctctaacaacctgagaaacagaatctatgataagtatctttatttcatgaatgccatcccatgtataaaaagaaatcattcccttctcgaatttcggtgttatccattttgactacctgtcccattcgaggtctcttggccgatgaatgtcgcacacaagcagcggcaatctcaatcatctgtaacatttcactctcaacatagttcctctcaagccttggatccaccagatgatcgacttccccattctcaagtgcattacttaacaatggtcgagcctgagaattgagatgcgtttatgagtatttagtcagaaaaattatcatttcatatgatgagctatagttctggtgaaacagctctatataatgatagaatatgttcaatttgtttccaaataaaacaaagatgacactaaaacatcttttttatttttaattttcccctaataacataagagggtttaaaacactaactattcctcagtcgagaaattttattcttctacatactggggaaatacctggtttacaacactaactattctcaaatacctggtttcacaaaacttaaccttctgatgtttataattagtagaaccaaaactcagcacagataatttttttttagaataacttatgctttagtggcaata

SEQ ID NO: 49704 - DNA, 1148 bp, Cannabis sativa
tgcatttggagcttgtattccaggaacgtgtggatgacctactccctgaggaggatttatggctccatgctatcccataatgaaaagatgttcgtttgcaactgcctatcttggatatatgactgggatccttacccaattggttaagtgtatgttccttactaatccctcaatttcatattttaaatagtcatattcatttgtggtgtgaccaacatcaccatgatattcacacttttttctcggatctcttcttttttttgcctttatacattgacagacgcttccaatagtgcaccatgttacaggttgccttgtatacactttctaaagtatctatgaaactagtgtacctgctatatcttgactcttgggtttttcccttctttgcggactcactctaatttggatccttcaaactcgttttactctatgaggctgttatattggactctggaacatctgcgtttttgtttgtttgtctgggagcggaactatgttcggtttacatagctacaaacctgaaaaaactagcctgtgcagctagctgcacgaaagaacttagtccatataccgtgggaatagtaaaagcagttcgtagagggtaaatggattgagttgtcatctttgaaggttgggcgcttattacattggtcgaaggtgttgggagtactccatatgctagagcataagcatcttctatatttataaatccttaagctatcgttaaaaaatcacttaatttatctacccttttcctttgaagaactccccacagtaaagatctagttgtaagtcttgatgttagggccaccattttgatgtcatcagtgaacttggttttagcagccacatccatcatgtgttggataacttcttcaagctttcttcttgttattgcttgatgttggtcaaggagctggtttccaaatcatagtccttgtctactataaacttctttctgaaaattacttataggtctctctagttgtggatcgatcctggagatagcctctctgaccaaccctcctcagacttgcttactattgatgaaaaacataacattttacatcatcactagccttggcgacttgcatgatgcaattgtatttggacaaatggtccctggggtccgtacgtccttcata

SEQ ID NO: 49705 - DNA, 1136 bp, Cannabis sativa
ctatttatttacattaatgaaattgaaaatattaccacctatattattaaatataaaaaatgatttacttcttttgtttgttgttatttcatttatagaactttctcactttttcaacaaaaataaaggaattttctcgtaacctagtccaacttagcatttttgtttgtaaggctagtcaaactcaacatcttatttacattacaatgcaactttttttttttggtcagtatcctactgatttataaaaatattaggaagatattaggaagatcttgtcgcttgatatagtttgatagtttctctggtttcatttgtggtctctatttgttggtttttttttttttgattgttatggcttctagtagtaagcagataagtgagttggaggcacagtatggtgggatcgagatagaagtagaaaaagacgttgttctgtcttatgataatatcgaaaagtagaataaaggcgaaaacgagcaattatatcttgtaattcctaacgtctcgggctatagacttcgatgtgatgaggtatatgatggcctttttatttcatccaattaaaggaatgtatgttaaagagttggagcataatcggtacatattccaattttactatgagttagatcttaaacgtgttattgatagtagcccttggactttcaataagtttcagtttgttttcgatcatctgaaaccaggggttgatcctcgtacagtaatgatcaaccatcttgatatatgggtgcaagttcatcgactccaatttggttttaagtcagatcaagtgcttaaggatctagggaactatatttgatcttttgtcgaaacttatccaaaaaacttttagggtttatggagagattacctacgggttcgtgtgaaagtggatatcacagtgcccctgaaacgtcatatgaaaatcagacgtactggcaacgagtggttctaggaaaatttcaagtacgtatacgttttgactttttattttgtctctggcattataggccattcaaaacgttttttttccgaaagtctttgacatcccattggagttggtcgttatgccgtatgggatatggatgcatgcccaaccttgtcagaaaaatcatcttatcggtgcctagtggttg

SEQ ID NO: 49706 - DNA, 1197 bp, Cannabis sativa
aaaaaaaaaaattataaaaatgcgattgtaccaaaattttaaatatattttatagtttttaaataaaattttatgtgatttttgttgtttgaatttttttttttttatgtgatttttttttttgttatttttatgaacaaagtaaaaatatataaaaaaatctttagacgtataaatgtataaaaaatttgtcaaaaataatagttatgtaaatttctatacaaataacaatcttttaggcccaagacactagtaaacagaagaaattgcattgtatgcccactttaatttttatctttatttctatattctttaagatatatacacttttatagatgatgtctctattaattatatctcttaagttaatgtaaatcatgtgctacacttaagtaaaaagtaaaagtatattaggcaacctactcacaaaaatgagttgattttaataaaatataatacaaaagtatttttattaataaatacaaaaaaagaaatatttttcaatttatcccgataaacatagtaaccaaacctagcttgatctatatacaaagtgtagtttagcttgtgagtggacattggcatttgtagatctaggacagttgattaaacaagattacatttgattttttacaaagttgaaaaataaaacaaaaattttaagtcttattgttatgatttgttggcataataaaaagaagccactttgttatatgacttttgcatcaaatatgatcttgtaaatgctaaggacaattgctcgagagatggaaaggatataaatgacagcttctctatttttcttttcttcctgttttccatttcaacttgcagaaattacataaaagaaaaaaaaattaaaatatagaagaatattgttcaaagcctattgaacaagatattacaaattgaaggtaatgaccaaaaacattccttctcgctttggatagcagcctatagatattctacaagtcacctagaatatgtttctttacaccaagtgataaattttgagtagaatggttttcaggatttgaagcaaagcaagaacgttccctcctctaataattgagagcttgccatttgaaccaactgataagagagttaagaactgagcattagttcagttctcttgagatgaattcaagaccatgattgaagacgagcacaaatcaattaacaatgacaatttgaata

SEQ ID NO: 49707 - DNA, 1027 bp, Cannabis sativa
acaagccttttctttcaagtctttgcctaatatggtgaactatcagggaactatggtggcatttggttggaggtaatgaaatggaatggaatggaaaggaaacaatttttattacattcctttgtttggttacattttaaagtattggaatgacattacaatggaatgactattccattttaaaaataaagaatgaccattccaatgtaacaagaaaaaaaaattaatgatttttttatcaatttcttttatgcattttaaattttattccattcatatcctattcatattcccattctcattcctattcctatattttaattcctcccaaccaaacaactcctatatgctttcaaattcgcattaatattgaattaatatatggaactcattggcacttgatattcttggtacaaaacaaaatagatctctcatgaaaatgcccatctttgaaattgtatcatacgatcataatattgcggttccctcaaccatgcctggttggagatagtcctagtatttctccatatctactcaatccattttgtccataattattcttctagtaactaactgcgaaagataataaataaataaataaataaataaatacatcaatcaaaattaacctactaatactgaaatctacaaatgtaaagaacaccaacaatggcaataaatatatgaattcaatcaatacacaaaaacagagagcacatatacaataatttatatggggttccaactagggtgcacacgggtcgggctttcggattttcagattttcgggttcgggttttcgggcttcgggtcttggaaatgtacaaccaaacccggtttttgggtgttcgggtgcatcgggtatcgggtcgagctttttcgggttgggcataaccgggttcggatcctattgggttgagcccgaatatttaatgtatgagctgaaatgaaattaaatttaatatattattttcccattattctatgttgtcaaacacacggcagcctttttttttttaaatgaaca

SEQ ID NO: 49708 - DNA, 1659 bp, Cannabis sativa
ttgtattatatgtattagacttttaaattactattttctttacattaaaggctcattgcttggcaagagactcttgtttctctacaggttgtcctcttcagttggacgattgttcctctgaggtgcgttctattgtttcgaacgagtttattaattaataaatctcccgattaaatcaaaaaaaaaatgttatttgtatatataatttttttataaatatgtgtggattggattgaatcggttacttttacatgtcaatcaatattcaatccgcacaagtacaaatatccgcactttgcagattgaattagattggatcgtgcagattggattggatcgactattttatgaatactcctataaatataactacatatgtttatttaggaggggcgaattacacctattttattctatagaattaatttaattttaatttttcttttatacattaagaaaaaaaaaaaaaagagcatatgtaagagcccaacctaatctttcattggatctcctactattggtaaaatctacactaatttagtgtataattttttatttttgatataataacttcaatgattcacatcaaatattctactaaataaatatattttacttaaaaaatctcatattttatattatttatattaataatcaaaaataacatatttatgacataattatatcttcacaactattattaagaattgaaactcttaaaatgacttagtaaataaaatatttattaaatcaattaaacattacacattttttttaaaagaaaaaaaacaagaaaatttaaataaaatcacacctaatatttattaaattattattttacttaatgtttatttttatttatattgttctttttagtttcataacttagtgttatgttatttttattttatttattattagtatttttattattattatttttctatttttcagtatgttagtgtttaaatcaattattacttttgtgataaattttaattttgaggactaaaatgtaagattattttttaaaataaattaaattaaggacatgcaaaaaaaaaaaaaaagtttaacacaaaattggtgtagagttaaaatccaacaccattaatggtgtagaatttagtgtacaccaattggtgtgtcagtggagtaaaatagtgtaaagattccacaccaatttggtaaaataatgtaccgtggagatgctctaagaccatctccaatggttacaccaatttggtgaggaatctacaccaatttagcataaaatcttttactttttggtgtttttttttttttttaaaaaaaataaacgtattcatgcattaaaacaaggaaatcgttagacctcacggtcattacaaagtagttcctccgatacagaggagatcaaaatggaaccgtacaactggtgggtgaaagcccacttagtcacattatgggcaacaaaattacaattcctgttaacattagaatgattcacaccaaaaattttacattttggtgttacaactaaaaattaaatttgagtatttataccaaaaattattctaataatcactacaaaaatttttacttttagtcacaacaaaacttgtgactaaaaatgaaaaaattgtgactaatattataaatcatgattcctatgttgtg

SEQ ID NO: 49709 - DNA, 1823 bp, Cannabis sativa
gcaccgttgagaaatgcattattgatgtcgagttgacgtatatcccaactgtttgcaacagcaatggttagaaccacacgcacagtagaagccttgaccacggggctaaaggtctcaccaaaatccaccccaggtcgttgatgaaagcccttcgcaacgagacgtgccttaagtcgttgaaccgaaccatcagcattgaatttaattttatagacccacttgttgccaacaacattgtagttaggagagggaggcacaagataccatgttttatttttctttagagctgtcatttcacatcccatggcagagttccacccctcatggtggagtgcctcttccacagatcgaggttcatgaggatcaagattagtgccactgtgagacagaaggatacgtggtttaaagatccctgccttaccccgagtgatcatggggtgattagggacagtagctgctggtgcagaaacatctgtgacagcaagagggtgattggttgaaggtgtacttggcagaggtgaatgtaatgctggagaggagctactggccgtggtaggtgatgtagccaaaggagagtaacctggacacatatcaggaatagcagaagcagcagaacagtgatcaaatgaatcgcaagaaggtacctgattatgcgtggaagaagcctgaggagatggttctgcagtggactgagatggcaaggaattgaatggtaaatgaatccaagaatgaggcatagtgacagtaacagactcttcggattggtaattgttaaggaaaccaattttgaatggaaactctttttcattgaagatcacatgtcttgaaatgtaaattcgaccgtgtggactaaggcatttataccctttgtgcacatcactatagcctaagttgacacacttaatagagtggtattgaaacttatgagtttggtaggctctaagacaaggaaaacaagagactccaaaaactttcaaaaacttgtaatctggttttgtggaatgaataatctcataaggtgtttgattaccgattacaggtgtggggagacgattaataagatacacagcagtctgaaatgcatcagaccagtatttgagaggcattgatgcctgagcaagaagtgtgagccccatttcgacaatatgtcgatgcttgcgttcggctcggccattttgagcagacgtatggggacaagaatgatcaaacaggataccactttgtgcaacaaggttagaaaaggcttgatactctcctccccaatctgtccttaatttcttgattttcctaccaaattgagtttctaccatggttttaaattggacaaaggcagctaatgcatctgacttgtttttcagtaagtataaccaggtgtaacgactatgatcatcaagaaaatggatgtaatacttaaagttagtatgagaggctatgggggcaggcccccacaaatcagtatgcactaaatcaagcaaaccagtggctctagaatgagaaattgaaaacggcaaagcatgtgacttgccaaattgacaagcatcacaaaagctttgtacttcattgataggaaattttacatttgacattcttagaacttgatttaaagtattgacagaagggtgtcctaagcgtctatgccaaatgtcttttagggaatttgtagaaacttgagtgttgacagtaacagccgagaaggagacatgagcaggatgtgttgcagaagttgaacttgctgctggaagttgataaatgccatctttaagagtcccttgcagaaccaccttccctgttcttcgatccttcacacaacaaaaatcaggaaa

SEQ ID NO: 49710 - DNA, 1114 bp, Cannabis sativa
  modified_base (131)..(134): a, c, t, g, unknown or other
atggggaaggagagaatacagaaagactagtgttttttttttttttggactactacctatttataggctcattatataatgagttttgggtgtttatgattaggcctctcaacaaattataaattaacttnnnntatctacacattatttccatgacaatttaatactcttttgatactcataacataattagtcacttaattttatatcatactttataatagcatatacattatacatatatacccacaataggattttaattcaacattaaacactttagtaccttatagcaatactctttcaaaattacgaaacagtatatatatagtatttttaaagtattattattgatataattaagtactattaaatttaagataaacatattctaatttaataattattattaaaacaataaacatgaaagtaacatgagagctgatggtgaaaattgtactgataccttcaactcaaatcactataatcttacatttagtaaaagttataagcaaattacatcactagcttgctagctagctaaaaaattaaaatacagttataagtatattataaatatattttttaacaaactttaatcattgtacgtatttactttgtcaccaaattaaattagtggcaaccactaaatatcacattttattcactaacagtcttttaattacatgcgtatatattaatgattaaaactaatatttatatattgaaaattttcttatcaactataaaatgataatttctaaaattaaccaattataattaagcactagaatctcaattaataccaacaacaatgaactataataagcaaaataatatacgttctactatttggtatactttttctctcaattgagactcactttcccttcccctaactagggtttcatcgcttcttctacaaactttcatgatagaggtgatgtcatcgtctccaaaagctttggtgatgcttcggccgaaaggccttagctcgctcgttttctaggtgttgtcactacaagaaatgtcacttttaccatcacatttttgtgctggcaaaagttagtattgcgctggtaaaatagaatttacctatgatgtgttggtaaaa

SEQ ID NO: 49711 - DNA, 796 bp, Cannabis sativa
  modified_base (508)..(511): a, c, t, g, unknown or other
taataaaataataatacccaagaataggtaaataatgaagtttctcccctatttttgtgggctgttaaagttgaattcgtaactagaagtgttgtcaagactgaaagctacagagacacaaaaaattcttgctaggatggagcctgcccgacctttcctttgctggaggctggccaacctatgttggtaatagggccagccagggaggttcacataaatcccttaagctgaccactctgttgtcttttcatcatgcttaagtatttggactcctcgtctattgatatgttgtttatgatgacgtggccttcttattgacaagttatactccacatgccatcaatcttgcctatgtggacatgcgacatcatgtcggaaaaaattaggataacttatagcatcataaatcaacaatagaaataacctaaaataagagaatcaaaaggcaaaaaaatatagagcaaacaggaattgattttctcattcctactctctctctctctctctnnnnctctctctctctctctctcgtcacaagcccacacctatttaggtgtgtgtgagatcaaaaaccttcacttaattacagtgtctcattagtttagtacacactctaacacctacattaattcatcctaataagatataatagcccactctattcttgagtgttgaggctggcctagaagatcaaggtgttgattcttcaacaaaggttcttggattggatgattatacaaagagaaacaatgataccctaatagtattcaagaggtataaactttctttcagtagt

SEQ ID NO: 49712 - DNA, 814 bp, Cannabis sativa
cccttaaagatggcctatacttgcaaggacagtcttccaatgtctcaagatcgagtcccccaactcagtccaagtctcacattagtattcctactgctatgatctgtaataagtaaaattactcaaatgtaattcttaaatcaaactgtactactgttgacattaataaaattgatgattctactttttttttctctactcctattacatttcatattagcagtaaattaaactttcatatatgccatcaaaaacttggacattgttctttacctgtctagcataagccattcaactacactaaaccagttacctttttgtaatgcctatcaactaggtaagagccataaacaactatttcccatctctaactctaaggcctcacaacctttagaattgaaccatactaatctttgggggccatctcatatagaatccaaagatggatataggtattttattcattttttggatgactttagtcgttatacatggatctatcctcttgtttaaaagtttcatgacatgtttataaaattcaaaagcatggtagaaaagtaattcaacttacctataaagcaagttcaagctgatggaggaggggaatatcgaccatttgctaaattcctctcagatcaaggaattatgtttaagcatccttgtcttaaaacaagtgaacaaaacgggagagctgaacgaaagtataggcatatcacagaaatgggcctcaccatgcttgcttaatctggtttaccattcaattactggtggcatgctttccacagtgcagtatttactattaacaaattgccaa

SEQ ID NO: 49713 - DNA, 1481 bp, Cannabis sativa
tttttcattttgcatagcagctttaactgttttaggatatagagaagccattaggactctaggttttcttatcccagacttggatcgggtacacattagatgctgatttttcatagctggatgaccagtgggaccagtttcaattaaatttctcgttgtgttaggtgcagcagtaggttgtacagtagggccagtaggatgtctagcagcaaaagctgtagtgttttggtcaacaagagcaacaatgtgctgttcaataggagctgcagtttgctattcagcaggagcagcatatgttgaactggtatgacagtgacagcctgtggttcagtttgaggagtaggtacaataattggtggtacaggtatagtaggggtattggtgttgagaggagaaaagacatgtgaagtagggtcagtagcagtgtttggtgtagtaggagtagtaccaagtggaaagttatagaaaaaggatggtgaaataccctaaggtttaagaaaccggattagcaaccctaactagtttaaatgtgtattaatttggaattatgctattatataatttaatatgtgaaactatacttgtaaattgcattttaagaccccgttggtgtaccaggggcatttttgtaattttgtccgaaatgggtaaactcgtaattttatgatatattgtgtttgtggactatattattgtatagtatgtgtattctatctatttgcatgtgctttctgacaagtctgtgcggtatagtcaaaactgggtattttgggccgaaccaggttcgagacccaaaatacatttttggaatttaattttggcattatttgatgagtatgaaaatctgaaaatattgtgatatatatgtgtgattggaatgtttaaatttctcttgagtgtattgaaacgcttatattgattatgggggtatttttgtcattttgaccacttaggtattattcaataaaaacaaaatttgagaaaattagaaatccatttctggtgtatcctctcttggtcgaaccccctctttcccattaactttttctttttgctaaactctttggattttacaggaagctttgagattggagggaattttggtatgagtcattgctagaagtttgaggaaattgtggtattactcttcatctcttttagttatgattattcagattttaagtgaagctttaagcactgtttatggtgttcatatgagttttggatgcatgtcttggtgttttgtgtatatgttgatgatattttggtatttttgtgtgattgagctatagggaatgcatatagtacttatagattgtgttgggtgattttttggttgagatttggggtttgatttctttaagtttgaacttctgagttttctttgaatgtttaaagctttgatgttcaagcttaaatatttgtgttatagtataacttgtgttcttgatgttatgatgtatttgaattggtaaaattga

SEQ ID NO: 49714 - DNA, 1974 bp, Cannabis sativa
aacatagtcttatgatttagggtcatttgctatatttttttgaaatgaggacataaactaacatactcctatgatttgggaccatttactataattttccttatccatacagtctcgagctatgttatcgaggtaagtggagagtaacctctttggaaccattaaatgcctatagtgtcccttactacctataaataaggccaagtatcatttgaaaaatgattaaatttcttggttctaagcttaaatgcaagcaagcaaaatcgctattgaactttaaccttgagaactcatattacagctgacttgtggattaggctgaactacgtaaaaatttgtctcacttattcattatcttccctctctcttcaatctctttattttagttgacagaaaatctgattaataaacttcacttttcttatcttcatacctcactttctttaacctcaatttctatcccttataatttatctgtcctcacttacaaaaaattaaataaaaaaattacagtgaaacaccaatcgcatttacattttttttgaaattaaaaatcaaaatttgttaataaacgcacccttagtttatttatttatttattttttttttttgaataaacgcacccttatattaataactaataatcacaacaaattacaaaaaacttaagttgagagtattaatttcgatcttaagtaataagtagtgacactgaaatacaattcattttgtgagtgcccaaacatttaaatgctaatatacctcttgatccccatgagtatagttctccatatataccataaaccaagaaacatatcaacaaaataaccaataaattaatagcactctctcaattaaattaattaacttgcatactatcatcgtcaaactaaaattagtgatctccaatctttaagtatggtgataaaaatttcgcattcaaattggttgctccatctatggaacatttttcaacctacaaaaaattcaaaaaaaaaaaaaaaaacagaaaagttaatacttattataataacaataacaataataattttttttttttttttgggtgttttggatcaggaatcatattcattagaatttgatttctatttttaaaaaataaaaataaaagattacctgtaaatgaatattatagaagaccctcccaaaaaacgactcaaaagaattaacgtttagtaccgaaaatccatcttcctctagatcaatcagaatatgggacaatggagtttgttgaaccttaaaacaggaaatttgaagcactatttcactatcattaagcctactgactgaaacattacacaaagatctccaagctgataataaggagcttttcttatggctttcttcataaataagctccactctcttcgacatgctcgataaaagctcttcctttttcttaatcagtccttttacttgattttgaagctcaggtatgtattttatggttcttgaaattgttgatggattgcttagttttttctgagccaaacacaaaatcaaaaaatattaaattttaaaaattacaagtaattaattatgtctgcttaattgtaataaaataaataaaagctcttaattactgcgtaaattaacaaaatgacaggcctatatattagataaagaaaaatatgaatatatatataccatttggtcagctgccggaagaagagagcggagagaggaatagagagagttgattctctttctacggtcacgctcactagcattgtgacacagcttcttaatgatcgtggggtcatcaccagtgacagctgtcgtggacggcagagatggattaagctctgctgtcttattattctcttgttgctgttgttggaaaagagattgaatattgtcgatattattgtgagcaaaaaaggagaatgaatctgcaaagtcagcagtggctctgccatgatctaataacgccattgatggtgatgaagaaga

SEQ ID NO: 49715 - DNA, 1210 bp, Cannabis sativa
tgcaaaaacagctacagcaggaccctctcaatcttgagaagattgatagagaattagctactagaactaagctaattcaggtgcagcgggattactcaacttttttacagcagaagaccaaggtcacttggataaaaaatggtgacttaaacactgcactttttcatgcaagcatcaagcaaagagcaagacataatcagattttttccatagaaagtcaggagggaaccaggatcattgaccctaatctgatctcatcagcctttgttgattactacaaggagctgctgggaacaagtatgactaacagaagaccaatgagaaagaagattgtgagcagaggtgcggttttgtccacacagcaagctgaggatttgatgttgaaatttactaaagaagaagtaaaagctgccctctttgacattcctggaaacaaggctccaggactggatggtttttcgagcttgttcttccaagattgctgggagatagtgggagatgacatttttcaggcagtgacttcattccttgaatcaggtaatcttcttaaagagatcaatgctacaattttgacattagtctctaaaatgaaatgtcctaacacagttaaagattttagaccaatagcttgttgcaatgttatttataagattgcaacaaagcttttgtgttctagaatcaaactcattctcccaaatttagtctccatgaaccaaggaggctttattaaagggagattcatagggcataacataatgatttgtcaggatttgttgagacattatgggaggaagaataataaaccttcttgtattatcaagttagatctacagaaggcatatgacactatagaatgggactttcttgaaaaaatgttgcagggactcttatttccatctaagtttattaaactagtcatgaactgtgtgagaactcctcggttttcactgatgtttaattacatggatattttgagtcaaaaagaggtcttagacagggtgatccgatatctccctttttatttgtgttggggatggaatacgtcactcgaataatggggagaataggagtcaaagaagacttctacttccatgacagatgtgcaaccacctccctaaatcacctagcctttgctgatgatgtattacttttctgcaatggggatttcaggagtgtttattatttactacaaggcctcaagctattctct

SEQ ID NO: 49716 - DNA, 847 bp, Cannabis sativa
tttgaacaattttcagacaaacccagaagttgaattagcttctcaatatcacaaactgagtcagattgggttggtttgggaagtgggaaatcaggggaacatgagagaaattgttgaggaagttcactgctttgttggggtgttgatgagttttggttgttgtaatttgattggtcaaagtggagatatataggtgagcttagtgatgattgtgattgtgattgtgattgttgttcttcttctaacttgagtctcttctcaacctgtaattaattagggttgaaatcaaaagaagaatacataaaggagaaaactttacacaaattacagaatgaagaaagcaaaatctgatatacctgtttaagggaggagaagaaattggagtgtagagatggatgtggtctcatattttggcaatttcccccaattgtgaagtgagaaaacactataatttttctttctattcttctttgaagaaaacttaaaataaatatatttacataaaacacacaatgggtattattaatgcaacccctaatttaagaaaaattttgagtatatattttttttatatggttgtgtacgttataattatttgaaatattttgtaaaattttgaaaattgtgatataatttacaatatagaaaatagtatttaaacaatttatctcacacgcgtataaaataaaaaaaatacacgtgtaacagactgtttgaatccttttcgatatgttaaattttaatagaatttctcaaaaaattttaaaatgtcttaaataattacaatatacacaaatacaaaaaaaaaatggactaaagaattcttttgaattacgaaataaatggg

SEQ ID NO: 49717 - DNA, 592 bp, Cannabis sativa
ttggtgtgtatttgcgaaataatcactttaatttaaggctgaccatgatcttattaaacactactacactcaatatgttgtgtgaactttatttgatttgattattaataattttacgtgtgttgattgacattgtattgtataagtccaacacaaaatgacgtaggtagtaataataataagataagagagttttggttttttgcatttggccttaaataaaaagatcatgatgatgacgtagctatttaatgctattacaatcacaacaacaacatgttgattttagttatataacatatatctatgtgctttgactcaactagaaataaaaagtatatatatggtaaagttttggataataactatatatattttgtactaaggtgtgttttctcatgtcattgtgaattcctcttgtcatattaaaatatatgtatttatatatttagagataaacactaacaccattatgacaaacataaaaccaaacaaaatatagttttttttttttttaaaaaaaaaaaaataccaatgaagtgttatggtgtgtatacaatttacacataaaataaataaatcaagtatattt

SEQ ID NO: 49718 - DNA, 1168 bp, Cannabis sativa
ctacaacttttttttttttattttatctttagtaacaaattttattgtgactaaaagtaaatttatttgtagtggtcgccatcttatagaagtgctaggcaccttagtgtatcaatactcttgttaagtaccaataatatctaagttatgctaaatgcacttttactgcttaattagcacccgtttaaaaggtgtcataatcaatatattaggtaatatttattttgatgtaatgtaataaattaataattatgagaatgataatgataatgtaatgaaataaaaattgtaatgggaataatattattgatgtttggtttaacactctatattgaacattgtaattctataaaattagaagcatattaataaaaatatccttaattttattatctttaatatttaaagttaaataaaagaaaaaaaaaaaagagcaaaataagtcttttctaacaatataatcactattacacttgttttataatgtaaaaggaaattataatataatgtaatgatcattacaatataaaattattacaaagctttaaagataaaaatgtaatagtaatattaatttcattataatcctcatttcatcaaatcaaacataattaaacatttataatattaagtgtcacttattttattttaataataaattattatagaaatatgctactgcatagtggtatatcatttaataataaatgacaaattaaattttgtatattttaaaattgagcattgatattaagcattagtagtggctagtaccttctcgacatgtcgcgttgagatcgactagcgatagttcctaaaagctattatattaaattatataagacccgatacttagttggatcaataacgatattaacacatatgagagtgctagacataccctttagtatttctttttaaaattatacaaattagtattttataagtttaatttttgacaaaactattttttaatataaccaacttaaaaataaattttaatataaacagatgtaattagtattaccatcaaattagataagattattattaaattttattaaagtaaaattacttcaaaatattaatctaatttactaacaaaataaaatatgtaacttttaaaaaaaacgagtggaaaatgatattaaccctaaaagttacatta

SEQ ID NO: 49719 - DNA, 840 bp, Cannabis sativa
ctaaacacaggttcatgttttggcaaatcataaatgaaaacttgctcacccgtgaccatttgagcagattttttcccattccttcagggctttgtttggtttgtgaggatgccccggaatctcataatcacctattttttgagtgcatcttcacaaggaaactcattgtgactgtggaaagttgggctgggaggattaattggccgaagagaatcattgaactacacaaccgagtcttgccaacaaaagtagacttagcttcaaagattctgaatgctatccctgctacctctttgtacttactgtggaaaaatagaaacgattgtctgtttaatgttgtttgtaattcagttgcttctcttagcaaagagataaagagtgttgttaaggctagagttcttgggctttattgtactagtaaaaataaaaaggatcaatatgtgctgaggttaatcaatagttggtagcctttccttttctttgctggcggttgattcccttccggcctttgttgtgtattgttctgttcttttgaataaaattatccttttgttcaaaaaaaacaaagtatcagtctcatataatttaagaaaatagcctcacctataaaaagtgttgaatattactgatgtccaataacaataatctatataaaaaaaaggtttttttttcataaatgtacaactaaaacaatataattacaaaaaatgtgcaaaaaagaaaatattttaaaaaacttatacattttgaaattttattaagtgaaaccatacattttaattattaatataaatagttaatgattaaactaattaccataaataaattaatgtaattaat

SEQ ID NO: 49720 - DNA, 1888 bp, Cannabis sativa
tgtaattaatggactaaatttgtacaaattataaaggggtataaattttgatataggttgtattattagggtcaaaaattgaaatttcccaagcataactaattaaactaagtttgggagataaataagagaggccaattgtcctatatacagtgactggacccaaatctacattggtatagacactaggtcttgaccacatagggagaataaatggttgaaccttctgcaactagatggaataatcatctaatttcactaatgttaccaaatccaaataatgtctgaatttggcttgagtaacacatttagtaaaaatgtctgctggattgtgatcagtgcacactctctttacttaaatttccttcttggcaataatgtctcgaatgaaaagcaactttatgtcaatatattttgacttttcatggaacattaagttcttcatcaagtgcggggtactttgattgtcacagtgtcttatatcttcaaatttaaactctagttccctagctagtgagactgtgtaactaaataacttcttttattgcctttgtagcagccatatactcaacttcagtagatgacaatactactatcttttggagatttgatttccagcttatacatccaccttgagttgtgaagatgtaacctgtgaaggaccttcttgtatcaatacaacctgcatgatttgagtctacaaaaccttcaacttcacaactttcttttctttcaactttgtagactagacgagtgtttatagatcttttcacatacatcatcacccacctgactgcatcccaatgtttgctgccaggattagtaatgaattcgctaattatgctcatggcataggctaaatttggccttgtgaataccatgacatacactaggtaccctacacaactagcacatggtatgttgtccatatgctttctcttccagtctgaggtgattgttcatttgagagtttaaagtgctgagccaaaggtgtgacaactggtttgacttcattcatcataaatttcattaacactttttgtaggtgtctttttcggagtaagcatgatcaaactagacctttttcttttgattagctctttaatggtgtgttaaatcttgtattaaatttagctcatgctaaaatttgtattaaatttagcacaaaatataacactgacaataaataaagtttttttaattataaatttgtcattaattattaatactaagttttaatatatatttttaattataataactaggaggcaactacgtgcgaggcacgtgttattttgtctttggtttttttttttatctaaaatatttaatttaataatagaaatattactttattaaatattttgtaagataagatgtttacccatttaaaaaatattatatcagataagttttttattataatttttaaattattacttatatgcaatgtataatttaagataaaaatttagcaatttcttcttattttatttcttcaatagaatatatattaaaattcttatatcgatctttgagtttttatcttcttttgatcaacataaatttgtagtatccaacacttagttaaaaatttattaaaaatactttcaatatatttaatctttttcagataaataaattataaaagttagtattagtcttcaattaatgatgatgttactatataaataataaataagtatatagcttgaaatgttacctcttcagaataatctattatttatattacattagatctcaaaagttattttacttcgtgattaagatacgcttttaatattgtcatttatttgagtatataatcttacactaaaaatataattatttttatgcttggatagacttgtatgtatcaatgacttat

SEQ ID NO: 49721 - DNA, 773 bp, Cannabis sativa
aaaccttgttttacctatcagtaatattttcccacaatatttatgtcctttaatcagttgaagatagatttggtaatgtattgatgtgtttgctggcgctatatagcgttatagcatatatataatattaggcatgtaaattattcagacttttgagcagaaaataagatgttttccgaatatttggtgctaatgctaagcaagaaatcagaaatgtaatgtcaaacccagctgaaggaatattgtgggtggtgtaattgtattatactagtactaatactattaggactaaatacaaaatgaagtgtaacaaagatatctacctgattcgggaaaaaaagaaactgcagtccaaaatttactgtcaaattatgtaacagagattatctttctccattaatattaatactgtttctcctcaattaataataacacttttaagtaattgataatattagaaattagttgaaaaattgtatttaaggatccgattggtttaccgtttcacattgtattgtattagaaagtattatatttaattgtattatacgtgatatttttatatagtgtattatgaatgttattaatttgtatatgtatataaatatttaatattttaatataaatcaatttaatttaatattaaataaaaatataatatatattacacaatttaatattatactatacaatataatctaatactaagggttattttggcatagctgtgctgaaaagtagggctgaatatcgggcgggtttaccgggtttcg

SEQ ID NO: 49722 - DNA, 1046 bp, Cannabis sativa
gggcataaaatcccaacaataggagcatcaaatttgctctcacctatgaggggaattgttttagtatactattgggtaaaagggtgaggtgcatatgagtactatatgtatgagagcagtgtaacaataagttacatgcagaacgtgctattagattttttattaaaaacaattgtttattatataggattctgcttttggtagtttttcaatttttaatttttgtcaagagttatttatttatattgagtaaaacaaaataaatttaataaaaagttgtgtatgttttgaaaagatatgaaggattttttttttttgttcagatcagtatttcacttggaatactcaaaagcatgaaaaatataatgaaccaatcaaccaagtatgttttagaagcatgaaatggttaataaaaatggcagagaaatttattctactcaaacaggaataaaaaaataaaattcatctcttcaatatatatttggatgtactgtttttgagttccacgaaatagtttttaaaaaaatataacataagcaaagactcctaaagaaagtaaaaattattgagaaacaaaccatattattctcttaaaagaaaaataaaattgatcactttttttagaaagtaactgatcacttttttaaaataatatataaaaatgttaataatctaatgtgggatgccctattctaactaatcaaataataaccacatgattacaattcaacgacttaaaaaatattctcacaaataaaagcaaaagtgatgctctcacctaaagagtaccctacatatatattattattataattgctgccaccaatttttactaatatacgtggcctaagccacatgttttgtgtgggtcccggttagtggaaagctagaatttatcattggatcgtaattaaaccccattccaggaggagtaaaaacatccagaaggataacacgacacttgggaacctggagagattaaaacaataatataagccttcggaaggataggtcctcccgaagcctgcaaggtttgtgcttgcatt

SEQ ID NO: 49723 - DNA, 1119 bp, Cannabis sativa
atgaatttatgcattttttattttatggtttctttggctatttggggctgcacaaacaaaagttttgaccatattgatgggctctatttctcattcacaaaccagacatcatatgcctctgtcacttggttcttcaatggtggctattaagcttaattagtcatcaacagattcacgtgccacttgcttccttgattggaggaatgtttttttttaaatatgaaaactaactttctgcaactgtctagtagatatgcctcatcttttgtaagcttttccaattcatgaatgaagcttatttatttcttaaagaaaaacaaaaaaaaaaatgaacgaatatgagctttatagtagaaaaagagatgaagcagaaattctaataatagcttttgatacatattgtaattgatgttcttaaatcatgctattaagttgtttgtaaactgaactagcagtgagtgagtggtatatgaggtactagagacgcgatgcaaattatcccacatgggaaacagataatataaacctagtaactcaacaactataagaccacaaatcttttgacgattaaaaccacgcagccacgcggtgaacacaaagcgaactattctttcgccttttactaaagaataccgtgtgttcgccgctattagtggcatacgcctatttttggagaggtttcttattagaagcctctataatgtagtttataattttttttaacttattctaggattgtaagttgttttctcaaatcatctggtatataaagtcgttgatcgtgctacaaaaataaacaaagactatattaaaaggacctattttgaagggtgtgtggacaatttgcttaatgaaaaggacaagaagagaaagaggggcataaagagaatttcagttgtttattctctgatagttaaacatctgagcaaaattcaatcttttcctttctatttttggtttcctaaaaagaaaacactacaggaacataagtccaacaaacaagagaaatattcctctaccccagtaataactatttttgacacgttaaccctttaacacatcacatgctccattgaagaagtattcagtttattctctgataatttaagcttgtattta

SEQ ID NO: 49724 - DNA, 2164 bp, Cannabis sativa
atttcttacattaagcctctgcgtatacaactgtgataccgcactgtttatcacattatttcatatataatgatgccactgcatctaatgtctatatagcatagatccgcgtgttacactcacccattttttttacacataaggccttaatagagtttatctcaattttatttactgagtctaacctagttatgtcttgatcacacaactcttattatatatgcataatttatatattatgctctcacaagggtttgtcctaaagatatttatcaaacctaatgcaattgtgtcttatatacataattcttgacatatatccacagagaatcctcaataatccataacaaaaagaaaagatccataacacacactcgaagtcactctcatcttattttgacttctcctcatgtgctgtagtatacagtttaaaattagctttgctgcaccaattaaataaatgaagagaattaaatatagtattttcaaaaccaaaaacaattaacgccagaacacaaggacaaatcacttactaatttttgacccaaacttcctttgcattatttttttgttaattcatgctcatatataacttttagggtattaaccctaactatccatataatataacttttatcatttattcacaagtcatgtcttaaccgcataacctttagcatttagggtaatgactcaattccacaatatatattcctaggataataacccttgatcacattaagcatatttagggtaataaccctagttcacaatttatatacttaggataataaacataattcatgaattctcaatagcaatcaaataacatataattgcgccactgcgctatacgctatgtactttgttcactgtcttacctgatttctaatgtatgaggagaaaccccaatccacaggtagttctgaccaagtatcggtattcttagtcacaagtcgtaagtttcacacaatagagttaatcctaaatcacatttcataattttacagggcttagaagatttgaaaacatgagcagagccttgctgaaaaaattagcttggtatgtctgtacagggtaggatgtccattgggttgagaatttgattgtaaaatactgttgtaaagatgaattctagattgtcaatcaaaagttaattgattctatcatttggcatggtattttaaatgtgtaagatatcatttggaggggcataagttctcattggcgaattaagatatatatttggtccaaaccttgtgtgtcatggacaagactgacttatatacaacaagctttcattgatacctaaagctaggttgtaaacatgatcactactactttcaatgatccaatggctaaacatgtactcaatactcgcatcttgtccgtttcagaaagagacaaattttttagtaggccaataagagcgagagtttctctatcaaaagtgcttgttaagttgaccaacaataccaattttaggtaaaatcgaaggctttcaaaaatatttggcgcttaaggatatagcctatacacatacttctttggaaaatttgttctagctgactcccttccaaagatggatttttttcatactaaatatagacaaagagtgctgcttatgtcatcaggcggaggaatctatagagcggttatttttcaagtgtactttcgtgaagtttttatggttttcaagtagttggagtattcaaatcgaacttgaatttacacttgtaacaccctattagtttaggcgtgctatcatgattttttactaattgggcgatccgttgctaatcaacgagtttattgaaaaacatgattaattaaaacttttctcaattacccttaatattaaaagtaaataacttatatataaccgggatctcgtatttaaaatatttacaattgagttacaaaatatttgatacaaaagttgtcatctagcgattatataaaatacaacatgatgtcccaaagatagtacgctccatgtttaaccgccccaacatgtaaatttttcatctactcgcactcactgctgttcaaccatagctttgcccttacctacacatggaaatagtaagtaattcgacaaactcagtaagaaacgtataatcataatcatacacataaacataaatataactcgagttataat

SEQ ID NO: 49725 - DNA, 706 bp, Cannabis sativa
ttaaataactataacgtacaatactatgaaaaaaaaaatagacgaattttttttctaaaagtcgcaatagttaggagttgtaccaatacacctattttagtggggtgcattgtagaccatctctaatgcaaaatttaaattttgtgtcaaacttgcacaaaaaataaatttgtgcttatatttgaccaactattttaattatgctctaatacacaatacaatacgtaaaataagtaaaatatttaatattttattgagaatataaaagtagcattaatttattccaagctaaatttgactcaatattatattttgggctaaatttaacacacacttttaacatgtgataaatttaacacactttttcttcttctagataagccatggagattgagactgtgaaaccgaaaaaacagctctaaagaggataaaggaagcatagaagagaactaagcgataaagagactgagaaatcagagtgaaaaagagaaacaaaggaggagaaggcccgagacccattttgaggttgataatgacgaatatctacgggattgaacatccttttgtagagtgtcgagatacaactagattcagtaacatacgaagagattcgaatgagatccaccaagatacgaataaattgacttctatttatttagtttggcaaactgagaataaagatttcaaattaaggtttctatttgtt

SEQ ID NO: 49726 - DNA, 1081 bp, Cannabis sativa
  modified_base (974)..(976): a, c, t, g, unknown or other
ggaatagaagattttagaattgataaaaatacacctaagtgattttatgactttttggctttagtggggccattatggtctttttaccatttgagattgttgtcctttagtgaaaatttattaagctaagtaatctgaatttataatccattttattagataatatcattacccctttttgcaaaaattagaatattgaagaaaaaacttaaactctttctctctagtctctctctctctcatgaaccctagaaaccagctagggtttgataatttttctgcaactcagggatttccagcaggttattaggtgatttaatccaaggtaatagctttagcacttctatcttttattgccttatggtttttagttgagttgttgcatgatttgtgtgtttaggtgttgtagtagttagggttgtttgaaattgttttctggagtttatttaagtttagttatgctgatttgaagtggttttaggggctgttataagatttgagcaagctttgagtttaagaactcaagcttggctcttcaatggtgaaattttctattgagcatgttatgttgttctattgcttgggttatgtttattagggtataatatgcaggtctagaaggtttggtaaggtttggagtcgaattggttaggttttcgaaatttttaggttacctggtgtaaaaactggttaaccggatcagaaactgatttcctacacttttgtgttttcgattcatgttagtttagagctttggtcggttaattccctgttagtttagggtatttccatgttaactttcagtaggtaagcttttggtttaaaacttaagtctccggttgtgatttagcgtgtcacttatccatgttatgaacgatgtgatttaggagcctataattcgtcgagcagttgttccactcaagttggccggcacacctgaattcggaaaacaaggtaagattagtataatgatnnncatatgtgattacatatttagcgtacatgtttgtttccgtcaaaaaaacatattagggtatcggtgaggtgtacatagagttgcaccgagataccaacagatata

SEQ ID NO: 49727 - DNA, 602 bp, Cannabis sativa
ttcaccatatcactaaaaatatcgttatgagtatcactagatatcgttaatagttgaactgtgttttacttgttcagaatatgaaattttatgctgttagatgttgtgaatattatcgcaaggtattgttgaatcatgaactttgttttactttatttttcgtgacatgtcacgacatattagcgacatagtttgcgatttaaaattatagagttttttatttgtctgcttacttttgcagatggctcctgaacttgaacttctaattttttagcatttcacaggatgccttacctatcggggtacaggaagtttagagatatcaaggctaagtttacgaagcttgagttgattaatacggttaaggctatgtttataatcagcaaaacatagaggtttcacaggcaacaatgaaagtaaactatagacattgaataaggataatgttgactttctctggcgctttggtccatagcctcctcttacggaagatgaaagtcgataatgaaaagaaagatgaggtttggtttcatgtgggcaaaaatgacatgaggttcgggtggatagaatttggacttattaccggcttacctatgggtagt

SEQ ID NO: 49728 - DNA, 1059 bp, Cannabis sativa
aaattctagaaagatacaatggttaactatgaagtagatttttaggtacttaaaggggacaacaaatgttggacttatgtttagatagtcacaaaaccaaacgttggtggaaggatttagtgactcaaactatgcaggggatagagacacaaaaaagtctacttcaacttactattttatgattggaggtaattgtgtgagctagaaagtactacaaccagtggtggccctataaaccacttaagcatagtatatctcagcaacaaaagcgataaaagaggcagtgtagattaaaggagtactaaaagagttaaacttgctgagtagtgtgcctacagtgtactttaacagccaaagttgtgttcatctctgcaaaaatccagcctttcatgatataacaaagcatgttgagattaagtgccactttattagagacaaggtgacacagggagaggtcacagtggaaaaggttcccactgaacataaccctgcagacatggagaccaaagtggtaaccctagctaagttcaaacattgcatgaacttgctagggatagacaaaggaagctaaccctagtggtcattcaagctaagaccctcaaagcatcatcaactatccttggttatataagggaatttgggtagaatttgttaaaattagatcccctagtataacctaagtttcaaaagcaaatccttgggtatgaaattacagttctaacacaagacaaaaagacaattacaaagacattctctatcggaatcaagatatagacaagtacaaaataagttacaacaaatctctagggctcaaacagttacaaccatagatcatttcacagatcttatttctatttaaaggatacattttttttttttccaattgtggcagtgcctttgagagagagccattgagagagcttttccagtagagagccattgtaagaaagagagaatacttttatgtgttatttccttagtgtgtatttgtaaaaactataaaaaagagagagttagtaacttgtaaaaggaggaaaaaacagttaaaacaaaaagaga

SEQ ID NO: 49729 - DNA, 1596 bp, Cannabis sativa
atctgggttgataaccagagtgccactgccttagccgcaaatccagtttttcacgccaggtcaaaacacattgagttagatcttcatttcgtgcgtgatcaaatattggataagcagctctttgtcagatatgttccagctctcgatcaagctgttgacctacttacaaagtctctaactacagacaggttcttgtaccttaaatccaaactgaaaatggtgtccacaccatttagattgaggggggatgttaatgctgttattaccggttcttaagtgtacaagtgtcagttagttagttgggtctagctgactttctgttatgtttgtttcaactgtttctctgtaaagactttgtataaataccctgtattcattaatgaatccaagcttttagtaattcagttcatctgttctttgtttttcttttctctgcaactcacaaggcttctgcctatggctcttacatatattgatgaattagagaattcattgcacaaacaaattgatttgtacaacctaaaacacctcatatagagccctgtataagaatctatacaagagatctaattacaataagtcaaacttatctatgtttctataatctacatgtttaggcaaacacaagttatccggcctagttttaatttgtcatatttttcttcctaaattaacagattcaaactaacaatatatttaactgccataatttgttattcctagcttgccaaccaaagctgcaatggaagaagctaagacttttttcttccatttactcttcgtggacctgtttatccatctgatcttgcaaggaaacagtgtcggctttccatccaagtcaatttttcagctaatataggcattcatgagagaaaagacacttaaagaaaagatgatcagtaactatttctacaatattattacagaggatacaagttgaatcatctgcaatgttgaatctgtggagtctttctctagttttcaacatgttttgtactgcgatccagagcacaaagtgtgcttgtgctttgggatgttaagtctgcaccaaacttgcttactccaataaaattgatcctgtacctaattaagcatcctgtagctagaggaaattcagtaaatacctaatgttccattaggtgtctaacctcatctttgatctccactatatattttcttctaataccaactactttgaggtgaggcgttgtaatcccactagttcctcatgctttatgtaaacattattgttgtggtatttttgacacgcaaatatattgtttacaagtaatagactcacaaagagtgaggtcgatggcacagggattgtagttaagtactttataattaaatctttacttctatttggctaaataaaattttaaaagaaaattaaagttagaaacactaaagaaacagtgaaattaagaagcaagtaaattaaaaaaaaaattaacgatgattaaagttatggctttcgattcaattgtatctattatctatggcctaatatgattatcttcctattaccaatttttatgtaatagcatgtttactaaggtaatttatagtcttctcagatatataaacctcaat

SEQ ID NO: 49730 - DNA, 1061 bp, Cannabis sativa
gtagtaacaatataaatttttcattattgaataataattttaatcaccataaatagttactaaatattacaagtaaattttatatataaattattactaatttaattttaagtataatattaacaaattataattattgtatttaataattttagcgacaaatttttttaatgataatgataacatataacgatttaataatatttgtttaatcaaaatttttttcacttttacgtacaattataattataggtaaatatttttgttgcggctatttctataaggcttcgattgaaggcgctattaatttataaaattactttttggagtaataaaaatttagctgattcatgaaaaaaaaaatgtttttgtagtgtagaatatatttttgtgaatgtgggaagaaaattgtaaaaagaacaccatcatacttatgttatatttatataactaaaaatctgtagagtgtagaatatgtctgccccctgtgttatttttgtgactatattaaatatttattaatgtaatgtattttttttccaacaacttaatccaatatatgtaaataagtctttttttttttttttctttctgaatcagtatataaaacctttttagttttcttattatatgtaagaatatttgctgcaaaagtatataaattattatatttgtagcaatcaataacaagttaattaacgtcattcttactgttccactatagtcctacgtagcatcaaatatgcttataatttcacgcacatacacactaaacggtctcaaacagatattcgatgtgcaacaaaactgcaccaaaaaaaattatggacagaacttaaaaaaataaatgatacactaattaattcaaataatttcatcacaaatatctaatatatatctatattataggaatggaaaaataatgaaagacgatcagctttgtacaacatatttcagtatatatccaactataacgtactctcttttctattattatatcaatatatatatatatatgtagtctttctttttttgtttttattttatgtgcaagtttatca

SEQ ID NO: 49731 - DNA, 893 bp, Cannabis sativa
tctgttttcctcatattgatgctttacaaagaagcaagttttctcaaaagaaaataggatataatagagatcgacgttcttgcaaatttatatataataataaaaaaaattaaaattttagtatttgaaatttttttcaaaaaaaaaagtatttaaaattaattaagatatgtacatatttcaatatcaactcatgcaaattttaatttaataaataatttaaaaaactgctaactaattattgggtactacattgagtactacatatatatagtactgaaccttaaggtgccacttaacaataataacaaaaaattatttactaaaaaaatcattcataataaataaagaaaaaacaaaaagaaaatgataatagaagctaataaagatatgtacatattgataaaagcaatgttaaaggcacattaaagtgtcaaacaccacaaaagataacatattattattggtgcacttcaatatcacttcctacaaattttaatttaataattgatttatagaaaactgttaatcaattattgtgtatgtgaattagtatgatattaaaaaatttaaagtctcactgtctcacataacaataataatacaaaaaattattttaaaaaagatattacaaaatcatttaaaaaacacacacacacaaaaataaaaaaaaaaatgctaattaagacaaaaaatcaaaaaaaaaaattgttaactaattattaattaccatatcgatatggtattaagtaccttaaagtattaatagtaaataaaaaaaattaatataaaagatcaaaaaaattgctaattaattattaggtaccatatcattcgcattaaacactttaaattgtcaatataataaataaataatatcaattatctaaata

SEQ ID NO: 49732 - DNA, 2254 bp, Cannabis sativa
aacttgtcaatcattttctgtatgtagtttctttgtgacagtgataatctctctggtctgtctctttttatgtcaatcccaattatcctctttgcttctcctagatcattcatttcaaattatgtattcaaactctgttttagtttatctattgccttccttttgttaccaatgatgagaatatcatcaacatataacaacaactagattggttcaatgttatagtatacaaaaggatcatagtcacttctgctatacccaatactaaccatgaattcatggaacctcaaattccactaccttggtgcttgtttgagccaataaagtgattcatgtaggagacacacttgattaggttttctacttttgtaaccatctggttcttccatgtagatttattcttcaagtctgccatgcaaaaatgttgtcttcacatccatttgatccatttcgagatcatattttgccactttagttatcatgattcttatggatgtttgtctgactactggagagaagatatcattgaagtcaataccttccctttgattaaagcctttggccactagtttggctttgattctagtttcttcacctggcaacccttcctattccttaaaaatccatttgtagccaattaagttttgctctggtggccttgtgattgttttccatgtttattctttttcagggaactcatttcttcgtcaattgtagcaagctacttcttcttattcttagagttgatagcttcttggtatgtggttagcattgtgctttcaacttcttttgctgataaaagtgtaaaagctgtgcaattagaaaatcaaaacctctttggtggttttatctgtcttctctcttcgtctctaacaagttgataatcttgtggatcaattcgagatgtttcttcttcagtttcttctatatatgtctctggctgtgcattccacctaacatgtactgtcttcttcttccctatcaccttgaatttccaagcctgtcacatcttgataactttgtctgttattggttgtagtcgttttcatagccatttcatgttctttgaacaccatatccctactaattatgaacttcatgtgtccctcttccaaacaccataacttgtatccttttaccctttcagggtaaccaaggaatagacactagagagctcttggctctagtttatcttgtcttgtatgagcaaaagttgtgcatccaaaaattctgaaatgatcaactgttgggacatgtcttgtccagatttcttaaggtgttttaaacttaattgcagttgagggacatctgtttatcaagtagcatgctgttttcagagcttcaccccaaaatttattgtcaaggttaactcccttgagcatgcatctcactttttccaatagagtcctattcattctttcagcaagtccatcttgttgtggatttttcacaactgccttatgtctatcaattccctcatgttgacagaacctagtgaactcatcttaatacaattctaatccattatcagttcgaagcttttttatttttcttcttgtctgattttcaatcggtcttttccaagtgacaaaggtgttgaatgtctcattctttgttttgagcaagaaaacctaaactttcctattatagtcatcaactatactcatgaaatagctaacacctcctagtgttttagttctagaagccccccatagatctgaatggatatagtctagtttttcctgtgtggtatgcttccttggtgtgaatttcaacttgcagcatttgccatagacacaatcatcacagaaatccaatttctcctagtttgcccttaagaatcccttgtttttcaagctcacccatacccctttcactcacatgtctaagtcttaaatgccaaagcctagtgctttccatatctggtcctttaaccaccataccattctcacctgacatcttgaatgattctgacctgatcatcatggagcttgattcttacagttctaattcctgtaactctacatgccttattgtctcctaacaagattgatccaccatcaagcttcttgaaactgccaaataattctcttcttggtgtcatgtggaattaacaacctgagtcaactatccatgagtctcctcattcttggctagagacaaccaaaacatcagctgactcatagccatctgtcacaacaccatcttctcctctttctttgcttttgtctctttgaagtttggccttcaatgc

SEQ ID NO: 49733 - DNA, 769 bp, Cannabis sativa
taattaaattatttgtttttttttttttatcacaagtactatatatatgcatttatataaaaatatgaactctttccaaagagatcatataaatattgagacatatgctcttctttaagtgacaagagttaaatgtatatatatttatatatatatatatatagaaagtttaattatgaactatgtctttgtccatatatgtataatgccagtagtgcattattcctagaaatcaggtcttttcaacaccaaattatattaagtattgtatacataatattttcatatttgaaagaatatttactttactaaagtgctacatatatattataattatatataacatataacaattatataaacaatattgcaagctcatagttatatctataattattttaattttcagaattaattctgatgattttattaagaaaaaatccagtcaatattcctcttttgaaatttgacttgattacaaaaatgcaaagaaagtataatattttatcaattatataaaattaattaatatacttcatatgagaaaaggagattaactaattaataagggtattgtggaaagtggtcatattaattattaggcccatatagatatatattattaaagatccattaacagaaacacaagaagcttcaatatgcaaaaagctcaacccaccccaactctcccaaaattaaatataataaaataatggcattttccaaaataataataagttttaagagttgaaaaataatatgaaatttt

SEQ ID NO: 49734 - DNA, 709 bp, Cannabis sativa
caaccacgtaaaaatctttctcttaatttcttacagttctctaatcttatattattttattggttgctgaaaacctcggtcaactatatgtataaattatgcaagaaaaatgcatgaattaactcatttaatcattagtttttacacaataaaaagaatcaacattacaaaataataattttaaaatatcactaccctcattactaatttttagatattgatgtttaaattatatgtgcaaattatacaaaaaaaaatgtataaattagttcatttaattaatttatttttttttttgaaaaaaccacatataattaaagaactttcaatatatattgaactccacaaacattttccctaacaaaaaaaaataatttaattttataggttaaagtttaaactatatgtattgttgtaagaaaaaggcataaactatactttatataatattaagtttagaaaataaaaagaatcaaaatttaaaaatgataattcaaagataccaaaattatttaggggaatgactccatatactatttttttaacttttttttaaaaaaaatttacggtttgggtttctaaagtgattttttcggtagtttctatgtataattccgtaaaaatacaaaacaaaaaaaattattttgaagtataaaaataaaaaagctccaattatttatcacaataaatgactttttcttttttccaa

SEQ ID NO: 49735 - DNA, 3016 bp, Cannabis sativa
  modified_base (2406)..(2417): a, c, t, g, unknown or other
ttaaaaatattttcacttttttaattttaaaaacaaaaaacttattaaaaaagtattaccaaacgacacctaaataaacaaatgatggagctgtgatttattcagcttctgtaaacatttttttttatgctaacaaaattttgtatacatttatttatataaatattatatttattattttaaaaatattaagatgccatttgtttttactaaatagtgaagaaaacagaggaaagatcacttgagttgagctttcaattatattttttcttgctacaataatatatgcatgagctctacagctcgtaataatatttacttgacttgatagaagaattcaaaatgaagtttcatgtacaagaaaagaaaacattttggtggtaagtgagttatggattgtaaaataggatgtggaagcatatattagattagatcaagttgatggaaaatgattgcgtgtaaaaggggatacataatataataattgggaagatattaataaagcttatctaaaggaagggatatgatatatgtgaagtggcccaagtggctaagcaaactcaaaaaaccaaaccaaacataaataactccatcatatatatggtcatggactgtggacacgggcatggtgggataacagtactacatcatttgcccatattcttccaaaaatttcaaatttcactactaaataattaatatcgttttttttctctttttttttatttttttttgaaagggatatcttcttcaatatattggagtaatatgtattgatatttatttttttgaatacaatatgtattgatatttataagcggtggaggaatgggtttgttttaaatgaatttgggacatttgcgagttgatttgtctaacctatttaattaacaaacgagttgtgtttcgattgatacggttgaaacgaaattgacccgttaacgactttgttgacctcaaaaagtgatcaaccgacagcgaggtcgtatagatttcatgcttgccacgtatttacacaaataagagtgaaaagtaataaacacatagatttgttataaaagttcgacccccttgtgatagcgagtaatgacgtacttcccttttagttgtattaatactgagggttgataatgtccagatcactatagatgggatctgctatagcacccttaagaatataaggtataaatcaataatggtaaaactcaagtgttgagatgatgctagtgtaggcgtgtgagagaagaagtgaggaagagagaagttgttaaacttaggcttagagcctggcggcaagtttcagccttagattcaacttaggtttctaggctagagttaaggcctttatataggaggcctaaagcctaggttacagtttgaaaccctagatatttgcatagtatgttagttaattgcaaaagaccaaaatgccattgaatctagatattattcagccattttcttcagcttttagggcccaattcgaagcccatgagttgttgtgcacgtgtagaagtgcacaggaaaccctgtagagaacctcctagccagttaggcccctgtggagggtaggctggtcgaccatggtgcaatcccgaggctggccggccataggcccggccagctcctgtgagggagctagtttgtcacttaatgcccgtttgagtgtcgaggtctccgtttgcttaggtgctgacttggccttcttattggcaagttgtactgccatgtggcgctgattttgtccacgtaagcatgccacgtcaggaggataaaaattgggataacatttgcccccaagtccctgtgcggaagtctatacggatagggactttactagctatgttggtgtgttcgggattgttgtagcctttgctaaataaaagttgatacattttagccttttgaagcactttgtcttgactgtttgatctcattgctgtagagaaatagctactttagttgcctttatgatgtgtaggtgaggtaagtgacaaaaaaggggcccgcatgtattacataagtgagttttggagggaaaaccttttttaacttctcattttttacttttcactttctctcacttgaaacttgcctaagaaaaagctcttccttctctttaaagggtcgaacccacaagcatcatcttttcaggatttttgcactgttttgatgatttgagcttcccaccttcttcttcaacgacatcttgtagtgggtaagcttcctattcctattattttacttgatttggttgattttgccatggatgcatgaatattattccttgtttagaacatgctttgattcttacgttagattgttatccttttggtattttgatctacatgacagccttaggatacatgatgtgtgatttctagatgaaaaagatctgaatctgannnnnnnnnnnnttcttggctctttgagtcacgaagaacacgaagaatgcaaagaacatgtttgagctctagaaaaaacacgtgttctgatccatgcagatcctgggtggccaaggaagccttgtttgtggcctggccgaccaagggaggcgttcatggggtctaaccggccaaggggttgtacctcctaggttggccgacctatgcctggaaatagggttcctggtcggccactaaggcctgaaaccctagccagccactaaggcttggaacccaagccggcacaaggccaaggctctagtgggcagccagctgttctccctcttttgaccttggctagggtcttgtgacagccttggaggcatatacaactgtggccttttgcgtggtttatcttggaaactatgtataaggctaggtagtgagtccattatagtcaattatacagcttaggacttatgatgtgtcatattaagtgtacttaagacggtacttggtagttgatcgaccttgtacattgtgttttacctggaaggctaggtataaggctaggtagtgagtccaaggtgcaagtaaactatgttttggattatcatatctgttaaaccctg

SEQ ID NO: 49736 - DNA, 1519 bp, Cannabis sativa
aagaattcaattaattggtacttaactacaattctcgtgggaacgatctcacttacctggatattacttgttaaaacgatacgtatacttgcgtgttaaaataccataacaaacatacaaaaaaaataaaaacaaatagccactaaaaatatttatttttttaatattttattatatataaataaatataaataatttttttgatatatataaatgtaattggattggatcggtttttaattggattttaaaattgacatttaataaccaatctaatccaattataatccaacttttaacacccaatctgatccaattaattagattggattggataagttcggttcggttcggttcagttcagtttaattggattgaatgttgcctactcctagcaactagttgcggtggagaccgattgcctagtgtggtgcaggcattactatgctctatcagtatgatttcttcttttggttttctcattcaagattgtaaaatttgcttgctagtttgagaaatatttctgtttattttattgaacgatcagctaatgtgtggtagcttataattttgctagagctgcaattttatattttggtcgtcacttcaatttgaagtctgtttcaattgacttattatcttgtttggcaacagagattgatggttaaataaattgattttccattgaaaaaaatctaataaatattttgtccctaaaaaataaaaaataaaaaaattcaaacttatttatatttacaaactcatattttaaaaaataaattaaaaaaaaaccttacaaaaaatcctaaatatattaaacaatcaaaaaaaaaatctagtttatttatattcacaaacttatattttaaaattttaagaaaaaatattatgaaaaattcaataaaaatattgagttattttaaaaatacggaaaagtaaattaaaaaaaaatatatattatatttacttaaataaatttaaattgtttggaaaaaataaattcaagcattgccagaagttgaacttatacacaaattaaatctttaataaaaaatttccatgtataaattgaattttttaataaaaaaataattaattttttaaatcgcataattaattttttaaatcgcataattaattttacaattttggtttcttttcttacaattttttttttttattttttaagatttgatttaatattttaagaattcaaaaaaaaaaaaatcttctctcaatttttttttaagagtatgatatgatagttataaagttgagcaaaaatttttaatttgcttatgtcaccatttaaaaggtaaaatagacccaaaaaaaaattaacaaattttatataaacactaattattcaaaatacaaatatacatatagggtaatactatggtagtacctagaaaaagttccctaccggtagggaactttttttctaaccgttgattttagatcttgtggttattataaagtaaggtatatactcttactataggactgcttgtataca

SEQ ID NO: 49737 - DNA, 1095 bp, Cannabis sativa
tttggtcttgaggataagttataacgccacagcaaaataaaatactatttaaattatacaataatatttcagatttgctttacttttttatactctgatagtcgattcaatccaattcacacttgtgcagattgaattggattaaaaaaatgaaatccgcatttagtgcaaatcagatgcactatgagtaaaatagtacggatcagattaaatgaacactttacatacttggctttattttgttggtggttcttattaatgtggtgatgttcaaccttagcattgtattccattagtctcctttagtattagtttattgcattagcaggtaaaaagctttatgccaaacttcttatcaagctaactcttttaataatatatatattttggaaagttttatgaagcactcaaatggatgtagttataattctaatatttttatattacagtgtatactatagaaatttaaggatattttgctgttattttattttattttttttaaaataattgtacaataatttatagtacaaaaaataaaatttaaacaattctttatacatacttttttgttttattatatatatttttggtttatgaaataaattgtttcaactctatttttattataaattaatttttgattaaatttattgaatatcttaaataattataatatacaatattatataaaaaaaattacaaatatttaaattcaaggaacattcatttttaggagtacacagataattaaaaccatatattatatatataaatttcctttttcttgattttggttacatgatataactggaaaaatatattcactcttaaaagacagactgacagaactgtagtcatttcagagcaagcttaattattctgctcactttctatttacaagtttcaaccgagtttacacagtttattacatctaaataatttacaaagttatatttaattatgtataatttagacagtttctttctatatttacttatatatgtataatttataagttagacagtttctttctatatttacttatatatgtataatttacaaagttaggtacctttcacaacagatttggat

SEQ ID NO: 49738 - DNA, 3397 bp, Cannabis sativa
  modified_base (2626)..(2627): a, c, t, g, unknown or other
aattatgttattccaatattgtaggtttgacatgggcgaatatacttgctagttatgttctgtggttgatggcaccattcttgacagatgtgtggaggcttaataccaaaatgctgctatgggtattaatatattttggggcatcattgatatagctcctttcattacacaatatttttttgattcttacttaggtaactatcggatggcttcactcactactttaatgtatactagtgtaagtttctattcaccacaattaatttattaatcatttctgtaatatgaataaataaattaagagatatttacataatttaatcatatgttctctcattgttatgtttttgtgccattatatttttttcactaaatttttggatttcagtgattagtatgtttgtccttatcagcattggggacttgcaacgaagaacataaggcatcgtgtcatgttaaaaaaagatacaagttttattttacatagcataacctcaattaattggaggtatttcttttcaccgattaaattcaatacaagaacttcttcgtaaagaaggacaacaaacaataagttcattatcaccaacagttgaagaagtagcaattcctactaatgaattagaacaagatcagggctcatcatcaagatcaataataagaccaaataactcaaatggtgctactaatagggaagaagaagtggtattaaattcaattttaagatcatcaacaataatatttaaaaggtggcagttgttgaacatagttattttggcagtgattcatttagttggaacatttgcacttcctaacttgaaacaatggacaattagatttgggattccaactttgtttatgttggtggtaacagtgttgttcgtgagtgataaccacaaagattttaatgctccaattggaagtttcttaactactatgcgttcggttatcgtagcaagtttctcaaaatcaactaatgatcatcacctaaaccaagaatatcatcattctcaaacctcgccgccttatggtcgttacctcaggtactatatactatatacaatatagttagtcaaagtgattgatttatttattagtatatatttttagtatttctattccatcatagatataaactttacttatatttctttttttttttttttggtttaggatttttgacccacaaactatttttactaccaaattgtatatttcttgaacgtttttgccaagtaaaaattcttctaaaactatcatcacaagactgaaatataggtgttcatcgagttttacagaaactaattatgagaagaaatttttaacgtgattcacgtgttaatgaatcttaacctatgagtcaatagtattaagcttttagtagtggtgttttacactttgagtttttgctctataaagactgagttttgaatccccttcatggtgatggtgaggtctattttataagcaaccttgcactttgggttagactaatccgagcctaataagagtatttttgtgtatatttagcccactatattaataaaattgtatttagataaatagcatcaatgttgaagattaagcctaatgatagaagcctaatcctaaaagcaacgaaccacttctgttcatagtaacattgacgttgacaagaaacacgtggattgttgtttggagcatggaaaaaggttgtgttagagtagtggttgtgacaattccaagcttgattgaacttttttctgaatagcctttctatgagttagtaacttggacatgtatctagattttgtggaattttttagaaatgtgacatgtagaaagtgttcaggtcggtaaacaatcccatatgatcctttaggtcttcttcctaaattcttttcttgttcacaccttcatagatcaaatttttatagaggaaagttgtcgaggactcccttacaacatactactcatccaggaccatgggatgggatgtattcaaatccctataaccttcttcaacagtagttatcttattagttgtcgttgttgtttgtggattgaattaatctctaaattagatgtagtaacataatcatccaggaggatggtgtcctgaactgcccggacttggagcatgtgtacagattggacttaggcgttctcgatccagatggacctatttaggtcaaagatgggcttgttgtctgctaggcctcccttaagaggtcacgtgtcatttggataagagcacgaacaacaattggacttttgttaagttttatcccatgtatctagcaaagtagggatgcacacgaggtagggaattggcggggagtgctcgctccgtccccatccccattagggattttaatccctatccccgcgtatttttgattagggataggacggggaatcccctaatgggggtagggtcggagcagggaatcccctaataaaaaaaagtttacaataagaatttaaatatataaaaatattaaattacataaaaattaaaatattgcacattgattattattcaaaaaattaattattatccaaaatacaactttaaattcacaaaaagaatactaatatactaaaaaaatgaaaacatacattataaattataaaatattattannaatataaaataaaatactaaatgggtccccgtcggagcggggagtgtgatccccgtccccgtctcgtttaacattcggagacaaaaattaatccacgtccccttcctattccccatttagacggggaatccccgcccattaggggcgggtccccatagggtcccatctctatggaaaaatgtgccaatttgtccatcatgtaatcctataaataggagccttaactcctcattgtttctgagactcacatttgatactaaaacattgtgcaattataatctcatacctagagcataagaaactcaatggagtttcttcttgttatcttttttcctaatccaatgaatataatctcaaagtagacatagctctattaccaatgaaaggatgttaattactataaaagttcttgactttattttattacactgctctctatatttataattattgttttcttcatatattgccattggattttacgacagtcaatattttggtgttttaattgagggcaagaacctctaaaaatccaaatcatattccatggctatcaccagatctacaagtgtagaacatccaactgttgagacgacaccttccatctctggcatacctatacctttgaggcacactgaaacacagattgtacctcataaaacacccaagtgagtcccactaaggtgttagtacaagtgtactagcccacaatgaacctcaagttgacttaggggaagacttcaatccttatgttgagcaattgaaagagg

SEQ ID NO: 49739 - DNA, 1372 bp, Cannabis sativa
tcttttgtcattgattaaagtaatcgttctaaaagttgacaacaatatcaaaccttgtatattacagaaatttataaaattgtaaatgaatggcttgataaactatcgagaaaaaaaaatatggttagatctcagacagcccaccctgtatatgtccctttttgtaattttttctctttattttctttctctatttcacacaaagtattaatcggtagctaaacaatacacctattgtagcagctaataattgaaagatatgtaagaaataaattgatctgatctacaatttacaatgttaattcacatgaagattacattataactttacagatgcataattaacaatagaagtagaatgcactttaagtacgaaaccatggtgttattactaagttcaattattgtgataccaaacttataatttataatggccataagtaaataaaggaaagtatgaaattaagaattttataaaataaaatgattagatctttactttccgtaagtaaatatttaacatctttaattgctttccaatattcttgatcattaagggaaagaatagtatttttacttataccatcaatgcgattgacatcggaggagttgatcggcgaatagatttgagcttgagagatggatggaatataggtcaatcgcaataaggagggagaaaaattataattttattattataaaattataaaattagaaagtaatcatttttttaattaataatatacaaggtggatggtagaggtagatgaaaagttaacagagatgttaattatatggatttaaaataataaaaattaattaggaatattctgttaagttatagtatattatggttaaaccaaaaatatcggtgacttagactttaaaagtaatattaatttattttaaaattaatattaaaatacatcttaataaaaaaaactgttattttttaatagaaaacttttttaaaaaaaagtcccccaataatttatcgtaaactaagaattctattatgtagccacattttatatagaatagataaaaaatttggttagaaaatcaacatttaatcatcattaatattttattattatagatattgtttagacttagatattttagtaaaaataaaagaaatagaaattagaagatatttagggtattatataattccttagtatttataaatctaataaaaaataataaaaaataaaaaaaatgagagaattaaagatctttagaaattttagagtgacatgtgaccgttcaatatatatgtctcttttatatactagtaaaaagttacgtgcgatgcacgtatactaaattttatgctagttttttctacgttattaaaaagtgatacaat

SEQ ID NO: 49740 - DNA, 878 bp, Cannabis sativa
aggactcaagagccttctcaatcattgcttctcttgaattcctaaggttgaaagttaaagagtagtttagtacgcggaaagaaataattgcccaagtgtatgacgactctatcaccataaatggagcaggacttggtattgcagtttgagaaatatttgtacttaaatgttgacacaagtggatcttatacattccatattaaccctagagcattagttgagagaggtgttgtagtggacttccaggaataaacatacacttctggcctattccaaatcatgaagatttcatgtcctcatgcatgcgttgtagctcaacaaggaagtattagcatatacacactaagctcacaatagtacacaatagaatattagaggagtacatatgaaggaacaattatgcaagtttgtgatgaggatgacatcaagaacgtcaaatttggagtgcctgttaagaagaaactggtagggtggctgaagaagcaaatggttggaagaattaagacgaattaaactccttctaatggaaaaaaaaatgtgttgcaatgaaactggagcaagtgtggtggtaaagggtacaacaggaagtcctagaaataccgaggttaaattagcaggttgtatgttagtaattgtattgttatgtgttagtatgttattaattttattgctatgtattgaattagtaggttttcttttacttttttcactactgttatttgtgtaaaaatatcaggtaaaatagtatctaaccgtgtaccgatactggtgcgatggtatccattaaatggttgttttattattttgcaatggaacgataaagggttgatagtccccaatattggtacgatggtacttagttaataattgttttgtgt

SEQ ID NO: 49741 - DNA, 1715 bp, Cannabis sativa
  modified_base (871)..(871): a, c, t, g, unknown or other
gtgagtataatgtgcggtatgagacttgatgtgtgcatgtgagaacaacatgcgttgtggatatatttatggaatgtgaattactgttgattaatattaaaaatattatcttaaaatttaaaaattataaaaatattatgtttgaataaataaaaaaaaaagaacaacttaaaaacaactcaataagtaaaaacaaaaatatagataaattaagggctactcaatcaatactagtgttataccaatatctcttccatatccttgcaaaaaaaaaaaaaatatctcttccatttgcataaagatgaaaggtctaccatacattttagggtatatatacatttatatatattagtattggagaaagatataattctcaactattttttaaataaaaaaattcttgatttttgctgtcaaaatgaaaaaaaacggctaaactttaatactaagataagaaaatcacatgttattatatattgatgcatgtaatagaacctctatataaaaatactctatttaagaataacttttaatttattataaaaaaattaaatcccaatttagaccagttataaataagaataacatctaaattataattagttatacattttttaagtcccgtattaataaaatatacctctatataaaaataattacatattaataaaatatatacatgtattttgtaaatttaattatttacgtagaattaataattttattctaaattataacacttgtataaacattatatttatttaaaaataattctattatgatatagtattaataattgtttattgttactattgttacattaatattttttggtattttgatttttttagtgtaactctatttagttatnacctctcaattagaatataatttatttgatcctaagtgtatttttagataaaaattctactgtagaaagaatcatattagctgagtaggaaattaaatattttaaggattagtttcatatattgtataatattatttaatataatactatatttagtattgacttatattaataaattatgtaaaattatacttgataaaaacatatttatctttatctagaccctaaattcgacttggggtttggacctaagactcagactcaaatctctacctcataccatttctaaatattataaaacgaataattttttatgtattaaatactacaattcatattttattaaaatttatgatcgtaataattaatagaataaattttttttatccaaacatagtattattttttatttcatacaatacgatctttatatttcctaccaaataagttcaaaaaaaatgctaaataacaatatttggtaaaaaaaaaaaaagctattacgtgtggaaataacataaaaaaaatggcaacaaaaaaaatactaatgttaattaaaagagaaatgttaaaatgcaccattaatctagtaccactaatcaaatattgagtcccacattatttaattcaataactattatagaatattattattataattagaagacgtcacctctaaatatgctaggcaccaccaactctactacaaaaatactctataaaggcaactttttttcagaatattaattaaaaggaaagctaaagcctcccatttttttaatcttctatttttcatagctaaacctatacacccgaaaaatttaggggttgattggttcagtatttg

SEQ ID NO: 49742 - DNA, 993 bp, Cannabis sativa
ctctctctctctctctctcaatagcatacactgagtttttagatcttgagttcgattggagatgatcccttttataagactttggacagtgagagtagatgtcataactgtcataacagaaagttagttgtgacagttatgacatgtttgagctagtattttgcaagattcagtgaatgtggacaaatcaattgtgaggccaaacataacattatattatgtgaacaaaggaaaactacataaaacaaatttatatatatttttaataatatagtgtgtttgaactacatttataaattttaaaaggtaatttggagagtgtaacctacaatcatgatataattgaggtcaaacagcatgctttaccctatagagtatagtcattagatatactaccaagcactaccttaaccaccttgagatgacacattgattattaaatttttataattattattaatataataaaaaagattcaatattaaattatgctagtagctaaatgatatcttatattgctaagcaccatgactacccattaataattttcagcttgatatgataatttgtgttctatacacgatttgatgaacaccacaccactacaatttgatatagaaaaatgcttaaagacactagttttgtctagctccttctatggtattattattccaaaaatcacctttatggcatggcacaaagcaagatgacatgtggcggttgatagtgagttgggacggtatatagtaaagcagtaagactgcccaaaaggctttgcgtggaaaaagaaacaatatcgacaatagtactctatgaaaagagtcgcccgcttagagagaataaccagatatcctcaatcagcttagaggatgctcccatggtggcatgtccgaccaacaatattgcaaagatagaaattagattcgccttaactgcccaatccctaaagactaggtcattttagatgcctacaattgtgggattgagagaatc

SEQ ID NO: 49743 - DNA, 1137 bp, Cannabis sativa
tataatattcattattatatttaacttttattattttaacttatttataattgataaatttatattttattattattattaataaattatagggtttttaaatatattatactgtgcttttcgggcttttcgtatgtcgtactttttgggttagtctattcgtgtttacgtgtcatgtcttttgtgcttttcgtgtcgtgtcgtgcttaaggacatatttatcgtgtcgtgtcgtgtcaatttgtagcatcgtgtcgtgtcgtgcccaagtctgtattttttcgtgcctaatcgtgctcgtgtcttcggggctcgtactaatttcgtgttgtgtcaaaaagtctgacttgtatttacagcattatgaacaccttggcagccatgactagtgccttaatataaaaatataattaatttattaataactggtttttataaaattaaggggttagtactattttttttaagaggggttaatatcattttaaatcttgtattttacaaaaattattagctggattctatattttgttaaataaaaaaaatagacataacttaatttttaataatataaccaagggcagaagtatgtagtagcctaggttggccctggctcccaacccaaaactttgatgcatattgttctcattaattttataaaatattattacatggcccctaatcaactataatactcgatgtaaaatattgtcgtgaacattgaaacaaattgtatagaatgtgtatatttataggccatatttatatttatataaatatatatagaaattttgcaatgtatttctttaaaaggcagccctattaatttgatatctgaaataattttttagttaaaatttcttctcatgattatgtacgtcatagttatttaagacatctagaaattttttaaaaaatttaaaaaaacttaacatgtcgaaaataagattcaaacagtgttgtacaacccaactcaagggtggggcaactggggtcttcgccctaagtcccatatttttagaggccaaaaaagaaaggtatacataatatgtagaagtaagggtgcactcttattgggtattacccatgaatgggtaaaattagaaaattttgagtttttatgcttaatttttctat

SEQ ID NO: 49744 - DNA, 1404 bp, Cannabis sativa
tctagtgaagaatggaccaagatccttgccccctacttggcaatggaagttagtgtggaataccaaaatgcacactagattgaagatattgtgctggcagattctaagggatgctctcccaactcgagccaagttgggacagatcatgacgctcccctccgttctctgcccactctgtaatgatgaggaggagacttctatacatctgttttggcaatgttcttttgccaaagcagtttggtatggaagcctttggggcatcagaacggactccttcatattccatgattggatggggtggcttcagtggttcaattgctcaagaaaccttcccaacaacctggaatttggtactttcctcattggggctatatgcatattcgaggtgctatggcacaatcgtaataaggtaattcatggaaccatcagtactccgattaatgaggttatcggcattgtgaggcgtaaattccaggatcactcatatgctagccaaccccttccaaagagtgctgagatatgtataactcctcctacgggatggatagcgtgtcatacggatgtatctattgatgcggatcaatcctacggagcggcagtgttcagggactcgagtaaccgaattcaggccgtcttctcgattcatctcaatgtaacaaatccaacattagcagaggccttgacaatagtgagtgctgctgaatttggggtgcgacgcaccttcactaatgtaatatttctttgtgacaattcgctggtggtatcgtattttaacgctctgcaacgagaggatcatcaactgctgaatggcgctgtagagagattctatgcagctgttcccaatcttgtaaactggaaggtcaaaaagatcagcaggggggtcaatttcttggctcacaactctgctaaatgggctcgataccatggctctgttggggaacttgcagtgagcaacatggatgtaggagtgtttagggatgatactgaatgggtccctgatccgggatagaatttgatattgctgcagttgttctggattcgtcttggtcatggattttggccctgtgttttttttcttatttccctgtttgctgttgttttatctttttcctttgtgttaagttgtcttgagttttccgcttgtttagactttttcactagcctttggttagttgttttgtagttttgtgttttgcttcaatgaatctggtgcaccacccttttcaccaaaaaaaaactataaggttattctatatatatataccaatgttattattcgtaagcttgaaaaagaaaattataattttacaatttagtgaccacataattatgtgtaatcacttgtatatacacgagtatatgataaagatatattttaccttaatatgcgtatgcataatatag

SEQ ID NO: 49745 - DNA, 1306 bp, Cannabis sativa
tgactgaagtgaagactgtaaagttaggacaaaaatcagtggtgtttttttctcacatgtcacaacattataaaaatcgaataaaaccattatattgcttttcatttatatattattttatataaatatatgaactttttttacatgttgtaatattccatatgataaaaccctcatttaacaatttattattgtcgtttaatgttaactaattaaatctaatattttagaaaatatatacacattataaaagtttgcatataatgattattggttattgattgagttaagttaattataaaaccaataaaaattagacacttgtgttgagtttttactcgttcaaaaaatgttcttaaattttaaattttgagtttataaataaaaaatattaaaagagattttaaggtattaaatatcacaaaaaatggtgtattagtacattttaatatattgaatcttacacaaattaatttaataaataataaaaaaattgttaactaattatgatgtaccacatgcataagtatagtatttaacactgtaatatcaatgcctctttataaatctattagatgatcttttgaattatatttttaataataaaaattctatgagtttattataattatttgtatttaatttgtagattttttttactaattaaattcaccctaaacctcaaaagaaatataattctaaattcattataaatagtttttaaattattataattatcaaataagagatattttttttaatttattgaattctagaatttagtttaataatataaattctatttgtactagttgtgtgagatgatgaatcttagttattagcactatttattaattaagttaaagaaaaaaaaaattctatttcattcatcttttattttacactacacatacatactcgaaattaaaaaacatatatcaaatcttaaaataatttgtgaacgataatcttaaattatttagataatgtcttgtcttttgacatgttaagaaagttttctggtatagtgccacaagtttttgttgtttttgttttcttttgagagtgatctgctttgttcagagagatggcttcgagtagtcatccagagagtgagtttgtggatagatatgctcagttacaactggaagaggaagaggaaggtgttctaatagctgttgatcaagaagaagagtgtcaagcttttgatgatagatggtgtctagtgggaaaattccttactggtcgatcaatcgattttgatgcaatgagacatatgatggcatccttatggcaaccgggaaga

SEQ ID NO: 49746 - DNA, 2741 bp, Cannabis sativa
tagcaactgtgagtcaacaaactcagtaagaaaagcataaataataacataacaataacccagattataatcagctgcccatacacccaaccataaccctatccccgagtcccaaacggtactgagtttagaacgttcatacgacaaggtatgactaactggggatccagcctatactcagtactctagtcatactgatgtggtagcagataactcatactatctgatagcctagcatatgtctgttggcatctcggtgcaactctatgtacacctcactgtttccctgatatgctaatctgatggctatagatttgccttttctgagggcaagtaacatgtacgctaaatatgtaatcacatatgcatatcattatactaatcttaccttgtttctgaatttaggtgtaccggccaacctgagtggaacaactgctcggcgaattacaggtccctaaatcgcatcgttcataacacaggtaagtgagacgcttaatcacatccgaggacttaggttttaaaccaaaagttttcctactgaaagttaacatggaaataccctaaactaatagggaattaacaaatcaaagctctaaaactaacacaaatcgaaaatacaaaaagtttgggaacccagctgctaatctaattaactagttttataaggcctggaaaatcatttggcgcatgaatttttttgttgatttcggaggaaaatcataatgcttggaaaccagacgaatggagataacaacactggatctttcaacgcggaacaatgaatgatccactcccaagtaatggaacagcacctgtcgataccatcaacagaggagtgggacgtaccaccgttactcccctcaacttatttcttgaaaccaccgatcatgttggagaaacatcgacaccggcaaccactatgggacaattcccacctatcacacctgttgtggtgtctgagggaatcattcaactgaccacgacctagtatacgactctgcaagaacaaatgcaggctgaggtcaatggaagggtcaggacctggcgtcctcctcgagcaccaaacatgcgttcagataacccctaggtcacaaacactaggcaacgaagtaataatcgctctcgtagagaacacaggactggaccggagggactcgacttgaaccagcctacacaaagggaataagtcgcacaaaacactaaccacgagatgcagcaagaggaggatccctagcgacgcaaccctcgaagtagagcccaaccacttaatgaggtaaatgatgctgaatcttattcttcatcctcacaaagttgttctcctagtgtctataccaggtctggctctgtggagacaccgcaaggagaaagataccaagttcacaggggtgatctttgtgatcacctcaacgcagttttcagggcacggtctcaaatgccccgaaattgcgatgaacctcgtgatccccaatgggcgatcaaggcacaaacaatggtaataacccagcaaatgttgtcaacccacctaacgcaccagctctaactaccgaggtggtaatcccagctaacataactgcgattgcaactgcacctacgacaactcaaaacaacactgtcgtgccagggggttgttgatcagagcatcctgctacgagcattgaaaataattgagcatcagagaaagcccatttagaagctccatgggacttctcctttcactgaagaagtgtgacaggatcaaattcccaagggattcaggttgtctgagtaactaaaatataaaggtactactaatcccatagattacttagaaaaatttaattcaattatagaagtagactaagtacctcaattagcaaaatgtcgcttcctagcggtaaccttggagaataatgctcatgattggttcagccagttgcctgaggcatccatatcaatttgggagacttttgtggatttattcttaacgcacttccaagccatgatgacgtataaactaccttacacaaccctggctaacaccaagcgagaaattggtgagtccttacaggattcatttaagcgttttaatgctgaagtaaccaaggtcgagaaggcccccgagtctttgttggtttgtatgttaattacaggtgtcttgccaagaaccaatttctggaaggagctgcaagccagaagaccagaatcgttggtggacttctttgccatgtgtgagtcgcataagagaatcgagaattctctagctgaactagaaagggtgaaggagaagcacaagtcacccaaactgcgatcacgatctcaaagtccttgaggaaagaatcctagaggtagaagcctgagaagatgcagcccccggaggcagcaagtccaaagcttgccaagtccccttccaagaaggaaacatctccaaagagaaaaggaggatcgcgctttctcaattacactgaactagcagtccctcgtgatcatatttacgcgattgaggaggaaaatggagtcttcaaaaagcctcccccaattagaggaaatcgcgacaaaagagatccgaagaagttctcaagtaccataaggacatcggccataccactctagaatgctggttcatacaggacgaaatcgaagaattgatcagatgaggaaagttcggtaagtacaagaagaacggagaaactcatccccaagcgagtggttcacgaactcctcaacttccaatgggagtttagttaatgtccaccgcattctag

SEQ ID NO: 49747 - DNA, 2103 bp, Cannabis sativa
gaaaaaagggtctagagttgataaaaacaaattgaatgctcaataaaatgcacattaattaagaaatattttgacaactaaattgccaaaaaaggacctaacagctcacatatacatgccaagcccattttttggagtctacattaataatatgtaaaaaagcttaatactatatataaaatacacattgagtaaagataaaatgttgaattcaaatagttaacattgggatagcttaagtggtcatggagggtattagggagtgtggggagattatggaatccaataaaatgtgtaactcttcaatatatatatatatatatatatatatatattgaagatgattatataaaaagatatatatatttatatttatattgagatttgttaacattcatttattttatgtttgcaagttaaattttggtagggaaaaaatatgaaagtaataaaaacaatactctcatatttaatatgaaatgaaaaattatatggaaaaaaaaaaaaaacaaacttgactcaaccaaaatcttcataccaaaacatgataaattgaattttctttttattctccatatttttcttcctcgccaaaaatttgaattattaagatatagagaatttatcactaaactcaaattagagcatctccaacgctcatagatgaggagtagcccaagttacttttgtcagcagcttagctactatgctcagtaatattgcattggaggaattcaaattgaccactccaactgttgtgcagagcaacggtcactgtctaattttttttaattaaagaaaataataaataaaggtcaaatcaatattaaatgtacagtaacagtaacaattttaacacactcaaataatttaattaataataaaaaaataaactattttatcctctataaatactcattattttttactcttcttctacaccatttttacaatttcttacaaaatctattatcacaaattttctttatttttttcttctcacaatttcatatcattttccaaaccacttttctacattatcttatattcataaatggattctcaaaattctccacataccaactctcaaaattcaatcattcaatcttctcaatccaaccaaaattatcaaaattctccacaaaccaacccacaaaattcaaatttgcaatattttccaatcaaccaatccatataccaactctcaaaatccaaattttccattttctcaatttaaccataatcctccatttaacaacccccaaaattctaatttcaaatattctcaattcaacccaaattatccaatctcctctttcccttaccaaaattttagctcttttgagactccccaacatagtccaatcttcacacaaagaaatttactcccacaggtgtttccctcaccttttccaaaccaacctgaaatggtttcaagcattaataagcaaagtattgatttgaatgttgaatcgtcaacacaatccgtctctgaaactcattcaacacatggtgttgaagggttagcaaaagtggttctacatagtgaagagtaaccaagccaaaaaaataaacttaaatggagcaaggaagcaaatatacttctgataagtgcatggcttaatacatctaaggatgttgtcgtgggaactgaccaaacctttgtaaatttttgggtcggatcgcaaattacttcaacacctactacaaagatgatcaacaaagaactggaaagcaatgcaaagaccattggaacaagatgaataaaaaggtgacacgtttcaatgggtgttacaagcgagtacaacaagcacatcacagtggttggtctgatgaccaaattattgagaatgcacatgagatgtacaagtctgaaaataacaatttaaatttttaacttgtagactgttggagattgttagatcaaaagatcttaatcctgacaagcttaggttcaatctcaggagtgttattcatgttttttgatttgttaattaagcgtactttttggtcagagtaataagtacattttggaaacatgatagtataattgggtgggagcgctagacatagatatggaatctatagcttcaatttggacat

SEQ ID NO: 49748 - DNA, 1445 bp, Cannabis sativa
ccatttggaatgcattgattactgcagagatgaatctgggttcattcttgatggaattccttgaacaagaatccaagctgtaagttccaagaaaatgggactttaaaattatcttgttcgtgtttgaatataatgtttaattgtttgcctctgttaatttttgctgcaaacgaccctggtttgcaaattgaattccttttcatttcccataggagattcttgatcaacttgcagatattgatttagttgtgaatttcaagagcacggaaaagcatttggagaataatataggaaaatgtcaaaaatacatgggaaagaacaacaatgccagttataaaaatctaaacttgtaccctcagaatggacaacaagtccacttctactgattctgaaataccgtggaaagagaagttcattaactatgcaaaacaagtatatatacatacaaacaagttacttttatatgaatttggggaccactataaagttgattgtcttatttgttgttttcttttctgtagagcaagtcattggaagaatactacaaaacacagaggaaacttgttgatattcaagtaagtgatgcacttggagaaacttggcaaggtttattggctgctttacatctccagcatacaaatgctgtaaatgtatttatgcttctttttcttcttaatttattattgttaatggtagatttgcatatctaactgctaagttgtccaggtttgagatctttcttattgaacagattgttatataattattggaaattatcgatttggaaagcctatcaacatataagagtttgtgaatccaaccagcaacaagattataataaagtacatgtgtacaaatattattccattatataataatataaatgcacccatatatataaaatgataatgtaaatggatcaattaatacaaatattaatttataggtaatcggcttgaagcttggaccaccattagttcagaaggaggaaactcgtagtgtggcggcaggttctgtttgccaataccaagtcccttcggttcaatctcatcacaggcgaatgctagaataggcaatcttatttaattgtggcatggcatacaatctcaactttactattagttcggaattttaaaattttgccctgttgttttcaaatattttagtcaattttttttttcagtcatgtaagcattatgattatttctttttcttagagatattgcaaaatgggatgtcccagttgagtttaatcacttgaacaactgcaccacagaaaccacaaatatttaaaatgggttactttcttatattcccacactcatatgctaaggttctaatttgtctttattgttgttttttgagatttctgtattgtgcaatatatgaaaattggtttagtcttcttgtatgaaataataatgttgctttaagtattggatttt

SEQ ID NO: 49749 - DNA, 1017 bp, Cannabis sativa
ttcatgcttgtttaaaaaaagaaagcttgagaacaacatcacaactttcactaatgatcaaggtgaagttattgataattttccccaaagttgttgatcactttatgtctcattttcgggctatcgtggggagcagaagtcaggtctccagtaagctggttgctacctgctttgaccatggagctaggcttgatttgaaatagcactttgatcttctcaaacaattcttgaccaaggaaatcaaggctattttttcaagcattctagatgttcaatctccaagagctgatgggtacggatcttgatttttcaagatactatggcctgacattggatttgaattatgctcagctgttaagtacttctttaacacaagtaaaattcctcttgaattccattcaactctaatttctcttattcctaagaataagaaccctactagagctgtagagtttagacttatcgcttgttgctctacgatctataagtttatatctaaactattatgctctagactggttgttatgctccctggtttaatcaatcaaaaccaatgagctttcattcaaggcaggtccatcactcataatgtgatgattctttaagagctcctaaaaaactataagagaaaattagtctccccgagatgcacaatcaaaattgatataagcaaggcatatgacaatgtcagttgggattttttggaggatttgccagctgcctataaccttcctcagaagtttattcaatggattatggtgtatttaagaacaacatcttattcgattgttatgaatggtagagtgcaaggaaaattcaagggagagaaagggttaagacaaggtgacccaatctctcatctgctgtttgttctcattatggagtatctcacgagcagacttcaattggcagcttctaaatcttcttataggttccatcctatgtgtaaggggctgaaaataattaacctgtgttttgttgttgacttaattctatttagcaagggttcaatcctct

SEQ ID NO: 49750 - DNA, 1236 bp, Cannabis sativa
actgctattccaattcaaattcctactaatcatgtaaataactgattttgattttgattttgattttgatttatctatcgattgaagattcaatttaaattttagtcattccaataagtgtaagcaaacacaccattatttgatttttgttgtgattattggaataggcgcatcattggggagtggtggacacaaaatgttggaatagcaggatagaggaacataaatttagtggaacaaaggcttacggatccagcaaacttatgcatgtaagtaaatcattattattaatataaacccctatttatgaatacagtatccataaataataaaaacatttattaccaaactttttgactttcaagtttataaaacattctacttttttattttattttattttttgtttaatgaaaaatcagctcatgtttctgaaagcactagccataaatcttgtacaacttggttgtaactcagttcaatgcattgctgtccatccaggaattgtctcttctaacctggtaaattactttactatgtatctaattaataaattataatattaatcttttttgtaaagaaattataatattgatgtgaacactttttttttttgtttcttatagattctgtttttattgatacaaagttttcgtgctttaatttattaggttccaggcgtccagaaaaaggcattttggatgcttgactcatcagaaggttcgaaaatattgatatggtggataatatataaaaaaaaaattaaaatattaccattaaaatgactaattaaattgatttacattttatttatgtatgtatggtactcaattttagtattttcttgcattaattaaaagtaatttttgaaggggcaaggagtgtgctgtattgtgctacaagtaaggacgttgtggagaacttggataagggttttgcctactactccagcaactgtaaaccaggaaaaatgtctcccatagcagaaaatatggagacttgtttcaagatatgggatgagacattgaaaattttaggattagaccctaattatctatccacctccaaaatttaatgttacaactgttggattaaaatcctcaatatgagcttatattgtattgctatttgaagtttgattcaaataaaatgatcattttaataatggtgggttattaggtattaaagtgtcatgagaattgccatttattcctttttactaagctttaatgtccc

SEQ ID NO: 49751 - DNA, 2268 bp, Cannabis sativa
  modified_base (1373)..(1378): a, c, t, g, unknown or other
cgaagcgagtccctgtcaggactgggagtgtgatcccattctcgccccatttaacattcggaaataaaaagtaatcctcgttcccgtctcatttaacattagagacaaaaagtaatcctcgttctccatttagacggagaaacctggggcaggtccttgcaaggccccatcctcatgggagaaatgtacatccctaggcactagtggtcatatccagtaccacaaagatttcttattaatattatgatgcgtttagttacaagtatatttggaatgataaagaattagattgattaaaaatcagattcacactcaattaaaatcagaataagtaatattcccattaatgtgtttgcattactttggaatcagaataatttattttaagttacaaaaatattctttattaaagttttatttgaatttttttttaaaaaaatttctttaataaaaaaacaattaaaagacggtaaaaattaaattttataattttaaaaggaatgagagtgttaatcctaccaatctactgcgattattaatctcatttctcaatgcgaagacccacaaggtatattgaatattattttttaatgtaattaagtatcacatcttatattcaaataaaaaaatattaaattttatatattttaatttaataattataaaaatcgctaattattcacaaatcctaattattttagatagatgcaacatgtatctacaatataacaatgctttattcaataaaatctagtgtaataagtgaaagatatttaaattatgagcattattattagacactattagtacttagtactacctaaaagtgatgccttataatttattatcaatattctcttaaaattatttcattaaattatattcgactcaatatttaattacacttaaatgatatgattatttagaaagtaaaacatgatctgtatcttttggtatttttaaatttgtcggtgttaatcaagattaggttttaagtaaataattaaaagtaaacccgacatactttagttaatctaaaaatcataatcactcataaaggaaattaaaaagtactttgtttttattcttaatggggaaaagaattggatcattagatcttacctatatggatactagatatgctttttcttcttattattttttaaatatatattattattaataataaaaggttgttgaaaaagaagtgaattacatatggtagatagcagccacgtgggtgcatgcatatataagtagagtagataataaattttataggaaaagaatatatttattttaagagcattgctattaggcaccaacatgtcgcgttgcgattgactagcgatactccctaaaaactattatannnnnntatatgggacccgatacttagttataccaatagcgatattgacacataggaaggtgctaggcaggcaccactggtgccctttagcatttctcttattttaattattttcaataataatataattagtattgctattaggtatcttaaagtatttaatattatattatgtgttacattgtaattaattaacagttatttataatatttattaaattaaattgtgtggaatctaatccgttctaatttttagtgagttaaaaacaaaaattacaccctcatttagaagtaattaatttaatatttataaatgaatttaaagaattaattcatatttttcttgtttaaaaaaatatatcttctcaaaatgaatttttcgctaactaaataatattttttttataaatattatacatatatatctcttatattaaatgtgattatttaatagaaattattagtttaacagattttttttataattattctgttaaagttaacggttaaaattaacactattaaattaatcaattattttttttaaaaaaaataattttaagtatctaaatttaatttatttattaaaatattaattagatatattttcttattaataaataaatttaaaattagattaaattttatatattttaaaaatataattaacttgtattagatttaaatttttatagtattatttaaattaataattaagtaataacaactctaatacaattttaaacaaacatgtattgtatgttactaatacataatatataattatatatcctatcagtcccgacccttgacataagcaggttaggtgtgacagtcagtagtcccgtgatccgtaagggaaaataccgggtaagctgtgcaatcccacaccgcct

SEQ ID NO: 49752 - DNA, 1110 bp, Cannabis sativa
tttatctatagatccaactaaataaccaaattgacatggaaaaactagtttactgttatgacaaatgcagcatgcactctaattatgtaaaactttaaacaagcaaattcactatattatatattcatacataatgatatatacatataaatgacacattaggcagtaatcctgttagcaaatcaatttcaataaaaccttaatcttattcttactggttcgcatctatttggtaaccagttcacaaaatttattctacagactcagacaaccatttgttttctgtacaggaaagtgtatcccgaatcccgcttgggttaaagttacgtaataaaatgtttgcaaataaagtaatttattcacctattccatctgaccactcactgctgcatcctcttcttcagcgtcaaattcttgctctacacctttgacctgtacgtacaatatcataagctaatcagcataatcacaaacacaaggcagccaaagttttccgtagatgaccagcccatggccacacccacaagatgcgatgtagaaattaataaatgtgtgtaacctaatatgcatactcacatacaagaaatggaaagaataactgaagctggtcatgactttcattgacatgcttagacaccctagaatcacataaaccaccaacagaccaaaacatatctctcatctcatctccaatacattaacaaaagttcaaaatgtcattttaagatgacaagtggtaggtccaagccccaccaattatgtatataaatatatgtatatatcaaacacggtacacaaagattaaagaattcgagcagcaaattatgctgaaataaacaataaatgtactaaaagtggtatctgtccaagtttcaaagtgttaatatctcaaaatacacttcggtgaagaaattgagaaaagtacaagctgcttcctttcttgttttgcttgctagattagagtttttgttgtagcttttttaatttttttttttgatttttccttctttgcaaaaattttccgccgcatatatttattatattatatatatacaatactatatcttgataagggaatgataaaaaagtctactgtgtgttgtgaagtcg

SEQ ID NO: 49753 - DNA, 2462 bp, Cannabis sativa
tagttagggtgttacaatatgcctcttaagtattggtgggattctttccaaaccgctatctatttgattaataggttgcctacacctattttgaaacataagtcaccatttcaggttgtttctaacaagaaaccagattacaagttcattaaaacatttggagttgcttgttacccttgtattagaccatatcaaactcacaagtttcaatttcatttagtatgatgtgtcaatcttgggtatagtgactctcacaaaggttacaaatgcttgagttccacaggaaggatatacatttctcgaaatgttgtattcaatgaagacagcttccctttccaaactggttttctgaacaatttctaacccgaaaaatctgtgtgtgttagtgtcccatcatggtcagctttgtttcaatcctctcaaaatcagtccaacactactacactagaccctgtgtgtcaagtccctgaagcagcaacctttgaagcaactctcgactccactgatcctagtcatcaaaatcgacatcaggtattagactcatctgaatttattgtctctcaatctcatgaacaaactcccagtgacagagaacagagtagtagcactcctcaattgataatacaggctctattttacaacctgcaatttatgatactgctagtcaaaatgaacctaaaactccgaccttctcaccctatgatcactcgatcaaaggcaggcatttttaagccgaaagtgtatatcagtcaagctcaatggcagtggaaaaatgatgaactagctactgttgaggaagctttgtgtcatccaggttggaactctgcaatgggagatgaaatgacagctttgaggagaaacaaaacctggtatttagttccaagaaagcaaggtatgaacattattggaaataaatgggtttttcgagaaaagaggaattcagatggtagtttgcaaagactcaaggcacgtttggttgcaaaaggctttaaccaaagacctggaattgactttggggaaacctatagttcagtaatcaaagcttcaaccatgaaaataattctgactattgcagtatctaaaggctgggaaattcgacagctggacatcaataacgcattcttgaatggcactctacgagaaggacgtttatatgttacaacaaccaaggttttgaagatcaaaaccaacctaatgcagtgtgcaaactcaccaagtctttatatggtctgaagcaggccccgagggcctagtatgacagattaaaaactaccttgctcaactggaactttgcaaaatcaagagccgattcatctttgtttttctaaaaagccactggtactgttataatggctctcatttatgtcgatgacataatcatcacaggaaatgatgcttctaaactcacaaagttcattggaaaattgaatgaaatgttttctctcaaggatcttggtcctctacaattttccttggcattgaagtgcacagggatgaaaccggtttgtatatgaatcaggggaagtatgtcaaagaattattaatcaaagctgaaatgcttcatctcaaacctggtaacaccccaatgacaactgggaaacctttgtctaaaactgatggtgaactactctcaaacccaacagagtatagaagcatcataggaggtttgcaatacttgactcacaccagaccagacctatcttttgtcgtgaacaagttgagtcagctcctgcaatctcctacaacagcacactggagtgaagccaagagagtgcttcgatatttgaaaggaacaacctatcatggactccacataaaaccttgagatagattggcaataacaaggtactcggatgccgattgggcgtgttgtctagatgatagaagaagtgttgctgcctactgcgtttatctcggagacacacttgtatcctggtcatctaagaaataggtcgttgtatctcgatcaagtacagaatccgaatacagagctcttgctcaagtggctgctaaaatagcttggatacaatcttttctcaaagagttcgaatttcctctaccttgtactcctgtcacctggtgcgataacatgggggccagtgctttggctgccaaccttgtgtaccatgctcgtacaaaacacatcgaattggatgtgccttttgtaagagataaggtgattaacaaggaaattgaagtcagatacattccctcgagtgaccaaactgctgactgtcttaccaatagtttgacacaacatagatttcatttcttggtggacaaacttggtgtggttgaaacaccctcaagtttgagatgggctgtgaaaaaatgatattttgcctatttgtttagtgtatatgagctgtcataactaattcatgtggtcccattgttgtaacagattattgttagaatattccctttgtaataattattttatgattttgtaaaggttatta

SEQ ID NO: 49754 - DNA, 856 bp, Cannabis sativa
ctgttaggatcataactaactcttatctttgcttgattctgttatgggttctgttatgagtgttgtatataaaccatgtactgtactcttttcattcaataagacagaatgcacttcttcatttctctctgtgtttcaattgcttttacttcttgattgtatctttacagacttgttttcctttttgttaattgtctcaaaaagtttttacaaagttacataagagcttttttataaactttagagtggcttttggttagaggtaataaaatggaatagaatgaaaagaaaataatttttattttattcctttttaattttaatttctcgcaaaatgcttaagtctttcaatatggtatcagagccaaattggccctagttaatagctaatgtatttaccaactttggtgatctttcaaacaccagcaacaatgacgtacaataacctggtctacaacaatccagaaggaaggatgttgatgactccttttttatctactttagtcatggtctttcgataaaattcaatgactacaattatctactctagaagtagcaagtccttgcatcaatccatgaaaatcgtctccagcattacatttagggacataatctaccgtcaaagtttcttcatgatgaatatcgtgctctcaataagatcaactcggtgtatctcaactaggaagctcaaggatcagttcatagtatcatgtttgctctcttcaatgactctaagcttgcttactcaaatggtaggatgtgattttgtaagttagatctgattaactctgcagagtattttactctacaggtgagagctaagattcttgagtttcaaactaagctaccaaatctt

SEQ ID NO: 49755 - DNA, 2177 bp, Cannabis sativa
caggattatataccgaccgtgttcgacaattttagtgccaatgtatctgtggatgggagcattgtcaacttgggattatgggacactgcaggttggaatagcccttcagaccttgaagcctaaaactttctttttcctgtccttgaggggtgttgtggtctcttctctttagggtttgggttttgttcttgatgttctaaacagacttgttgtttctcttttgaattaaaggtcaagaagactatagcaggttgagaccactgagttacagaggtgcagatgtttttgtactggctttctctttgattagcagagcaagctatgagaatgtacttaaaaaggtatcattttttttatttactattcttattgcttctctctctctctctctctttctagttttggctatgctgaaaaaaaagagcaagtcatttctatttctgttaaaagccaaacttattagtctttctctttgcacttttgtttctctcatcttgttagcttttgagaatgtgtcagtttcctagtatgactttatgattctatttgtctattaaattttactaacatggttgtattgtctctgtaatgagattaattctctttttgatttttgtttttttagtggatgcctgaacttcgtcgatttgcacctaatgttccaattgttcttgttggaacaaaactaggtaccagttcatttcttcttctcaacattgtggtctgttagttactaaaaactaaatttggagtgtcattaaattgacattcttttctatgtttcagatcttcgtgatgacaggggttatcttgctgatcatatgggagccaacgccataacatctgctcaggtatttatacatagcatatatatgtgtgtaagtgtgtttgtgattttacctttgaagaatgaatgaagctaactcaatcaaacgtttatgaaatagggggaggagctaaggaagcaaattggtgctgcagcttatattgagtgcagttctaagactcaacaggtattatttatatacagcttacagaagagttcatagattgttatgatgttttctgttgaaacattcataccagtttatcagttgggtattgattcatgttaatgttttcttaaaactgaaaaataatattcttcttcagaatgtcaaagctgtttttgatactgccattaaggttgttcttcaacctcaaagaaggaaggagatggttcggaagaaaaggcatcgacggtctggttgctcgattgcgtgagtacttccattcataagctccttgatatgtttctttgttgcccaaaatgtattgctgtctgggattagatttagttagtatttgctcattatttatttatttatttatttttatagatttaatgacacaaagtattgtatttgctcattattgataagcttatttagaagctaaaatttcaacagaagatattagagagaagtaataaaagtaagtgatgataacattaaaattctaaacaccccatgtgaaattgaactagtgaatgttttgctgtttccttcaatttagtaccctaatcagatagaaataaagtacattgttgttagtaacatggggacttgggttgagagtatattgatgaaatttgaaattaaaaaataacttcataaataaaatggcaaataaagatgcttctctgtttggtaatactgctttctgctttcttgtcttcttggcttgagccaagctctaaattaatataatggggggacctcaattgacctgaaaatagtcttgggagagtacttggaatggcatcagaattgtgctgtcaattccaagcatgtgaataatgtcagtgtgagaagaagtaaaaagagaaaattagatgaaaattaaattatgtgatagaataatacttttctagtcaaccttcatatcagatcaaccttttaatctgagcttttttgataagataaaactttttttactttcaaaattatcattcacctgaagactctatatactactgactgctttttttcaggctcatctggggttatatttgtgttgtagagtgtagtagtatagttcattatgttaaatgttcttgttcttcttctcttaactgcaggagcctagtatgtggaggctgtgaggcttagcacagattaaaaagccagagtagatga

SEQ ID NO: 49756 - DNA, 1001 bp, Cannabis sativa
agtgaagtcgtctataggattccaaggcttcatcaccattggcttacgatcaaaaaacacatacccctgctgcatcactttgtctctctactctagactttggaatctggtgatgaagatgcctttggctagtaatcccactttaacaacctcatatttccacagcctccttacgaacccttccagtatgctaattggaggattggccccaataacttagcaaaccaatgatggttgccaataattgacttcatcttcaatatctgcatacttgatcttaaccttcttcttcgtttcttccttccctgcatcattcttcgattgctcaaacgaagtctccagcttcctcactatgttagatttgagaattgggggagaaatcctcttcccagaattaacatcctaagtagcccgatctgcaatagaaagccagtctgagaaatcttggcgaatctcactctgtctaataatcaatgcctccgattcctccggggagaagactctctcaacatactactctattgagtgatggcactgttccattgaatcttctgcttcttcaacttccagttcttgaatccctagtacagcatccatggatctagtcttgatgactctatccgaggaagatggtccagttttcttgccctttgatttccctttcccggccattttcactctttctgccatagcaccggtgaagcaccgaaagagagagaaggagcgggaaagagagggttacttaagttcttttttatgtttttatttgtgtttagtttaattatggattcgattatgagctaaattagggatttgatggatattgattgagattattctatggattaatgttatttgattgttctttcttcctctattattgtgatttattcatatttgtgcttatttcatgtttaaacttgatcacctattgcatgttttatgatctcaatacaaaatctgaaaagtgagtattgagaatgctctaaatgaatagacat

SEQ ID NO: 49757 - DNA, 1718 bp, Cannabis sativa
gaaatcaaacaggcccaaaccatacattgtaaatcttcaagaaagttacggagcttcttcagatgccgctgcatttgcttaagatcaaacaaagctcatccaatcttgatggtatgtacaattacgaaatttttttagtatgattttataattaaaaattaatatttggtgttattttcatttaattttcattgaattgaacttttaagctatctaatttagttgtcatatacatatttttggtttcttcttattttaaggaatttgtgactccataaatcatgacacatgctcttgttggttctattctcttagtcatgtttgaaaaaattagtgaaagagtagatttttaagagattatagattttatacgggtaaaaaaaattggatggaaaaatgttttaagaaaataattagaaaattacagttagttgactctgttacttgtgatgttgagcatatgcaaataaaaaatagaaatgtgaatgactaactttataaaataaaagaaacttcatactagttagaaaacttaatagatgagataagaatctatattttgggatgcaaggtgaaaagtgaactggaagcaattgtgaaagtcaagaacttttacttattctcgctgtcaaagtagaatccaaaataagagagctactaaataaagtagaaaacaatttaattaaaaaagatgttttcagtttaagaataagattaaaaaatagagcattcagattattatcttgctcctttagtgtaagaatgcgatattcaaggtgtgattttgataagaatcatattgttgggtggttggtttaagttgtatgcaatactaaacttggtgtccttttattcaataaatgattgggattgggaagacgaacatagcttattaatttatttatagtgatgatagaataaaaaattattttgatattataacaagagttgatgcatcttacaagtacgatgaatataagctgataaagacgctatttgatagcattgtcaatttagataaaatggatttcaaatataaatgctagtaaaataaggagtcttatgataacaatgacttttatcaactccaagttaacttgcaactgctttttagccagtatttttttttatcctagatgatgtggaatgaaaattacaacaattgcgattattttaaaagttatttaagtcttgagctcgaaaaagtagaattacaataactactaaaagtgaaattgtaccgtaaaaaatgagtgatgccataagctatttcctatataaatactattcattgatgattgttggagtttattgctaagcaaacctttaatagtatgctcaaaactcatgtaaacattcaaatttagaaatagttagtaggcatattattggaaattgcaataactttgcattggcagtaaaatcacgtagtgaacttttgcgttcagaattaaatacaaaagagtggaatattttacttaagagcaacatatggaagttatcccagcgagaaaataatattattctacctttatgattatttacaactatttgtcgctacatctaaggagatggcaagcgtattgctcgagacttttcaaatattatatatttgagcaaaagaaattagtttagatgtggatgggagaaagtcttttgcaacccaagaaagaaaaaaacataaaagatgttgggaaagagtactttgagcaccttgt

SEQ ID NO: 49758 - DNA, 956 bp, Cannabis sativa
ttaagtagactttctagcattgacattagtctagaaaacttatttggtactgtagcctaagggttttaatacaacacccacactgactaacatatatttcctcttcttatatttcaggatatattttattatcttccaatgttcatgtatggattaaactaatacttactcagctcccactcaacagcatatgtctggtctaattgcatacaagagtatgcataagacctcttacaattgatacttagggaatccttttctagacagttatcttttatagagcagttagaaacaaccccttacataaataaacttcaagtctggaagtcaagtgacctctactagagttagccatttgaaaattgctcagcatcttactaatgtaagctgtttgcaagaaagtaaataaatttccttaagtccattcaatagactgggcatggtttcccatcttagtcttgtattctaaaaactctatgttgctccatgtgaatggctaaaccatagttctctatgctttgagtcttagttccttttttggactatccaatgatagtttaaactaacattggttcgtcatcactagtgtcatccaagtcatactagggtgggttcttagaaatcctcccataatgattcgaatgataatatacctaggaagttcaatgatatagacctctttagttgtatcaatacaatagagattgtagaactatcttatatagtgtaagatgacggaataattttggatataatcgaatagtatctccacttctttgctactttggttttaagattacatctatgtagtcaacatctagaacagttagcagttctagatattcttaaagatatgatcagacttagatgagacgacatttaatatattgtttgctatctcaaagatttatttttagaaggactttgttaactgctagttactaatcataaatcta

SEQ ID NO: 49759 - DNA, 2570 bp, Cannabis sativa
tcaatgcttttcaaagtaacaatctttactatacataatttttcattcactacaaattaaactcaaatcaattaaatgttggtttatacataaatactgagctcgagcacaatttttctcaattttttactataacctatcagaaatctgtgtctagcaccaacataattgaaaaaaaaaaatgtaatatgagtaaattttatttaaacaaaaaatcagtccaagatattatatgtaccatttcaagaaatacaatattttaattgtcatttagttaattcaataatatttacaaaacgtaaagtcccaattaatatttaatcagaaatttgacgcgtcatatagatgtacaaataaggtcttctctataaaaatgtgcaaaagacatgcataagattatcaagttaaattcactcaataatttattttgttctttactcttcaccaaataatcatccatggcctatggacaagttgtcctcaaattcgttgatgtgcaaaaaaagtttgatgaacaatttttttttttttttgaaggaacaaccgagttcattaaattaggaaaagaatataggaatcacaggggggattcttttcccttgaacaacactagcgttatggctagaacacctagcactcttagccagcgaatcagcaagatagtaaactttctaggtaaatgataaaaattacagcaaacaaaagaagctaaaacatccaaaacctgaaaagacgtatgccaactattccattcaagaggacacacccttgattcaaaagcccgaattgcataagacgcatccgagataatagccatattattccaaccttcattttttgcccaattcagtgccgaaagcattgcctagatctcagcatccaaagcagaaacagttatggtgcagcacgaattcgtagcccaccttcccgagattctatgtatcataaccacaacaagcctagtcgaaccttccttccaagaagcatctattaagaaaaagtagtcatagttcttccacgacttacctgagaactccacccggttcaattctaatctctccctctcccttgaaacctctatcattttgatgaactttgcatcaatgcaagcaataatagcgcctggttgatacattttacctatcaatctcatcaggtttcgttgtgtccagacctcctccacttggcaaccaacatacatcagcactctatggctgtcctcccccgtgaaactccgtaggagattcaccaaaaactccttgagattttctcttggaatgcaattagctctgcagttgaacataccatcgtaccacaaatacaaagaaaaaggataatctctgaatagatggagaccatcttcgacatctacctggcaaaagaagtaatccttttctttaacaaaagacagctttattttgataggaagttcatcattgaagcatcgccaaagaaacaacgccacacggggttgaatcttgggatgccaaatatgtttccagattatgttgaaatctttgaaacgatgctgttgatccatctcgtatacttttctcatagaaaaaacacccttctgtgagtgttttgacaccatcctcttaagactgtggtagtcgaggtatattaagaatgcgactccccgtctcatctccgaacatctcaatgactttgtgcctacaccaggagttagcctgagatagatccgcaatggattggacctctgggaagcttggcctgagttgattcacaagcctttgaaactctccataatcaagccagggaatccaaggttgattccaaagatcaatagtcgacccatcagccgcaatcgtatgagcaccttgtttaatgatgtttcttacttcaataattttcttgcattggaacgaaccactctatttttgtttaaccccctagaaactatccttgttacaatattttttgagtaaacattgaacccacggtttatgctccatacaatccaaactcgaagcaaattttgcaagcaaggcacaattggcgtctttgaatcctctgaaacccaagcctcctacacacttcggttggaaaatgttgtcccaagatttcaaagcaagaaatctatcctttttaaggttccccagccaccaaaattttctcataagtccatctaaacttctacaggtgctgactgggatcatgttggttgacattgcataaattggtaatgcaaaagcgacttcttttagtaggacagttctcccactataaggtaaaagtttcattttccatccctccaagtgcctcatcatcttagcttttaatgattcgtactcctcccttcttcaccttttaaacacaaacaggttcccaggtgcttttcttcaccatttgtttccttgaccttcaactccttcagaattgtttgctttcagttaccgttcaaattgttggagaatagaacacttgttttggatttattgcatctttgtccagaccatttctcataaatagagagacaattcaacaatgccttagcttccacttcattggctctcgtaaagaggattgtatcgtcggcaaacaataag

SEQ ID NO: 49760 - DNA, 2588 bp, Cannabis sativa
  modified_base (2458)..(2458): a, c, t, g, unknown or other
aattaccttttcaaggtatttctcctgatgcaaaattataatttcaggttctggtctttcaagttcaataccaagaattctcttgactttcctaagatttttcatgtcaaactcattatttaaatgcacttcatgagtttgttaatttctttgatactctttccaaccaaaattatatcatcaacatataagagcaagtatatgttttcattgaattacatacatggatcaaaattgctcttaacaaatcaaacttagtgatagtctggggttgaacctgatattctattatctaggagtcgcttgagtccatataagaactttttgagtaagaaaacttggtttggattcccattgtcaaacccttcaaactatttcatgtacatttcttcttccaaagtcccacataggaatgttatcttcacattcatttgcttcatttccactctagctgctttggatattatgatttgaattgagatttgtttgactactggggagaagatttatgtgtagtctacaacttccttttgtgtgaattccccttctacaagcttggcattgtacatgtctttctctactccaggaattctctcttttatcttataaaccaatttacaatcaaccaatttttgtccttctggtctgaatataatgatccaagttttattcttcacaagagataccatctcctcatctatagctttcaaccgaagcttgtaatttggaattttggaccattgacaacttctgcataagctaaagggtctaaactataatgttttgtttagctactaatagagcatagggtatgaaatttgtatagcctaatctatatggtgctcttgtctcctttctctgtcccttgcaatctggtagccttctagacctgagctacttctagtctcttgagtagcaattcctgtttcatcatcaggttatgttgactaatctttatcaatatgctccacctcaaactgcatatcccttatcttaggtggagcaccatctctgatgttcatcttcattggcattttggtttctttgaagataacatcttttcttattatgcatgtcttgtaaccatgttcaaggcaccataatttgtatcctttcacacacatgatatccaatgaaccttgactctagttttgtgttgccttatatgcgcataagttgtgcaaccaaacacttttaagtgttcatatgagggtttcttccctgtctatagttcttggggtgttttgaagtttaagactactgagggacatctattgattaaatagcacccctgaacttcttttctaaactcgctcctttcttcatgcacctttccctctctaacagtgttctattcattctctcagcaaactattttgctaaggtgttttcctcattattttaaatctggtattctattgtctaggagtcgcttgagtccatataagaactttttgagtaagcaaacaatgccattactattctaagctttttgaccctctttcaacaagtttcttccaattcttaaaggcttccaaagcttaatctttgggttttaaaaataatacccatacctttatcaatcatgctcataaataattggctccacctagacatgtaaccttgacaggtccctaattaagatctagtgtatgtaagccaaagattctattatagtgtgctttcttttgctaaacttaacgttgcaacacttgccaaacatacattctttataaaaatcatgttttccactaagtttacccttgaaaactgcatgctttaacagttctgttatgcctctttaactaatgtgtcccaatcttttatgcaagaattgagtcatatcatcattgtcctattgcaactgatgttcatgtaataaacttcgagttttatttctcatgagatggtattacaaaaaaagactaagtatcagaagctctaatttctagagagagaaactagagagagaagctctgaccttgtgggtagttttctgaaagtaaaaaatgagctaagggagctctccttttataggtgaaggatgcccacaaaaatagagaaaaaataaaaattagatattttgaccgttgatgattttctaacagtgaaaattagctcttggtagtgatggccatttttcggagcccggcgggtcctactgcaggtaacctggagcttattttcgtaactccattgtaggtaaaatttaatgatgatatcttcaaaattacgattaatgtgtaagacatgacttgatagagaattaaattagtttcgaaatgcaagttgaattgcgtcaaacagatcgatattgtgagttatgaatgttttacttaaggcagttcatgacctagcgcccatgttgacatcacagtgcctaggttgacatatgacgtcaatttggatgctgggtaattgtaaaaatgtccaagggatgtactttaagatgcctaantgatattttgacatcacttaatttgtttctctgttctggaaaagttggtcaccatttctcgaagatgttgttctacggaaatgagaaactcaaaactcttcatttttgagtgagtttcccatgttggaaa

SEQ ID NO: 49761 - DNA, 1195 bp, Cannabis sativa
aatttattatagatcacagaataattcaatgtatctttgatcttatatttgtaatggcattttgtgtgttttctagtgcattgaaagcctaggtggagatttgtaatatttagtccctcaatatacagagtaagttaggaattgttaggaggtccggttagttatgttagttacctaagctacccttagttgagttaggaccaatgcctataaatatgcatctaactcattgaaagcctaggtggagattgtaatatttagtctcccaatatacagaataagttaggaatcgttaggaggtccgattagctatattagttacctaagctaccgttgtgcaagagctgagattaatattcagcagtaaaccagagaaatgaatactgagataagaattcaatgaacaaattaaatgaacatggcattaacaaaacacagacatgaaacaaaggaaattaaagcaatcgattgaagattagaaacaaaagaacttagctgattaattgacaatctttattgatgaattcagttagagaaagatcacagtattggtgattacaatcaaaccttgaagagagaacaatgcattacaaaagatctcacatgagggaagctatttcaagaataggcaatccctttacatctctccattcacacacaaacaaggcttaattctaagtgatcttaatctaagaacaatctaaaaatctcaaccataaaccactgtaagtcttgctatttataggtgtcggtttaggttgttaggaagctaacaaagttagttagataagttgatgatgtggcagtccaaagattcacaatgtgtcttaattataacaatttccaccttaattgagacacattgaggattttggactttaagcttcttcaatgttgagtaagtttaaacagtgtttaaacttgtcaagagtaacacatttggtgagcatatctgctaggttgtgatcagtgttgatctttttaacttgaacttggttgctggagatgatgtctctaatgaagtgcagccttatatctacgtgttttgatctctcatgatgcataggattcttcatgagatggagtgcactttggttgtcacagtgcactgttgtatcttcagcatttaaccccagttcagtagtgaatccctttagccacagagcctctttaatggcttcagttgcagccatat

SEQ ID NO: 49762 - DNA, 1144 bp, Cannabis sativa
  modified_base (451)..(451): a, c, t, g, unknown or other
cttaaaacattaactatacatatatatgtaaaataaatagttttctttttttcacaaaaataaaataataaaaataaataggtatatcttatttaaagcaatacactgtcaaatctcatttataagatttaataactagtgaaatatttttggaaaatattaaagtccccttttccattcccacattttcggttgaagagatgaaataacaatttgctattataatattagttttccaattaatgcaaaatatgagaataatgcacaatacataacttgtaagctaagaaagatgtacacattaatttctagtggcggaaccaatataagtatataacactaagaaagatgtacaatacatgttttaagtttgagatgccaaagggcatcagtggtgcttagcacgtgttaatatctctattagtccaattaagtatcgggtctcatatantttaatataataatttttagggaatatcgctagccaatcgcaacacaacatgttgagaagatgctaaacaccactggtgcctaatagtaatgctctttaatttttacctttactcacttctctaattttttttaccctcgttagaataaaatttttgagtccgccctacatattctaataatattatataatatggtagagagactgatcacattccaaaatcaattcaaaaacatacaataaaaaatacaaatcaattgtatttgttaattagaaattttctatttgtatacaaatttgtatatatatataagcttattttatgcgattattaaaaggaaatagtttctgttgttgaaaacaagtgaagtctcccatttatttcctctctcatttattttcctttggactttaatgagtgattgagcctatacatttttaaccctaaataattgagcatttttaataggtactttatgatgctcaacactacaacgatgtggcgcatatgaagcggttaacaggtttttatattatttattaaatcaaaatgtataagatttaatattgaattacactaataacgatatgttaccttttatagtgcttgacacactttaaagtgacctttaatatttttctaaataataaagactaattcgtagaacgtcactaagaattatatatattaaa

SEQ ID NO: 49763 - DNA, 1207 bp, Cannabis sativa
tggaggccttttgtgctatttctgggcttaaaatcaacatgaacaaaagtcaaatcttggggatttgcacggaagaggaaaaggtggccaggttggcatctcagatagggtgtgaagttggcagttggcccttgacttacttaggtatgcccctggggggctcgcctagaaaatgggctttttgggagccggttctgaataagtgcgctaaaagactagatggctggaaatgctcatttttatctcgtgggggtagattgactctcattcagtcagtcctatcctcccttccaatctactatctttccctatttaaagttccaaaagttgtaactaaagcattggagaagttgatgagggattttctttgggaaggctgcgaatcgtcaggcggggatcatttagtggcttggggtgaagtatgcagatctcgagaggaaggtggcctgggaattgggaacttggagatgaggaacaagggcttgcttatgaaatggttgtggaggttttccctagaaccaaactcgttgtggcacaaggtggtgctgagtcgatatggaaagtctgataacttctgggacacaaaaaaaggaagtcgtctctctcccaaaggcccatggagggatatctctgacttgtatgacgagtaccttgggttagtacaattcaagttaggcaatggagccagcattcggttttgggaagatgtttggcttggtgactcctccctatcgagatccctccctgacctagcagcgctctccaaggatagaaatgtgtcaataaaagatctgattgttgacgagggtcagcctgggggacgagtagaaagctgggatttcaaatttagaaggaacctaatggagcgggagatcccaagtctctcctcgctgttgcaaaaggtggaacatgttagagtactcaatatctcaaatgatagccgattgtggaaaccagactcatcaggaattttctcttgcaagtcagccttctcttggtttacggcgaacccgaatggcagacgagtctattgggtaaggcccttatggaaaagttgtgttccatcaaaagtcaaagtttttgggtggcttgttgctctaggaaaagtgaacgttcatgataagttgcaacaaaggaggccatattcttccatctcacctggatggtgtgtttgctgcaaagctagcggggaagatgtggggcatct

SEQ ID NO: 49764 - DNA, 2902 bp, Cannabis sativa
  modified_base (102)..(111): a, c, t, g, unknown or other
  modified_base (205)..(220): a, c, t, g, unknown or other
  modified_base (2353)..(2355): a, c, t, g, unknown or other
tattttaatatttaatgtgaaaatttttgcttaacaaatattatatattgaacatattttaatattaaaataataataaaaaataataatattacaaataannnnnnnnnntttatatatatatttaaattaattgatataagtttatttaattaatttaatatagatataagtttaatcaacttaaaataaataatattaatannnnnnnnnnnnnnnntatatatatatatattactttttcaggtgtgcctatagcacatttcacttgttagtttattttttaaaaaatatatataatattatatatatatttttattttaactagtgtataagatatatataaatttaaaataaataaatatcacaaaaaaatatatataaagaaaatctaagtatatttaataatatattttttttttattttatcataattttaagatgtttaatttttattattccatatataaataagagaataataaaaaaaatggtacgtgattatttttcaatgttattattataatcatttgtattgtcattcaaaaacctataaaagataaagaataaaaagtaaaaaaattaataataaacaatttaatattttagaattattttataaaattaaactaatcttaattttgaagtttaattggtagattataagtataaattagtccctatatgattaatttgtttaagttaattttatatcacgttttaaatataatggttttattatatacatattgatttttctaattgtaaatgatgaagacagtattttaacttattaatgactcaactaaaatttaattaatcaatgtacttaatcaatgtaatcgtagatttataatattaatattaattatttgaaaattattatataaataaaaaaattgtaaatggatgataaaaaattattatatacatgtacataaagtaatggaaaggagtgcccttggcactccctcaaaaaaaaataaaaataaaaaaattcttataaaaatatatataaatataaaaggatttctttttagttatatataaaaagataaaaatatggggtttttccataaatatgaaaaaatatagtatagtttacttttttataacataaataaataatactatagggttataggttttttttattattttattttattttttttacatttatatgagtttttttatgccatatttttatataaaaaagtagaaatcccatatttgtaaaacaataataagtttcaccgaaaaagtcaccgatgccaaaaaatttactggaaaagttattgtcgccaaaaaagtcaccgtttctaaaaaggtcatcagaagtagatgtctcagatataactaaaaatagaaccggttttataacataatgaataaaaacaaataactcctcaaaccggttataattgaaatatatccgttcagcaacataatgaataaaaataaataatacaaaataactcaaactagttataatcaaaatagaactagttctataacagtgttataatgaataaaaacaaataaaacgaaataactcaaatcggttataactaaaatagaaccggttatataatataatgaatacaaacaagtaacacacaataactcaaactgattacagttaaaaaaaaaaggaaatgagttccaagaacactgaaacataagttaaagacaaaactaaagtagttccacaacaaaatacctcataaacccgattataatttttttttttaaaaaaaatagagatgaattccaaaaaatacttaagcataaatataaaaagaaccagttccataacaaaataagtaaacacaaataataacatacaataactgaaatatagtataaagaaaccagtaatattgatcaactattaaaaatttaagacaaaaaaactggttctataaagcaactaagattaaaacttacacaaaaatatcacttaaataaaataactcaaacaaaaacaatcattcaacatgttctaaccgaccaaataattacacccatactacatctaccctaaaaatattcattcattatgttatataaccggttctattttagttataacaggtttgagttatttcgtgctatttgtttttattcattataacatttttatacaaccggttttattttaattataactggtttgagttattttatgttaattatttttattcattatattatagaaccggttatattttaattataaccggtttgagttattttatgttatatacttttattcattatattatagaaccggttatattttaattataacgggtttgagttgttctgtgttatttatttttattcatnnngttatagaaccggttctatttttgcttatatcttagacatcactactacaaaaagcccctttagaggcggttttttagccctttcagcgtcaggtttggcgaaattcgctccccacgctgatcagggcgacgctaaagtgttgttcctagctaataactgacgccatatatggcgtaggaaccgacgccatatatgagcgtttttcagttttttttaatttatataatttatttaaattatatatttattaatttatatattattttatttaattaaaatttaaattacatatttattttttaaaaggtaaattaaatattatttaaattaattttaaaattggctaaaatatataatttcatttcataaaagtaattaaatattacacaaacattgtaaaattagtctaagtattaataagttaataaatctacctacaagttaatcttaaaaaataacacagggaagaaaaattcttgggcctttcagcctcaatcgtcatcgtgaatcaccgccatcaaccgttctatccactgtccctgtaat

SEQ ID NO: 49765 - DNA, 1887 bp, Cannabis sativa
atcattgaaaccttgtgcacccaacttcttaggaatcaaaactataaaggtttgatttagggtcctgacaaattccccagtctgtaaaaactggataatcgtatcaatcacatcttgacccacaatatcttaatgggccctataaaagtggcatgacataccatctggccctgatgccttgagatgcgtcaaagaccacacaacatcttttatttcctccgggctcagactactcagaagagccaagttgtcctcgatagaaattaaaggatggataaggttagccaagtctaaatattcaagaggcctatttgaagagaaaacacttttgaaacgagagataaaatactcccctattacatgaagaccctctatccaatcaacaccattatcaaatatcgcactgataaaattattttttcgttttataaatgtaaaagcataaaagaacttggtgttcttatctccatctttataccaaagctctcttgatttttctctccagatttcacactgtctagctgagacctcgttaatttccaattgaacatctgcctcaattttttaggaactctactttgtatatcaatgaggaggttatttagcaaaatcaatttctccttgcaataactaaagtgatccttattccatttagctaaggatgcatatggggcggggaattagcagggagtactctctcgtctccatattcgttaaggattttaatccccatccccgcatattctttatcgggaatggagcaaggaatcccctaatataaaataaaatttatattaaaaatttaaatgtattaaaatattaaactacataaaaattaaaatattgcacattatttattcaatatattaattatcctatgaaacacaacttaaaaaattataacaagatactagcatactaaaaaaaatacaaatataaattataaattataaaatattatcaaaaagataactaaatattaaacgggttcccgtcagggcaaagagtgtcatccccgttctcgttgtgtttaacattcacggacaaaaaatgatccccgctcctgccttattagagcatctccaatggaatcaccatttgtaattggcaaaggtacattacacacatcattccaaaaaattagttttttttttctttcatctacataactgtaggggtatgcagaaagtcgcccaattcaaatacaaccgactgatccaatcctaactgatccaatagaattggatatccaatcataattggatcggatgtaaattttgaaaattcaatcggatcagatcggttgtcgaatgggacatccgatccaatggataaccgatcaaaccgatccaactatcatctaattatatttataatttttaaaatacacttataattttatacatttaatatatttttatttaaaaatatatattaattgatttaatatacatttaatacatgagattaatgaaaagatactttaaatttaaaatataaattcttatcttcctaaacgctaataaaattgtcaatgcgtattgaataaattttattttttagcaattttggttagactaatctaatgtttattatgtatgttggattattaagttttaaattatatttttatatttttatttttctttttaatgaaatcaacttaaatggtacctaaaatggattggatggatccaatccaatccaatccaatagaaaacaagtcaatgcatccaatggttggaaccgatccaatccaatatatctattggatcagatcggatttgataactcaatttgattggattggatcggatgacaaaattcaatatccaataaataattggattggatcggttgggtccaaatccattggatgtgatccaa

SEQ ID NO: 49766 - DNA, 2844 bp, Cannabis sativa
ttgaagtttctcaaaccaggctcggggagcctgcttcagtccatacaaagctttgtgaagtttgcagaccaagtgaggagcagattcatcttcaaaaccaggaggttggaccatgtagacttcctcttgtaaatcaccatttaagaaggcattgtccacatccaattgcctcactgtccaatcctgagcaatagccaaagtaagaacaattctgattgttacaggcttcactacaggactgaaggtctctgtaaaatcgaaaccaggttgttggtggaaccctttggccaccaacctagctttgagcttattaacagacccatctgcattctccttaatcctgtacacccatttacatcccactggtgttctccctgcaggtaaaggaaccaaagtgtaggtgccatttctcttcagagccactatttctgtacccatggcattgttccaatgcttgttttgtaaggcttctttcaaggtgagaggctccctacataccatataggtttttggtttagaaataccagatttggctctggttttcataggatgaatattacctgaggaagagttagatgtagttgtgctatcatttggtacaactgattgagattcagagagaatctctggcactgggataggcacaggggattgagactgagacacattctcagttgaaacaccaggagagatttgttgtgcaccagtaacagggtgaacatcaggacactgttctgtgatgatattaggtgtagtgtgaggcacaggatcacaaggtgtaggagtaggatagtttgagatatcaggagaaaggttatgaatgttgggtatgtgaccagatgttagacaagtgtctgacatggagacaggagtgataggaacagagagtttggcatgagggaagctgtgttcatcaaacacaacatctctagagatgtataatctcccagaggtatcaaggcatttatagcctttgtgattcagactatagccaacaaaggtgcatggagtggatctgaattccaatttatgcttgttataaggcctgatattgggaaaacaggtgcaaccaaaggttttgaggcttaagtaatctggttttatgttaaacaagacctctatgggagatttgttgtcaagaagaggagtaggtaatctgttgtgaaggtacacagcagttcgaaaggcctcatcccagaattgaagtggcattgaggcatgagcaagaagtgtcaagccattttccacgatatgtctatgctttctttcagctagaccattttgctcatgagtggtagggcagggatgtctatgaatgactcctaattgattaagaaagggtgtgaaggatctgtactctcctccccaatctgtttgtagggatttgagtttagtgccaagttgaagttcagcttcagctttgaaaatttgaaacatttttaaagcttctgatttactctttaaaaggtaaagccaggtgaatcgagagtacacatccatgaaatggatgtagtacttgtatccatttgtggatggtgtaaaggagggtccccacaggtcagagaccaccagctgcagaggtgctgaatattcagtgttagattgtttgggaaaagggagtttgtggattttccctaaacaacaagcagagcatagagaaggcacatttttattgaagtgaatgtgtttgttacatgattgaaggacagtcttgacaaccctttcagagggatgtccaagtctgttatgccataaactgaattcagaaaataaaggtgcattacatttaacacatgacagacactgaatagaagctgaagataaaccagaatgagactgagtggtgagatgggcactggtttgagttggggaaggagtgctttgacttgactcaggagtgtgcagctggatttgagaagagtcaaaagaatacaggccattctgaaggtgtcccttcagtaaggtaagatgagtcttctcctccttgacaaaacatatgtcagcatgaaattggaaatagacatcattgtctttggcaaactgagacacacttagcaaatttttggttatggcaggcacatgcaagagattattaagtaaaagaggatgagtagagtatttagatgacatcagagaatgaccagttttgagaattgacaaacctgtgccatcaccaacaaacaattggtcagaaccaatgttttcagtgggtgtcatgatgttttgagagtctggggtgcaatggttggtggcaccagagtctggataccaattcgagtcccaacccgagtttgaactggccaaatgtgcctgcatctgtgcttggtgtccagagttgctttgagatgaattggtgatgtaggccttgtcaaatctgtagaagcaatctagagcagtatgcccagttttgaaacatatctgacactgaagtcgattattgttgctattgggaattcttcctcctctattcccagagaaacctcctctctgattgttgaatccaggtggtggtgattgagtgctgagacttgagttgccaaatcgagatggagaacctcgagattgacctgagttgtatggaggaaagtaagatccagaattgtatccattatagaaaggctgagagccactggatctaggataggagctcctgaagtttcgatttgaatttgtgtagtttgcctcaggaaattcaggatctgtgtaagctatattgacattgaaatctacttctttgtcacttttctcaattctggattcagaagcaagaagtaatgcttctatctcagctacagagtaactttcaagccgtgtgttggtggagataacgaaggtatcatactc

SEQ ID NO: 49767 - DNA, 1815 bp, Cannabis sativa
taattattaattaaaaataaaaaactaaaatattaaataaaactaacactacgtgtcttggcacgtaacaatcacctagtatatatatatttatgtatgtgtgtgaaaaaaagaaaaacatataattatatgtataaaagaaggtgtgaaagggttcgtttatatatattaaatatacaaattaatgtacattaataaaaattggtgtgtttttgtggggtttggtttgatgtgatattgtccataaaagtgagaagtgggggtccgagttggtcatctatatgttggcaataattctcaaaacactactcttctctcctaaaggtgccaaagtgcttgccatccatcatatatattttattatatatatgtataaatgaagaacttgattgcattatttttcataatttggcttctaattattaaattttgtaataattagatgcttcagatgttttaagataaacagatcagtattatgatagttggttaaaagctcgaaagtcatacttttgggctacaaaactactcctgtctagagttgtttattggatagcttattttactggtttgtccaagttaaatatggatgctaatattaatagtgataataagattattgatattggtgttcttgtttgtgattctgacgactttccttaggggcatttgcacgacctggcgagctagcctgtatctaaggccgacccaatccagatgcccaaaagaaaaaaaaaaacttatatttttcctaggcccaacaaaacttagttttagactacaaaaatattataagaatttattagtaatttgtaattggtgtaaagagttgtctactattttatatcttaaagaagttgaaacctatgccctatcttttttgatttgaagtggtgcttgctttacttcttttttattttgatgagagtgaagctaaagttgttgtaaattttatgtattatgttgttttttaatagtcatttcttttattaaaaagaattatttaaaatcgtccaatacataaatatatattttaatgggataaaatctagtttccataattaatatatctattaaagaatagttgattacatcatggttcatgatagtaataaattaatgtaagaatcctccattaataaatcaaatttaaatttctaataatgttttttggtgtagttgaagtgtttgtaagatcacccaatgcaaatagacttacatggcaattagtgtttctccaagctcattttttcattacatgcataataagtttaattatatatatacatgcatgcatatacaataagtttcattatatttaggggattgttaattatagcctcctactaaaatcttttattcaattttctattatatttagtcaattttcacgctcaaaattatatgtcggaatatttttttcaatgatatttgctataatcatgataccatcccggtaattttttgaaaaattctaaatagtttacattacaaaaaaagaagtcctgatattctagtcaattatgcatattcaaagaacttcaaacttatttttggcaatataaattatttcaaaattttcaaaaatttacaaaaataatattatgagtataacgaacaaaaataattaaaaaaaatgtttcgatatatattttaagcacaaaaattaattaagagactttaattaaatgttgacaattaatagaattcatcttatatttatcataattttttttttgaactaatatttatcataaattaatatacctatacatatataatatatctttcatggcattgatgcatgatttgcaa

SEQ ID NO: 49768 - DNA, 2147 bp, Cannabis sativa
caacaatcttaatagttcagggaacatttttaacgaccttaaaagtttaaagagcataatttacatgtcaaaatttagggagtaaaaatcataattagccaaaataagatattgagttttggagttttcacactacggaaatatcaacaactttaatttaccactgctagtttgataattaacaatttcttatatacagaaagaaagaaaaaaatggtcacattggaaaggctggaaatagtgaccaataaaaatgcacatgagttttagaggtattgcaagcaagaggcaaatggtcaaaggtagaataatgcttaactccatgtgcttggaattcggagtaatggagaacaaaataacaaaatgataattttcttatttttttggaagaaatgataattttcttattgttgttatttttctagttgtattattttttctttcttttctattattttttttttcttttaatggattctagttgtattcacttggctgttattatgtaatttgtctaatactagttgtatatataaaatataaccagtacattttggcatgttaatggctgtcaaaatcgttaaaatgttaatttctttttcccggaaaatcttatcgagaagtgagaaaatttttgggactttgtaacatttgtttgatgaatattctatctagtaaagctggtatgagttttctcaaacccccacaaactccaccatctgactgcattttgttctttgtaatatataatatatattaacattaaacttaactttatcgaactactaataattatattaaaagtatttatatgaatatacaatatgcttttaagttactctttaatttattaattttcttttcttccaagaaaacatattaaaaaaatattagttttcatgtgactgaaaaataaaaatattaatgccattgcttaattaaccactactacattactagttggaaaatctgcctcctttcatatcaaatatatattgatactacatatatgaatttatatatatatatatatatatttatgtatatcttctcttttccatgtcttttggtgtacaattgaaagaaaaaagttaagaaacaagatctgacatgataccacacccttgatttcattgattcttatacagcatttacatatatagttgtcggattatgatacaaattttgctaagctttaatatttatattaatttacttaaatgaactgttacatgcatgtaattagttttacaccaaccaaaatttaaagacatgaaattggagaattttgaaggcccgctataaatataagtttagttttttttttcaaaggaaacgttcattaatagagaaaattagacctctcagttattacaaaataaacctaaaggcaaataatcaacaggcaagcaatcaaactaattttgggtaaacgtccacttagacacattatgggcaacaaaattactgattctgagaatacaattaataatgcaaccaccaaaacatctagagagatctaagcaagaagaatagtaattctcaatctcccaacacgacgtcacgtggttgagagagttgttcaccaccctagagtcatctctacgatgatgaacttgtgaccattgaactttgcaaactccatggctacacaacaaccagccacctcgccacacaatgcatccgcaaagtccaatatagccgtaaaaacccagaccaccttgccaaaatggtctctagtgaccaccgcaatgcacgaattgtccaaaccaactctgacatcacaatttagcttaagcctgtcctaggaatgagggctccagccatccctctagaccggggtcgcaacaggtaaaagagggagttttaaatctataaaggaacaatggatagtgttaatatatttagtcacattaggctcgcacttattgtggacatttttattcttgacccgccaaatagtatccaccacaactgaagcatagataaagacatcctcaacatttatgcccttagaattgagaccccaaatgaatttgacccaatcctaaacttgaattctcgaatcaaaaataggatagatacctcacgagaaaaatctccaaaagtggacagctaagttacatgaaaggaacagatgctccata

SEQ ID NO: 49769 - DNA, 1237 bp, Cannabis sativa
  modified_base (381)..(382): a, c, t, g, unknown or other
tggttgacagggccactaccttttctaagttggctttcaaatttatagttgttccatacatggtgagtacatatcctgttaaggattttctggtatccaaacaccctgcatagtctgaatccacatagccattgactgttgttgtcatttgtaactttgtttattccaaacaccaatcttttatgaatggtatccttcaaatatatgagaatccatttcagaacttgccaatgctctttgcctgaattcaccaagaatttgctaaatatgctaagtgcatatgcaatgtccggtcttatacaaaccatttgcatgcattgtttgagcatcctgcactagcataaggaactgtgttcatttcttttaggtggcgtttggttnnaggtaatgaaatggaatagaatagcaaagaaacaattttcatttcatttctttgttcggttgcattttaaagtattggaatatcgttctcatagaatgctctttctaccattttggtgaaatgattattccattttaaaatggaagaaagtccattccaatttaacatgagcaaaaatttgataatttttttatcaatattttttatgcatttaaaattttatttcattctattaatatttctattcccattgttattcttataatttcattcccttcaaccacaccacaccttaattctttctctttcttagaagtactcaatttgaagtcttctggtgtaagtacagaacagctttcttcctgtccctttcaatttccactccaatgatgcattcccactaagacacatttgggttccatgtgttaactttaacgacgattacaattttttaagagtaactttgtaacgtcagactaaatgggcaaattataaccttcattttgtttacaagtaattgttatattttcaaattcttaccaatcacttcaaaatttaaaaacagttcccatataccaaaccaatcatatttatttagctacatcttatttatccttttgataatgataggttagcttagtcgttcttatagctgaggactctgtaaataaaacaagaaatttggaaccataaaattaaaaaactatccgtctcaccatagaacttttttcagttaaaatcaaggaaattatgtaatgcttaagaggtactaatatttagttacttgttagtgtaatttagtatatggttgatttatgtggaatccatacttaatttcatcaattaatatcaaaa

SEQ ID NO: 49770 - DNA, 1677 bp, Cannabis sativa
agatgttctgatatgagactaaagcatctcagctttgcagacgatgtattgcaattttggaaaagtgattttaagagtgtttaccatttaatgcaaggccttcagctattctctcttacatctggtctgcaatctaacaagtaaaatctgctttgtattgctctagtatggaggaaagagaaattcagagggtgttagatatgtctggttccactagataaaaagatctattcaaatacctttgggtgcccatattgctaggagacttgctgcttctgattgtagcagtctagccctaaaagtgactgctaaaatcaagatttggggcactagtaacctctcttttgcaagcaggttcgtgcttgtaaactcggttctacttaccatccacatttattggagcaaaatgatgattctaccaaaaaaatcataaaggaaattaaagctatttgtagaagttttttatggacaggtaaggataagatgacaggggctggaagcatttcttgggagaagatttgtaatccaaaaaaagctggtggccttggacttatgaatattgctcgatggaacattgcagtaatggttaaacatgtgtgggcagtggccaataaaaaagataatgtgtgggttaagtgggtgcattgtgtgtacatcaagcaccatgattggtgggactataaagctcccataaacagcagttgttattcgaggaaaatggtggagattaaagataaaattcgacaatctaacagccaactgtgttgtctattactgaatataagattaatatgggatgttgctagtttagcaatgaaaatgacagggttgctttgtgtaatgaggtctaatgcatactaaattcacctaagcatagtttcttgacttggcttcctgtccaaaacaggttgaagactcggggaagacttttcaaatacaagatcatagactcccgtgaatgcatattctccagcaacgacaatgagactgtggagcacctgttcttcaagtgtgaaactgctcttgactgcttgaatcaactgaaagcttggttgaattggcaagtgaatactaattctctgcaaggaatcctaaaatggattaggaaggcaaagaattccaagtttcagtttaagaatgttaaaatggctactgttgcagctcttgtttattcgatttggagggctagaaatgaattgtactggaattcaaataggtagcagattgctgagattgtgcagcaaattaaatgggttgttaaaaatagaataatgtttctaatgctaaaaaaagtaaagcaaaaagataaagattggttccagttactgtaaataatgttgtatagataaaattaaagccttttaaggtgcttttaggttgtaaaaaaataagttttggagcaatgaatacactgatttatcaaaaaaaaaaatattactcatctttcaaaaaaataaaatcaccatattactcagactcctaaagaaaattctggtaaactaatatttttcatccatagtctatatttaactagcaacatctatattattcatgtgtgatatatattctctcagaaacgtgatagattacttatgcattatgcatgaaaacttaatgtgaaattatacttgtatttctacctagcacatataaaattaccaaaatatattattaaat

SEQ ID NO: 49771 - DNA, 1915 bp, Cannabis sativa
  modified_base (1376)..(1382): a, c, t, g, unknown or other
tctttctctttctctttctctccctcactctctctctatctctctctctatatatatatctctctctccttatcttcgtttctagcactctctcaccgcctcttaattttttcaggtggttggtggctcgcggtctgagcgacgatggttggtggtagcttctctacaaacattttatttgtgcattacacaatatatatctgataattttcatgtaatatacattgtgtaatatttgtatatacattgtgtaatatttgtatttatattgtgtaatatttgagatctgggtattaatttgtgtttatttttgtttttaattgtgcttaaatttggtttgtatggtcttagatatgaattttttttgtttgtctatttagtgtgtctgttataaaccgacaagataagtgtaaaaattattttttataattatttgcgagtgttgaaaactgacagaaataatgtgaaatgacgattgataaccaatgcaaatatagacgttttttgcatctatagtatacacgtcgattgggggaaccgaagaaaaaacttttgatgtcaattaaaaactgacgggcaatgtgctttttgtagtagtgttgtctggaagtgtggtcttcgtagaaaccttcatgtatctcgtggataattgtacttatcttttttctgaaaatacacctcaggtacgatacaaacaaacctcttctgtacagtttcctatctaaagtaatgtacatgggagcttgatacttgatttttcttgcagctgctctatttgctgataactctccagtactcaaaaatttatcataaaggagttttggtctctagggaccagccagattgtatatctttagagattctagagaaattgtcgtgattaggagacatagacatccatcttttccctcttagtttgacattcgtctgatatttgattcataaccaactgggagtcgctataaaactcaatgttttcggccctgatttccttgcctcgttgcaaaccacagatcattgcttcatgctctgctttgtttttagacatgaaaaattcagagagcactttggagcttgagaccttgaggaaaattaggataattccagctcaggaccctttttcatttaaggctctctcaacatagacattccagattaccaactctagaactagttcttccggatcatcattgatctcaatgccttccacaataaaattccctaaagcttggtctttaatataaattcttggtccgctagtgaatgtaaaattggctgacctccatggcccactttagcagtctccatgaggattttggcttttttaggacttggcaaagaggatggtttcggaacttattttaccaggatctagnnnnnnnaacatgtatgtttgattataatctatgatctaacactctaaatatgaatttcttaaaacaataaaatacacacataagagattaagaaatccttacattgatggcagcaaaatataatgactccttctattcagatctctagcccttgattcgtgtctgtagcagagcattatcaagatttgaacctggatcttctttctttcaatttgattagacacagtcttcctaactatgctaggtattgctttgacatgagtggacatactctatattcaccataggcttcgaaacattcaatagagaagaaggagaattttgaatttcaagaggctttctttgttttctacttttgtctgacaaagtagtctgaagtcaattattgaatttttaagaaaataagagccatcttattctatttatagggagatactaggtttaggtttagaatttaaacgtaattaaaaaagataaaaaaaaatagctttattaatcatcatggctaatcctatatgggccttatggattttaatttt

SEQ ID NO: 49772 - DNA, 804 bp, Cannabis sativa
taaacataaacaactgctagtttccaaattaactaagcgggctttacacagctgccttttgaaggtgatcctttcacttggattaaaggtagacacaatgtcaatgcaactaaagagcgtttagattggtgtttcaccaatgatctttggaacaccacttttaaaccattgacaacatcacatttggactattattcttcggaccatcaggccatagctgttcatgttcactacctctcatcaagttaggaaaaactaccaaggaaaataagattcagatatgaaaaaatctggttaaatgaaccaaatgctgttgcaataatccgtgagcattggtcaactaatttaaatggtggaattgatcttttcatgtagaatttgcaatcctgtatagaagcattacaacaatggcatgtcacaaagtttggaaatttcaaaacagacatctcaaaaatgcagcagaatgtttctctgctaaataatgcagcaaatagatgtgattcgaacatgactgagttgaaaaaatctgaagctattttggatgaattacttgaacaagaagagaaatattagcatcaaagatcaagggtcgattggcttcaatgtggagatcagaacaccaaatgttttcaagctcacgctacatccaggaagtccaaaagcgtcatcaaatccttagtgaactcacaaggaattactgtcacctctaaagctgatatgccaaatgctacttgttcttactatgacagtttgtttgcttcagaaggtgttgatcctcactccctacaggaaatcctctctgct

SEQ ID NO: 49773 - DNA, 2883 bp, Cannabis sativa
aagttcttatttaggatgttaataaacatacttgtgagtaggtctaagatcctggtaaaataatttccaataccccggtcagaaagaaattttgtacttgtacaacgacaaccctgccgaccacgtcccaacatttttggtagaaacaggtgtcatgccatccggacccggagccttgtcagggtgcatttgaaaaagagctttcctaatttcatctgcttcaacaggtttaagcaaatcctcaatttgagcagctgagatacaaggagaaatacagtcagaaatatgagaccaatcagagccgctgaaagagaacaagccttgaaaataacccatcattaactcagtcagacccgtgtcccaatcatgccaaatcccattcgaatctttgagtttgacaatcaaattgttgcgacgatgggaagaagcggacttatggaaaaacttactattgttgtctcctgcttgtagccatataattgcttggaacgctgcctccaaaaaatctctctttgggtaaacacctcaaacatattctttttttattctttaaattttttaacggaaaaagcatctcgaccatacttcattttattaatctcagacttacacctttaattctctctttaaaattaccagtataatccttaccccactcactcagcacttccccacaatacaaaattttctcttgtatcccttgccaatacaaagatcccagctatcttaaacaatttggtaacaaagaggttcccttaaccaagaattttcaaatctaaatttcttttcattaagatagccacctcatttttaggcactaaaaatataggataattgttagaactagaaagatcaagattcaataacttacaatttggaaataagtcaagccaagcatccgaaacaagcgcccgatcaagccgaacttctatccattcgaaagtccctctaccccgttcccacgtaaaaggatacctaaccaactccaagtcttgcaaatggcagtcatcaacagcctgttggaatcctgacagaagccaatcgagataaggattaccaccccgtttgtcatcatgactaagaacattgttgaggtcgcctataatacaccagggtaacgcatattcagaggacaaatctctaagtaaatcccaagttttatgtctgagatgctgataaggttcaccatacatccccgtcaactgccatgagggagtatcagaaacagtgattttcaaatcaatatgcgagtttgaaaatcccattaaactagcttcatctccaaatctccatagaaaagctaaaccaccactatgaccttgctcatcaatcacaaataagtcttcaaagcccaacgaaatacgaactctctccatgtaatctcttttactaagagtctcacataaaaatataaaattgggtctcttgtggattactaaatccttaaggaattgtaaaggccacgggttcccaagcccatggcaattccaaataagtaggctcataattcttggtgggcctagaaaccagagcccacttgaaaatcattttttgtcccctaaataatatcattatttatattatttataccatcattcatttcctcttccatactaaccgacccatcagacaggcccaattgagtccttctacattttgtgtcaattaccaccagcatattgcttgtgacagctggcaagtgagaatccctattattatgggatttattaatgtccacgtgagctggcatgtgagaacccatattaatatgggatttattaatacccacatgaggcagcatgtgagaatccctattattgtgggatttattgaccgaaataattgtgtcaactcccacgttactcgccccaaccaccacgacccgatcgtctcccccaccattcgtctccatggctgacggcatcaacccctggtagcaatcgtcctcaacccttgggatccccgccgtgttcttacccgagttgtcctcaacccctggtagcagtagttcctcggcggcagcaataaatttcgagcagctgcgcagccacttggctccgatcctatggttacgccgacgtggttgtgctctcatgaacgatccatatggcttcactatttctgcaggaggcgtagtgaacaaagaaggacaatgtccctcctcatgacccaatatcccatatatgaagcaaaacaatgggacatgttcatatttgaagttgcaccaaaactcctctatgtcatccttcttaactctccttcttcttttcaaaggcttagtgacatagagtgtgaccctcacacgcatataagatctctacattcccatgaaattcttaggatcggacaacacaaattttcctatgtaattacccatattctttaccattgccgcagacatgaatcccggatggaggtcatgtaattgaactcaaatatccacattatatagacaagcagccaacgaatcatctccctgttgtagtcgttggaacaccaataaagagtcattaaacgtccaaggacttttttcaacaacccttcgtatatcgacttcatgataaaattggaacaaataccgattatcacctagttctttgataaacagtctgcggcctagctgccacaacgagccatcaggtgttgcatggtgttgaaattatttcttcgttgggttaagaacccccccaccaaacaccagcgatcgtcaatagttggtgccggttaaatagtctctaagaaacctaaaacatcttcttccacatcctccaaagcaatattaactccttgctttgacagatcaagagttcccatactactagaatccataaaagaaccaggcagaaacaaaacacggacaaaatccttaaacaatatgattaa

SEQ ID NO: 49774 - DNA, 1438 bp, Cannabis sativa
  modified_base (1411)..(1412): a, c, t, g, unknown or other
ttaggatgttaaataacacacatggtagtaaatctagatcctggtaaaacataatccaaagaaaaaaccttacaacagtttcattttgtgccataacctggcaatagggaaaccctacacggttcccttctatcactgacgcccgtacatatgttcgatacattgtcaggaagaaaccttacaatggtttcattttgtgccataacctggcaatgaggaaaccctacacggttctattctgtcactgatgcccgtatctacgcccgatacgttgccacgaagaaaccctacaatggtttcattatgccactaatacacgtacctataccccgtacgtcaccaggaatatcgcatcacctaatcaagtgaacccgtacattatgtccatagtatcatcacattatcattgcctaattagataatcgataatttaggacctagcaaacaacagttttgattcatagtcatgactttataacagttgccccacaggtacaacgtgaatgtcagtatccatatatcacattacttactcaagcaagtttatgccatagcatgtcattcatcatatatatacatatgtttcattgcctaatcaggcaagctcagcctatgccatagcttggcactatatcacctaatcatatcacttaattaggtaaatttgtatgtcacattcatattattgtagtctaattagacagccgatgatcacaaaacctatcatgccatgtggtacattatacttttcttacttcaagttctggttcaggtatgtttgtcgacctgcttggagaacaatcgatgatcccaggccctatgtcataacaatgataaatcactaagtgtttttctcaaaacactacttaacagttgtaaaggacaacctaggatttcctaccaaaccttgtagttcaaatacactaaaatgaaagtgatattttggctctaaaacatacaccatatggtagaactcatttcaagcttcgaaacggtatatagaacatccaaaacagacacctgagtaaaaagttatggaaaaaatacgattctcgagatctcgaggatgcctgaaacagtgaacaggttgaccggttggtcaggggcaaaaaatataattttccaagtgtttgcactgagcgaaacgcaactagaacctatccaaacgaccccaaatttcatagggtacaaatataccatacatactaccacactcacgtaatagaaactaaaatcatgtccttaattggcaaacgccactagtgtttggacttaggctataaaaagttccaatctcaatttctaacctaaaatcacctcaattttagcaaggaaacattggaactcgtcccatgactacccgagaacaatcctataggtcagaatctccataactattctaattcatgannggaaatttgataatccatgctaaaaa

SEQ ID NO: 49775 - DNA, 2065 bp, Cannabis sativa
aggatgttaatgaaacatacatggtagtaaatctagatcctattgaaatgggttttatttagggcacaaaacccaacagattgtgggtagaatttttagggagtgaactgattttgatagtggggatttagtccaaaataaaaaataaaaactgaaaatgaaaaataaaaataaaaagaaaaagaagtgtagaaaatatagagaaaagagtttgagtgtgataataaacaatgacatcagcatttgcatgcttatgtacgaccaaaatatattttggtaattaaatcgtttttaaaagtataaatgtatttataaaaggtataaaagtttatagggacacaattttgtcttgtgatgtactttcatggaatgtatttcgtggtacattagatgggtctcagggtacattaaatgggtctcagttactattttttaaccctaattacccctagatcaaccccagccctcagatcaaataactcccatctaacagctgtcgtacatcacggaatacattccgtgaaagtacatcacaacaaaatcgtgtcccaaagtttatattatcttataaatgtatttatgtaaataaagtatttttgtattttatatgtaaaaattttaaaaggcaaaagaaatttgtgtgtgtattttgtcactcattattactgtgtgtaatttatgagtataatttaagatttatattgtactcgtaagtcatgatgttataataaaattttagtaattaaataaagagatttttataaaaatattagattttatgtaaaaatttataatttactgtcacacaatttttttaagaaaatattatttttcataaaacaagtgtaaaataacaaaatagaacaattaaaacaatagtggaacaactaaaaaataattgtggaacaacattgaaaacataacacagtacatagtatttttgaaaaaaattctaccctacaataaaaaagaaaaaaaattaaaaatttaaatatgtggtgtaaaaatcccttaaataaatacgaaaagtatgattgaaatttatcctcctatagaggagtgctaccgtcaacctcctgttacaaccttttagtcaacctccacgctcgaaaacacatgttggtatattttttttttaaatttttttcacgacggtgttcgttatgcttacaacatcatccctgtaaaattttgaaaaatttcaaatagtttacagtgcccaaaatacgtttgaagttttttgaacacgagtggtaaactggaatattaggaactctatttttggtactggaaactattcagaatttttcaaaaatttacagggatgatactgtaacgataacgaataccactatgaaaaaaaatattttgttatgtgattaaaatactgatggactctgctgtatttactatctctgcaggttgcaacttgtttttgacccccccaactcgactgaactggtgcaaggttgtttggtcaaggctaaacattcccaaacataatgttatagcttggttggccatgcttaatagactaaaaacacaagacagggcgatttggaatgcaggtgagagatgtttgctgcctgtgtgagttgcagcccgaatcctgccaccatttgttctttgattgcaaagttgcaggcctttgtttgatggaagtaaagaagttgctgaattggaatgctcaagcttgtaatcttcaacagctgcttagatggattgatagagctaaaatgtcaaagtttagaaaaggggtgcttgctgcttctaccattggactggtttacaacctttggaaggcccgaaatgagcttatatggcaaaaaagaagagtcaattcggaaagaataattgaagaaactaagtggtaggggtgtacataaaactgctcaaatcgctcaaaccgcccgcaccgcaaaaaaaatgcagtttgaaattcttcgcggtgcggttgcggtttgaatttttcccaaaccgcgaggtgcggtgcggtttgcggttttgaattattaaaccgtgattcaaatcgcaccgcaccgcatgttttaaaatttcaattttt

SEQ ID NO: 49776 - DNA, 1655 bp, Cannabis sativa
cctgaaaaattgaatccaacaaatgatggtgattggaatgagcctcttggtcaggctgatagattggatccgaatgaagccattacaaggcaaggttcacgaaagagtaacccagaaactaaaaagagaagacggtcttataaacaacattctaagatgacagacctcactgaaccaaatgaagagctgttacaacctgaaaaaatgaatccaacaagtgaaggcgattggactgagccttttgatgcgactgaagccattacaaggcgaaattcacagaagagcaaaccagaaactaaagagagaaaacaaactcgtaaacgacattctaagtcgaaagacctccctaaaccaaatgaagaaggggtatgtcctctgttacggcctgaaaagtcgaatctaagaaatgatggtgatcggaccgagtttgttggtcagggtaatacagttgatgtacatgaagccattactagacaaggttcgggaaagaagagtaaatcagttgctaagaagagaaaacgatcttctgaaacgagccctaagatgacagagcttgctgaaccaaatgaagagagggagtgtattccatcacagacagaaaaattgaattcatcaagtgatggtattacgccacaaagtaccgaatcgagtttgaagcagaaaagtggaaaaagtactctggattcatgcaaacatcaacattccgatttatcttctgataagtcgtcgccagcaggaattgctactgatgtttcggttcacaattcatgcctggattcaacagaaataatggcagttgacaccgttggtggaaatgataaaatcgcctcagagaaaaataaaggcactaaacagtacaaaagacgggcaaaaaaagctgtatcggttccttctcaacaaaacggaatgaaagagttaactgaaacgacagtttgttctgatcagaatgaagtcactgcagatttcgatcttccacttattagcttcctaaaaaataaaccaaagaagagaaaactcgaagccaacggttgtgatagtaaccattcacaccctccattgataactcagaaggaagcagatacatccaatgctggaagtctaatgcctattacgaacgatgatagcgctttcaacaagtttggatcgtgcaatttgacttccgattttgcaatggacaactctgcagcttttggtagtgaaattgaggctggtacaccttatctcgatttggaaatggagagcatcaatgtggaaagcagtgatgatgctaacaacacttatgttatcaccgagcagcaaactcgtgaaagtgaatccaaaattcgtgcaacagttacatccagcgaacgaaagcctagcaaagaagatcttggtaccggacatgaagttgctcccgaggaaccaaagaaggaaaaaggcgaaaatggtacgattttagcttatgttcgtcgaaatagattgaaaataaaaatttagtttctcaattgacctagtaaagtagtagttttcgggtagaaaaatgtgttcgatttcgattctaaagagtgccaaatgatgctgaacgtctgaagttttttaagtgatcacagtcgtttagttgaaggaaatattttgaattggtaatggtgagttttctctttataatatattctttt

SEQ ID NO: 49777 - DNA, 1386 bp, Cannabis sativa
  modified_base (411)..(424): a, c, t, g, unknown or other
atagttatccaggatggaaatacataatatattgtatttcaaaaaaaaaaaaaaatcatgtattcgattaagcgaaaggagtttgggataactgtaccataagaaataagtattccaccaaaacatgtgaccgtggtgaaaaaggccattcaaattaccatttcataacaaagtcagcattacttaaacattcatttcaaaatactcagtcacctctagtttatgcatttgatcctaattaagattcaaggtacctgatactataacgatttaataacttaggtaggtaatgtaatggatattacacaaattctatgaattctcattacacttttacttctcataaataaggattacaatgacaactaaataataaaatgataattttatcttttctctctctctctctcnnnnnnnnnnnnnntctctctctctctctcttactttggaaatataaataaagcaaggatatttttgtcaattcaattctaattacaatgttcattacaaaataaaccaaatatggtaatactattcctattactattaccattacattatattactattcctattaccattacaattacattccggtaaaccaaacatcaccctatgtcatttgtaacttcgttttcaatataaatatatattagattttttttaggtgagagcatcacttttgctcacatgtaatgtaagagtatttttaaaatttttaatttttaatctaatggtaatggtttgttgtagtttatttagttaacatgaggtagcggatatagaattattattactttatttttaactcaactaatttctagtcatgatctgatttttttctaaaataatacacaatattataattatttatagtcaactttaatgagatgatgatgaacgaggcgtattaggactggtgcagcttggttcatgcaaagatggtgatgaggttgtggttcaggtgaagagaagttgaggatgatgattagatgaaagtgaagtgggcggaggattttctaggttggttgatttctaggtttggttatggtggggaaaaaagagaggagaaatgtgattgggggtctcataatgaggtttttggcgaatggaggtggagaagggtagatggtggtcagggtggtcgtagttcaggcgaggggaagaaatagacgaggtggctatggtggttaggatggaaaaggaagaagacaagaaaatagggtttctaaggaaaggaagtttggggtattcgagattatttgggttaggatattatttgagaaattatgttttggttttggttttttttcttcttgaaaattcctttacagttcgcaaagaatcccaaattatgcctgttgtagcaataagtctgcaaaaatt

SEQ ID NO: 49778 - DNA, 3319 bp, Cannabis sativa
ataggtgagatactccatcagtatctgcgccacattaattattttaacaattaaatcaggaaattgaattgggtaatgaatatagaaatctgaccatatatagaatattacgtaattgattttgtccagattcaatgaatataaaatattcatttatcaaaaaaatcaactatttatttatttccttaaatagaaatatattttctaaaataaaatattcttataaggaactcgagcaatcttacagtacgatgataagatcaaaacaactggtttagatcatattctctggttcgctcctcaactactggaggacccatacataaatcagtgactcaaatggctaaggatgctgccctaaagaaagctaggagtataatactgggattaaccactaagcggcagaaaatcttaatatctggtaattgctgttttttaatctcattttagattgtaaaaatagattcataatgttttagttttcttttctaactcttgttttatttaatggaatactacatcaagaggaaggggcaacttacactcacagaactgtaagtaatgaagaagtttctttactaaatcagaaatcgataggttcaaataagagtgacagtactaatatttccttcatatagtggtaatggaggagagaaaacaaaaagttcggaactatcgatgaggaaaataattgaagcggaggctaactctggatcaaaagtgaagactaaaaattccaaggcataaagactcattggcaaatgagataggattactaagtatttcaataaatgtgttggttgtttcaaagtaaaatagatgactattattgggtggatttaaaatgttatgttgtgtgtttattttcaaaaacacaagtattggatgttttcttcttttaagtatgtgttaaataaagtggaaacaagaatttaagtattatttctcttgtcatgatttttaaaacttaaattacttattttatttctcaaatatcaaaacttgctctgtatgtgcttagagtgattgatacaatttttagttttgaagttaaatgacagaggaatgctacatttactatagtttataattgatttttctcgaacagtttataatcccacatataaatatttttacttcaaatgaatgtggtatcactcaaagataaactaaattatctataactgatatagattgtcattatcaatattttattcccaaaaaaattggtattttctcaataactaactaagttttgtttaccctactttcatgaggcaataataagagagaaaatgatagaagaggatattctaataattaaatacatgtaaatttagttatctcaaaaattaatttattttattttttttctcaaatcataaagagggattgtatgtttttttatttttaagtagtaatatatgtagaagattaaattctagaataatgtaaataattgaatgtggagatactgtaaggcattaaaatcataaaattaaagtaagattatgaaatgtatctagatggtattaagagcattcctatttttttcaaatcaaaaatttaatggcagaaattaacttgaatagtagattagtagggattcttttcttcaatatgataaattacaaaagcatatctataaatagaaaagtgtaaaacaaattgcacatttttttgtttctacaagaaaacagttttaaagtttgaagtattaagacttttttctaattttgcttcatatttcaaatactttgcagaaataaaggaatctctcaagaaaggaagagtggaacttttggagttttatctaaagaggtactagttttggtattttattgtccctttcaattatcaatttatactttcatctttaaaatctaataaaaaaaaaataattaaaaattttacaacaaatttattttttaatcaaaaatcttagttaggagcaatcacaaattttaataaccatctaattttaaaaaatcttaatattagtttttgcttttgaatgataagtaggtaatggctatagtcagttggaatgtaagaggtcttaatggagatgtagctttacgactaacaaaattattattgaaatatcattaaacagatgtcatcttctttatggagactaaattagcagaaggaaaactggattctatgaaaaaaatgtcttggttttgaagagggatatgaagtgccacgaaatggtctaagcgggggattaatgttactatacaaagagaacgttgaaatctcaaatataagatcctcttccaatcatattagttgttttatacgactggaaagtcaagtgttggcatggcatttttgtagattctatggggatcttaaggtctctaatagacataatacatggcaattgctcgaacgcctcaaaatagtggctgctggaccatggatggtagttggggatttcaataaaatcttaactaatcaagataaggaaggggggaacatgagaagacattcacaaatggaagcttttcaaaatacattagaatcgtgtgctctacatcttttaccttttatgggtgagcgttttacttgggctaaaaattcaaatggaagtctaattcaagaaagattagattgggtaatggtcaatgaaaagcatggactgagaggttttccataaacactttacccatttggattattatcattcagatcatagagctttaatagtaaatatgcaagaaagaacagataattccttaaagattatgaggactaaggaatctgaatgctaaagcatcatcaaggacagttggtcttcctcctcgacatcatgtataagtgctattaccagtaacattcaaagatgttccaccaatctctcttcatggagtcatgtcaaatttggttctttaactgagaaaattaaggagactcataaccacattgcaaagttgcataatcttcaagaattttcaacatattcaaaggaattgggagaattggaagaaaaattgaatgatttgctatttaaagaagaagtgtattggaagcaaaggtctagaatacaatgtctacaagaaggagaccagaacactaaatttttctaccaaaaggcaaaaaaaaaaaaacaaatattatcaaaggtatgatttttcaagtaataattctttgatattattagcttttataacttctaaagtaattgtagaaaagaaatcaaattatacaaaaaactatactattgaggtgtaactcaaatatctataatatagaataaaattcttaaataattgcggttaaaataattttctatgacatgttataggtattc

SEQ ID NO: 49779 - DNA, 663 bp, Cannabis sativa
gcaaccaccatcctccacctcgaaaatctcagttacgtttctctccttttcttcatgtcggcatcaatggcggatcgatgaacattagtgatgaatgtgagctaccaccctcagccttcatgtgcggctcaaatagacctccttcaccctctcccttgctcgcatcgatctcagacccgaggcaccacatatcctcttatttatttcccagtagcccaaacaaaccgtgtcaaatctttatgttttgccagagtccatggcagatcactttttcttgctcctttctgcacgttttgtctgcgtccaggactaatccttcattgttgtttcctttttcttttgctcttttttagctagaaatggcaggaatctagagattgaaaaaataaaagaaaaaaattgattatttgtttttataacttatttacaaatattattcataaaaataataataattttttatttgtagtaattttttttatttttaaatttaattaataaattttttaaaatggcatagaaatattctcagttatatttaacaaaatagtagtaataggagtaggtaaaactaagctctgggtatttaatccattgcaaaaaaaaaaaaagatgtggtatttaagtgtaaaaaattagaaacatttggtatttatgccgcaa

SEQ ID NO: 49780 - DNA, 1661 bp, Cannabis sativa
  modified_base (1619)..(1631): a, c, t, g, unknown or other
taccgccaaaaatacgacttaggtatttatcagctactctgcataaaacttaggtatttatgccgcaaattactcttaaagatatacggtaagtcttatcgtagtgtaatgtctcgctgagaatgtagttgagttaaccttgatgacgagcaagagctcgtcatatgtcttcccaaggttgataatgcttttactttaattctgacaactacagtttctggcgacgagatgatctttcgtgcatgctcttacggcgaggtggacgcctcgctatctctcactttgattcacccatctgtttatactaagtttgtataccgtacattataagctaagtatctccattttcattatatttcctccacgtaacgaggttagtgcctcgtcttgtacacttgaagttacatggtttctcatcggggcacaaggcaacaattagtacatttttatcttgcataagactgttcaatcaaccgagttgtaaacatactctgctaattgcgcttttaacgagttattccatgtcaagtgtaattatgattacgtgtttgaattttttattctttccagttcaacacgtgtcttcctctgatgtgctcaccgaatttcgggtataacaacaacaacaaactaactataacaaaaggagctatactcaagctagcaagctgaaagaatcatctatactaactttctcttttttaaagagagaaagtctaaaacaaatttctcttttgattttatataaaagaaaatttacagtataaacttgaacattctacaaactattgtttctaacttcccaaatattgtagaccaaagtagtaatgatagccacccaaacttttctttttctcttaggttggttgcatcttttaacccataaggtcacaatgatggacattcataccagcccaatgaaagatatccaattgaacttgtttgctgtatttgtaattaaagaacaagtgactatgagtctctaaatcaaaatcacaaaataagcaatttacctcagcaatgtatccaaattggtgcaagcgatctcttgtttaaagtctattccaacaagcaagccaggtaataaatttgtgttttagattacttggtctactccaaatgaaggaaaaccatttcctctcatttttatctctcggccacagtctagagcaagtctttgcaatgctgaaattcgaatcagcaaactctatctctttcatccatcttgctcctattgaaattcttaatcttcacaatttttctccaataccaactagatgtatttagagcttcatagctccactaattttgtcctttaatatacactgcttgaattcatctcacccatagactgtcttttttattaccaatacccaacttttatcttcttttaggaatgtttctttatgttctgtcaaatggtccgctaatttggctgctcatcttatggcttatgcattttgtttgtatgctgatcgtatttttttggagtttaatctctctttttgatattgctgatattattgaggccgaactatgaaatttaccgttaaaaaaataggagctctattggcaccccataaaattattaatgccccattattaaaaaaatataaacnnnnnnnnnnnnnaaaaattactcttaatatttttaatttttt

SEQ ID NO: 49781 - DNA, 2152 bp, Cannabis sativa
ccgtttaccatacaccgacttctctacatcattaaaaaattatatctttaaaaaattttatttataataaaatataaataacagaaaccaaaataaatgaataaatatatatatatttgaagtgagaaataaataaatgattaaaatatgtttagctcacatttataggttaaggaaatgaggtgagctattatacatatacatttagctcatctcttggagcacaaaaatataacattttagctatatatttagctttagagctattgtaagtactctaggtttgaattgataagtacaaggtaactcttgtcgtagtaatgatcaaagcgcgatatgccattatcaccagagccgtggacactagactgacaactactgtaacttaaggcatgtcattagagctactgttcctccccagcccgggactcaaacacgaaccccagccccagaccatagcctcgaacttggaccctagacccgaactgtggtttggatgtggccctagactcggaccttgacccccacctcatacacgacccctaaccctggacccagaccccggtcccaaacccaggttccagacccagaatcgaccttagtcccagccccagacttaggactcgaacttgatcaggactcgaattctagccccgaaccctagatcggacctgaacctggacttggccccaaatctaggacctagatctcgactccaaatccgtgactcagatcttggcccagacttagacctagcctaggacctggtctccggacctcggatcttgcctcggctatagatcctgactcagatccgacttaaataaaaatgaaaatgaaatttagagaacacaattttattttttggaaaaacaaaataaaaaacaaatttctcttttcacttttgtgatttaaaagttaaaaataaaaatttttacaaaacgccaccttagttttaagataatttgtcattttagaaatttgacaaaatggtgttaaacttataaaagagaaaattagactctataccctttttatattgtactcttttatttttaccctcttttttaaagtctattatttttacctctttttttaaatattgtaccaattttacccctttcacttcaagatactctccttgtgactcacttataccagggcattttgggtacaatacatataaaaagaggtatgtttcaattaaaaaaaaattaaaggtaagtttagttaattgattaataaaagaggcatttttcaacttacctcaacttagaatgtttaagaagcccaaactctattgagctataaacaaagctcagcccaggtcttcagtccagtttatcgaaagtcatcatttcagcccatcacaacattacatttcagcaaagcccaatagcttgatatcttaagtatctaccaacagtttttggcccgaaccaatacacagtaacaacctcatgggctgtcatctcatttcaggccctgcctaattgcctcatttatatcttttcacgagcaaagtagtctagagatgtaaatgtacacacactatggagtgacattatcattttcattcttcatttaccaataccactccccaaacctcaatacagcaacatctcaatttttctttttacaacttaattagcaaatatcactaacaatgctacaagtaatatgcccacaatatgaaatatcaatttaaacagttgatattatattaatttcttagaaaattacaactaataagcataatcaaatcaactaagttgaattacgaaaagattagtaataacaagattaacaaatcatgaactaggaatcagagataaaacaggacagaacagaacaattaaaactagaaaaaaataaagcatgaaattaataaaatcaacaccaaaatatatattagttcaaatcttataaatcgatgtgatctatgactctactgtagttctcgaacaccaccaaaaaaactctttattgattgagcaagaacaggattacaatacagtcgagatcgattctgtgtggattctctcaaagcatttatctctcacactaccaagaattctcttcatttacaaaagattctttatacaaatcccgaaactcaatcgctctattttctcagtacctctctctctct

SEQ ID NO: 49782 - DNA, 940 bp, Cannabis sativa
aattgagcaggttaaaaataagtagaacccaatttaacccgactagtatcattttttttagttttgtacttttcaatttttattataacataaagaataatatataatacaattacaaaaaaaaaacccctaatgacctgagctctcacactctctctctaatggttaatgtgttcaaatttcatttattttgaaaaaaataccttaggtcagtttggacgggttaactgaccaaactgaccaagccatcgatcgggtcactatttttttaaattgagcgggttgcacttagaattttacaactcgatataaattgacttgttatccgcattttcgacaagggacacgtggactccaagttagcatctaaagcctactagtgggcccagcaagaccttccaggaaagcatatcttcgttcctcgctcagatgagcttctgccaaggatttcctgtacatggaagcggtcccatgcagtaccgcattttcaaaaggcacacaacgtgttctcagaagcctagcgtagttttcctttatatcaaatcgcatagaataaggaattaactcttcttaaatcttggccagaagatgatatcaagctaaaagaagaaactacctaaaatgaagatcatgttgttatccacacttctaacattggacatgtggactccaggccagccacaccaggagccatcagtgggaccctcagcaaatataaaactggccaagctcatctagatatgtccttcttggaatgtaccttagttccgcactcgtagagtcttccgtcctcaacaagtcgtacccgaaagacatctctggtaccatgagaccggagaggcaagacagtgtgttcccagaacacccttccaaattccctttatatagctgcacacaaataagaaaactccaaattttagatcacaacagagtatcgtat

SEQ ID NO: 49783 - DNA, 984 bp, Cannabis sativa
tggtctagtccgattgaggggagggaggataaaacttaatggggatgcaagcttattgaggatggaccgaaaaattagttgtggtacggtcattcatgaccctaccagtctttgtttggcttctgtatctgtttttgtgcaagcttcaatgatgcctctagtaactgaagttttgacagtacttcatggtcttttgttctcgcctgaagtataataacatcgaagtaaagtgtgttttgctttaattgatagaagtcttcttatagttgaatttggtaatatttttactgatgtgttagctatttgtaatcacattaccgtttttagtttcactcattgtaataggaacgtcaataccataattcatgatcttgttaaaataactctttctttaagtttgaactttcaaattgtatgagtctataactctatttgtaagtagttacctattaatttaatatatatatatataataacttaaataatggtgaaattgtttgagtctagtcatttgttaattaattatatatattaatcccctcaaaataagaaatatattaattataaatataaaattaaatgtatgacattcttaacttttttttttttttttgaaaagattcttaacttacctttttatttaagattgtcttttattttattttttacaatatattttgtaactagagtactaagccacgctcttaaattgttgtaatttttatatataaatatatattgtacttataatgagtgatataatgtaaaacataatattttcatgtatttattattattaattactataaaagaatttattatagatttattaatttaattatataattgaattgtattctatcattatttataatttattactttatataatttttttgggttaggatatcaaatatcacttagaagaaaaattaataaaaaatatgaaaaagaaaaaatataatagattgctaactcaaattt

SEQ ID NO: 49784 - DNA, 803 bp, Cannabis sativa
tatttttatttaatatgtataattttcaaaaacataaggaggaagaacaaaattgaaaagagaaattagtataaattaaagatgtgttatttttatataaataaataaaattatcaaaatggaattcttttataagattttgaggggcaaataaatctcccaaatgaataattgactatgcttattacagcaaaaaaaaaaaacactatttacactgataatagttatagtagtaagaagaacatattaaaatatttaatattattattcgtagattaatattttttataggcgagactattatccgtatttatagtgacataaataattccaaaatccaataacagtcaagacagacctaaacctatagccaatcaagataacaattaagcccacaaatagagttatgttacaattttgcatctagatctgagtctaactcatcaaaataacaaagtctaatcatttgatttgggaaatatttttcggccaagaaagtgaagagtgtaccaggaccaatccgaataccttcttggggtaagtcggacgccggcaatcgcagagtcactcggggagcttttgggtgataccttacgcggaatcctcaagacacaggaccccactgtgttcgagtttgtccctacactggacccgcagaatgcgcacaccaccaaaagaagagtgtctttttgttcaacgacatattctatgatattcttaatatgggcacggttgtagggctgcatatttggacccgcacacccgaaaaacccgagtacccgccccgacccgatgccaaaaaa

SEQ ID NO: 49785 - DNA, 738 bp, Cannabis sativa
taaaatattcatttatcagaaaattaattatttattttatttccttaaatagaaatttatttcattaaatagaaatatatttcccaaaaataaaatattcttacagataatagtcaaaatacaacaaaaatgaaaccaatacttcatataccttgtcaagataaggccacatgatttcaatgaatctgttgagccaatccacctccacataagcaagcaaattagaaccttaacatatgagtgtgggaacataagaacttttgtatatcatcataaaaactcgattaatcaggcattttggcccaaagtggtatcaatgaaagaaaccttgaaaagttttaaaatcttgctccaccagaggctgaataacaggatcttggacacatatataacaataaacataagcaaaaaatgctaccaatatcttacatgaaagatctaacaaacctacaaccaataatagacagtagtaaatgatattaaggggaagagatagtagtaaaccatgaagtgaactttatgttaagctataatagaacctatgaatttaatttgattaattgttgtcacgtaaaatttgacaacaccaaatatatgtaatattattaatgacaagaagaaaattgcttgaagaacaattgcgagtattcaacctagacggcgagtactcgagcttggataatgaatgcttaatagaaaactcgaaacaacaaggagacagaggattatagtggttca

SEQ ID NO: 49786 - DNA, 1425 bp, Cannabis sativa
  modified_base (1202)..(1204): a, c, t, g, unknown or other
ttaaaattttactagcatatttttgtaaataaaaaattttagattgtaaaattataaataaacataaaaaaatgtattttttgctactagtacattggtttgtttcgcgggagtttggtcatcttgattggttggttgagtggaactggtctaatcctaagggacaaacatgatgttgacctgaaaagctccgataccaagttaaatttggtaaaaataatagattaattttaatcaactcaaaagataatgatgaataacttctcatttatagtcggtcggcaaaataggagaaataatacaaaacaatgacaactatacacatacacacttaattataacaggaaaaatagaataattataacaacaataatacaaaatagtaatgaaagtaacatttggtaataattggcttgagaatgcaatattgcataaaaattctaacaattttaggtgcacatttctgtgattaaaataccctaatattttctattttgtaatacctaataattaaaatgttcacagttataaaataaataaataaataattcatgaaaatatgaaaccaataaaatgtgtattaaaacaaccgtgtgccataaaattaacctatacggatatatacaaataagggacatccacaaccacgtataattttgttttggaacgtgagaataatgatagcgtaccattttcgttttatattctttttatcttttgtgtacactcctttcttctcactacaaaaaataaagaaagaaatatcaattagctaggatgataatatctttattcaatgtatatagatgccaaatagggaaaggaaaactaaaaaccacaaaaaaaaaaaaggaaaaaaacaaccttttttctataaatgaaacagtcacgtgaactatttatcagaaaaaggaaagggtgaactttaaccaacttttatttttagaaatgtgaactaacatagaatagaatagagaaaaaaaaaaatcataattgttcactaaaataaagatatttatataaaaaaaaaataaataaaaataaaaaaataaagatattaaagctgttaaaaaaaattaattaggatttttgtcacttaaattttgacatgtaacaaattatgctccttccatttttaagatcgttaaaaataccctctgaactattgcgattgttgaatttaaagatttttgtctaatttnnntcaattttactatttcaatgattgtttatgtactaaatcatgttccctagactttgatatctaccaaattatgctcctcgaattttgacatgtactaaattatgtcacctgaactttcatcatattagatttttttacttaaattggaaaaaagtctttaaattcaacaatctcaatagtttaggggtatttttaacgactttaagggctcgtttggaacg

SEQ ID NO: 49787 - DNA, 969 bp, Cannabis sativa
aggaaaacaaacgtaaaattctttctgaatttataaatttaacgttcccaggagaggaagagagaattgaataataattaccattttttaatggattgacagatgttgaaaaagaaaaatcatagagaaggaaaataaagcctcattaagccttgaataatttaagattttttatttcttcattttgaattgtcatatatgtcctttattttcactaggtagttgttttttttagagtataattattatagtttttgtggagttcaaaaaaatttatgtctattttcttttttacatataagtaatctttattaagaaaaaaatctgttctctacaaaattccataaatacacagcaataacataactttttgatttgttgtaaaataataatgataataataataataataaaaacttattggtgtgaattgcatttttagtaaacatttatacatatatttgaaggaaatttgaaagaaagaaaacaagaggaaggaaaactacagattctaaatttttattagattgaactttctgagtatatatatagaaaaatctaacgtggaaagtatattatttaaaactctactttctttattttatttcgtacacttttatattacactattttgtattcttttcttatatcatttaaagaatctattttaaaatattttaattatttaaataatataaaagaataataaaatatttattaaaaaagagagattgacataaaatgattaaaataattatacctcaaatatattattctatcgctacatgctacaaatcagtattcttttattttacttttagagtattttttacgttactttttgatttacctcggctaatgtatgtttgatataagattctcactatttttttttagggaaatttgataatttatgctaaaaaattagatagggtgtttaattatacccaattattacacataaaaaaa

SEQ ID NO: 49788 - DNA, 2176 bp, Cannabis sativa
ttggagtgataagtgaacaagttgtttggtatttgagaaactcagtgtttaccaattctctcttattttagtgatcttcgtctcatgttgcgcaggggaggaggttgttcggggattttcttatccctcttgtggtgaaaagtttttggtggaaagtctaccacaaatggttgtttgtttacgggatcctctctaagcggggtataggtgtgtgtgtctcccatatttgctgttgttgtgatcatttagtggaacatatttttcattccctttgggaaggtttgggaattcggttcactatgttaaggtgttggtacgcgaccagtttgaatggaatttttaaacatatatattggaccctagacaagtttattaaaattatttaacatagaaagttgtttgcacctttcagctaaatttagatattatacctttgcaattatcataacttaaaaagtcatgatttgcttgttccaacttgtcaaaccctcttgtctaaaattcactgcaccctgttgtttacagtattgaatgaaaatgcttccttattgcacattgatcaattgctaaataataatcctcaatagaaaaacaaaaaattgctaaataagggagtactattaattttttttttttctattccttttttctttcgttttagaattttactcgcttatgttattagggagggatgacagaaaaggtttcaactctcagtggagaaggcaccatatcatatgcgagaacgcaataaaataattatggttgtcatcactattctaccgaaaatgaggattgaaatttggtaaaatatgacttactgaaaacacaaaggaaggtaacaagttttttccaagacaattgatgtgaattaagctcaaacagtcgtagggcagctctcctttggcaagtatcattaaatgctaagtcaaagcctcaaatacgtgccaagaaagagaagccctataactgatttacttatagaagatcaagctctgtcctcattctccaacctcttcatgttttaatgaatgcagcttatgacaaagccttatatacactaaaacttcggtctgaatatatatggcataaaccatggaagccttggcatatgcttatacgaattatgctttttttaactgttagtgtgaattggcatccatatcgatgtttctaatctctacgatatacatatcatgtatatgaagagttttttattcacgccttttgaaggtgagaagaggaaaaaaggagctggcaggagaatcaagagagagctatgtgattgacaagggtcatggcatatccaggtttggattcctctccttttttaaggttgctttaatgtgtttttctcaaatctttagttttatatatatatatatatatgtatatgcccttttaagtacaaatttcacttaaatcacacaccaaaattgatacctatattaaataaagatggtccattagttgaaattatacttgccacatatatgtgttataagtgtgtgaataatttgtgtatacagatatcattactgaaaactaaatgtgtggtgtgtatacttgaaaagaacaacaaacaatggatatttttttgagtaaataagtactatttcattgcacaaaggagtgcaattacacattgaactcatttgctcaaaccaatcccagggtatacttcatgattcacaaagtattattcgtatcttcccaaatgttatgcattagagcaatattgataagagctacatatattagaatgttttttatttatggaacaaaataagataactaattttgagataaatgaatattttatttttattggatttggataaaattaattacgtgatattatatatatggtcagattttgatatttattacccaatttattttctaaattaattgtcaaaatattatgataattaatatggcgcagatactgatagagtatctcagctataagtataaattttcggtcctcgagctcttccctcattctatgcaaacagaaaaattctatctaaggagagttgagagagcgagaaagcccaaattcccatagtgaagctatttcaaggggattgaagctcaaacttaatggttggaggtcacatatacgatttcgatatgtctgtagttattccactttacatgtatcgttcatgta

SEQ ID NO: 49789 - DNA, 1143 bp, Cannabis sativa
ttgttttcattggatgggatgtttattaagatggacgatttagttcttcccttgacttttgtatctataagatagtcatgtagcttagactttgttacaaacaagaccctgtactagttaggattcttgtatctgttctagaattgtcacatagcaaagagtgtcactttaagactttccatctatatttggatcatacatcttttaaaaatgctactattagagatactttaagatcttgagtgtggctaagactttataaacaagttgtatttctgtaatattaaacttaataggccgtataaatatttataaagtcaatccatcttatttttataatttatttactttattagttataactaaaaaaaagtcctcaatttttctttatcacacttgtttgatatttttttagtgggtggaacttggtttgtaattatagaatagttatgaaaatttttactatgaagctctaaaaaggagtcaactgatgtacattttatttattttaatatctgagagaatattttagtttaattttttttatgaccgtccacattatacgccgaaaattttgagaaattcaaaaactttaatacgcgaaaaataaggttaaaacagtctattcacatgcttataaaataaaagaatcttgagtgtaacatactatttgaatcttattttcagtgtgttaaattttttcgaattttttaaaattttacaagatattttaaacaattacaacataaatgataataaaaaaaataaactaaaaaaatttcagaaataaattggagtgcatttgtcaaccatccaatatttattttcataccaacttatttgtttcatacttgattaatcgattcaatcaaatgataaattagcaatattaaaattagaaatttaatagtttttactaaaatcaatgatgagtgaaaaaaacaaaactagtttggaatggaaattgcagttaagagatataagtatttcaataattcttaaccgtttgcaataaacaagtagacctcccataaaatcccatttccacaatttattgaagagaacaagcgaagcaatgagaatgttggttcaatcatattcattgatctccaaaaatgtagcatatcttacaacttagcctta

SEQ ID NO: 49790 - DNA, 1182 bp, Cannabis sativa
aatcctcatgttggtaactgtgccgacattcctcattttcaaggagccaatccacatgttcggaaccattccaacaatcctcctgtccatgtaagagttgattgtggtagaccaaatggaaatccatgcataacattgcttaaaagacaactccaaaaatttttgaataacaataaaatgaaggagtatgaatctgatgaagaaatagagcccttcgtacattgtatcttggcattaccttataatccatagtttgaaatgcaaactacaatatcaagtatgatgcgaccactgactatggcgtctacataagtgatttcaatactctcatgtaagcacatcaagtggttggggaattgaaatgtgtgttatcccctgctaccttatctgaagctgcatcctcgtggttcaaaaagtttaaaagacactccatagtgtcatgggtccaactttcagatgatttctgtatatctcgggattagtaaatagattagcaaccctaaataaattggattaatggaaatttagtaattatattattatataactaataacgtgaaaattatataaggcttattcacatttaagactctgtttataagtttggggtatttttgtaatttttgcccaagaatagtaaaatcataattttgatttatattgtgctaatagactatattattgtatagtatattcatattgtcttattgcaggtaatttttgacaagttagcgcagtacagtcacaatcaggtattcttggtcaaaccaagtttggaatccaaaatttgtgagttacgtgcttaaggcaataacatgatatatatatggaattatatattatatgtgtgctatgaaatgacaaaactacccttggtaattatttatgttatttataggccctgtgggcaaagtgatcatttgaccaaaaaaatagtaaaatggtacatatttgcatttttttaaaaaaataataaagaatgaaatctcttttatgattgaaaccttttccaaccgacccccttctcactctctttctataatcttatggttttaatttaatgttggtgattttggtggatttgaatagggattttgtgttggattttgtgccctataaaactcatttcaaataaatcagatttactgattaataaagaccagaaattacattttatgttgc

SEQ ID NO: 49791 - DNA, 1431 bp, Cannabis sativa
accaagtaaagaaatttcttgtcgccttgacatcttcaatttggcaatagttcacacaatcagcaaagtctgtgtcaggatagtatttaactttttgccccactctctcttctttggccaatatatcattcaaatctcccatcagtagccaattagctttagtggccaactccctcgggtctttccataatttttgtcttccaattttgtcattaaaggaatatattatagtaacaaagctactataagtgtttaccaaaaaaaatttggttacggtaattatttattgtatatattataccttcaaaaaatcatataagagcaatatttttttattcatatagaaaggtaaacttattaaatatatatatattaccaaaagaaaccttactatagtttattttttaaatattagtcacaaaaaaaatatgtttttttatttttggctctaggtactgtaatgaaatcttgaaagttaacttatcatttgaatttcaaaaattttcagttagcctatctatgggtcaataattgttacactgtctgtcctaaaaatctttatccattcgagtatcaagtaatatatctttccaaccctaagagtgacaactctttctcttttcaaatattttaatacctgtgagaattttgagttaagactttttactttaaatattttttgatattatcgttgttatggaattaagtaaagaatatgatttgaaacatacacacaaaatttgaatttatatctattgcaattttttatatagcatttttctatagtttacgctaatattttattttgttttaattagacaaagtttattttaatttttttatcttggtaatattttttcatccagttgaattgctaaggactagtaaatagctagttggagattgtattaaatgccaaaatattacatatttcatagtataaaaatataaagttaattaaattttaaataatattttcattaaattaaagttatatatttgtatgttgaaaatatttttttagaattaattttatctttgtttacacttaataattagtatttatgacataattaagaaaagaaaaaaaaaggataagaaatgcgttatttttattaaaagagctaaaaattaattagatttttaagaaatatttcagtaaaattaatgtcatatattttatgttaaaatattttatttagaaagatggctaatatcaccctatgtacttaatctacaaagagttgatagaaactcaagaaaccatctatgttgtgaatgaggaccgagttctattccaagttcctaaaccagtgaagcatgatcaagccaagagagatgcttcaagatatttctaataccacaaggacatcttccacacagtcaataagtgtcaaaatctcaaagataaaattagagaaatgctaaagg

SEQ ID NO: 49792 - DNA, 613 bp, Cannabis sativa
tcgttagcggtttttttagcttttggttccaccggttttggttccagcagtgttcggcaggtcagtttgaatggttcagttgtctggatttcatgctcagccctaccgctattggtataattatgtctcgagtttcatataatttaagaaaataatttttaaaaaatattgttaactaatcgtggagcaccactggtgcccaatagcaatacttattctagtgtttaatttagaaatgtttataaaatactcactctattttacacgatgcaatttaatttggaaagtgtaaattagatattgatttacatataaaagcaaatcaaatcacacatatttatatatatttgaatgtaaaaaataataatttaaaaatctaatacacatgattcaaatattttaaaaattagtagatcaaatgtatatttaattcttatgtatatagaaaatataatcttaaacaacattaaacatttctttatacataaaataataataattaaataaaacacattttttttcttctttctttgaatttgttatcttttattttattgttttgaattgttgttttatagagacattaaacaacaataatttgttttcttttgtt

SEQ ID NO: 49793 - DNA, 2190 bp, Cannabis sativa
tttttcatattcatataaaacagctagcaattaacaatagcaaaagcataattggtggtgctagtacctattcatattctataacaactagagtatttaatatatatatatatatttataggagatagtataatttgaattaatatgttaatatttttaaaccagaaatttacttcattatttgatattatcaaataattagcataattataattaatattatatatatggaaacaaacttaatataattcttaatactatatatatatatacataatcggagactaaatggggcggggagtactatccccgactccgccccgtccccgaatcgggtaaaaaatattagcctcatccctgccccaatccccgccccattagaggcggatcctcgcgggtccccatccccgtggagtttttgtgcatccctaattataatactatggagagtgctagacactagtagtgccttttagcaattttcttctttaaaacattcccattggatatgctcttaggcactaatagtgcttaacaccacttagaggtgatatcttacgattagttagtgacactccataaaaattattacattaaactatataaaactcaatacttaatttcatcaataacaatattacatattaaaaaatactaaacaccattaatattttttagcatttatccaccataaacgctacaaaatacttaacaataacactttcgatttatttaatcaaatattattttaaataacataatcacaaagccaatttgttccaacccttttggagagcataatcacaaagccaatagtaaaaataatacgtggcactatggcatcattttagagggaattaaatttttgcaagagattatcatgactagcctcttcaatgctaagcttatgtgccttaaatataaaagagattctcctaaattattccatcttgtaatctcctgtatattattcccagaattggacatgaataatagaccaaaagcattttgcaaattaattctttaatgagtgaaaataggtgattatggttatggagttaaaagatgaatcctattatcaaaatgaaattttgaagccatcctttaagggaatagttttgatcataatgttacactaaggagtacttattagctgggccggtcctcaccattaatgggtccaagaatattttttgtgaatgtgtgtgttgtatttaaagttgagtggagtattattgggtctacttcataaaattttataaaactcctacttttcttactacatatggtataaaaattttgagtgcagagtacgataataggcgaagccagaaataaaatttaagtagagcaattttgtatttttattgtgaaatgataagaatatttatggtgcctaacaatttagtatcataagttattggtacaattcaatacgaatttcacttattttacttttaataataattataaaatattaatgactatttatagagcatcactcatgcatggtgatactaaaaattatagtactttatagcaatacttattcttatattatgtggatatcaacatctaataaaaattacaaaattcactataataaaataataaataattatgttaaaatattttttagagtaatgacatttcaaatttattgctaagttcaaaacccgacaataatacaaaagataaaatgaagatgttgagtcttgaacttgtgatttctttaaaatttacatatgaatttaccactacactaaataatacaatctaataatatttgaccaaattaataatttatataagagcaaaaaaaaaaaaaattatttagaactaagccctaaataattttgaatcgagtcaaatttgacgtgggatgattgtctcacttagtttgcatggactttgtccatgaacactgtcctaacctattttagtttaaagttgacatgtttattagtaatttgttagtatatagaacctataaatatataaattatctagagattatgaaatgaaaaatacaactttagttgattttgggaaattaacatgcaatttagctttcttttcgaaagaggagaatggttttgtgttgcagtttcccttctattttagtcaatccaatatcctaatttaattatacttttaagcacatattatatttcaacatataagttaaag

SEQ ID NO: 49794 - DNA, 1834 bp, Cannabis sativa
taattaattaaatctaaaaaaggaaagtttacctattagtaacctgctattacaggttaataaaaaatttaattattgaatagtcacccaaaaatatatatatatatttccagctatatatatggtgaagcttattactttataaggtgtatgcaaagatataatctcaaatatatttggacgtttttttttattttttttaatgaatatattttttaaaaacatttttctttttttcttactatggtatggtacataaaactgacaaagtcttttgttgtgtagtgtagtattagggacaggtctttactcaaggatttgaaactcactatagctcctcttgaaaagagattatgaacccatatgaaggctaaaaggtaatttagtgtaggtgatgccatctttatttgatggaaactgttaaagtaatttattgaggacccaattaacacagattgaagtataaaattactatggctaatatgtaatcctaagaagtggtgaagaaatctacactacttgattctcttgtgttaataaaaaaaaaactacatttcgaaaaaagaaaaaaaaaactaaaattattaaatatttacaaacttagatcgctcatattatatttaggctcagatttttctgaacacgtgactatttgcacgacaaccttgaaaaacgaggtttaaactttgtgactttctctgatatttgcttaaatgtggagtttgtttttaacaatgaagttaatcggattccattcaaaaaaccaacaatacatcaatttataacaagtgatattctaactctgttttgagctgtagctagctagtgctataagcccatagctttcattatcattctttccaaaaacaaaggttgataattttttcttatcaaaaaacaagaagataattaagaaggcaaaaaaaaaaacatattgttattattattctcactaatatatatttattattagagatataaacttcaccacgtgagacttaccttttattatttcttacaaactcttttttcttcaaccaaaacaaaaaacaactacgttacaaactccatttcataagctaactaaagcttaagtttactcatatctggtctgttgggaagaagggctaaagacagagatctcatccctaccatacttcaacctccttgcttgctccctcgatatttggaaagcattggccaaaacatcgtcaggcatagccctcatggccgacaccttaccagcaagagggtttctcatggcgttgtcgttagtcttaacggcgatccactcgaacccttgggcgctggccttcttaaccacggcgaagttttgtggcaccacgaagatctgtccctccctaagctcgccgtcaaagacgttacggccgttatcgtcgacaacttggagtctggcgctgccacgtgtgacgtagatgacgctgtggctgtcgaggttgaagtgtggggccatcatgccgttcttgtagaggactcctctctcggccgtgagctggaggaaccgtaggattgggaggttgtagttgttgagagtgtttaatctgccgccacgtgggttgaagatgtcggcctgtgatggacggtcgatgttctgtctcagcctcaatgtgcagaaggtctcttctaatccgttgtcgcggctgtaatggcgtctctcctcttcttggattctagaaggtgctatgatctgaaggtcttctcctctgactcggacgattctctctctcatgtcgtctctgttttggagtttgtgagccaactcggtgtccacgttgaatgactcggctaagattcttgtgtcgaatccgctgaa

SEQ ID NO: 49795 - DNA, 1021 bp, Cannabis sativa
agagagagagaggacatagtaaacacattaataatgttggtgttttacagtactagtacagaaagtagaaaggggggaagcataatgtcttcatcatcatcatcatttcgttttcctcggccaacaatgccaacggccgcggcggcgatagtagtagtagtgctcatgatgacgagcacaattaagaactgttgtgaggcagctgtgcttctgcagagaaatgtcacttatgataggtactgcctcaacggtggcgccgctgacgacaactgcctcattgcggaggatttggagttggagtttttgatggattctcacgtcagccgaattttggttgatcatcctaaaacaaaaactggcggatcaggcaatgcggacgcaccggtacagccctgtggaaatgtaaagcgtggccaagcgtactgcctgacgaaggcaggaattatagtgaaggttgatgaatattgttcaaaagagaacacttacaaaagagattgcaagaaaattagatgatgatgacacgaattgaagataaaggaggaattaatgctatgcctttccatcatccgcgtttgttattttatacgtacgtatgtgtgtaatgtgtttttattcgtgccgaactattgtaatttaggtttaattgttgattattatctgcctgtttagtattcgtaatattaaagtttgagaatctttaaataatggttgttagtattattcacttatgtccatttttcggtgtaaataatcttagatagtatgacatctaagtgaagatgttgtatataattgagattatgcataacaaggacaggccgatatgaataacaatgcctttatcaaacttaccgtttactataattaaagacctaaatcatattataaagatgatcaatagttgatcgatttaaattttgagtaatcatgaactcttgttcatgttattagtttttttgattcactcgtaaaagttttttagagaaaattcttataacttctattttacaaatctaataat

SEQ ID NO: 49796 - DNA, 2194 bp, Cannabis sativa
  modified_base (995)..(1025): a, c, t, g, unknown or other
ttttaatttataaaattttgaaatcaaattatatatctaattttatatttattattgatttaactctttttttaataaattaaaataaaattatatacttagataatgaatataattgattttaatcttagagttgtatgtgttttactaatattaatttacgattactcctttcaaaaaaaaaaaaaaaatagtcttctaataatttcaaacgatactttaatttgaaatacttttaaaagtatcaaatatacatatatgataactttcttaaaaactttaagaaaaaaattatatgtgtaactaataatttatttatttttaatggacgtatataaagttttaactaaaaaatctttattcaatctatatgccattaaaaaaagtatatatttacttaatttaggatattaaaatgattttaaaaatttgaaaattaaaaacaattctatcgagcaaaatcattatctaatgcaactatgcaaggtcaaaaaaaataacaaattattttatgatacatattaaatgtccaccaatatataaaaaaaaaatgattttttatcaattattatatataaaactgatatatttaaaaggttaaacattatcatcctatttgaatgttgtttaaactttaattaattaaagagaataataatttaaatagtatataaatcaagtccaaatgttatttgaaattttaaatttaaattttaaaaaaatatagaaaaaaaaaatcatgttatatatcataaaactcaaatttaaatttcttagattttttttaataaaatcatcccgcaattatcgataataaaatatcaaccgtttagttcgttatatttatcacttaatttagtattattattttttttattctaaataatccttatgataatcaactctatataaacataactaataccacacaagttttcatcgaaattctcattcattgtagaaaagaaagaaaaaaagtgagtatagagattttnnnnnnnnnnnnnnnnnnnnnnnnnnnnnnntcttttatggtggctttgagtttctgtaatgcacaacctcttagcaatgtcaacaaaactcacacgagttgcgaagaattacaacaattacaaccgtgttctgctaacatattctcttttttcattcgaaagcaacctattaactctacatgttgcgaatctattctcagcatcgccgataaatgttcgggtgatccaatgcctatttggtttctcaaaagccaaaaatattgcactattgtaaatactattaaatcgacaccaccaatttcttcaatggccgcgaagcaaaagtcaacaccgttgaacgttacatctcctgttgttgatggtttcaagcaaaattgtatacatgaactacatcgcttaacaccttgtatcggtgatataaaggcacatatttggacaaatagttcaattaactctacatgttgcgccacaattctcgatgtgggcgaccaatgtcaatgggattcacgaccactatggtttgcgcgaagcaaagacttttgcaaaaatcactgatgagatatttctatcagttgagcttgtttagtttagttttttttttcttatttcttttttaaaaacttttcttagttttattttagagattttttttaatgttaggcattttgtgtttttctctatttagagctcaacctatgaattgttttggttattgaatatagttgatttttattttagagttgcatgtgttttactaatttaaaaaaaaattacgattagtcatattataatctcaatctacacttttcaaaaatatcaaattaatatgtattattaactttctaacttttcttttgctaccaaaaaaactcttaaatttcctaaaaaaaaaaaaaaactcttaaactaattatatatgtatgcaacaattaatttagttttatatattttgaattgacttaactaataattaatatcaatagcaaatatagaatgttttaactaaaaaaaaaatttattcaattgctattaaaaaaagtgtatatttgcttaacttttaggatatgaaaatggaataataggaaccattttttgtaaaatatttacatttttacgttcaaagaatagttttttatatttttacggttttctaaaaaataacacgaaaaaaacataaaatcaacaagaaaacaacataa

SEQ ID NO: 49797 - DNA, 758 bp, Cannabis sativa
aataataataataaaaattgaagtgatttgatagtttatcagttccatgcaagaccaattttgtcgtttttaataaaagtagttggaggttggagggatatgaacagcattaaaacttatcataataattattgccaacttataaagaggaaagagacccacaaaacataattattattactaatcctaatcttaattaccttaataccatttggtttggactattaggttcatctagataagttttgctttttgattataatatctaaataaaaaagcatagaataaactaaaaaatatgactcatttgtttggatatataattactacataaaggtaataatttaaagattaatttaaatttttgtcttttaaattttgatatgttttagattatgtcttttgaattttgaagaccattaaaaattcttctgaactattaagacggttggaattaaggatttttgtctaattttagtaaaaaaaatttaacatgaataaaagttcgaaggatatgatttaataaatatcaaagtctaaagaacacgatttagtacatggataattaccgaattagtaaaattgaatgaaattagagaaaaaaatttaattccaacaatctcaatagttcaaagagaatttttaacaggcaaaaaaattcaagaagtataatttagtacatatttcagaacgcaaaaaacttaattagcttttttttaaattatttttgaataaatgaaaaatctcattaggcctaa

SEQ ID NO: 49798 - DNA, 516 bp, Cannabis sativa
gggtacttcgtggtgcaggtaaagggaagaaaaaagtggcccagccatgagtcaaaggtctgttgacgatgtacatatcaacttctgtgttttgacttccagtgttcaggatccacccttttcatcatattttgaaaatttaatcctactttgtaataccgattttgagatatattgtaaaaatttataaataagggatccccaaacctagcagtattttgagtataaagtcaagtttaagtttaatcaaaatttttttaattaactacacttttatttaaactgttatttaataattatagattaatttataaaagtacacacatggtgtacctgtgagtcagggcgttataattaaggtcctaaatcatatcttatctatttgcatctctgaaataaattaatatataatatgtattaagtacataatttgattgtcacacatgctatgcatatactctcgtttacatcaaaatccatatttgttctattagagcatgttggaaattattttac

SEQ ID NO: 49799 - DNA, 1296 bp, Cannabis sativa
ctgtgcacattatcattgataaatcttttggattttataaaccgaagatatagaactttgcaatatacatgcatgttttttcaattttcaattatggtgcggttggtaatatttttgtaatctaattttttaatcacaaaaataaaaataaaattttatttttgaaaaataaaaattcgttctatagccactttttttttcaattaaaaaaaacagaaaataaaagtgtattctataaagtttgttttcatatttatttttttattttatttaagtcgggtccaaatccgagatcgagtccgagtgtaggttaggggccaagttcggtgtcagggccgggaccgagtttgagtccggtccgggtctagtcagagtccaaaatattgattaaaaaaactatttaaaaaatattgaaagtaattttttttaaaaaaaaaaaaattgattctcaattaaaaaattaaaaagtgaaaagagttttacttttctaattttaaaaataaaaaactaattaaaaaaaagttaccaaacatcacctataataatatgaattagagtgtaatggagttcagtatgtattagtattattatgtagtatatattagtttgatgttatagtattgctaagtgtttgttattaccaagctactaaatatataggggcgatcataaaatattatcatcccaattcaaagtgtaagtactaatattgtagattggatgttaattgagatgtaaaataataaatttaatgaattcaattcaatctacacatatttatatgtatatattagaaaatatatatatacaattaatattttaatataaaagatacgaattgaaaaatctcacatatgatacaaatatattttcaaatttagtagataaaatgtatatttcattttcaatataagaaaattataatttaaaattaaattaaatatttttttttatacacacaatttttttttcttcctttaagtttgttatttttattttatttgatttaatttattgttggagaataaatttcaacaataatttgttttattctgttgttagttatatttttttaataaatattaaataatttaatattaaaaagtaccaaatttaaaataatactggatttgacttattatgcaaattggattagatctaaaatttaaaaactacactaatggcacgtttactatacagtattcaaaatcggaataaattaatggagaaatgtaacggaataaatgaaaaataatcggaatcaatatttgcaatatgttgtttactaaaattttt

SEQ ID NO: 49800 - DNA, 1430 bp, Cannabis sativa
  modified_base (810)..(810): a, c, t, g, unknown or other
ggagaagctctcgaaaaacctacggattacagaagtctaatagaaagttttgagatacttgaaaggaaccattaatcatggaatacacatcaaatgcagtgatcaactcactctcacgagtttttcagatgcagattgggcttgttgcccagatgataggaggtctgttgctggttattgtgtttttctgggagacaccttggtgtcatggtcatccaagaaacaagctgtggtgtccaggtcaagtactgaattagaatatcgtgcctttgcacaagtctctgctgagctaacttggattcaatcccttctaaatgaagtcaagtttcccttacctgctgtgcctataacctggtgtgacaacatgggggcaagttcccttgcttctaatcctgtttaccatgctaggacaaagcacatcgagcttgacatccattttgttcgtgacaaggtgattaacaaaactctggacattcggtatgtgccctcacatgaccaagtagcggattgtccaaccaaaccactttcgagtataagattcaattttcttgtagacaaacttggaggtgacaacttcaccattgcatattcccctgtctgctggtgcactgttatatactgttactgcttaattcttttttctctccatttgtcaatactatatcccacgtggtgtattagtttttgataggaattttcctatcaagattaatcaattgcagaaaatagagaaagagtagtggtgtttggataaaaatggcagaatgcctttcattaatacccaggatttcgagagcctggttctctccnaaagttacaaactaaaaccaaattcttccccaccttttccttcactattgagtcctatatataataacaatacccctatcacaattacacttatgcccctttttattatatcccaatgcctatcaataccggctgccgaaaatcaccttgtcctcaaggtgatggagttcaacttgtaacatcagtaggtgcaacccgtaatcgtcctttgtcaaagaaccaagccaacaaatgcaaggttttccagccaagacagagacgcccctccgcagcgattcgacctcgatcaaaaaaccagctgagcaagttaatagttcttccctttgtatgcaaaacaagttgaaaaaccgccactcccacgccattgaatggagcttccaagtcaagttgagaaaaaagaagggccagccctgaagttgtcaaaatcggagtggtcccaaaatttattgtcctttccctgtccaaaacccaagagacacacccccaaaatcgataattgtgtttcacaagaaacatttcaggacctttttctttttgtcttttggtgctcttgcccaaaaccagtagaacaaaagaggtataagacaaaaaattttcataaatgaaaattaaaaacttat

SEQ ID NO: 49801 - DNA, 2086 bp, Cannabis sativa
tatcttctcctgtattgatctttcaaacaataattttcatggagaaatttcaaaatctgttggggatcttcgatcattgattgtgttgaatctatcaagtaacaactttgaaggtcacattccactatcttttggagatcttaagcaacttgaatcattggatctctccaacaacacactctctggaagaatccctcaagaattggcaacactcacatttcttgcttatctcaaccttagcacgaaccaacttatgggactgattccacaaggtgaacaattcaacacatttgagaattcttcattttatggaaacgaagacttatgtggctttccattatcaaaagaatgtgaagattgtacagatgagacaccaaatacgactctggatgatcatgaatctgagttttagagtggttttggttggaaagcagtgactataggatatgcatgtgggtttcttgttggagtgttgggtgaatatctcttcatttccaaaaaaataaatcacaggtatcataaaaatatttatggcaatgatatttattattgagaattataactacttattttttttattctgatttgtttagttcttattatataaaaaaattatatgtattaagagtgagatcaatatcagaattattattaatttcttatatgaagaagggagctttacataggaatgatattattaagagtgagatcaatatcagaattattattaatttctgtctcttttgttataaatatgcttaattaattaattaatgaaaattagtgtcagtgtttgaattaatatttatctctcctttgttaatctttatttgaactcaacattattattcaagactgttcaatgggtgtctacacatgaaaattaaacacaatgtttgctggtttaaaatttatacaagaacatatcatgtgataaataatgggacaaggcatttggaccctatataccatagtagagtgttaacataaattgtggtttcataataataatctaaaatttgagtaaatcattccatcaaatttgatacaaaataatctatagaaattgctaaccaaactagggactagtggaagatttaaaggaattggttgagtgtgatagataatgtagattttttttatttatgtttggaacgtatgaaatggggaatataaaatattcaaagactaaccaaattcgtttgtttgttttcatgaagacttgaatatattccaaactaaaggagttgatgatggacaaatattccatcatcaagacttttcttaattaaaaaccaaacaaagataaatgaaagaattgaattatataaacaaattcaaatctcattctcaaatactcatcttttacagctcattattattaataatctcgccaaaaatgaagaatcttttgcccctcttcactactcccatgtttagctttttcatcatgatcatgtgttgttgctatgttacaacacaacatcaacatcatgctgatctaaatgcctctttctctccgatgagaatgagaatgagaatgagatgccttcctcacataagctctgctttgttgcaactaaagcaagagtttatatatgaaaacactttttacaatgatctgccttcttacccaaagatgaagttttggaaggaaggaaaggattgttgtgagtgggatggcgtcacatgcagcgccaaaacaggacaacttataggccttgatctcagtcacagttggcttaaagggtctttgagttccaatagcagcctattcagcttaagtcaacttcaactactcaaccttgcttgcaacgacttcagttattccaagattccatcaagttttgccatgctttcgaggttaacccttctcaacctctcttattcccatttttctggtcaagtcccttctgaaatttcttttttgtctaatatgatttctcttgatctctccggttcttattatgttagtctttcatatagtacaacaacaaaattttctcaaaacatgaccaagttggaagaacttcacttggacatcgtgaatctttcttcaccactacctaaatccattgcaaatcta

SEQ ID NO: 49802 - DNA, 1461 bp, Cannabis sativa
tggtttgataatgtttgtaaggttcaacctatggaacgtattgagaggcttgctatgcttctttggggagtttggggagctcgtaatgacttggtttgaagtaataaggctttgtcgatagaatgggtagtgaatgctgcaattacttatcttaatttttggaagaatgctcagctggaaaatagagttgtttcgccagtttctggtccaaatacaaccgggtgtgagcaatgggctaaacctcgttttggtgagataaaggttaattgtgatgctgctgtctttgaggatgacaatagtatcggtttgggttgaattgctcgggatcataatggtttattcattgatgctttagtggttaaaatttatggtcaacccgacccatttttggctgaagttatggcgttgaaggaggcgctcagttaggtgaaagggaggtgggtagagggggtgtgcttgctggtgtggttatggacagcttgtagtttgtagtaataatattaatgctcattttaggacaacttgtgtgatttattaagacaaaactaatgcaacttaattgaagttggtttgtaaattcaacttatcacactcaagcttattttgaagcagagtcatagtaagcaactaagataaaaattcacacacaaagaccaattaaataaaatagctcaaacaaaaacattcattcaacatattccaacccactaaataattacactcataccatatctaccttaaattattttttattaatatgttatataactggttctattttagttataaccggtttgagttatttcgtattatttgtttttatttattatgacattgtcatagaatcggttctaatataattataattagtttgagttattttattttatttatttttattcattatgttatagaaccggttatatttcaattaaaaccggtttaagttattttgtgttatttattttcattaattatattctagaactggtgctatttttgtttatattaaagacagctacttcttgtgactttttcagtaacttttttcggcggtaatttttttggtcttttccagcgatggtgacttttccggcgatactaacttttctagcacaggtaatttttccggtgactttttcgatgccggtgactttttttgcgactttttcggcgccggtgactttttcgacagcttttccaggaaaacttattatttacaaatatgggatttttatctttttttacaaaaatagcataaaaaatctatataaatgtaaaaaaaataaaaaattccttaacccaataacattatttatttatgggctatttttaaaaatttggaaaaattattaaggttatgataaatatggcataaaaagtaaatgccactaaatatgacattatctaaccaatcaaactaaaaatatagtttttttcataaaaaaaataaaaacttaa

SEQ ID NO: 49803 - DNA, 1354 bp, Cannabis sativa
cgcttgactttggttgatttccagggtttctcttattatttcaagggattccctagttccctagtcgaggttgcctttcctcttcatttgtacgagatgcttctagcatatcggtttgttcattcccttggttattaaacccatgggaagtttgtggaacatcacgtcgatgttcctgattttttttattatatttagattagtttaattatccatggggacatcccttgtgttcccaggttgcttttcctgggtattaggggtctcctgattcgcttcctgccttctggttctggagccttgaggtcttcctcgtggcctccttgttgtaaggtctggttggttatgtggaactgttccctacaccgtcctagctgctgcagcctttctttctaactcaacatttagttggttagattcagccaatcattaccgaaattgcctattttccaactccaccaatggtacgtatctagttgggtcataacctcctcactcctaggaacgtatctagcagagttattggtatcatcgttccttctttatggaacttgatctccatcaccatcgttcctccttaaacgtggtgttttggaggtgttgggcctttaagatcccatgggctccttgccaagacgacgggttgtttcttcgggacgattactgtcattttgattgttatcagccattgaatatggacagatttgtgtttgtaaggagagatttttctgagttattatcatcaaggctctcaatgaaagcaccaaactgttaacacagatttttcgtcaactaaataaaatagtttttatgcaataaattctctacaaaaatatatataagtaataaataatcagataacaccagatattatatgtagttttgtagttaaaatctacatactccacgggtccttattattagggatatttattgagtacagaatacaatctcatactttgaataataatattttctcttttaattttgccgtcccttttctcatggaatctgccccttataggaatataggttgtaaattatccttttttgggattaattcaaatacaactgctcatgaaacgtgaataatccccacgttttatttaatcacatgtgagataatatctaataatttcccaaccgttctttagttttatcccttagacggttattgctgatgtggaaggttacatctcgcctgacatgagttttcccctttgtccatcttaaggaaaaatactaagtgttgggaagtagttcgtctcgtcatattcttttattgatatcaacaatgcgaggtgaccttctcgctatgtgtaatgtgaggcagttatgttgttacatttattct

SEQ ID NO: 49804 - DNA, 1446 bp, Cannabis sativa
ttttaaaagaaaaatatttaagtgttaccaaacgccaccttaaataataattctttaaaaaataagacaaatatttaaataatcttaagaggagtttagtaacacttttgctttttaattttttgatcacaaaaatgaaagtaaaatttgtgtttttataaccacttttattttttaatttgaaaaacataaaacaaatgtgtgttctataacttttatttttatttttatatatttgattttatttaagtcggacctggtgctagggccgtggtccggatccgagactggggctgagaccgtagtccgggtaccatggtcaagattggggtcgaagtccaaaatattgattaaaaaaactgtttaaaaaaattttaaaagtaattttttgtttttaaattttttaataatttttaattaaaaaattaaaaaataatgaaaacagttttatagaacatatttttaggaaacatttttatttttttaattaaaaaaataaaaaattaattaataaacggttaccaaacacacccttacttaatcatttaactaagatatttgtaagaaaaagcacattaatcctctaaaacaatttggaaaggaaaaaaaaactaatacacagtttattaataaaaataaataaactcattaatgtataatttatattaatcttttatatgcacagtataatatatatttatttctttaattcttttagtggtggtgttattttttaattttaataaaaaataattttgttttcactaaaaaaaatatgtatacagttgtatatgatgtgaagattaggtctaatttcaatggagttttatacgagtcatgttttgttttgtttctatatttaaatgttgcttgctctaagttatagaagagatagtgtataattattcttcaaccatattagttagtacatccttaatttagagagaatatacacctctaacaacatcttccttttacatgtgggactaatatttccataaggccactttaatcaaactttacacttttcttaatttttaacaatttcacatgtaaaagttccaacatgcatattatcttttaagtttaacaaattatatatcttgacaagactttagctggttgagtttttaaaagcttcaatattgtttcaattactagttgagtaattagtgagtttcaatttttattttttttcacgaagttttatataaaaaaaaaacttggtaacaataatagctttgttaatcaaattttattgtaccactactatcttttctaatactttgtgttacaactttccaattattgagtactttaactccaataataaacaaataataagaaaaagtataatttttttcatagtttctccctcagttatcgttaaaattaaatatatatatatatatatatttatggatattcttaatgggtattacccat

SEQ ID NO: 49805 - DNA, 1011 bp, Cannabis sativa
gtacaatgataatttatattaaatattttcgctgcatacttaatttaatattataaaaccaataaatggtattaaagttggttctattatgtatatattaaatgatgtgtgggttttcttacattatatatatgtgtgatatgtatatgaatggatgatcatgtatattgggaatgtaaatggttaaatgatgaatcgttaattttatggtaatattatgtataggaactacttttatttttcttagaaaaaattgtaagccattattgaggcataagaattttaagtaatttattctttttgaaaataattacgttgtaatgctatacgcacggagctcaaattttttgagaatgctggttgtctattctacttgcatagagcttggattacctttcgaattcgtctgtgtttttcggtgtccactgcacggagaactgtggtcctcatgagtttcatgcccaactgataattgcacgatgccatgcatgcttgcatacaaatcagaagtaagggacgttaatgtccagacgaaaccaaacgagccttttggctcttgtccctctcggtctgattggactaggttgcttctgactgaggtcgactggacctcatggtcctatccctcgggcctcttgtagtgtcacaactcctcactaagctattcggtgattcctgtcccttaccgccttggtgccatgcgactgaaacgaagacctaactaggtctcaaggtcctttgatccgtgtgtgagccttgttataaaatcgttcaaattctcagatccctgacccgggtcgtttatctcgtctaatggccaccatagtggctcgtccgggagctgccgactacaatagtattttatggtggccaccttgtaaacttcatttttctctcttgcgcaaattatatacatatgatattatgctcaaaagatcaaacaacatccaatccgcactaagtgcggattttatattttggatccaatccgatccgcataagagtttaaat

SEQ ID NO: 49806 - DNA, 707 bp, Cannabis sativa
gtatttttgtaattttttttccttttttgtatttttttgtttttttcccaataacatatggactattaaatatgctaaaaaatatcttaataaagaatattaattgagaatgtttaatattcaaaatattatttacaatagtatattaataaaaactaattaataacactcaaaaaaaaaaaaaactaattaatatatgaagagaaatttaaattaatcaataaaataaataaaatatggttacaaaaataaagccacatatatgataataaattgatataaaaactatgagaaccaatataagataattgagaattgaaagatacaatattataaatcaaaccagtaatgaaacttatacaaaataagaaatattaacatttatatacatttaataaaattattttaacataaaataaaactttaatttgatttgtaataataactaaatcatataaaaattaataccaaaatttaataacaagattttatcaatcattattaccacactaatttatatataaatattgtataaatataccacatctaattttatatataaatattacataaatataatttaatataatatatatattacaatataatttacaaaaaaaaaaaaaacactaaatatagtcaggttcttgttagcagagtttataaaagtaaaagacgaagagagtaaaccacttgaggctagctca

SEQ ID NO: 49807 - DNA, 2008 bp, Cannabis sativa
  modified_base (784)..(787): a, c, t, g, unknown or other
taaatataaaattggtatttttatcatgtgcggtgcggtgcgggttgaaccgcatattaacaatttaaaaccgcaaaccgtaccgcaccgcgcggtttactaaaaaattcaaaccgcgaccccaccgcaaagaattttaaactgcattttttttgtggtgtggtgcggtgcggacactttgagcggtttgatgaacactcctaatcattaccacattaattattcgaaatatgggtataatacaagtatatttataaataaaaaaaattgggatataaaattgtaaataaaacatgaaaaagtatttttgaaattcttctaaaatttattagtagagtttgaacaattataaaaccacttgactcctacaaagtatgactccctctcaatattattgcattattcctagtccacacttttgtaatctaacttcttgagacgttgctatgttgaagcatgctctcttactcccaaactttagagtgatcttctttcgaagatcatttaaacgttcagaatgcttctccaatttattaagaacaaaaaaggaaaacaatatcaaaagacaaagccatagagataaacaatctaagttttacaaaaaaaacttttcaatgaaaaatgatattaaagagaatggaagaggtaatctcagtctgcacctatagctataggagaatagttggtttcaaatataaaaaattgttacacatttctacaatactcaattaagtttagaattttctacacatttgtagaaaaacttactctaaacttttagatnnnngtaaaataatttagaattttctagacatgtgaaaaatataatagaacatagaatttttagaaaactttagtctagagatttctagttatgcatgtttaataaatatgtagaaatatatggataaaattcttgaactagaaagatctagagaaaacaattctagcttcaaatgtttgaaggctagcaactataaatacccattaagcttttccaatggtaaccaacaccaaacaaccaacatccaaactatcaataaagcttactaccttctcatacaaccctctcttctaagccaaaactgttctcatatactaaatcaacaactactcatcaatatcactacttcaattaccataacaattattaaacacttattcctcatatacacctatttaaatataaactaatacaaatttattctcaatccatcaggaaacaatagaaaaactattccaaaaatacttatcaatcaccaataaatgaagataaatgttgttgtatcagacgagaaatctaatggatcaccacatctcaaaattataaggtgagatgagaaacatgtagcagaaaaatctctacttccacgcatggataatatgtagaaatattgaattaattgcatgaaaataatttattttcactaattggtcatgtgcaaggacattattttcaattaattccatcagaggtcaaagtggcaggcttactcaaaaacacattttcttgatcctagaatcttgtgtagccaattaattggtctacctacttatcaaatttgaggtgagatgttaatctatgtatttagtttttttctttgctggggacccatgtaagtggttagttctattagtttctgtttcagtagctaactaattctggggttagtgtgtcaaatgcagctaacacacacttgtctattttcaagagcttttacactcaatacatatataggatacataaatggagtttgtaagtaatttattgatgagagatactctgttattctagtacataatatgatatgctctagttgtttaaaaaaaaaagacaaaaaatgctctataaaatgtcagaagtgggatttgaacccacgccctctctcgaagaccagaacttgagtctggcgccttagaccactcggccatcctgacgtcttgaacaaacgttgtacaattaataccaagtacatttgtcgtcaaacagaatttttacatgataata

SEQ ID NO: 49808 - DNA, 1698 bp, Cannabis sativa
atactcaggaagaacaacctgggaatataagggatgtcccaatggataatcaacctaatccaaataatacatgggaccaacaacatcgacgtgatgttccaagaacatcccatggatttgcaaaccaagggattgaacgaactgatatgccaaaatcatctcgcatgaatgaagaggctagacaacctcgaccaagaaactagggatttcctcgtgataatgaaaaaaatcctggaaaccaacccaagtccattggtctccccccgagacacccacaacggccttctcgcacggatagaaagaatatgcacacttactaaagtacggcacatgtgtctaatctctttcaaagaagaagaccatgcgagatgaagcaagctaaagcacaggagaatcgcgatcccgcgagcatagtaggttgagtagacaaacatgagatggaagtaggtattgacgttattttgctgaccagtagagtataagtaactcacatagttaccagtccgaaagctactcggagaccacgtctgtaagtaactatgagcataggcatcgcgaaccttatttacacaagagattaattgaaggcagccagaattcacgatcacttatattgaaatgcgcttgatttacgttatcaacttaaccgaaatgcaaatcaacaacctgtggatccaattcaattacgagtaattcaattggagaataaatttagaaaatatcaagatggagaatatgacaagttgttaggatatgactcagacgaagaaactgagccattccatcttgataacttaaatttagagtttcctcaaggatttaagaatttgcatgtctcgcaatacgatggaaccacagatccagacgcccatttgaacaattttaataccattatgcgagcaagcaatgtttcaaataatttgcgttgcatattattcccaacctccttaataggattcgcaagcatttggtttgataaattcaccaatcattccataacatccaaagaacagttgtcaaaggatttcaaaaaccagttttaggctgcatgagatcgtcgaccatatgcatcatctttgaccaacataaaacaacaaccaagggaatctcttaaagcttacttgagtcgcttcagtacggctgctgcaaaagtcaaaaacctgaatgatagcattcagttaacaaccctttaggctagaatcacgactgatttgtcaacagtcgggggagaattatgggatgatattcaaggtcgccctgtaaggaatattaatgaatttattgaaagaacatacgtttttgtgcataaagaggaagcatggagtgaaatgaagctgttaaagaccagcttaggagacaaatctaacacaagtactgcaacagcaagcaccgtgacaacaaagataaaaaatcccagtggatcaaataccaaaagaaaggatgagtcaaaagaatcatccaaggacaagaagaaatagaaaaagcatgagaagtttgtatccatttattcagtatatatagtttaatgaaactcgtgagaatatctacctcgccaatgagaataaggtcgcattttgccgacaagaaccaatgaggcatgcgaggaacaaatgagattcaaccaagtattttcgtttccacaaagacattgggcataccaccgaggaatgccaacaattgaaagatgagattaaaagt

SEQ ID NO: 49809 - DNA, 1265 bp, Cannabis sativa
  modified_base (1153)..(1156): a, c, t, g, unknown or other
aaatttagatgaacattaaaaaaagaaaaactaaataaaaatgcaaggaaagaagatgcgaaatacattaccaagagtttttaatccgtttgctcgtgcacaaagctagtatccttgccacactattatgttaaagaacctaacataaatatataaatattgacaaaattatcacaatcatatattgatcaatatcatatatcagccaataaaaaatattcaagtatattgagacccttagaacaagggagagagtagcctcgatatctaccaattgagcttcctaagagaattgattttgcttgtactctttaaactctttctttcttcaacattcagtttcttttcatgtcctcttgtagctgaataaaagaaatcgctcttatggctacgaccactggaaaataacaaacactataatctctacttgtattatatacagacataaatattcattctaaatacattttttcctatcggtaataaatggtacaagcactaactactaagtctcattaaggccttctaacaaacaaattatctgcaagctacggaagaaagaaaatatggcaagtgtcacacaagtgtaagaccacaaaaacaaaccaagaacaaataatcacaaggaaaagactaggactagtaatgtggggtttagaacacttaaacaactaactaactgccttgacatgggtcctaactaacctactgctataaatagaaaacattacaactaagagagacagagagagagagagagagttggggaggctgatacacaaagaagaatgagagctttattgagatgaattctcttcaagtttggggtgttacaaggttgttcaggttcaagatttcgactgcctttagtgagctcattttgtaattggtgcgaatcaccattagtgtgctttgtgttcttgattctccattgttgtaagttgtaatctttgccattcaataataaaatcatcacagccaatagagttgtttctacccggggattaggtctaagttttatccaaaacttgtgactgaacctcgttatttcttgctgtcaatttacttttctggtttatagtttctagtttaatgttctaagcctatttcctttcttgcattgtgttcttgtttgtgcttgagtgcacaacannnngtatcagagcactagggagatcagggatcaaattcaagaaacatttgcaagaaaatcaagattgatgcaagatggcttctaccaaattcgaggtggacaaattcacagg

SEQ ID NO: 49810 - DNA, 2092 bp, Cannabis sativa
tcccaattccttaatttttatactaatcttttcagttctcaaggagtctgtgatgtggctatcaattccattctccaagggatttctcccagactctctcctgagcaatcggtgttccttgatggaaacttcactgaggctgaaatcaagcaggctttatttagccttttaggagataaagctccgggccctgatggtttaaaccctcttttttattagaaaaattggtctatctttggcccggatctctgtcgtgctatgctttacatcctcaatcatcaaggtgacatttccttgatcaatgatactattctggttctcatacctaagaagaaaaatcccaaaactgtctgagacttcagaccagtaagtctttgtaatacattgtacaagtgcatctccaaggttttttctaatcgcattagaaatgtcatgcactcgattattagcactaatcaaagtgcctttctcaaggggtgtcaaatcactgataatatccttatagccaatgagatcattcatgccatccactcaagacgttcgggtaaacttggttgggctgccattaagctcgacatggaaaaggcttttgatagagttgaatggcaattcattcatcatctgctcactcatgtcggttttcctccttcttttacctctcttatcatgaaatgtctttctacagtcacttatcgtttatctctcaacggtaccctctctgaccctttttaatcctccggtggaatccgacaaggggatcctttatctccgtacctttttctcctggttgctgagggcctttctgctgctatccgtttacacgaggctaatggtagcttttcgggcattcaaatttgtaggggagccccttccctatctcatcttctatttgctgacgatagcatgctgttctctcctgttactcctcgctccagtgaggctcttaatgctatccttctcctctataatcaagccactggccagttggttaatagagataagtcttccattctattctcccttaccacttcaactgagtctcagcatgaatttcgtacgtctttgcatctaactggggaaggttttgttagcaaatatctgggagtccctcactgtgtgggcagggttaccaattcagttttccattatcttatccaaagtgtttcctcccatatgaatatatggaatgataaacttttttccagagttggtaaggaaactcttattaaggcggttgtccaagccattccctctttttccatgtcttgttttaagatccctaaatctatctgcctcaaaattcagagtgtaatatccaaattttggtggggttcttcaagggctaaaaagattcattggaaaagttggtcagcaatctctgtccctaagttttttggtggtttgggcttttgaactctcacttaccacaaccaagctcttcttgccaagcaggcttggagaatttggactgatcctggctctctcctccattctattcttaaagctcgttactttaaaaactctgattttttgcaagcccctaatgagtataactcttctttcacctggaaaagtattctttgggggcgtcaactgctcaaaaaaagtattgtgtggaagataggcgttggtaataacattcctttgtctgccccaaactggatccctggtatctctcatcccaccgttatgcaacccattgatccccttcatgcttttgtttctttctttatcaaccctgatattacttggaatgtccttaaactcaaacattattttccttcatatcaggttgatcatattctacagatccctctggatcctactatggttgactctctaatatggggtcctcatccttctggccttattactgtcaaatctgcttatcatctagcctcatcttctacctccattgcctcatcttcctcctctaatccgaaccctttccagcagtggtggaaagctctctggacacttcatgttccccctaaaatcaagcatttcacttggaaagctttcaaccatattttaccttgtgccttaaatttgtttcataagaagattctcccgcagccatcttgttcagttt

SEQ ID NO: 49811 - DNA, 909 bp, Cannabis sativa
agctttgtttgagaaggaaaggacatatggatttggagttgtggctcgtgattctctcagtcatcttattgacttaacaactaaatatcatggataaacataccctgcagaaactgttgaagctcttggtgtcaaagaggctctcagttggttaaaagataaaggatggagtcaagttgaagtagagacagatagcatggtaaccgtccaagcaatcctttgtaatcaacacatgacttctgtttttggtttaattgttaatgattgtaaaaacttattatcttctcttcaacatgttagtattcgttttgttagacgatcagctaatcgggtcgcccactttgttgctaggcgtgctcggttcttctctgatcgtagcattcatgagggtgttgtccctaatgatcttcaaactcttttgtatgatgaatgctaaagttcaatgaagtacacatttcattttccaaaaaaaaaaaaaaagtaataagctttaactatatatcttaaatagagaatataatattaaatttcttccttaattaataaataattttatttatttactatattatggtggaaaagtaattatatagtgattttgtatttttttttagagttagatttagagagaatttaagtacagaatcggtgaacatattataagatatgaaaaatcttaatcttttattttttagagaataaaatctttttaagactttttagctattttatttattttttgcttaaaaaaagattaattttgactaataaacaattacatagtatatgttttttataataaggttagtgtttataatgtttgtgtaatgtacatatagaagtcaatattatatatgatgagagaaacatagtatactaatcaagagggttttttagtaaattattatt

SEQ ID NO: 49812 - DNA, 2116 bp, Cannabis sativa
  modified_base (827)..(836): a, c, t, g, unknown or other
aaatgcagttattatttgagaatcccactactgtgatttaaaccgcttttaaagggtcaacgctaacgttgattaagatacgctgcaaaacgtatctcgctgcggcgtctcgcttggtacatgaatagcttggtttattcataagtcttccagcaatggcatgagcaccagtgtactgagcaaacttaagaactgctctttaaccataaggccttgcaaactggacaatcatgtcttgggggttctcaatagtaataataaccctgacagcgagctggagtttaccaggagtatgcgttcctatagctagatggatgtctctctatccattatttaggtccttcaagctgttacacttagttaatataatgtatattttacgctaagtgttctaatggccaatttgccttgtcaacacctctttacatattgcgaggtaaatgcctcgctatgtattatggatgtccttgcgattacgtcctctgactcgaagtgatttctcgttcatacgtgagtcaatagttcgtacatccttgtctcactaaagactgtgcagattgcgagttataaatgtaccatattgactctgcagttaatgagttattccatttaatatttttttaatataattgccactatatttgctcgttcatattctccgcgattaacacgtgtcaccttttgaagtaccagtcgaaattcgggtataacaattgtcccttaaaaagtttttttcaataaaaagtgatttttaaatgattacagagggtatatttgtcataatttattttgaagaaacacatgcctttgattttggcggttttgtnnnnnnnnnncacatcatgagcattaaataaccatcttttccacttctctcttatttctacccgttggatcatttttttccttaatctgacggagatcaacccaatggtataaaactaaaaaaggaaccaccttttcatcactttgccatttcaaaaattcttgagattctcttcaaaaaactccacccagattatatgaagctttgcatgctatctttgtctttgacatacttcttgtgaatttcatcgaatttgattttcgaccttaagtattcaaagagatcaccgcgccgttcccctcatccccagttgcagagtcgttcatcgctccacaacccgatttcaaacagtaagtgtctcatcccttttttgtgtttttctttacattcctcggtttgatcattatttttatggtctacatttttgccattccaattggttttagtgattttgtaattgaatttttaccaattctataggcccatttagaaaagagttattagagaattaccttgatactgtttgatcaagaagattttatacctctccaacttatgtacacaaattgttttcatcagtaattcactttaagcaatacatgatcattgtcaatttatgtctgacaagtgtgtacaagtttgtaagtctcctctactaaaataaaaaaaaaaattcgggttcacattatttgtaacatgcatatctttttcctcaacatctactaagtatggtttgttcttgagatactaattagttattctcttttgaaagcataacatgtatatttgtcattggttatgaattttgattagttggttactttagaatacattatatttattgtgcatattttattttgtatttatttcggattttcaaaaatataaaaataaataaaaaagagagggaggcgttggtgacttggcttgtgggctaagaaaattttgtgcttttttggtacatttactctaaattgatttttttataagttactttttaaaggttgatatcttattcattgtaatttgtcattgatattgcctatatttgaaaagtatcttggttattctattttccttttattttttttaaaaaatatttttggaaaaagagtggggcggttattgcttgttcgtgggctagtggtttttcaaatttgaaattggtttccttttttgctccactctctcatgtttatttaaaccaattctctttgtcatttattcttaccacctacccgatccctcttctttttgttcttgtttctttgcttctctttcttactttta

SEQ ID NO: 49813 - DNA, 843 bp, Cannabis sativa
tatatataaatatacaagctatgttctggctggaaaaaattcaaacatgtaaatacactaatgtagtaaaatctctataaacttaataacgtcgtgatattagaattaatcccatattgttaatgtgtagaaataaattgtcaataagataaatgagttacttctgttattgcaaattagttttgagatacaacttcattcactttatcttgtgagcccaaagtgctaccggtccaaaaagtcgacccaaaataaaaacttatgttgtctcccctttaacctctatttgaaatctttcagccaatgtgtataagttttcagtgtggggatctttgacctatttcaaaatctaaaaattttccgatgtgtacacctacaagtcgtttattatacttaaaagtcgtttattatacttaaattttttaagtccaaacgtgaagaatgtatattagagtctcatattgttaatgtgtagaaataaattattattatataaaataaaatctttttaccaattaattttgagatgaaatggtcaatcactttatctaaaactctaacacatgagactacaaaaatataatttaattgggattattaattaattgtgttaatttataaattttcttcaaaagagggatcagaagtattctttaatggaagctattaatttatggaggttatatactaaacaagtacatataagaaggccattaagatcaggatgggtaccaattcctatcctcaatgaaattctctaatcagatcataaattgatattttttttttttttatgaatcaataaaattttattgctcaaaaactattttgtacaatcaaata

SEQ ID NO: 49814 - DNA, 2021 bp, Cannabis sativa
gaaatggtggatgaagacaatggagacagggctgtggggcatatttttcgaaagagaagacgatttgaagaacgtcttaaatggaagaccctggattatggcgggccagatcctgaacttacaagaatggcccaaggatgggtactggcatttggtggatatgagagtggcgaaagtttgggcacaaatccatggcctcccgactccctatttggcggtccaaaatgctccggtcattgagggtaaggtagggacctttgttaagttcgatacagtggatcctacggtgaatgctagaagaggctttctaaaactaatggtggaaattgaccttaccaaagaattccggcagggttccacctgagcattaacagaggtcggaaagaatgggttcaattcaaatattgtaaaattcctttggtttgctttaattgtggttatttatttcatgaaagtaagaaatgttcaagacaaatggaatatgtgtatcctccgataggggatgctactcctctatatgggacgtggataaaaaccaactcagtggcccgaagttgttttgatgggaatggtaatggtggttctagaagagacaactcttgctctgagagaatggtgcgaggcctgcaatccctcacgattcaggaggacggaggtgacggtgttgagacggtggaaagagtggctggtaggatcgggggcccacgaaagggagggacgttgagttggaggaacaacattcaaaatcgtactgatggtacagggagtaacgaattggggaaaggtgctcaggagaatgtggtgaaaacgacaagtcatagtactaccaatggggaccaccctatggctaacctgggaaagaatcctagagatgaagaggtaattctatctttgatgcccaatgttgggccttcggcggcccaaatgcttgattcccccccagaaagtgtgtaaatcaaggaccccgcaccaacatcctgaaccaattcctattaagtggaatatagggttgggccttgaggaaaatatggcccatattgtgaaaggaagtggtgacattcctacggctgaaaaaattgtttttagtcagaatgaggaaggaattcaagcccaagctttacctgggccaggccagaagaaacgaaaagcctcagtccatgtgatccccattgacgaaatgggccatcctctcccagacgccttagtgagaaacatggactcagacaaaatttttgccccagaaggatcacccgtctttgtgattgggaaaaatgataaagagactctagcaggaggtgggaaactcatgaacaattcttcatctagtaagaagagagggagaccaaggaagagtgctacgagtaaaagctcccagaaaagccatgaaaggggtgtcggggttgagagtaggggactggaggaactatgcgaagcgggggaagtttttgtggacatttccattcaataggattttcagatgggcgaggaggcggcccttatcaagccccccccatcctcatgaagtgcttattcctggaattgccgaggtttggcctggaccaaggcatcccaagctctaaaggcttggacaagtaagtttcatgttgattgtatttttctaatggaaactaaaattgggcgggatcatatggatttagttcgaaagaatttggggtttgattacggggaatttattccatcagaagggttagctggcggtttttgtttcctttggagagctgaggccaatgttaaagttctgagaatacacaattctgcctttgaatgtcgtctgtgggagcctcaatgtcaaaagttctggactttgtttgtggtgtatggacccccttatgacgatgagaaggcttggttctgggaagaattcaccagctatgtttcgaaggaagaagaaccgtgggcggttatgggcgatctaaatgtgaatttgaatagagaagataagatgggagggagacgatttttggagaaggatgggaagatcctccagtctttcctcgatt

SEQ ID NO: 49815 - DNA, 2016 bp, Cannabis sativa
tgttcctgatttgtacagtaatgaccagcgtcttcttctgtgaaggagatcgtgggctctatgggtttttgtttcttagtgcttctatctttgacaactagaataacacttttaggctcatgaagaagtttccgagcatagcgctccctagcctcactagtctcacctgtaatgtggggtcttcccatgatgacccctagatgtcttgccactggcggtggcattggatctcttttctgggcaccttgtgcttgagtttggtcatcttgcacataacaatgcaagtagggattattacgccttatgaggtattcaatctctctgttcaaattttgacactcattggtgtcatggctgaagtcgttgtgataccgacaaaactttgacatgtccctcttttccatctcccttttgataggaaagggcttttggcatagaattgttccctgagtggccatgaagatggcctcaggtttctctattaggagggtgaagcaggtgtacttctcctccttgttcttttgtggcgtgggagaagtgttaaacttccctttttcgccattggtcctccagagttgttggtgttgcgcttgtttctagtgtttttgccactagatgtttggacagggttattggtatctgcctatgcgcctggtaggtcatgagactgtcggatgtctcgtggctgcctattattgacatgccccaactaggcttgtcgtatggcctcctcaagctttataaagccatcaactctatcaaggaattccttcatgttgttggtagagatcctctggatatctttctagaaattgttcaatgggagtacgccccccagtatggtcatatattggccctcttttgtaaggtcttttactttggttgcctcagccaagaacctctagatgtaatccttcaaaggttctcattgtttttgtttgactttgacaaggtcttctagctacgatggtacaagtcttaaagacaagaattgtgtgtagaactcttgagagaactcagcccaagagttgaatcttcctggggtgagttttaagtaccattgtcgagttatttttgacaaagtggttgggaacatcaccgtaaaccttctgcagatcaagttgcatcttgaagtatttgatgtgggctaacaggtcttctcgctcagtatacatcttccataccggcatcttgaacttagacaagggcaagaccttatgtatgctgagaatgatctccttgaccgatcaagttcaagatctaaaggctttggaccagctatgccttgaatcatgtccctaagttcgtccaactgttcttgcacagaaggatctattattgggggaacttgactgactggccctccttgaaggggttacagattctaaagagacaggggtggctagccataccctgggagagtgtatggtgaaagttagctagacctatgttaaactgcagaccctagatgaccattctcagatatgggtgttggctttggccggctaggcctacacttagctgttatccttggtctaccagacctgcattgggtagggcctagccgcccactgctccttcatggccagccagacctgaaaagggcaaggtctaggcacctgtgattcctccatggttgtctagacctacaaaggacagggtttggccgcccgtgatgctaccatggccgcccagacctacagaagggaggatttagccacccaagactcctcaattgattgaggttggttgtgtgttgacagaggtagatcacaccaattgctagagtttggtggatctagatgtctgaagtgatgggtttcacttcatgaatttccattttgggtgtttccacccactcccagtccttgtcatttgaagattgacctctgggcacgtctgctggtgtctagtcagtcataggttgtacaatgggggtgttgctaagccagagatccctggcagccccccatgccactggtcaccgagatttggctattctcaccgttagacctt

SEQ ID NO: 49816 - DNA, 1296 bp, Cannabis sativa
cttggaggtgtttgtgtaagcctaaggctgcaggtggtttaggcttcatgaacacttccgattggaatgaggcagcccttttcaaacatgtttggtccattgctaataaaaaagataatctttggataaggtggatccatagtgtttacatcaagaaggaagagtggtgggagcataaagctcctttgaatagcagttggtattggcgcaaaataactgagggaagagataaagtgaagcagttgatgaacatcaacactttcgcctcaaaccagtactcaatagcagctggttataagctactgcaaggggattttgagcattattttttgagcattatttctggtgcaagggcagctggagtagacttaatgtgcccaagcacaatttcattctctagttaacaatgcaaaatcaactgaaaaccaaagatagacttgctaaatttggaataatagatgatgaaaactgctccttatgcaactcgacttatgagatagcagaccaccttttttttgcttgcagattctcacaggaagtgctgcaacaggtgaagctttggctggattgaagggtcacttcgagcagtctacaagctatggttcgaagagttgatagagggaaatactccaagtttaggaagaaagtgtattatgcagcaattgtagctttggtatactctgtttggcaaaagagaaatgctcaaatcttgaactcaagcatgcacacagccggttctttgctgcagcagattaaatgggttttgaaacacagaattgcaagtgtaatgccgaaaaaaagtagctgagaaagatagactttggtttagtaatctttaagaatcatttgtcataacacatataactgtatagattatacaaaaggccttgattaaggtgcttttagattgtaaatgttgtaaatggttgtttgtgcaatgaaagttctaattcatcaaaaaaaaatgatcatgttactctgtttggtgtaatttctcttaaacaaattgtctttgagcggtttaactgattaaagacatgaaataaggatgtagaaacattgacgagctgttatttcaaattaaagaactgcttttgcttacacccctctgttatcagtttgtcttttatttttagagaaactaattatgtggctcacattttagctaatcaaattttgttatctaaagctagtgtgtcaccctcttatgttcgtcatgctctttgagttgaggagccatttcttttgtaatcctttgggtttatgaatcaattctttatcaaaaaaaaaaaaaaa

SEQ ID NO: 49817 - DNA, 1812 bp, Cannabis sativa
atggcttaacaaatttgttacaatgctttgatttagttttacccaaaatatatgttaaaattcaatggattaacagggaaaaaaaaggacaaaaaagaaatttttagtgatacttagtattaccttgtagaaattttttattcaattattatattttgaaaaaaaaaaaacaatttttactttcaggtatgagatcagggacaaaattatgtaggatattgggatgctatggctcccatatattttttgagaattcttttaatacacataatttatataaattaaattaagttcattactttttttattgagaagattaattgatctttgtgttagaaatttataaaaaaaaccatgaaattaagcatgtcaaaaaattcatttacttagagtgggtcggagcttcgatctaacgcatcatttctgatctgaaacattcagataattattgaatctcagatcagattcgttccgccccgcctattttttttttcgaattgaagctgatccgaatgggtttcaatatattagaaaaaacttaatttaagactcggacctcggacccagaccccctgggacctgaacccgcccaagatctaaactcgaactggggacccgagatcaaactcggacctgaacttggaacccaagcccgggacccaagcccaaacctaagacctggacccggaccatgaccataacccgaaactaggaccggacccagacccgcgtttcgggtgccagacctgaactcgagtttggacccggacccagccttggacactcgaacctggacctagactcgaacccaaactcggaacccagtttggggccttgacctgggacctagacccaggaccagacccggacccagacttggacctaaatccaaacccagacctaggacccatacccgggacccaaacccgagacccaaacgtgggttgccaggagttgtgtttggactagctgtatcattcataaaaagtgactacattgtcaatcatagacctcgaagcaaagtgatactagaagaactagagcaaagtttgacttccaatattccatcatcgtcaactcaagttgataatgatattcccacttttttttctgaattgacccatgtcaataataaagaagaaattatcattgaatttctaagtttgtcacttacacaatttcatgggaggatttctaggaatctagctcgttacggacttgacagtgaatccaacatggattgttaaagatacaagtgatgataatttattgacctatgtacaaacaatgactagtcttaacaaaaatttatgaaacaatgccatgaatcaagtggattccatgcgttcaaattctatctaaaaacttgtacttgcatctgatgactttagggctatcgaatgcaagtggaaatataaagaaaatgagatgttgatggaaaagtagagacattcaaagctcgactagttgtcaaggagtgccctcaaaagaatgtgtggttggattaattttttatgaacaacttagggtttgtgaagattaacaatatttggttatattcaaaattatctcatttttatgttttttttttttacaaatctttttagaaaattttatctcctaataagcttccactaatatatttttatctgtttcgatatgcagagaaaaaatataaaccaattttttattttttacactttctaattagaaatttttacatgaaaaatccattttacacaatttattacaaaattactcacacacgcctatgactacatttttacttacaaagttgcttttattacacaa

SEQ ID NO: 49818 - DNA, 2230 bp, Cannabis sativa
ttttttttttttactaaaacacaacattcctgtaattttaaacctttaatacagtatttttgtaaacttaatgcagtaaaaatgtaaaaatctttatgtcccagtattttgttaactttcccaattttctagtatttttgtaattaatttaatggtggacttggactgggctttatatgaacatacaaaatcccaatataaaattggaggttattagtttctaatggctcatgttgatatacagcccatgtttattttggaccttaactaaaaacatgatttctgacttagaatttttcaagttgtaattattataatttcttacattaaaaacccaaaactaacatattttcaaaagaaagtgcaagagtattacttaggctatgtttagggggagggagagactgtaaaatgaatggagatgattgttaatctcttttatattatttgatattaggtgtgatgtgggatggacaaaaattaattagtaaaattataaaattattcttttgaaaataaaaatttattatatttttaagagtaaatattatattttgcaaatcatattttttctttttctataattttccgatttaatttttaaagttcagagggagagattctttctttatcaaacaagtgatttagcttcttcttttatcattctccttccacccatctctcctttctatcaaacatattattagtgtgggtctaatggtgacaacccttgccctaatttttttgaaaattttaaaattattaaaaaaatatataaaaattattttttttatatattttgacaggtgttggccccgttaaatgttgggctggttccaccccatctaatacaaaggtgtctaaaatttatcaatgataggacttaatatgatgagtgtttactatataaaaaaaaaaaaggttaataaaagcacttgcaatttttctatatgaagttggtactaagagttgattgaagattaaaaccttacaaccactagaaactatttatagctgtaaattagcctccctttgaggaaaaatgagggttcataatcatatatgtatagatatatatatttatatatatatataaaatatagggtttttttcacagttttaatttaattagtaattgaatttaaaaaattatcatttgatccgattcaattgactttaaaatttaatctaattactaattattaattgaattagattaattttttaatttgatgtccaattatacatttaaattttaatatgaatttaaaaaatgaagaaaaatacatataaactaaatatcaccctttatttacgtttagtaccccataaacataccatcgttacaagggtaatgcaactaaaaattaaaataattaaaacaacaatattgctaagtaataaaatagagcaaaacatcattaaaaataaatacacaaaataatcaagtgttacaaattcagcacagaaaaaatctaataaaaatataattaatatatattatatttttcttaatattttttattatataaattattttttaacatatataaatgttttaattagattttgatattgacatctaataactgatttaatccaacttttagcatccaatccaatttaattgtaattaaatatctaatttttttaattagattggattgaatagattctttcaattaaattagattgatacccaccctatatgtataaaatatatacgagtgtttaccatctagcactaattatcaatgggggcacatagaaatgaaagctaaacaaaatttggtcccatcccaattccaatcatactaggtgtaatagtaccccaaaacatcaaatttagaagctgctttctgaagcaacaacgaatgcataaacataaccccatcattctcacccactttgcactcatattccaaaatcaaatctccttttttattctacacatattgttgtttttgcatcaccaagcaaattatatttttcgatatttatttgaagtttttttatttttgtactttaaaatatttttttttacgaaaattctcataaaaatctacatagcaactaatagagcaacttaaatcgtaattacaatttacataataatttatataatagctattagaataacctaaaccataaattgaaaaaaaaataaaaataatatataaaataattctccttaaactatataatataatcccttttcaaaaaaaaaaaa

SEQ ID NO: 49819 - DNA, 1473 bp, Cannabis sativa
cccgaaatcattttcaaatgcttccaaccttgagatgcttgatatttctgaaaatcattttgtgggaaaagttccagctagtttggggatcaatcttccacatcttaggagactcaatttagagctaaatcatctaggaaactacttacctaatagcttggactttattgcatctttaataaattgtagtcaaatatattttttgtctttggcagataacaacttcggaggtcctttgccaaaatctgtatctaatttgtcaactcaaataacttatctttatcttggacagaatcaaatatctggaattattcctccaacattaaaaaacttagtcaacttaatcagcttaaccatggagtttaatcttttggaaggtgtcattccaagttctttagggaagctaaggttcttgcaactattattgttgaataacaatgcattatcaggaaagataccgtcatccttaggaaacctcactcaactcttcattcttaatttagaaattaacaatttagatggaagcataacacctaacattgtatactgccaaaaactgcagcaacttggactttcacaaaatagtctaagtggaactattcccaaagaactttttggttttccttcacttcttgtactagacttttcaaaaaactcactcaatggtagcataccagcagaagtgggaaaggtcaggggtctagagtctttggacctctctgaaaacaatatgacaagtgaaattccagatacaattggagattgtagcagtctccaattactttccctgcaagggaacttctttcaaggacttcttccttcttctttgactttccttagaggtctagagtacttagatctttctcgaaacaacttgacaggaaacattcctatggatttaaataatcttaaattcttgaattatttgaatctttctttcaatgaccttgagggagaggtaccagacaaaggcatctttgaaaatactactgcaatatcaattgttggaaatgccaggctttgtggtggtgtaccgaagttacaacttccaagatgtcaaaaagccattgaatccaaacaaggaaagatgaaagatcacaaattgataatcataattgtttgtctgattgcatttattcttttatttgtatcttcatcatctttgttttggagaaggaaatcaataaagggatcatcatcatcaaagtctgaactctcatcaatcagctttctctcaaaggtttcatacaagagtttacaccaggccaccaatggattctctcaaagcatgttgatcggaacaggcagctttggctctgtgttcaaaggcatacttgatcaagaagaaaatgtagttgctgtaaaggttctcaatctaaaccaaaaaggagcttccaagagtttcattgctgaatgcaacgcgttgagaaatattcgacaccgaaatcttgttaagattttaacatgttgctc

SEQ ID NO: 49820 - DNA, 4028 bp, Cannabis sativa
  modified_base (103)..(105): a, c, t, g, unknown or other
  modified_base (1090)..(1094): a, c, t, g, unknown or other
ttattatttaatagagtgaatctatattcttaaaaagaatgtaccgatacactttctatttattttggcatctatttttttagaataatttacaatataaaannnaatgttcaaacagtctattttacatgcatataaaataaaatagttactcgtgtaatatcttgtttgaaagttgttttcaacgtgttaaacttttctaaatttcttaaaattttatagaatgttttaaataagtataatttaatgacatgagaaaaaatttgactaaaaaattattttggatacttaaaataatagcaatgtatcagtacatccattttaaataagtgcattatagaatttttttaataataattaattattaattgaataaaaataaataaataaatattaacttttataaattatttttctaaatttaataaaaaaagggaaataccaaagcaaatagagatataaagtaggggtgggcatcatccaatccaatccaattaaaccgaaccgattcaatccaatccaattacaaaaagttggatatccaattacaattggattggactggatgttaaaagttggattctaattggattggatcggttattggatgtcaatttcaaaatccaattaaaaactgatccaatctaattacatttatatatattaaaaaattatttatataataaaatacattgaaaaatataataaatatttattgtatttttattagatctttttgtatattgaatttgtaacacttgattgtttagtgtatttatttcatgatgttttgttctattttattaattaaaaatgttattgttttaattatttaaaacttttagctacaataacacttgtaagaataatatatttatgaagtattaaacttaaataaaaagtgaaacttagttttttacgtatttttctttatatttttaagctaatattgaaatttaggcgtgtaattggatatccaattaaaaaatcgatccaatccaattagtagttggattggattggattggattttgaggtctaattggattggattggattggatgatgatttttcaaatccaattactaannnnnttggatcggatgaggaaaaaaaagctggattggatcggatgcccacccctagtaatatccactattgatatttctaagcaaagctcgacatttatgaagctttatgccctcctcttcaaattcagccatggcaaggaggtgtctgagatagactctcaattttgaaatacaggtacattttgtggcttactattattgactgatggagactaaaagaaagactatttagattcaaaatagtccaggaccatgtgagtgatggttgtttaaaagaagtcaaacagtacaggctggattggggagttaagaatatttcggtaaatggtctaatgaagaggctagccaaaggagaaagtaagtttcgacgacaagtatatgttgttgcacttgctgcaatggtatatccgatttggtattgcagaagcgaggctctttggaatctaaaagtgtatacaatagaagcaagggttaaaaagattaaaaaggatgtaaagtataagattaggaaagtattgcctaaaaaagtctcaaaaattgattggtttgaaaatttgtaaatattcatgcctatttcttagatatatatatttactctgattcaccagcaaaaaatagatttttaaagcaaaaaatagatttgtccctaatatatatacgtaagagagaaacaaaaattacaagagacgtagtgacgtacacacattatctgcatgatagtaccatatatacttccaaatcatgatgcatattacatacagctaaagctagctaattaataattacaagtattcaagtaaactccaccgtcaaaagcgacacatcgaaaatctaacacaatatataatacaactatacacaccaccctgtatttttctttatataccatgtatataattacatacatgcatgatcagtataaaaacatctttaactcaatactcttaactcttatcgtttacagtttttttttcaacactacttattagttcttttatttttatctaaaacacaatacttctaaatattacactaaataatataatatcaaatttaaaaatgttcattaatactgcactaaatcaagcacagtttttaagatcattaaaataaattaatatggaaataaaagctcttgtaacatgcttcaaagctccttgaagtacttgcctgaagttttaatgctaatatatcataccaattaagctatcaaagcatgtcattttaatgaaaatattggttaagtttttctgcactatattatgtaacaacacaagatagctattttacaaaatacatataatagatgggtttcttatgaaattattagtattttattttacaaaatatataatagatgggtctgaaattataatctattatatatattgtgtagattagttatatagttataatttatagtctcactaaatttttaaaaatactaataatttacggtgtcaaaatttaggttcaattacttacacaaatatagcatttttgaactctgaatttataaaactacaatgcacaatttcacatgaaagattgaattacaatttattcatatatgtagaattttattttaaataaatgatacaaaatattcctttataatatatacatatatatttatatatagagatgtatacagtacataataacttcttaaaagtgaaactgacagaagagatagagtgtaaagtcaatatatgtaaatagatctaacaacccaacttttcaattttttcctgtcctagcctcttttgtatccatcaattgaaaaagaggattgaaaatgaaacatgaattaaagttatgttggtgtatttgtgtgactgatcgagtgagtgatggaggttttatataaatatatattttatttatatatattttcagaaaattgaatggatcaaaaggatatatatctacatatatgtaattgaaaaagatggtcgttgttaggttaagtttcatgtgggtttggggtcatattataggtgaacaaaaagtatactaaggttaattaataataaaaaaaatattacatataaagggatggagttgtctaattgtcttgctttaattatcaatatttactttaaaaataaataattaagaaactttttatctttcttttctttcttttcagtttgttgtcgctaattattttgattataccatgaaggaaatataccataaaagaaataaaatgcaaaacgtgtacttaatagaattagaaggtaatgaataatttataatatgaaacaatatattagtactaaacaatttgggattaaaggataaggctaaatcatttaataagcagttgaacttatacaaaaagatcatgttagctcaacttttaatagtgggatttaaaaaggataaatttgaaaagaaattcatttaaggaccacatttacaatttttattatctatttacccttaattatatataacgagaaaaatatacattctatttaaatctgtgattatacttataaattttaggttatttataatagagtgaaactcttttaaaagaaattaaaatgagtctttagatctttaactaaattttaaaaataaaaactcattagaaaaataatataatatgaaaataagtttatggaacttttttattaatttcataaatttgtacttgacattgtattaatttgctttaactcattatgaaaaattcaaatttataacttttagtttttaatgaacaaggtggctaagcttattattttggaatttttttatttttatacttcaaaataattttttttatatatttttacgaaaattcacgtaacaacccacatagcaactaacaaagaaacttaaatcgcaatcaaaatctacatagcaactcacataatatataaattaattcccttattattttttatataaaaattgtgctca

SEQ ID NO: 49821 - DNA, 957 bp, Cannabis sativa
aaagaaaactttttgaggaaagtaatttatctttggaatattaagagatcagtagagaacaggaaaggatcgcactttgcactgaaaagattgcactttggcactgattacaaggttaatttagtaaattcgattttgtgtctattcaactttactactacttttttttctattttaaaataagagggcacaaacacatagtttgttcaaaacgacaaacgaactcaagaaaaaaaagatagtgttagtgacagtaatgtagagcttgaatatgtattccagccatattgcccacttaacattcctccgcctgaaaatctctctctcctcttccatatatttaaattaccaatttaccctttgtcccgtccttcaggtcgtcggcagctgtgtttggattcttgtttagtgaaaaatgaaaaaatgaaaaaggaaaaaaagttatcttcttctcaaccacatgcggtttgttttatatggcggagtgtttacaggtggggtttgcctttactggccatatatatgtatatgtgtatatatatatagagagagagagagtgagtgcaaagtgtttaaataagctttacccaccattattttcctatggtttaaactagagaatcactactcctctgttttcttctgggttcacgggcaataaaagcagtacgaaatttgagccagttgggaagattaggtagcttgagacaatatggcgaaaatggcgttctgtttctgggttttgcttctatcgttgcctttgttaatatccgcaggaagaagcggcgtcgtttcgcagaacacgtttgaggtgaagaaacagctgaagcaattgaacaagcctgctgttaagtccattaaggtatacctatataaatatcagactaaatcgtttacttttttcaggtttggaaaacaaagttaatgtattccatgtttggtttgaacagagcccag

SEQ ID NO: 49822 - DNA, 1599 bp, Cannabis sativa
aaaaagaagatcaaattacgtactttggtccaacaactctcttggtgtattttcttctaaatcattttttaagtttagagtgtgtttttgttgtgtgaggaacttgagtcgaatacgtttttagtattttattactatgttatttatgtattttttcttcgtggaaattgtgcatgttgaacacacttggacatcactcatcaagcttcgggagaagacttgttcgggggtcactttttgggaggataagtgcaagtgttatgatttgaagggagttcaagatcttagcacttcaaaaaattgattaggagtttagattacaatagttgggacaaatttaaagagggagtctttatttgtgtgttcttttactttatgttcatttttaccttatgttaattacctatttaaacacatatcatttctgtttaaatagtttttctgcctgtttaaatatcaattagattgaaaatttttaaaaagtgagatacctttttatactttaaatgaatcggaataaaattcagcccattatggacgactgtggttgtggaatgagctcatcgattcaaccagatatggtatacgccgaccatggttgtggaatgacggagttctacaagaaacgctttgaggcgctgggtgtgcagagaggtgtaacatggttgattggaggtgcaaggcgtctccgattagaggcgttggattttcgacgaggtggcccaatggtccgatggtggttcaactcttggacatggctcctatttgtttttcatttcatcatggctgtcaactcgagtgagatcaatggtgacgatgaagatgagaataatcttgccaatcgtgacctttgaaatttttttcagacacatgttagatcatcgtttttgggcaacaaaagaatctttggcagagctcttaggatgagtaaaatagcatctctgatcaaagattggaatttgttgggaaattgtttcgcttcaaatctctccaagcgttttgaagccgctgctatgccccgaaccaatctgaagacgtgcctcgaccgtgttctgatggtgtcggtgaatcccgaagctcccatcatcgatgacgacaggctgaagcccaagtcctgtgcagttgtcgtcgttggttgccatcggtggttgcgcatatgaatagtggctgaagtgctagtccgtttttcatgcctgatggacgacttggggctccctttttttgtaactgctttattattattattattaattaattaattaactaaatgtcttcatcaatttattttaaccaatcctaatataattatttttctattttcgtccaatttctttaaatcaaatatttttttttctaaaataaaaattatttatatacattatttttgtaacgacttctttttaaaattttattatttcaagagtataagaattattgtattaatttctactcattttcgtattatgttaattttgatatcatatctattgagttattttttggactgttttatttttcttataatattacttcttaacaatttttttttcaaaactttatttttcaccatatttcattttattttattttgtacataaa

SEQ ID NO: 49823 - DNA, 616 bp, Cannabis sativa
tatacgtttatattcatcaaaacattaccatagatcaccaaggctccacaataaagctctatgattacaaagtgtaagacaattatagtacaagtaagataatgtgacctcattattagttttacaatacttttagttttgctgaacacagttaataaaactgcagcaacatttccaccccttctgtcataccagaaatcactcctaaggatctgaaaaaaaaaccactatattatattcaggtgcatacacaatggaaaaattactattctctcggtacaattgacatggttgtaagccaataacaaagagccctaccattgagataaagccgctgatagtaatattatattcttctgaattagatccttaagtaccgttgttctctttaaataactcaccagggagagcttccagccaataccaaaaccaacataacctgcagtttgattgcacttaaatatttgattattcaaaattaaagcatatacatgtatcataatttactaaactgaagtggaaaacaaaagtatatagaattaataaccttaatcatgcctattaaattaaacaatttaatttgtgataagataggcagacatatttaatcaacctt

SEQ ID NO: 49824 - DNA, 1214 bp, Cannabis sativa
ttccaagaaggagggttgaagacatattgaaatttaagcaatatgtttgacaaatagtttgaaattttttaaattttataaataaatacaagtaagaaattgaatgcatataaagattgaatacaagaaataagtaaggcacttgtttttgagggcacatagctaagtatactaccccacaagtaagccaagaagtttggacgtctctgaattcttggtcaattatttaaaacatagcttatgcaagagacaaaaatgtgaactcttgtgtaagtttattctattttcatttcattatacccaaaggtttacattaagagagataatttacaaagatttacataccacttagaggaatagttatatccaaatattccaaacttattggtaataacgatgcaattagtcagcattctaggcatgagggatctgtgacccataaattctctggagttacaattttccatttcccacattatgttgtatctcatagggtccttttcaactaggtcctaagaaccccactcccaattcttgcgaagctgggaagactctcctcaagatgagatctcaaatgctaaatgtacgactcttgactttagaattaaagtgcctgacaatcttgccttggtacatcattagttaaacttgtgaatattcttggagatcttcaattaaatctactaattcttggagcaaagagtgtttccgagtttggtcataagtgtctaatctgtgagaggggactgtggttttattgggatgaccgcttcacacccataagtaatcatatacaatgtgtgccctattgaagtgtgttctattattctgtattcccagaggactcgcgaagctcctctgccaaatgggctttacaagcttggagttttttcttcattgttgtcttcaggatcttattcacaacttcaacttgtttattttcttgtgatttttccacaatcaaaaagctcttcacaattccgtgttaattaaagaaattggtgaagtgatcactatcaaatctcttcccgttgtctgagacaatcttgtgtggaagctgaagtggcacatgatttttttgatgacaaagtccagggccttcttggaggtgactgtgttcataggctctgcctgtaccaatttggtgaagtagtcaacaatagctatggcgtagttaacttctccttttttagtggggagggatcctactaagt

SEQ ID NO: 49825 - DNA, 1433 bp, Cannabis sativa
cattgattgtgagtgcacgtaattttttgtaaaattgtattattaagacataaaaatatataaatataatgggtttttttaataaatataattattgtaattttgggggacatttgacctcgatttcgaaggtcaaattcaagattattatgtagctacctaatgtttgtctagaagaataatattataaaccatgcatacacaacttgctccatatattatatatatatattattctttattattactagttgaaaagagaaatataaatagtaatttttgatgtaagatagaatttaggggagactgaattttcgttagttttcttttgtatttaatattaaacacaattatatatatgtagtccatttaattagctttacgtttatttttactttttttttatatgatgacatgtcatatgtgacgtattaggctattagcattggtggtagttgagattttataatatatattagcaatatttatcacatgtatagtcaatgtataatttgtcataataatattcaatttaaattattgtaattagatttgataggattaagaagaaagatgtttactgatagatacatatgtataatttttcttctatttttccttttttctccaaagtttataatatgtaagacgtagacatattacatatatgaaacgacaaataaaatatttatcaatcattaataagtacaataaataaataataaataaaactttattaatttggagttaataacattttaatcacacagcaaaattaatattatatatgattatatatagtacaattattaatggtaatcataattactaaaatattaattattattattagtaattaataagaaatgatatttatttaatcataaattataataaaattaattgtgagagatagactaccaaatttattttttgtgattttttatttatttatttattttatatatagtaatctatctaagtgatcatccatacatttttgtagataacattaactaggctactagagtagtcctttatattaattaatgtaaccatatattctatgaaataatgaaggaaatgtgtacattacacctatttatagatagtgtgtaattacttctcttttggttctcttacctattgttgaccgaggttttcggtaactaacaaataataaaagattaaagagctgtaagaaattaagagaagaatttttacgtggttggggcgttaataaaccttagtccacgagtctgtgtattaatgagtgtattaattacagagaatgttcttggtgagaatttactcttcttccacttatacaacccaaaattctcgaccccattaatgagctttgagggggtatttatagtattttttgtggggtgattcccagaattatagtacatgcatttttgtaactatca

SEQ ID NO: 49826 - DNA, 1119 bp, Cannabis sativa
aggccctgatagctagctcatagtccccagaattgtctaagctactgaaggggtggggaagggatctgtaccacgtgatccccttcaatttagattaaaaaaaaatattaggtcccatatattttaatgaaataattttatgaagtattgctagtcaatcgaaaagtgtcacctctaggtgatgtaagacgacaatctctcttaaacatatagataaacaaagaacaatattattaggcactagtggcgcctaacactattttaaggtgatgtcttgtaaaatagttagcaatattttataaaaaagttactaaattaaattatgtgggacttcatacttaattgcaccaatagcaaaatagcaccttatagattatgctagttggtggctttaatttaccatttctcataaatgaaaggcaaagcaatggagaagatttcatctcaaactattgtattcaattgctaatcaatatatagatgcattattaatatatattactcgtaaatataggtactattaagaaaatttatgcttaattttgttatataattaaaaaaatatatatattattttcatattatatggactagggttgtttttatcgatcgaaagagataaaaaaaaaagattaaacttgagttaaatatttttgacatagctaaattaaacataaaaatattctctcccccctcccttcacaaaaaaaatcataaaaattcaaaattttattttattattgtaaggcacgttacgtgatttctaattattgtgttaacatttactaattaaaaagattttaaattaaaagttaatttcttgaaaagaaatttcgttaaatatttattatccgggatcccgttatttatttgcaagatacacatactatattgaatctcaaaatagtcatctagcgacaaaacaaaagttgtgctagttgatctcccatacatctcaaacctgcagatctatacgaccaggtatgtaaaattttcaccagaaccctcgactcattactgttttgcttccgctttctctttacctgcacattgcaaagcaactctaagttaacatacttagcaagaaaaatatacatatagaaacataaataattgact

SEQ ID NO: 49827 - DNA, 1694 bp, Cannabis sativa
atgatgatgatgatgaaagcttttaataaaaaatataccattcacttggcaactagtgttttgtttcattcgtttgtttccacatccatattcttaatgcctaaaaacatattttgaatattctttttacattttttatgagccatatttgttttatatatatactattgtctattgggatatgcttaattgcactactacttaaaaataagcattagccttttaattattatctattaatagaaatagtcaattcattgtatatcaccggctttaaaaaccaagtatataaaaccatttttttggtggggatagggttttatattaatggcacattataatttatatgtataacttttaattaagtactgttttagttaaaccaaaacaatattataattgaaattagaaaaaaaaaaaaaacaatattataattaggaattagagaagttgtgtttacaagttatgtttgtactatatatgtgaagatttattaagtattacaagtaaataaatgtcaaagccaaactcaatttatttattaattgcaagttgaaaatactcaaaaattcgacctatttataaacagattttcactgtatactcattcatataaaatatcatatttaattttagtcaagtacttattgattaagtaaattgtttatgacaagtttagtacatttatagttcttttatggcatatatatttatatgaattaaattatatatttataatgacttatttaaataattacatataataagtaacatataataaatataaacttctagtgtaatttttgagttataaatgtgccgtcaatctgaaaataactcaaatttatttagaaaaatataaacgtgtttatttcgagttagttttaaattaaattatgatataatttgtttcttaaaaatatatcttgtttaaagaaagtagttgcatgcatatatagtaattagatttattattataagaaaattaatataattagttgtccttggctaatgtaattttctctagaacaatttgccacttaattaggattagttatatgtgatgtgtatcgacaagcatatgaccaactataaaagaagaagacaagaagatagagcaatgataacagatagttctctttgagtttaagaaatctttgtacattaattatgtcatcatatgaagctaagctaactaactttttaagaaaaaaataatatttttcaccaataattttggggacagatgctttgagtgattattaatcaaataaataatcaaaactttttcactttatctcttttcgaaagaaagtcttagctatattttcatacttataatatataaatatacttcttttattattagttttttcttatttttaccttattttaccattccatttatttatatttgtaattgcttttacatttaagcataaacttttactactacaaaaaacacaatttttatcagttaaaattcataattttttgaaaaccatccactataattgaatattcttgacgattttaaacagtcgtttaatattctcaatggtgtaaaattgtcacaattttaaaattaaaaaacaagtttaacgggtatccctgacggttttaaaccgtcaaggatacccttaatatgtaaaaccaaattttcatttcagaatctccagtcgcgctatcagctc

SEQ ID NO: 49828 - DNA, 1149 bp, Cannabis sativa
ggatttagtttatgtgtattaattgttgttatgcacaatatatatagcctcaagatgcttatgggttggagaagctagcaacagaagagctatgcaagcactataacaaggactttggtattgagtgtcgtattggacgattccacaacatttatggaccttttggaacatggaaaggtgagctagtgtacaactattatgactatgaatatatgaaatgataaaacattttcatttcataatgtgttgtttcttcttttttaattttttaggagggagagagaaggctccagctgcattttgtagaaaaacccttacttccactgataagtttgagatgtggggagatggtcttcaaactaggtctttcaccttcattgatgaatgtgtagaaggtgtcctaaggtaaattttattaacaaacaaatatacatacatatatgtataatgttagaatttgatcatgatttgtattaaaatttatttatgtatgcaattaatgcagattgacaaagtcagatttccgtgagccagtgaacattggaagtgatgagatggttagcatgaatgaaatggctgagattgtgctgggttttgataacaaggaccttcccattcaacacattcctggccctgaaggtgtccgtggccgaaactcagacaacactctcattaaagaaaagctaggctgggccccaaccatgaagttgaaggtattataaataataaatattggtccaaataatatatatatatatatatatattttcactaaataacattttggattctatgtggttgaaattattaattggtcactttgatccccctcctattttgttcaaagtctattgtactttgccataaaaaataaataaacataatcctaattttaaaattttatcttcccttactctagtgagtcaagtctgaaatctaatctaatctgaaaattctgaaaagaatgatcaaatctatcattatggtctattgtacaaagtgctagatctctaaaataaattttgtttttataactctatacaaaataattttgaagtataatattgttttggtgtattcaagatggagactaatcaaattctcattgcgtattttgttttttgttttctaaaggatgggcttaggttt

SEQ ID NO: 49829 - DNA, 1005 bp, Cannabis sativa
  modified_base (423)..(430): a, c, t, g, unknown or other
ttttcaaaatcatcacatttatttattttactttttcgataaattcgaaagatataatgaatcaacatcaacaaaattctaataaaattaaagaaaccgaaaaaaagtagaggaatatatgtaagacatttccacgtactcataaatgatatggttagatgtagcaccaaaactaaataaaggatttatatgacttggttatatatataccacacactagtttatcaataaaggataatatatattatgatgaagctactcccatattcttctcaactagttaattagctactaatgctatactagtccatccaaccttttcctttcattttgagtttatatttctcatcatcaaaatcaatagtattataacacaacacattatgtatataggaatataattttgtcctgttattgtacttnnnnnnnntgtaatccgtgatgtacggcagctgtcagatgaaagatatatttaatctgacggctgagattgatctaggagtaattatggttaaaaagtaaaaacgtaccttgacactcatttaatgtacccggagacccatctaatgtactacggaatacattccgtaaaagtacatcacgggacaaaatcatacccctatgtatataacctatccacatatatcttgttactatattattctacacatggaccatacacacctatccatggaccaattagggtctgtttgtcatattgatcaaataattatatccatgcataagataattgttaaaaagtactggtgtctataatttttttttttgatgtcatactattattagtgtaattaagtattgagtccgaaaataatttttaggtaatatcgctacctaatcataaagcatcacctataaaaaatactaaatactactggtgtccaataacaatactccatgtataataatcttccatttctatcattattccgaaacctttacacatagcatatatattattacaaactagttaatgattaataa

SEQ ID NO: 49830 - DNA, 1431 bp, Cannabis sativa
cactctttccctacacgacgctcttccgatctaaaataatttccaacaataactcactcactaattctctgtttgattgaagcttctcgacgaaataattcggtaattaatgaacaactaaaaaagctcaaggaaacttcttgcttctagctatagaatttgcaaatagctataaaattgaaaattataattttatggtctttttatagagtttttgaggggttacatttgttatcaacttcaaaatttttattttccctcaaaaataataaaggcttatcattacgggataaataaccgtcagcgcacgatctcccatgtacaatttttaaggcaaagaatttaatgaaaatacttgaagagacagagggagattcgcacgcctcgagcaaggctaacgtcacatacaagtcgacatgtaggcacaaacatgtgtcacctaccctagtgacgcgtaaatcgtaggagtccccataagagaagaaattctcacgcaaacttggggaaaatgttaacccaaatttcacacaggtgacatgacactcagcaaggagagatgtgttgaacatgtttagaccttggcagggcatatctttctattataccgaccatatcaagtctaagtaacattattagttctacctttggaagatctagaaatcattgttaagatgaagagaatcaaagatctaaaaggaaaaaggggagtctcgaagcagtataggagaaaagacttagagaaagcaagaatttagaaggaaaactcatggaagtgacttgaaacttttttaaattccccatatataaatatttatttttcatatataacatgaatcaaaacggaataatctagaaataagaaaagacagacacagtttcctaaaattttgaaataatgattacctattaaatcaattattgcatattaacgacatatggcaataatttttgtaaccgattccatgacaacagagcttgaactaaaaatattcataagctcagatattgtaaaacggaggggcaattataagtgataaaaataatctcgaaggtaacaaaaattaattctagaagactaaaatgtggaaagagataatattgtgatgtggcaagattaataaagaaacgactcattcactaaaagggaagcagagcgaaaaacttagaggcataaaagcatagcttaatttgtgaaggaaagaataatgcgcttgaggaactttaaaatcaggaaaacaaaattatgaggagaaacgaatgaaattaatacacgtggacaaattaaagcaattgcaaagagggaagctaacagattttttgtgcctacaaatagatgatcgcctcatttgaaaagaggaacgaattattaatcacactatactagtcgaaactttgtcggaatacatcctcatgaagcacatctaagttcac

SEQ ID NO: 49831 - DNA, 1774 bp, Cannabis sativa
  modified_base (818)..(820): a, c, t, g, unknown or other
  modified_base (1649)..(1651): a, c, t, g, unknown or other
ctattttgttgaataaaaatataatattatttttaacacttttcacataatatttattctattttttttctttaataggttttaaattaatatttagaattaagtcattcataattttatatacaattcataatttaaaatacaataataaaattcatataatttaaaaaattatggataccaaatattgttcaaatgctaaataaaaattaagtttttaatacatgagtttcgtctctacatatgtaataacattaaaaagaaaataccatctaattcaaacaactttttctgcatgcttagcagagttggaaacaattcaatcaacatgataatacacttgaattactccaccttcacttcaagtgctgaaaacaaatatcaaaacagagataatgagcacaatagagctaaaattccttgggtgctcactcaaatttcccaaatcatgaatgtaagactcatcaaaatcttcagaaataaaagggtaatcttatctaagcactgcttgtgtaatgtagaatcatgaaattcagaattaacaacaattgcagatttcacataatatttttattgaacaaagtatacatttaactatccaaaatagaagagtaaaggaagaatatgcataagatcaatttgaataactttatagtgaatctttaagctatctgaagacctaacttacactagacacactaatccctaaatttatttccacaaaatataaaattggtatttaaattacaaataatcacacagagctcggaacgagctttccaacgatataaagaacgtcccaaacagagtcccgagtnnnaagttatggccaaaacaaaaacccgaaaaaaaatacaataagctaccataaaattgctgcgactactgtgtttaaaaacccaagaaacccagcttccacccacgaaaaatgcatccataaacaccaattttcatgctaaaccagcccacaatcataataaactttcacttagcataaatcaaataattagagaagaattacacctaattcactctccaacaacaccaaaatatgcatcactaatcatcaattttcagcaagctttaactagagcaaaaatctcaattcaagagcttgcataactataaaaatatcagcatctttacacaaatttatttttaatataactcaagaaaatgccatcaaaatcattaagaacaattccatacctttgcaacacatacatgccaaaaataacaagattatccccttaatctaacacacatgcaaaaatggacttattcacacataaagcatgcttttcaatcttatttcagcagcttgcaattaaattaaaccaattaaaatggctacctcaacacaagcacaaagattaccaaaccaagctttgatccaagcaacaactcacacattcaacaaagaaagaaatagtttaagagggaaaaggggttcggttttgaagaagaagaaacctagaaatttcagcaacaaattcaaataaaaagtgagaaaagctccctcaaatctaagtaagagcaaatccccaaatctccaaaactaagctttcttccacaagcaattcaccacaaaatcaaagctagaaaaaatgagtttttgagagagggagagtgtaacgccctaaataatnnngcacgctacccaaaatacttatgaaaccctaatcccctaatcgagattactaatcaaaaatatagcgcaaaatttaaacttttatattaaacagaatgaaaataaacttgtaatatatttaaa

SEQ ID NO: 49832 - DNA, 4407 bp, Cannabis sativa
actcaaacttgagtaaaatcacctaacatgcattcaatctatgcttcaaactcattcatttaactcctatttattcatactttgaagctgcacttcattagtcaatagtgaagtcagtactttcaagatttgcaaattttgtcaagtattgtacgttttgttaattatatcttaaaataatcacctttttttttcattagtttattttatatttaattatgaagagatttagtttggtacaagtattatttatggagcgaaaattttctgtcatgaaaagttcaaactcttggagaaagtcttaatagtttcattctattttaattttttatgctacttctaattactgctaggttctttgtatgaacaactcacgaaaagatcaacaacaaccttatcaaggcaaggctcttctctctttaccaataccaataattcatattacttaagtttttttttctcaaaaaactaataaatcctaactgcaacagttgcaaagtcaaccaccataacaatattagctgcgggctaatggtgttggtgattgtgatgatgaccatggtgggctcttcttctccaccatttgtttaaaatccatcaggtatttttttattgggtttctgtttgtttcagtcttgtttctctgaatttgctattactctgtttaccctttatgcattatggaattgttctgtgaccattttgtatcgtagtcagattagaattactacacccaaatatataacacattaatttgaatatatagacagaatagaattagtatactccaaatgaccaaataatatgccaataagattattattgagttcatatgtttgagaggcttcagttttgtgggtttagaaacgtcttcgtctgtgagtgatgttcagaagaagaaaaagatatgaattacgctaaaagagaagaaaccatagtagtggtgcagctgtgagaaggaagaaaaagctaggcggctgaagtgctcattaggatttgacaagttattatagtatagattagagttatagcaaagtaattgatttggctgatctcatcacttcggctgaactaattgattaggctgatcgtatgttttgtgatggaactttacataaatatacttgtatgatataattataagaaacatattactaaaaaataataaatccattcataaaatttattattatatagctaaccaaccacaactttctctgtatataattttgataacaccattcatatcctataattaatataaccgttacattatcttaaaagaaggattgtaattagatatgtactatttggtagttataaactcaaatttagatactatttagtaagatttagatcaaataaatgagaaaaaaaagaaataagagtatgcggtagataataatctatcttaagtctatatttttatacgacaaaaaagtaagtcttattattcgaacatattattaactttgtacttctatactttgtctgtttatgttaatcaaactaaattaagttatatagatcacgaaaagattccaagtgttgactgatttcaattttataacaggatgtatacaaactttaatgctactaaatgagaatcaagattaatttcttactgtatagatagtaagtggttctttcattcacaaaatgaaacgaaaactagatttattcgaagacaatacaaaacatgaaattaataaaagacgaagagagctttatgcattacgaaaacaatctaataatatcactaccacaaaaattaatggttctaaaaaattggttgagatgaatgtcaaattaagaatggtgaacaacatgaggattataagagagctgcagttaataaagagaaaattatgctttgagaaaaagggaaaatgaaacaaatgtagataaaggtccttggaaaatgagttctgtgaaaaaagcatgtatatctaaaaaaaaatcgaaaatgataaatcttcttccactgtaggtacaataactattcatgaaaatagtgctattctacgaaacaccaaacataaaaggaattataaaattataaatcgaggaataataatcaatgaaaatgttataggtatgatataaatctaaatttttccattataatattaacatcatcttatttgtatctttttgataaatgaatttttgtttataggtgttggaaatggtggtaatgaagctgtgttagaagtaaataataggagagggaaagagcatttatttatttttagcatatttgaagttggtaatacacattttattaatagtagttgtttctcactttatataaattgtttagattaaatttgtataacatcttacagggtcaacatctacacagcaaacgagtagaaaaaatttccaaggtatatttatgatatatttttttgacataaatttataatatcttaatataatattaccatgttttatataacatgtagataaggtaatggtgaagaattcaaagaacaaattggaaaaaagaaaaccagaaccttttaagttaggcatactacctgaagtgtctcatgttctgcaaacaccgaaagtatgtacttagtgtggagcaaaaaagtttcagtatgagagtgaaggattctgttgttgtgctggaaaaattattctaaaagtaaatgatgcacctactgagttgtttgagctatttacttcaacctctcttgaagcacaattgtttaaaaaaaaatattcgcatctacaatagtaatttttctttcacttcatttggtgtcaaacatcataaggaattgtgtacaataaataaaggtttatatacatttagagtacaaggacaaatttatcattttattaatagaataattccgccatcatttactcctcctacttacttgcaattgtattttgatgatactgaacatgaattagaaaatcgactgaatttttcagacaatatgagcataatcactcttaccaagttaagtgctatcttacagtttaatccatatagtcaattttttagaaggcttggcaatatctctgacttagaaaatcaaaagatacaaataaggtgtgatgcaggtctcaatcaaagggtatacaattctccttctgtatcacaagttgctgcaatttgggtggatgatgatgtcagtgcagaaaataggacccgtgatattattgtgtcttctcatgatgaagtaagtcatagaattcattattattttggatgttatgatccactgcaatatccattattatttccctatggagaaacaagatgccatcaaggtattgagaaatttaatggatgaaaatgtaaaaaaaattctcgaaatgaagatttgattagtgctcataccattggttcaacttcagagttaattattgcagagactaaaggtacattaatcagccaaactaaattttgatcctaataactatcataattattttaatatttgttttaaattaaatgcatattttttttccttattcagttctccaaaagaagcctagaggtatttcatctcttgtcaggaatattattgttatatgatgcaaattcgacatacaacaaaatcagtattgttacatgttggtcgtttgttacaacaatatgtagtagatatgtatgtaaaactagaaacttctcgattggattattttcgaaagaatcaagaagacattcgagctgaattatacaaagggatgattgacagcattgaaatgggtgaaagacgaggctttaaaattggtcgaagaattattttgccttcatcttttattggtggaccaagagatatgcgcaaatgatatattgatgccatgacattagttcaaaaatttggaaaaccatatttgtttctaacaatgacttgtaatcctaattggcaagagatacaagaagaattaggagaaactgatcaagtgcaaaacagactagacttgatagcatgaatttttaaagcaaaattggatgaattgaaaaatgatttattcaagaaacaaatatttcgtcatgttattgcttatgtttatgtaatagaatttcaaacgagaggattaccacatgcacatttcttagttataatgaaaccaggttcaaaaattattaacacagattcatttgataaaattgtgtcagctgaactacctgatcaagacaagcatgcatatatattttcattagttgtgaaacatatgatgcatggaccatgcaggaaacttaatgataagaatatttgtatgcaaccaaatggaaaatgtaaaagccattatccaaaacaatttcgtatgaaaacagaatgtggcgatgattcttacccaaagtacaagcgacaagatgatggtaaaaaggctaaagtgcgaggtcattggttagacaatagatgggttgttcca

SEQ ID NO: 49833 - DNA, 1738 bp, Cannabis sativa
  modified_base (1198)..(1203): a, c, t, g, unknown or other
atatatattatatagatatatttgcaaaagtgtccgtgaaataattaccaataactcatgtacaacttttactaccaaattgcttttttgaaaataaaaatatcattgactctaagaaaaattattaccaaatatcaatgacaaaagattggggatttatcaaagggataattgcattgtaaatattttgggtagttaacttgaataccttgctaatcttaattaaacaaatgtaatgaccatttagtattattatgagagttagtaaataattagagtttaatttaaaattagactcttaattattatttatgcaattatggagatatgtttgaattttaagtgtgttaattatgttatatgtgaaatttcatgattttcatattttgcgagtaacaatggaatgtggcgtgtggcctatagagtcactttattttaatttagtattttagatatagcagggtaatttatttaaatatttgaaatgtcaagttatttttggaggaatggtctaagactattttacccctaagtatgttaaataccatatgttttagtaaagggtaattaggtcatttcatcttagtttgtcttatttggtgtagataattacaataatcctttttattattttattttatgctgaaagtctatttgattacatttgtgttagttgattaaattatgttcattgcaatttcactaggtggtctggagagttggaaataatttggggttaaattgagatgttggtgaggttttttagggtttctgcaggaaccgaccggttaaccagttcgagctagttctgtagaaccaattaaccatttctcctggcagaaaccttgagaattagtttttctttttgagaattcgatttaccggttctagcagttttggaaccctagttttacatgttttagtgatacttagggtattgtcatgctattcatcatcgagaaacttctagttttgattttaagtcactgaaaagtgatttagcgtatcacttatcaattttacaaaaattgtgatttaggggcttataaaccgtctagcagtagttccactcaagttgactgtgttagaacttattttaccaggatctagagtcactaacatgtatgttgattataatctatactctaacactcttaatatgaattttctgatatgataaaataaacacatataaagnnnnnnaaaccttacattggtggcagcgaaataatatgtttccttccacttagatatctaacccttgttcctttttgttgcagagtaataaacagatctgagcttggatctccttctcctttagtttggttaaccacctctcatgatttgagtacttgacttgctacgtgtgggcttggtactctatcactgaatgcttgaatttgatagaagaacagcaagaggaattcaaatcactatgaaggagtctctcatctattagttatctgacaaagttagaaaattaggtttagaatggttgaagtaggttggatgagaatagagtatcatgttccttttatagtatttcaataaggttttaggatttaattatatggattaaaaaaagataaaataatggacaaaaatcaagtagtggccggccacttaatgtgggtctcactagttacaattttgccactttatttcaaccatttatctttctttcataatgatatattttctaatttcaatcatataaatgtcaaaattatatattaaa

SEQ ID NO: 49834 - DNA, 1106 bp, Cannabis sativa
attaaaattttacaaatcgtggttcggcaaagcatgtccttcagttagacgatgagttattctggtttgaagaggttcctgcatggtttgcggatatctacatcgtaaaaataagaaaagaagggtattaagtagcatatatgtcctcaaacttggcttacaaaattttgagctaatccattattgattgaccccattaacatgcatatcacatgatactaaaacatcaattatttaatagaatttacctatatatgattacaaataaataataggtatccttggagggttccaatcaaagaaaccatagggtcccttttcaataaaattaaaaaataaaaagctagccaaagattgttttggagtaaccaccaccatcatcatgatccatgaggagtatatccccatattaagtactttgtcttttctaattcattatttatttacacgtcaacaatctttgtctttttttttttttcagatgcaatctcaaaattatgaatgattgaagatacaaaactttgttatatagtggcagatactaccaaatccactgttagaagttagaaaaatagcctgtaatcaccccatatacattatttcatttatataattggtgtcttttttttttttgaaagatttttctagatatcattttaaatgtttttatatgaacaaataattttaaatgttattagtattatattaatgcatgtttagtctacttaagctgtgacattatataatttttcttcttttcagagcactcaaaaatttttaagaatcaaaatgtaaatttctttctaacaaatgatgtaattatattctctattttaaggaaattttattctaatattatgtaattttttttattaatgatgaagtgtaaaagtttgatgtaaattataaaaagtgatattgctgcattattttgtttctacttttagaatttattttatctgtttaatttgtttgtatgcaaagtttggtctagttgtctctatattaatgtatagattattattatacactatccatgcatatgatgcatgtgagttgctcaggcaaattttttcatttgaactgaaggaatccacatctacaaa

SEQ ID NO: 49835 - DNA, 1128 bp, Cannabis sativa
catgaaaataacatgttaacttaactgatttctaatcttctattgatagcaaataaaattatattgaaatgtgttttattaagggcataaaatcccaacagtaacaagttcaacacagtcactaaagcaaactcaactcgactgaatctacatttattcttcacaatgtaaaagtggacttcatcgagcttttcagatttgttcttgtgcaagaacatctgatggattagtacacccgagaaattgaatttctctctctctctctcaaagaactatttgaaaggggattccttcactctttctattgatttgtagtcattaaatctttgttttatcttcgaatagtaaactgccaccgtgccaagtaatatgtcatgtgtaatggtttgaaataggaactaaaagctttggaggtcttaaattctatagaaaaaaatacaacaaaatgcaagttagacattctgtataaaggcaccgggcaagcatcataccaataccgtacccccatccaagaaagactcaatgatcaaattaataaaacttgccaaaactatcggaccaacatcagacatgcatcgtacctaataaattaaagaaaataagaccatcaaacacaactccgtgccctattgtaccaagtcataccaacaaaaaaaagtaaaaaaataaaactctatcgtacccactatcatcccacatcgtaccatatatcggactagtttcttcaacctaaaatatcattttcaactgagaaccatcatacccatatcgtacttgcatcgtactctatcgtgcctctaaagttgtaattaatttcactaataagggactatcggacctttacgtacaaccatcatgcccctatcgagcattcatcttcaacctctatccagtttttaacaaacacatattggacaagcatgagacctacattggacctgcaacggacctagcttaaaaactaaatttctttcaagaacataaatcacacccaactctaaccctaaatcacatatcatagatcaacacatatacaacaaatttctaccctaaatcaatgaacacataaaccctatcaaccaaaaatacaacaaaatcaaaacgagattcaaaaacttacctttgaca

SEQ ID NO: 49836 - DNA, 984 bp, Cannabis sativa
gattaatgaggctggagaaaatagcttttatctgggtcttcctaatactttggggcggaataagactgctttgcttgggttcttgaaggacaagatgaggaagaaaattcagagttgggaagggagatttttatctaaggcgggtaaagaattacttatcaaaaccgtggcacaatctctcctgagttatgccatgaatgtcttcttattaccaattgaaacttgtcaagagatggagcaattgatgtgcaagttttggtggcaagcctccaccaaaaacaaaggaattcactggtagagttgggaaagattaactgagcataaatccaaagggggaatgggttttcacaatcttcgagattttaatatcagtttattgagtaaacaaggttggtgtctcttgtgttagccagattctttggtgggaaggatttacaaagccagatactacaaaaatggtgacttcctctcggcagaactaggaggcgatccgagtttcgtctggcgtagtattcttgaagctcatgatgtggttcgcgaaggggtaagacgtcgaattggcaatgaatagtcggtgagtattctccttgattcttggctgctggatattgataatccaaaagtttcttctactcacccggccttgttgaaccaatatgtttgttcgttgatggttactggggaatatgcctgggatttagacttcgtgcttaatttgttcaataaccgggatgctaatttaactcttagcattcccttaaattcaagtcgggaaagtgattcttggtattggtgtttggaaaaaattgggcatttcacagttaaatcagcgtacaagtttcttcaattgtgcaaagagacagggtcccaaccgaacagttctccagtttggaatggtatttggaaactgcgtgttcctcccaaggttaaagatcttatatggcgtgcggcttcagagtgtctccctacaaaaacaagactgga

SEQ ID NO: 49837 - DNA, 1036 bp, Cannabis sativa
tttattacttgatcaaacgattaatcagaagagggcagagggtggtataattaacatcatggctttggtagaaacattattagtaggagcactataaatagaagttttattatacttctttacaatattaactattaaaataattttgtcttaacaatggaacttattatttaaacaaaaagttatcccaatctcactagctaatatatacctaaagttcaaaacccacttgatctagctacctagcttcctcttaacaattcatacaaatataatatatgtatatatatatatatttatatttatatcgatatccatatatattttattaaatataatagaaaatttttttttttttataaatatttgattacacatatttgtctctgttatatattaaagattattatttaacataaaatatgtgttcttttaacattataatttaaattaaaatttattgcacatatttaaaaaaaaaaattctattattatttttttagccaaaaaatatttttatataattattttaaagaaaataaaaaaagtgtatgatatatattatttttttttatcttttatcttatattaaatatagttatataatatagtatttttttaaatacatatctttaattctactatcattttttctatattatttaaaaataaagaaacggtatcatatttcttaaaaaataaagagtattataaaatgaaaagtgtttttttttttttttttgagaaaaataaaaagtgttatgattaaactaaaattatgtataattaacaataaattttaaatattattatgttttttttataaatagcacttaaattaaatatttttaaataaaaaatatttttttaataaaaattaatattattcattaaataacatatacataactaattaaaataaatatatataaagaaccaggagagggcgtgatatgttatgaacagatttaatgttaattatatatataattgtattaagcaaaaaggtatagtaatacctttcaaaaaaaaaaaa

SEQ ID NO: 49838 - DNA, 1356 bp, Cannabis sativa
tatggcgtgaagcctcaacccatgggcaccaattacaagattgggttttataagctagagaggtactcagatgcacactaccctataagcttcaccttacactccccagatctccgagagtactggttcttttccactagttttacagtgaagagggcccctaccctcccattaagattttagatcctaagtaaacatctttattgttgtctttccttctttcaaagtcttttctactctaattgctacttgggcctttatacttctaatctctggcagagcctatgcctcagagtcccaaaactgaggaaatgaagaaaaagatagcccaatataagctcttcactgacacaaagttgaaagtcggaggcttgcttaccacaaagtttctctgtgaacataggctaatcgctagcttccaaagcattgattgcataagtggcaggggccaaatatagatttccaaagaggctaaggagaaaatagctcttaacctggccaaaatcataaccgaagctgctaaggaggataagctcctggaagcagattgggtgctccgccaccctaatccattaatgaaggaggaagagattttcaaaatcatgagagtgcctcgggagcagcaattttgaaagaggtaacagacccttctgtgtattctgtaccccaagtctccatcgtatgtaccagatggaccaatggggattcgatagctattttctagacttaaatcatcttaaagtatcccatgaaggactatatagacagggtagatggaattattaggagtcctagtaacccatagtcaactctagatactgttatagtggatcattttgcaactatctctttccctaacttcagagagtatgacagcttcattgactgagatgacataatcttctttgcccatggggaaccatataactacacactgaatggttacacccacatacaaaaattagaatatgtttccatcgttgggattttatgccctaaataaaacccaattttattgtaatcttatttactttcaataataatcagaaattatatcttaaccttgtcatatgctttgttcacatattttatacatgattatagatttaatatataagttcttttaaatcttgaacatatagttatttacaattacaacgatgtcatcacaatggaaaataattatgattatataattcaaactatttagtctcacaatttatcagtgcacttgatatatagtgaagcgataatcaacgataaagtttacttacacactaatatgtggagtgttctttttaaggcattagtaaagtatactagtattggatttattagctatacatcagactggac

SEQ ID NO: 49839 - DNA, 2390 bp, Cannabis sativa
tttttatatagtaatttatatttaatctataaagtaaaaaaaagtaaagatatttaatttgaattcatttatcaactactatttatcatgtcacttattttacgataaaattaaatagaatatgatggaagaatcacgttactataaaagttatatgttaagaggtattattaacgaaccgtatattataaaaacataacttattagtgaaaaaagtttataagaaaaaaaatattaattattcctttctaaatccaatcttagcagtctgttgttgcaatagaaatattctaaaaaagagtgtataataatttaaaaagaggtagaaaatagggttaagttttcgattaattaattatatgcaaacgatctatcaaaaaaaaatattataggcaaaataagtggtacatatataatttgacatttgaatttgatggtgacacctacatacttttattctaacatattaagaaatgaaaaaatcccccccgaaaacaaaagggccaaaatccaacaataaaaataaaattaagaatctagccctaattagatcacttcatcaatcctagtgcatacattacataagagtattgtcagagaaatttagacaacaccagaaaatggcgagtattcaagttagacaaaaacactcaccaaccgttatgcgagtactcacttagaattccgagtacccaaattttgagctacgaaatagacaaaaacaagaacaaaaatataaataagacaagagatttatagtggttcagtcagagttcagtctgcttagtctacttttactaattattttcaacttggtcttattgaatttagatcactcctttatatacaaagtaggtatctgttgagattactctaccagtcagttaggaccattattacaataattatataatttaatgagaaaaatgtttaaacaataaatgtacgaacgatttcacctgttcatctcttccttaattgtagcagcgttagcgaccacctttgactgcatattttggacattcctcttatttacaatttagaacaaccgagctttttagcagtcgtcaaacacattagtcatttagaccacaacctatataaagaaacgatcttttacttgtcataggggagatatacttgttcattgcatataatgaatatacgtgattagtgctaacttctttgggtcctgcctgttctttgacaactttagtcatgcgattaaaccattattttggtcgcatctacttgcaagttgaatcatgcgaggttgattttatgagaaccatattattgaaacgtcatcatttttctttaagaaacaagtaaacatgtcatcttttcacgaggctaggctgatatttataggcggaaaatttgtactataaaacacatgctcctagtttcgcgatgacacactattagtcaatgaaactacctcaacagaacaggcgagttgcaccatcacgttgtgatgttctttagttgtcctgtcaagagttttgaaagggcagttacatttattactatttactttttcaaggtgccatgtcaccagacccttggggtttgtgtaggcatgactttgggtgaccgttagattaaatgaattttggtttttgaatgccacgtgtcataatctcagtggatgagtctgacccctatataagtttttttaatacaaatgaaaatcttagtgtccctcttattctcaagttttctcaaccttttcctctaaaaaatttgaaaaatcgtccttcaatccagaagattttttgaaaggttcttcgccaacactttgtgtttctaaagatcttgaagttggaatcacagttagaaatttcttcaaaactaaagtttagtctttctgagaaatttttggttaatttgaggtttaattatgaatgttcgcgtaccttctgggtttttagggtataaatgtatgaaaatgataggctaggttcttggtagtaaaattatatgggaaaattggcagaaagggaattttttggaaaatttttacttaaggactggatactcgcatctctcccaatacacaaacctcgaatatttgtatctttcaactagaacacattgaatgcttgcacatgcatgtaggtctttacttagaacatgaataatactcacaatgttcttaatgtccttttcgatttaagattattattcgtgtgaggacattcctccttaaattacacgcacaacacgctgaaaggatcttctatcttttagatgagcgatcattttgacaactagttcttcgagtctgatggaggagaatttgtggatgaacctataaactgtgatagctttattccaatatcactctcaatagacaaggttctagcaagagtagactcacaagcttt

SEQ ID NO: 49840 - DNA, 1404 bp, Cannabis sativa
tgcattgtagaattttcctatatttttatttagtaaataatatatttttatgtggtatagttttggacattttaatggacattaaataaatattacgaaattattatggcaactataacgtggagtaggtaaggggcataatagttggacaacttttttaattttttatgttaacgtgtggtgggggttgtatttttttattttcaaattaaattatatgtgatttttgtaatttctcaaactgcaatcatataaacgagatattaaaattgcaaagtcaaatcgtaaaaacatagtgcggtgtggtgcagtgcaatttcaccgatttacactatcattattataagatattataacaaaattttaaaaattaaacaaataaagctttaacaatacaaaataaacaatcttattaaacttttaattaacttcaacatgtataataattatcaagttattatatattgaattgtctctaaaaataaaataatatacatatgtattgtatatatttgctctttgtataaaaaacaaataaaaaccatattataaaaattaataattaattttataatatataatgttgcggagtttaaatcgtaattattaaatttaaaatcgcaaatagcaccacataacatacagtttgcaaaaaaataccacaatcgcatcgtaaaaaatttcaaactctccggtgcggtttgatggttagtcctaattatcatcatgcatataatattccaattggagaaagaatattctaattttttttttccttgttttttcctatccttttcacgattaaatataagatgaaccttatatactgacatatataatcgtaactcttttagtatatatacgcatattcaatataagctataattgagcacgataaagaatatatagttttagaaaaagaagaaaaaaatgaaggttgaagtaacctcaaaagatattatcaaaccttcttctccaacccctgaccacctgcgcctctatcaactctcattccttgaccaaatatcacccagagcttacagtcctttcatctattactactcactaaacgacatcaataatgaatccaacgacaacaattatatcatctctaacatatccgaaaagctcaagaaatctttgtccaaaaccctaactctttactacccacttgcaggaagattcaccaaagacttctgcgtcgactgccacgacgacggagcactcttcttcgaagctcgagtactaaagacgcaactctcggacgttcttaacaaccctattcctgttgaactcaatgatcttcttccatttcccctggacgaatgcgcagagctaccttttggtgtccaactcaacatctttccttgtggcggaatcgccattggcgtctgcatttcgcat

SEQ ID NO: 49841 - DNA, 1718 bp, Cannabis sativa
ttgtcttatatttttcatagtatactctaaaaaaaaatttattgtcaaaatataatttaataagtcgaggtattatgacaagatttggtatattttctgtatgattttttcgtgcgagaaattattttcaagttaattatattaaaaaaaatttatcaaaaaaactaagcctaaggtattattttataagtaattctattatatagaaaacaaaaattcatttataacgtgggaaaaacttctaaccaaccaaattttaaattgcaaaaagtacaattattagatacgagtttggaatttttcatttttgagatcaatatcacattgattaataaaaactttatttataatatatatacataaaatgaaaattattagcttatattaatttgtcttctagtatgggtaatattctattcaatagcatatgtcccacaagagatattttcattcaaaaggccaatcatgtgaattttttttaagaaatactattttatattttatattttacgattgaattctctattctgttaaattataaattagaccatgtattttcactataaaaaaaggaagttaaagtgtgtgaaaatatccgtattgatatttagaggcagttttttggtaaaaactgtaggtatggaatatatatatctatgtcgtcggtgggggttgaaaaaaaatcatagttttctaataaccctatggcgtcagttattttgttaatacttagactaattttacaatatttgtgtaatatttaattacttctatgaaataaaattatgtattttggccaattctaaaattaatttaaataatatttaatttaccttttaaaaaaatatataatttaaatttaaattaaataaaataattaataaatatataatttaaggtttagggtttagggtttagggtttaggatcctcttcgtgacaagacaaatcaccaattgataaataacgagtcttcttcgagataagacaaatttctaaatgcactcttcgagtgagtgccaaacttccaattaaatgattgtattatctctcttgcagtttatggcatttcacatagtcaaaattcagttttatgggaacaaaagtttcttgtgatttatgttcttgtagagaatatagttaatatgattactgttagattttaattcattaattaatttgagtaacttaagattgagtatttaaaattttgaagtaatatataactggtgattcataaactataatatacaactaatgaagacaaaagcaatccactaaaatatatatatatatatatagatgtaggaaattttaagataggcttttactatcctgcccctacaccaacaaacaacactaatcaataattaaggtcaatttcgaccttttactgttcaatgacttttcaaagtcagaacaccaaaacgacatcgttttgtgtttgaacaaaaccccaatgactcgagaaccttctcagtcaattcctttctcccttaggttttcctcgaaaccctagcagagagtttctctctgagaaactcgaagctaggtttagatcaacccagaaaaccctagaaatcccagattaaacacaagccaaagatcagatctagaaggatctgatctatacacaaccacacacacaaaaccagaaagattagagttagaaaacaccaaatttttcccgaagttcaccaataaattggctacgtctcc

SEQ ID NO: 49842 - DNA, 1281 bp, Cannabis sativa
  modified_base (1242)..(1254): a, c, t, g, unknown or other
ggtaaaataatttccaacataggtttgatacccactgagggtagaatgcttatgttatgaagtccttggccctcagttttttgacttcatctttgagcacctggatactctccttctccagcaatcacctcttttacggaataggctagatgcttggatcaatgttgagtgcataggttatcatggaggggttgattctgaccatgtcttcatgtaacaatgcaaacaggtccaggtttgcccttagaaattgtgtcaagactgacttgatttctggagccaaacctttaccgatcttcattcttcttgttaagcgagtggaaccaacctccacttcttccaactcttctacatgtccgaagcttcctctaggatcaccaaagtgaggatctatttatgagtccccaccttgggctagacttcattgccccttactgagctcatcttctagacttctggtggacatcttctcctttttggccttggatagcgctaatttgtaacagtgatgggtaggctgttggtctctccttagggatgccaatcattgcggtgaaagtcgaggaaacatcgatcatgacaaactgtgccatcagtgttcacatggttggattatctccaactatgaggggtaatctgatacacccgacatgtgggatgctttggccatggaagccatacatcacttagttgcaacgtgccagatcagtgagttggagccccatcttttcatatgtttatttgaaaagaatgttgacggaggctctgtcgttcaccatacatcttgccacggtcatattctcgatttgcacagtaatgaccagggcatcattatgcaagaaactgactggagctgcatcttccctgacaaaaaagatcgtgggctctatgggctccagttctcaatagctaggacttttcctttgggctcatgacggagtgtccaagcatactactttctagctttgctagttttgccagtaatgtggggtccgcttattatgacccctagatgtcctgccacaggcggtggcatcaaatctccattttggcctctttgtacttaggctttgtcatcttgcacataacgacgcatgtggggattgttacgccttatcaagtacttgatcttcctcttcagattttgacactcattagtatggtggctgaagtcgttgtgatatctacaaaactttcacatgtctctcttgcccatttcccttctgataggaaagggctttnnnnnnnnnnnnnttccctgagttgccatgaagatggcct

SEQ ID NO: 49843 - DNA, 950 bp, Cannabis sativa
ggattagaaccataaaaaccgaaagccgaattttggatttaccgaccgttgctcacccctaattataatggactaatgttcaaaataaattcctaaaagaaaaagaagttgggaggcctctgaggggccttaggcaacggtcccaaacgccccacccaaaagacgcatttgacgagcacaaataggcatgtaaaaatataggtgtgggcacgacacatcatactataattgacactacatgacataaaaaatatttgctaagcacaacacgacacgatagtcatgaaaggcataacatgtatattaacataaatagactagcctaaagcatgagacattaaaaaaatgctataatttgataataacaacaacaacaacaacaacaataacaacaataataataataataatattaataatatatacatacatatatacaaactaggagaaagcacatatagttaattttatgatatgtgttttataatataaatgggattgattcaataaataatcatataatttaatttattattatagtctaataaatttttttaataaagtgatttattcaagaaaaacttattttattattgggtgtagtaatttttatgtatattcaaataatttaaatgatggtgttgcaatccaaaataaatactgattgcaatatgttagttttaataatttaatataattgaataaattatgataatgtaattacaaacttaatatttaagatatattcaaacttaatattttcaaatatttattctttaaaaaaccaaataacaatacaatctaaaataaacataattcaatgactttagtgaaatacaaaagccaaaactaaaaaaatttaaccaattcacaaagtagtcaacttttttattattattattttactttattttctatcttaaaattaaaccaaagaacaataccatata

SEQ ID NO: 49844 - DNA, 745 bp, Cannabis sativa
ttcttagtttagcattatataattgttcttacaatggatgtatatgtatacttgatgaatgtgctttcaaccagattttttgattaattgcctatagttagaaagcaactttgatagatagcagattctacggtaaaaaaggattttattaaaatgtaatctgtaatccaacttaattattttctcatgtatgtatattccaaactagtgtatagtagctgtagtggaaacacaaactaaaatcagtatctcgctgtttaaaaattttcgacttctattatcagctctcaagagattagttcatcattttcatatgatgtcactttttaagttaactaatgggacttaaagaaaggacatggatttgattccactcagcaccacctttttgacccttattggcatttactaatctaacaatttttcacactctggtgcatttcactcggtttaactatttctgttccccaaattgttgtagatagaattagaacggaaaaaggaaattaataataatgtcttttctatactttggatgttatatctgacatttgttgttcctgaaggagagttggtacatgtagatacatgtactgttgagaatcataaggttccatctcaaaaccaattgacaatgagtggagtagtccatgttattatatatgcctcaattctccaccatttatttcatgtaggacaatgtccacaatagaaacaaaagacgaatggttaattcagctcattc

SEQ ID NO: 49845 - DNA, 988 bp, Cannabis sativa
gatgcagcgtcctacttccaaagacttttctataattgatgatgtatttcttttattttttatttttgtgatctgtggaggagtacttgcactagcactttagatttataaactcggtcattatatttgtgtgtgacctcaagaatttatatattaaatcataatagtgcttaactctattgtgcaaatagtctatatgtgcggttgatcaacttaatgaccttggcagcactagcactagcattatagaattaagaaacttggtcatgaggaaaacgtaaatatttcattaaaccatagaaatactcaatctcttgtgaaaaaagatttgaatgctcatttaacatactagggtgtatataccttttgagtgatcgagaaagtgccttcattggttacttgctgtaatgccctaacacttagggatgccacgtgtgtgcgtttaaaaactagtttataataataaacttgcagtttagataaaatatgatttaataaaattttactaactattctaaattataaaatcacggcagtcaatttttaaaattggggatccccctatttaaaatattacaatatatgtcattacagtgttatcataaaataaatttaaaagtttagaacatttgaaatacaactcttgacaactcaacaccacctgccaaataagttgatctgtacatttaactagagaagatttctgactcatggttgtccaaatatctctgtctattacctgcaccacatagcacccgtgagtcacaaggactcaccaagaaaagtaataacaagttaacaacaatcatataattcaccatacaatatcaataagtaaactcacatcatcagaatcaaataatcatacattaatcacatatttaaatttgaatcattacatatattcaaaaataatgaatgtcaatataaagatatacaattaccagcccaacaatattaattataaccattactttataaagtaatc

SEQ ID NO: 49846 - DNA, 819 bp, Cannabis sativa
acatgaaaataataaaaaaaaataacatcaaaataacataaaaaaaaatatacaaataacaaaaaatcaacaacaaaataataagaataccacataaaaatacatataaataccgtattttacataaataaaatataaaaaatcgtaaaaatattgaaaatttcgtataccgtatttttgtaattctttttaattatttttgtgttttttaaattatcccttcatttattacctaaaaccaagtacacaaaattcttaccgatttaatcaccttcaaaactcatcatataaaatgagatgctcattaattaaataggaaaattgaaagaaatacccattttattatccttattctaaaagtaaatggcaataatctcatatatagtgaaaaaaaaaaacacacacacacatttttattcgtatttctcttctcattgaccatacatacaaaaagttgatatatattcacatttgacataaaattccaaacactttatcaccaaaatcatactgttcatcatattgcatacctcttaaatcaaatctaattaaatatcagtcccacacatatatatttttaagaattttaattttatatctaaatttataattttatttccattttaattttatattagtattatttaataaaatactatatttggtattgacttgtatcaatagattgtattaaattataatatattttcaataaactcgaccccaatactaattacaggtcgagtccgagttcgagtctaggtcccgagtctaggttagggtttgggtctggtatccaggtctgggtctgggtcaagg

SEQ ID NO: 49847 - DNA, 1336 bp, Cannabis sativa
  modified_base (81)..(81): a, c, t, g, unknown or other
ttgatacctatattataatcactcttactagatttatttaattttgtggggaattttctataattatcaaattaaaaaaantacatttaattttttaaaaagtaatatttttgttagtgaagccatagcccccatatcaatactactaggtctgtccctgcatatgagccaataagaaacccaatagttagaactaaaaatctagaactagaactagtactttgaagacacagaaatagcatttaattaagctttctacatagtacaatgggtggcatgtgtcatttactagtacactcttatatatttacaaaacaataatcaatcaaagaagagtaggtgaggaagagcatgtagcaatgtttgacaggcagatgagatacttgtttttatatatgaactctacatgaataacaattcatattcatccctatatatacatatatatacacacacattatactacagatgtattgaaaacacactcaaccttaagctcttcaaagttgagttgacttgagttgggtttctctcttttctgtatgaatattttctagatgagaccacctcgtcctgatgggcctaggcctggatctgggcctgggcttggacctccgccgggttttcttggtggccttttcaatggcttgtacaacaccatatcttcttggtcagtaacttcatgaaaattgtatttcaagtttttcaggttttttcttcttttatatgttgtttcccattttacaatttttagtaactttcataaaacttaggtggaagaacattcatcacaacacaattatatcttttgtatgaaaagtgttttgtgccgtaattaaagttctcaagcttcttttgaagtgcttgtccagcaaagcaattatggggatttacaaaataataatgaattaataatattacgttatttgaaaaaatagcatttttaaggtagaaaaagaaattttatatatcccctctaatatttttgcagtgtctacgtgttatgctgttgctggttgatacaagattgctttggtggtccacttgggcctccagaaggcccaacagctcctcctcccgggccagcttggccaactcctcgaacacctggcccaccttcgcctcctcctcctcctgggcctccggcacctcctttcgacccagttcccccacctggaccttctttcggccaaccaagtccttttgggcctccaggaggtccaccagacccttttgggccttcaggaggcccaccaaatccgccaccatgactataatgttattactgtaattaataaagatttttcaacctaccattgttgctattgttcattca

SEQ ID NO: 49848 - DNA, 969 bp, Cannabis sativa
aattaccctagctagctagctaggttttcttttggtctttctgacacatattctagagatagagagaaagggtatttgtgtttgtgtgtgttatgatgattttatgaaaccaagaccacttctcattattattatttattattttttttaaggttattattattattattattattattattattattatttagagtattgttattgattattaatcctacttaatattttttaaatttattattttaatattagttagataatattttttaaaaattattatattaatatttttagcatttttcttaatattattattatttgattaatttgtgtgtacaattatttttacctgctatgtatacatctacacgcatacacctacctacgtttcaaagcacgcgcgtgtcttacaacctcataaatcatataactttatttatctttcattcatctcaaaaccaaaaagaaaaagaaaaaacttatattactattggaaattatttatattatgcatttgtcaaatttatttacttgtgtatgatatattattattttgatgttgtaatttatttttgtcgggatttattttgttttttcgtttccgttaattttttttttttaaatgttcttaattagctagttaagtgtagtatattttttccacacaagttcaaattctttttttttttttgttttgaaagtttaacaaattctctctcttttttttttttataattaatgctagtgcagtagtaattttcacagcaaattctatgtgaaaggcaaaataaatcaattttttgttgaggattaattaattctttggactccaataacacttctcccttctttcctctccaaaaaaagtcatttcttttcctatttatttgccaatatgaacatgaaaattagcttcccatttatagtgaaattatctcttttctttcaataatcatatatatatat

SEQ ID NO: 49849 - DNA, 1761 bp, Cannabis sativa
aacaatgtaacaaatatttggaaattagatgggtcgacgagttacctcaggtactttgggctcacagaactactaagaagacaaaaacgagatacactcccttcccactagcattcagctcggaagcaatgttatccgtggaagtgaacatatcgactcatagacaagagttttatgatcaagaagagaaccaagaactcctaaaattatctttggatctgcttgatgaaaaacgaactgagtcgcaagtcactaatgcagcgtatcaacactgacgagaaagggatcaaacccacaactttaaaaaatttcaaaaaaaaaaaaaattaaagtttttgatcaaacctttctgacgagaaagggatcaaaccatcctaactttttgttttaaaacctgtctgacgagaaaggaaaatcaaaagttgtaagtgagatataacccataactcgagtgcgtagctgaatattatggctcgcacaatataggaaagtattaaatgagacatcaaggtgttttgatataagtacttaaacctagtgtatgaatagataatataactattcatgtaagcaatcaaaaatgtacaaagtgataagatcattaaaagtatattcaagtttgcttaagacagattataactgttattgcgaggtagaattgataactgcttgtaaatcataagcctggtagattataaattgcccgcgcaaatagtagattactaactatttaaataggaaaattatgagcaatggaaaaaccaagactactctgcatttgatcaaaatataattgtttacattgtgaatgaaaatgcaagcaaacataaatatattaagttcgaatgcaaaagtacaaagcatttaagataaaaaaaagagctaagttggccagctaactttacaaacttgcttttacgaaaatgccacaaggggcaaaccattaggtcattttcctaaaacaaaaaatacaagactcattataggagacagcagggcttgaggataaccatctccaaacaagaaccagagaactcgacttggtgtgctgacccgatgagatgcacctcaacaaccctcgcagcagagatctcattccctcgcagcagagacctcattccctacaactgagacctcattcccaacctttagaaatttatcaacatcattgataggctggctcgaagatttcctcatgtaagctttggtcttgggtcgtttgggttctttagtggaatctgcgacttcatcagcttggactatcttcttcctagatctcttgtcaacttggggaggacctttgagcatactctaaaaatctaagtccattcttgtggagacaaaggtaaaaaatcaatgaaggaacggtggtgttgaataaaaacattaggtttgtagatataaaaaaaaataggttcagactaggccaccatttataaagaacaatgcttactttcagaaatctcttgtaagaatcgcctataacggttggcagtttcttcttggtttggattaatcggacaatcttcagtcctggaatcattcatttccgatttgaactgaggtttgaagtttttagggatatatggggaggataggcgtttagtatattccgaagctacaaatgttggaggataaatttttgagtcaggatgggacatctctgtaagagaatgacaatccaatttttggacgaaattcaccaaaccaggagtttatggaatatggctgacatgaactatcattttatactttgagccc

SEQ ID NO: 49850 - DNA, 3742 bp, Cannabis sativa
gtgtcattagatcatgatgcctaataactatatatactaaaaaataatcttttaaataaggtataaaaaattgatatatatatatatataaaattatatattttttggtaaaattagcagtgttatgctgcgatattagtatctctacttttataacctgtgacgatggcattttactcctgagtaatttacaatactaaaaataaaatttaaataatattacgtattttttttatacacgtgcaactaactattttaaattatttaaatccataattactatatatatatagagagagattctctaatatagtaattgagtatagagagagtgtagtgagtgatgacatacatagtaggcggtgacggtaccggcggagttaccggcgacgagcttaagttgcatatcaatcctaccaaacaagtattgtcttttggaagtgaaacctgagccagaaatagagtcaagagagagtgtgagaactttgcctccttccactattttggctctttggccaccccatgtcaactcaaattcttcaaacaagttaccatttaccaaactagtactctttgtgttaattgataccaaaaccaaaacaaatatcatcactactactatacctctcatatttttatgtatatatgtctagaatatatatattgattgtatatgattgttgttgattgagtttggtagatggtgtatttatatatataatgaaatttgttgtctttatatatatgctggcaatgggaaagatatagctcagcagcaactttatgtgttggcaaatatatataaattgtcatataagttaagattgtgtttataaaaatattagggttattgtataggggtgtttttatttttatactttaaaatagtttttttttattattattatttttatagaattacacacaaaaaattcctatagcaactaacagaacaacataaatcgcaatcaaaatccgtatagtaattcacataaaaattacttaaaaaactatcgaaacaactcaaaccgtaaatttaaaaaataatatatgaaataatttcccttttatatatataaaaaaatatttatatattttatatatataaaaaaataatattgaaaaaaatttatgtataatatattgtttgaattttaattttaacattttaagtcatttgaaattttataaaatatatttggattgtccttatatataaacaatgaggatttcaaatccacttaattttagagtttttagtttataatttttactataatataaaaaaaaaatattgactaaaaagaattgtacaccttaagtattttcttaaatatttatatatatatatatttatatatatatagctcccttcttaatttgtgattttattggggaaatgttttgaaattaaagcaacatgattgattttaatataagcttttagttattattaggatttttattgttggaattattataaatatcaaattgtgccttttaatttttgtatatatgctcattgaaaattctcttcaaattatttacagtactagaatatttgtgaagttgtatcttatatgtctaacaaaatattaatatgattgatttttcattctcatgtgcaatttaatatttaatttttattttactaacttaataaataaaattatatatttgaaaattttcttattaattgttgaaaaaaaaaaacataaatttaaaatcaatttttatttaaattatacatatggcaattatatcgcaataatgcattagccatatcaagattttgttagttgcataagataaaactcaacaaaaattctataaggttgaccttaaaatttagtaggtataaaaaatattttagatctttatttagagaaaaatataatattttttaaaatcaataaaaaagaaacttataattttaaaaggaaacaaaatattttagactactaattaagtaggccctagacacaaacctaactcggtcatgcctaaaaccgagcttgattttatattacaacactttgaataattctgattgaaatttatacaaatttaaaaaataaataaaaacacaattttatagttaggaaacacaaatcaaaactttaattacaaagtcctacattattctattacattcgagaattatattgaattaacataaaataagtataattgttttttttttttaaaaaatgtggtgaatcatattatattttcactttttgagtgtatgtgtcacaattatatatatatagagttattaaaacacaatatgactagctataaatacatatattaaagatagagttcataagatttttgtagccgcttccaccaaatatatatataattttgtcttttatttcttcataccatgaatttatttatttattatttaattatttatagtaaacttagacttttggatgtatgtaataaatagaacaaaaactatttttggaattatttatgaatttatatttagtgatctcatgcatatacttctcgattcttcataaagtcaataactttacattagcaagttattaaataatatttaataatccaaaactttaattaattaaatgatagttttcttaaattcttgcttggatactaatcaagaaaaatactaccgttaacattttattacaatctattatttaatctttgtgcctaaaattacatgctaatttttttttaaaatttgtctctcctaaaaagattatttcaaaataattaatagataataattaggagaggtgtaccagtagcgagcagaagcaaaattattagatactttaggaaagtttgactagaatcacacgtgcaagttctcctgcatgtggctcgatcgtccgtgataacttcttcggattagtgtgaactagtagactgatcactaagtggggatgcttggtcgtgatatgttattcgttataatcacaacattatctttataaatttttaaataatttatagtgtcaaaaataagtttaagtttttttgaacatgcgtagtaaactgaaacattaagaattttattttcattactgtaaactattcgaaacttaaaaaaaaaaattacaagaatgatattgtaactataacaaatatcgttataaaaaaattaaaaaaaatatttcgacatgtaattttaaaaattaattagaagattgtaattgtgttattatatatatattttttttttggtttatgattaacttagcaatatctttggcttttgaagcatttggccaaagtttgaatttgtttttgagtttagcttagaaataaataaataaataaataaaagattaatgacttgatgaatgaggaaagtaatattgggaagtacaaagatgatcacacgtgaattttcagagtttctaatcaaagaatacaactttttctttaatgcaatggaattcacatcattttgatttcttcctcatttatttccattgggtttattatatatgtctctatccttcacaaagctcgattttttaagaaaaaaaaaacgacaatcaatggaaaactgatatttttcagaaaaacgacattattggttaaaaacgacatttaatgagaaaactgatccttctcagaaaacgacatcattggtaaaaacaacatttaatgagaaaactgatcttattcagaaaacgacattattggttgaaaacgaaatcattggtgaaaacgacatcattggtaaaaa

SEQ ID NO: 49851 - DNA, 1398 bp, Cannabis sativa
taacaaccactattaacaacatcggtttcctcaatagaaagaaccttcccaggaggaccacccaacaaatagcactaaacaaaatataacacaaccaacttgactgcaatatcatcattattcttaaatttgtcaaaaataaaagcaatttggatagcattcttggtaattttttatggccctttaaacagtgtttaacaagcatattatcatcctgcttgtagtggaaaatgtcagagtatgacaatctaaaccggtaattaacaaaaatttctcaacactaaacctcagaaatttggcttacagagaaatccaaaattgcaactcatttgcccattcaacctccctcaacagcaaaccatgaatgagttgaaaatagatactatgctctagaatatggagaaaatgaccaaacatagtttttgaaaatattgtaattgggtttcagtgagaatagttttaatatcattaataacagaataatagccagagattataactctagaatgataatatttcaaacggctgtacttgcattccctgtcctataaaaacacaataaaaaaaactactaaaataaaactaaaacaacacaataaagacaactactaaaataaaactaaaacaacacaaaaacataaagaataaaaaatcaagcatagaaaacactaaaactaaaataatgaaacaacacacctcaataacccttttcctagtgatctcctcaaacatatcatttgattgaacagtcttcacttgggatttacccttcccctacgagttcacaaaacaaaaacaacaacaataacaacaacacaacagtcaaacaaacacaaaaccaaaaaataggaggattaacaaaaagaaacatgcaaaaaaataaatagatcacacacgaagaaatctgtaatataattaacctataaaaaaccctaaaagaatacaaaatcaatagaaaattaccttatcaactttgggagactttaaaaaactctggctccaactcaaaatcagagtcagaattttccaaaacaggtcaagggtgtttagatttcctgttcttcgaagttccagcaactaattttcttttagtaggaactggggaattagggctacgaggatgatccttcaaattgttcttgcccattgatgatcttggtttgcatttttaagggatttttttataactagagaagaagatgttaatcgggtaaaaactatacttaatgatgaaaagcaatatttataggagaagaacaacaaaaaaaggagaaaaattaaagggaaacttatgatttaaaaccaaaaaaactaaaagaatttgaaaaaaaaaattaaaaccacccactaaacacaataaccatctgaaaaaagaaaagaagaagaaaatgaagtaaa

SEQ ID NO: 49852 - DNA, 1436 bp, Cannabis sativa
  modified_base (26)..(34): a, c, t, g, unknown or other
aggatgttaataaaacatacttggtnnnnnnnnnatcctggtaaaatatttccaagagtgcatgcttctgggacctttcataaagtggttctattcggttgataacaacaaccggtctcacatgcatagcaggggtaggagccacctgcacctcaggagcaagcattacaggagcacccctactgtcttaaacgtcagatctcttcatcttttttattaattctggcttgcatctcaacgaacctattttcccaatcctaggcagcctatggtgggttagaatcaccccgattgcatgccctacctcttagcccttaggcctctacctcgaccatgaatgtttgggggaaactaaactccctgatcgccactagatctgaccaaattaccctagattctcatgttttgtctgacgtccattctatttgaacaacctgcgaaacaatgagctagcctggtcagaacatgattaggattaaattttaactaccgcttacttgagaaaataaaacatgcacctattcagctatcaggctactaacatgcttcctatcaagcttttcttataacatactaataaataaactactaaagcaatagaagcttactgaatcgtgagtcgagtttatctccaatgatgattgtatatatcgtgacgatcttcgaaagataacttggcggctctaataccaaattgtagcactctactagattaggcgtgttattgtgatttaaatactaactgtccaatccattgctaaccaacgggtttattgaaaatcgtatttaattaaaacttttcataattaaccttaaactttaaataaattaactttacataatctgggatcccgtcttagaaagttacaactattttataaaatatataactacaaaagttgttgctagtgactgccaaaataaagcgtcctaccctaaagatctaacactacaggtctaatcgccccgatatgtacaattcttatcagctcgcactcactgctgcacaaccttatctttgcccttacttacacatataaataatatatgtgagtcaaacaaactcaataagaaaagcataatcatgacataaacttaaactaaattataactagacaaccatacacccaatcataaccctatcccacgtcccactcatactgagtctagaatgttagtatgatagtactattgaccataatatcaatctatactcggtactctagtcggtactgtgataatagcgtctcaacaatcagtactttgccaaacatatatctcctagtatccagtgtaattctatgtacactaataccaccattattgatatgttaactaacgggcattcataaacatgcacaccaaacatgtaaagccctaaataaaactctatttcaatgtaatcttttatattcaattatcaataaagaaataga

SEQ ID NO: 49853 - DNA, 4667 bp, Cannabis sativa
agctccacgtaactttatatatatatatatcatatcacgaatagtataattaaaacatcccacatgattaaatacaataatttattatgaaatatttctaaccattcttataacaccacctcataacaatactaataactcataacaaaacattttttatataacaaactatgacttagtaaaagataaagataacagtttagtttagttacatgaaaaatattttatataatatggagtagatatatttttttatgatctatagtttcagttatttttatatgttttttaaatcaatatttttctcacaattacatgaaaagtattattggaaaattctacattatacatgagtgtacatacacctttttctattttagtatctaaaaaaatttttagtctaaatttttatagttatatacgttgtacttatttaagacatttggtaaaattttcaaaaatttaaaaaaatttaagacgtcaaaaatagggttcaaaaaatttattagacgtgtgacttttattattttatacgagtctgaaatagacggtttgaacattgatttttatattgtaaattatttcgaatttttcaaaattttacaaaatatctcaaataactataacgtacatgattatgaaaaaatttgaactaaaaaattttataaataccaaaacaattaagggttgtatcactatcagtgcacctattttagtaagaaccatccaatattatttcatatggttcaatcctatgagttctcattaatccatcaatccatctcaatgcgtattacaagcaacgactgatagtaatagctatattcaacacaatgatatgatccaaagaacaaaaacaaataaataagatatattacagattacagttaagggcggaaggatgttattatttgccgggaccatttcggcctataaatataatgtactgatcattatatacattattaatttattattacatatacgatacagtttgtattcaacagcaagttttttcttattattctaaaactaatgtaggagtgcgtttaagcaagagcttaacaacctctttcatagaaggccttaaagaaggttgtgtctgtgtacatttaatcccaattttgaaaacacagcacatttcgtcaacatagcatgcttcccttatctcctcatccaaggcttccgctattggcttgtcctcatggacatggtgccacgcccattcgacaaggctactgtgtgtgtcaccgctgtcatttgcttctctaccagttgccaactccaagagcacaatcccaaaactgtaaacatcaattttctcattcactcttgtagtgtacgagtattctgcaaattcaagataataaaacacaattttgagtccttactaagatagtcaatggcatgtaaagggaaagaaacatattgttggctcttaccaggagctatgtagccaaaggaaccagccacagttgacattgtagcaagctctccttgtcttgccaagaacttagctaccccaaaatctgcaatttttgcgttgaaatcagaatcaagcaagatgttgcttgatttaatgtctctgtgtataactggtggcacacaatcgtggtgcatgtagcagaggccctgagcagctccaatcgcaatttttagcctcttgggccagtcaaggactaaatggtgaacagacacagaaccaggaacagggttagtgatttccctatttttgctgtaaagccatctatccagactacgattctccatgtactcgtagactagaagggtagagctctcactggagatacagccaatgagtttcactatattggaatgtctaattgaggtcaaaatcttgacttctgcaaggaattcttgctcaagattgtgatctagcttattcttgttccatatgctttttacagcaaaaacatctccattacgactcacgcggacacggtagactttgcttgagcctccagttcctattaggttatgctcttttattccagacacaatttttgtttgtctgaaattcagtctttgaaatgacaccaccttccatttggaattgaatctgtttttcctcctgtaacatcttattatgaagaataagatgaaaagaacagacaaaaatacagctaccgttaatgttaccaacacagcaagatattttcctctgattatttttttcagtatcttttccagcttcttggatttggtatcgcagagctttagttttaacacattattacttgcacaaagatcaggattatccaagaagctttcggcaaatgcaggcttatagaactcaggggggactataccagtaagcttattggaagagagattgaaagtttggagcattgataaatgaccaagttgggatggtatttggccagaaaacatgttccctgaaaggtccaaatttattagaattggtaacagaccaagtctttctggaatctgtccagagagttggtttcgactcagattaagagtaagtaggacctcccaagatagtatttctgtaggaaactctcctctaagctggttttgatcaagcaaaagatttgtcaaacgaggaagagttgtcaattcttgaggaatagtacctgttagaaggttatcactggcctcaaactcaatcaaatttctccatgaagacactgcagtgggaagggtaccggaaaacctattgttactaatatggaattcccaaatgttatcagacaacttctcaggaaacaagccagtaaatgaattgtttcttaggatcaaggtgcccaagttaggtaatgtccacaagccactaggaatctcccccgaaagcatgttgtttccaacattgaatacaagcaagctactacaatttccaagtggttctggcaatgtgcctgtgagcctattggaattaaccctgaatgattgtagcttcgaattcttgccaaaatcagaaggcaaaacgcctgacaaattgttgttgaacactttgaaatctatcaaagctggtaatctgccgatgccttctggaatatttccagataattgattgataaacaaagccaaacccgtcatttgctttaactttccaaagtcttctggtattatccctgtcaaattgttttctgaaaaatcaattaccttcaatttcagagattcaaccacttgaggaatctccccagaaagtatgttcttgtaaagatatactgtgcttaaattcttcaacgtgaacaatccatctggtatattaccaatcaaactattccgagataaatccaagaactccaaagctaccatatctccaatactttcaggtattttcccaatcaaatttaagttagtaagccacaaattcttcaactttttcaactgagtataatttgaaggcagtttagatggtgaaagcaacttattattggataaccataacgtttcaagattggacaagttacctaattccagtggcagagaaccattgaattggttggcccctagttccaatgtccttagctcttgaagtcgtccgatggcaatgggaatgttaccagtgaagttattacctcctagtttaagactccggagatgaaccattcgatcaatgtcactaggaatggttcccacaaagtagttgtcggagaggtctaattcttcaagctttgaacagttgaacaaagctgtaggaaacacccctgggatgtagttaagcccaagagtaattagtgagaggttcctaaggtcacagatgaagaaaggaacaggtaccgtgatatttacgtcatagagtttcagctctgtgactgagtccaacatacaagtaattccaggccaagaacagtgggaagaggagtttgttgatgggatccattgactcatataaggaaggtttccccactgctgctttaacttcaggagaactgattgttcttgctcttgtagtgttagagaaactccaggactgaagtggaagaagcataagaaaacaacgccaaattggattgggagagatttgtttcttatgcaagtcatttggaagagactgagagcttgagaaatggatttggtctttcgatactccttaaggagttgcatgaaatacttgtagcagattaaaaaacatgttttgactttctaggaaagtttggatggtaaattcccactttaccaattaccaagtaccaaccaatacatggggccatgtagagttttttttttcccttaagttggacttttggatgtgatggtcaacgctcaacgacgactaagatcatattttaaggcgttatatatatactgctagacctagtgctactgaaacgaccctgttccaaaattgtgatgtgagaatgcaaatgaattctgtgatgatgtgcattattagacactagtgatattaagtatctttgtaagtagtactttacaattgtaatattttttaaaaattattttcttgaattatataaaaattaatatttaattacaccattattaccgtttagaaattattttcttaaattttatataaaaattatataaaatattacaattattacaccattatataaaaattattttcttaaattttaacaccattattaccctttagaaattttcttcaggtaatcatccacatgtcttttcgaaataggtgacgtaaaagatga

SEQ ID NO: 49854 - DNA, 1062 bp, Cannabis sativa
gtctaattggtaacttttgtaattggtaacttttgtaaaacagaataacttttgtaaaacagaaagtccttttgtaaaacagaaagtccaaaaacagaaagtccaaaatggtatttaccctaataataataataagaggagcaggtatctattttctctctcttccatggtgaagaagagatgaatggtttaaaagccagatcctaggttgcctgatcttgattccactcatggtctgcaagtagaaaaaggagaggaaggtgatgctagttcgatccttgagaagaatatatgtgatactggggaattgaggtagagtacgtagtgctcgataatcattattaattgtacctgaatttctcacaccccagttagtacaagctgggctaataaggaagtggaattggagcaagaacaagatttgtttcaagaatcggtcaaggatatctctggaattcatttgctaaaaagatggttttaagtcgtgattcgaagttgtcctaaaaattcatccgtagtaaagtagggttttaatttttgtattgttaatgttattttatttgttttgaattattttttgtgttttgtttcttattttttacatgtttaaaatatttgagaacatcttattacagttattgtgctgataaaattctaatagaattaaaataaatttcactaaaaatgtataaatattagagtaaaagtattagattgaggtaaaaaagtttatattatatgtgtgtgtgggaagtaattaacttaactaataaaatactacacatttaaataaataattaaatatagtttttttttttaaatttcaaaattgatagaaattaaatgagtgtaaatacattatcagcggagtataaagaaagtgttgactatttcttggacttttgacagtgtaaaaaattctaaattggttgtttgttcttatcttaaatgtggtaacatggaaggtatgaatactactaaagataaatgagcatttatttaggaacgaaaaaaacaagaattataagtttgttttgtaatactttctttcttttgctttaa

SEQ ID NO: 49855 - DNA, 1252 bp, Cannabis sativa
tggatgggactgttcacctatagtaaagactgtcccaccggctcctattgttgtaccactaaacaactaactaaatgtaaaatgataaataattcattttgtagttttactaaacctacttttaaatattgatgtttgttaaatattagtggtaatagttagtattaattagttgtaacctgtgagtaacatttaattacaagttgttgccttttattgttttgtcacctatactcaactccaaactcaataatcaactatggaagttgtatgtatagagttaatggaaccactgtgcatatagttatttgctgaggaaggttctatattaatctaaaaacaattttaaataaatagaacctacagatcatgtgttataactatagtgaatcaatagcctactaaaatgatctgagaaatcattacagaaaaataatagtaaagattaaatacaatctcgtggttgagtttgcataaaaagattatgtgacattaatgatgataatgttggtgcaaaatctgaatcaatttactaagatgatgcttaataaaatttctatgggaaacatgcaaaactaaaaagttagagtttattatcattgtaccaccccaaccccaatgatctgccatatatgacatatattaaatcagaaagtaaatacagtaaaagaaaaattaccacttaaaactgatcaagaatcatatattactttcttttcatataaaaattgatcacccatctaacaagagagcaaaaatgcaactgaaagtgatttttcatgttagccacggcactcaaggaacagagtgggttaataggactcacactagcgataatgacaacatgatcttccaaatcgctcttcttgtaaagaatttttagaaaccaatgaaagataaatgaaagctataaaaatagataaataatgaagaaataatactatatttttacgtgattgggacataaacgagtcatagtcaacaaggtaatattattacaatgagccttgaaaagtcttaggatttacataattgtttgaaccctagaattttgaaaaatgagatttcaacccttttgcatgggatgatgttcttatatttatagtgctacggttcttatttatctaccttttgcctactattggggtaaatacaaataacatattgacttaggcccatctcgtggagcccgaccaatgaggtgtcgattatatgctgatgtggatcccacataatgtttgatagttgtcca

SEQ ID NO: 49856 - DNA, 1643 bp, Cannabis sativa
  modified_base (1411)..(1416): a, c, t, g, unknown or other
  modified_base (1616)..(1617): a, c, t, g, unknown or other
tcaaagtgcacgacacattttttcataggtcgcaacccacaacacccgggccgcgacacatttatgggacctgacttggatgttcaggccaggctacgacgcacaattttctaagttgcagtctacaatgctgattttaaaattttatttagtttttaattacagtttaagtgagactataaaataatttttctaaaattaattagagatttggaattacattttagaagagaaaaaatgagaagaagatctcgagaaaaaaaaaggatggcatcatcaaaattatcaatttagttttttatttttttttcttaaactctttggattttgattatgattatgattatgtcaatgattaagattatttttattgagtggtttttcttaggttaaaggctatttcaatgccctaaacatgattaccattgattaataatattttgatttctttcattcaaattaattgaattgttcacatgttttttttaatttaaagcttatgttattgccttgttcttatttggatggctgctgaatatgatagggtagtgattgattgttattttagaatttatattcacctaataatagtttaggattctatccttattaatcttactacttttgctgaattaaattttaagtactttttcttggattgtttggtaaaataattagtcaatagcgattttcttttgattaaattacatatgagagattgagataactattgcttttgtgttatcaacggttgttagttaaatatagaatggagagcataaatattgctaatttatgatatggttgtttagtggtggtggcgaattagttcttaactctcttttatcaatactaatgcccatatttcattgatgccttgttctttagtttttatgttctttgcatttaaattgcaaaccataatcccctcttaagttctagtttataactcttgaataataaattaaactatagtcctcgtgggatcgattcgtactataccactatactaaagtagttggttagtttgaaattataattgttaaatttgttacagtatatgacatacatcaaatttttagcgctgtttttgggagttatttttattcacttcttattgtttaattttactatttttcttttctttatttttgctatagaattttaaaataaagatgaactgaagcaaaagtttgatgtactcatataacatagcaaatttaacaactattattaaaaaaaaaacacgtcaaacacgcgcaattattgtgaaaaaaatttcactcaaattatgtcactaaaatttaaaaaaatatataatataaactaaaaaacaataataaataaaatcaataaattggatagacacgataatttttcctcacacttaatataagcattgtcttcaagnnnnnntcaaataaaatcaatgcaaaataaaatagacaagggtaagaaaattcctgtaagtttgctttatttaacgtcgttatctagattgtatgttgtgctcatgtggtcttatgttgggtcttctatcaaacacttatttcttgtgtacttatcaatagaactaaacacattgaatttgataatattgggttttatgccctaannaaaactctatttcaatgtaatccaga

SEQ ID NO: 49857 - DNA, 1512 bp, Cannabis sativa
  modified_base (637)..(642): a, c, t, g, unknown or other
  modified_base (688)..(697): a, c, t, g, unknown or other
agatgtgggtataaaaaaaattacacatgcaataaattatttaaaatttaattttgacacattaaataattttaaattttctaaagaattataataaaagaaatgctaaggcactacaggggcctaattttatctaacatatcatatcactatctatcggtagtatcacgtctcatataatttaatataatagcttttatgagatattgctaaacaatcacaaaatatcatcactaagtagggtcgaccttgagaatatatgtatcatggaactcgaattcatactattgcataatatgttatacactctaatcaaccaaactataaatatttattattaaacatcactactggtgtcttatagcaatgctcttgtaataaactaaccttattaaaaagagttttttacggctaaaccctctcaactatcactccacttgcacttaatcctctaagcttaaattttgacggtaaaattctccaaaatacttaactgcttgcaaatttaaggtgtcatctatttttttacagttaattgtcaatatagactgcttatgtgtacacttttgtacatgtgataaatttatattggtacacctaatattattattttaaaaatataaaaattatttcaaannnnnnaatattttttatttttttaaatattttatttttattttttataatnnnnnnnnnntttaaaatgaattttgaaaataagttttaaataataatattaggtgtaccaatataaatgtaccatgtgtacacaagtagcccataatgagagttaaccgaatgacaccttaaatttactactaatacattcatttagagggttttatcgccaaaattatagcttggaaagttatatacaagtaaaacgatagttggaaaagttttaccacaaaaaactcaatgaaaaataaatttataacttattcacgagtaaaaactgaaacatatgcaccaataatcctttttagttgctatcccatggaagtcccaataacgtagagagaaaaagtttcagatatatgtggcaacatattatgtttgactagtaaaaaataattaataaacaagacaagaattgaaaacattaataatggttggactggcaatatttttaatgggtatgttttcattgtactacacgtagcaaaattgaggtaaggtggctagaattttcaacgaaacttgatgatgactgagattttgtttgcttgttatttatttatttatttaacctgaaatatgtagctataaaagtattattattggacattaatggtacttaacacaattaaatatgtcattttgtgattgattagtaatatatttttaaaaaaatattatattaaattatatatgacccaatatttaattgaaccaataataatatcgacacataaaaaattacacattactggaactttaacattttctatcacatatagttattgtgtttgagttctaaacattaattgatttttaacacttaattaaaac

SEQ ID NO: 49858 - DNA, 749 bp, Cannabis sativa
aaaaaaaaagtaacaaacactactaaaagtacaaataaatatttttctttgaaaaaaaacataagtacaaataaatctttaaaatataaaaatgaatatacttgcatattttgcttatagtgggctgcttttaaccaaataaatgcagatagttcaatgaggttttcatagaatatgacaaatttatataagtagcattatatataatttcatgtgggtcactctattcttatcaagtaaatgtgtatataaaagtatatatataagacatatatacatatgataagataaccaagataaccatatataaattccctctcaacatttctttgccgtgtggaaaaactcctcaatgattgagtatataatataatgtttagtagacgcttatctattttgtgtaataaaatatttgataaaattttagttttgacattaaaaattagtttagaagccactagattaacggtgagggagggatgggaaaaagtaaaaggttatggattcgaactcaagacctttaactgttaagctaatgtatgattgtaaaataccattatattacaaaaaatttacaagtgatgattctaaataactataatgtgtattatcataaaaaaaaaattaaaataaaaaactctcctaaatgccgaaatagatagaatctacctaaacattaatttataggtagtgtactataaacttaccgtataatatatatacacataaattaatgtttagtgcaacaa

SEQ ID NO: 49859 - DNA, 963 bp, Cannabis sativa
  modified_base (774)..(779): a, c, t, g, unknown or other
gtaacaatggaatcaacaatgcagatcatatcaaatgaagaatcaaaacgactgaatgccgtggaatccacattccaagatgctgaatccattgccaaagcaattggaaacgccagcaaagttgtggtaacaataggtcctacagagaatggccccagtcaagaagtcacggcaatggacgctttaaaagttgtccaagctgccgagctggctggtgttggccacgtggcaatagtctatgacgggaacacaagtcctggatcaacatacaacgtactggatggcatcacttcgttctttaacaacatattctctcaatcacagccattgagtgtacaagaatttctgcagaaaatcattgaaacggacatcagctatacatttataaagacgagtttgacagaggacttttcaccagagagtgcctataatgttgttgtgtcagctgaaggaagcgttggtgcaaacgactacaaagtaatgtaatgtatgcagtaatgtgtagactaaaaaaatcatcattcaaaagatttggttgtaaatatttgttttttggggtggacatcaaattttgactatctatacaatcaggtagccaagtctcaaattgcatcactggtggccaatgtattctcaaacacggctgtagcagagaataaggtagctacttttctttctacccaagttttgttcatattaatgaatgtgtgctagttttatatggcattctataaatggtaaaatcctttaacttaggtggcatttggttggagnnnnnnaaatggaatggaaaggaaagaaaacattctcattccatttctttgtttggttgcatattaaattgttggaatgttattccaatagaagggccttttcaccaatttgatggaatgacaattccattttaaaatagaatgaaagaccatttcaatgcattagcaattttttttatacattttaaat

SEQ ID NO: 49860 - DNA, 1485 bp, Cannabis sativa
  modified_base (138)..(141): a, c, t, g, unknown or other
atttttttatattataaagacgaaaaaataaattctattttctctcctatttactatggcgacgaaaaatcaaattatcgctatatttattcctttttctacttcttctgcccagtgcagaataaccccaaggggttnnnngttttttctaccaattggggcccttccttcactacaacttttagtcacaacaaaaaactacttgtgactaaaacatagtatctagacacaagttgtcactcactaatttactcttaattaatcaccacaataagtattgtaactaaaaccattagtcacaacaaattgtaatttttgtgactaatacctttggccacagaccttttagtcacaacataagaatagtaattaataattagtcacaactttattacttttagttacaagttttgttgtgactaaaagtaagattttttgtagtggaaaattgtgctagggtacatgtcttgtataattgttccatccactctattagtatgtcttttaggaaggtacatgtaacgccctatcatgtaagaacgctacatgtgtgcttttataaattaatttataataatagactaacggtttaaataaaattataatttaattaagaactttattaattatttgaaatataatatttatttttggcattgtaaattatttagggttgggatccccttttaaaagtttacaaaagatattgttacaattttactacaaaatacatatatatattcatcaaaggcaccataaaataaaattccaataactcaacactacaatccagatgagttgatacgtacatttgtcgaagaagacctctaactcatagcaaccctaactcgtttttctcttacatgcaccacaaaataccgatgagtcacaaagactcagtaagaaaagtaaacataaacaatagacatcagaacatagacataaatagatatgttcatataatcaaaatcaagtattacatatttaatccataatccaaaaatcacaccatccaataaaaaataattaaaacaaatatttgtctaataagacaaactaaagttttgatcaagaaggactgaaatcttcattaatcacaaactctttacaaccaacaatacaataccagcagccaaacaaagctacttacaaatcctctctatatatattttctcataatcttttagtttcctatttttcatgtattgtaacctgtacattacaactctttgcacatcattaacaatagctctagctgtaaaagagtaagcattgtaaacacatctatttcaattaatccaaatgttataaatcacagcaacaagaataacaatatttactctttgcttcccattctttgactgcctagccaaccagcatctccatccttcaaaatccagcggccacaccttgttgcctacccagttctgcaccagtaaatttacttctctcgacagccagcagttgaaaaataggtgttgttgc

SEQ ID NO: 49861 - DNA, 1510 bp, Cannabis sativa
aattttttagttaatttttacgttgaaaaatacatgctagaatatatatttttttaatttttcttcaaggtggtgttcgttatacttacaacaatatccttgtaaatttttgaaaaatttcgaataatttacagtgtcgaaaatacatttgaacacgtgtagtaaattggaatatcagaaactcacactgtaaactatttagaatttttaaaaaatttatgttgtaactataacgaatatcattatgaaaaaaaaattaaaaaatatattccaacgtataaattaattaagagattgtaatagtagattataattaacactacctgcaacaataaaattagtactgctattgataattttatagaggataataagttgggccaaggtgtttttggacctatatacaaagtaagttctctcatttacttgtttcagaacattttctcattactttttaccaattatggatattttcattgtgaatgcctacattttgcaaagctgttgtgaatctgtgatattatttcaaaaaaaaaaataataataatttaatggcaatgcaacacaagtataatgaaaccttagttactaacatgtgtttggagagtgagaaagtcacaatgaagaaaaaactatcacatgtaattttttttttttgtataatctatgcataagctttaaggcacataataagatggtttctttttaattcatgctaattgggcagagcctttcactcgtgcatctttacaattcattcatcatatttttgtccaactattattagatagtcctacgttactaatgtgtagaaatataatagaatatataagagaaatgagctactcctctcataaccaattaattttaaaatagaactccattcatcttattcaagaatagtgacccaaaaaataaaaatagctaccaaagttaattttgagatagaaccccattcatcttatcccaaattctaacaactatttggcctgagatttgaatatcaaatgagcatttcttgactccactttttcttgtgcttttgttcctgcgatatttcttgtttgtgcgtgttattgattattcgatttggtgcttgtatgttcagtgtaatgatttagcaattgttttggttctattgctcttctcactttgttttttgttaattttgttgttagttgttgtattgttttgtttttgaatattgtcaatcacaaatttgaattgttatgtgttgtattgtattcacttttttcatgtagtagtttatttagttttgcattgttattttggtatcttgtgaaaaaagtaatttatttagtgggttaattatgctcgatgattaaccataataataataataataataatacctttatatcatttcattctttccttgccttttgttgtttaattgagtaataatttttagaatattagtggagtgacaaaattatgatgaatgtgtcttttttcatgctgtgtgcataatttgaccaacataatatat

SEQ ID NO: 49862 - DNA, 2671 bp, Cannabis sativa
taataataaatttttttaattatttaagcatataaattcaaattttcctatatctccctggccttggttatgaaagagagcattctatgttgtacggtacctatataggtacggaagtatgactatttgtataaaacactttcaacgtgcaaaccgcatgaggtgggaataatgtgcagcactatttaattattattcttagtttttcaaaaaaaaattattaaattattagaagtaagctccaactttaaggatgtgtttgaaaagttatcttattagaaatggcttgatgggtttgtttaactagtcaattacaccgtagctagcaactatttaatgtgaggtaattgaggtactctattaattgcactctcaaattttcatgtctcctcatgaaaattgagaattgggtgacatttaattttatgtattacaattctactttacgtccaaacacacatctaaatgttctttgaaatataatttcatgaatcacctcaaaaactgaatcataacatattatagtgtgggtttataattacgaggggaagtgttgttaaataagcaagtaattaaggagtagaggttgggggtagcattaattaggtaaggtacctttggttccacggacatcgggcttgttgccaaaatcataattaatcagcattatcacgcagtgcatcgggaattgaggacacaatcctcggcggagggtaggcatgcaacgcaactatctgaggcgttttgtatgcattcctcacacattaaactatcgagattcttctaacgcatagcagctacaaaagaagacatttcaccagctttcttaatttgtttccttcctgcctgtgtattcctttctcagatcaaagtctaacactgcatctatgtacaagtatatataatactaagttaatattacctgaaaatgcgtatacttagttattaatattaataattaaaatttgttattaattgtaattttaatttaaccgtaatacttacaatgatagaaacaatattattcatggtaaaaggcctctgttagaatattagatgggataaacactgtacggttttctttttcttctcttcttgtttttttttttatttaccacttcttctttttctcttcattttttttttattttaatttttattggaaaaataaaaaaatgtattttgtttgttgttatagtttatatttggattggttatgtgaatggtgttaaaaatatggccaaactgaccgaatacaactaaaacactcgattgtgtggatattctccaccaccaccacatttattgttatttattgttattaccattattaaccatttctttttggattcatcaaaaaaaaaaaccatttctttttggaaaaaataaaataaaatatataagataattgttacctatcgaagttactattgtttaaaaagaaaacaatacaccaggaccagtcatacacatcttcatctagacaatgagaaaaatgtaacttgcattgcttggtatcactttcataaccaaaggagaaataagcatgtaaaatatatacataaatattatattttactaaagcaaaatgcaaggattacatgatataaggctcaaattatcttcgataaaaccgaatgatattttaactaaacacactattgttcttcttcttcctttctccacaattaagtttgtccgtcttgaaaaaatagcagtttacactttataaggtcaaaaaaatataaataattaaatatgcgaccacaagaattagaaagatgagtacaccaaccccattataacttcgaagagtaaggttggatatagccactctaattgtcacctttatacgaaataacagctaacctacatacaagtgccattctttaagcttcaagtaggagctgactctactatgtgacccaaaattcctgttatactcagggctggtaaaagggtatttttccgttccaaaccccgaaagccacatcttccaaaaccttaatggaaatttacaaaagttcaatgagtcttaactttctggaagaatttgtaactgtgaacaggtcccactttgcaaccaaagtctcttcgtatcaaccgtctttctagttgcccgtaatgtgaaattgttcttgcacaaactattctgaacagcctcattcaaacctattcatcatctaacaaagacagaacgggaatgcctttcgtcgaaaaacttgaacactccacttttaactcctcaccaatctcaaagtccttcctgccatttgtctgcatggaaacagaaggaaacaatgtgtctttttcaatggcatgtatataattatttatacaacgttagaaacatggagtgtctgtgtatacatgtatatgaaggagaagaagaacatggtataatatttagtttgggttcacagtcatgctcacacacaaaagatatatactgactttaatgtaagttgggtggtagaggcaacaaagttgagaaaaaaatcagccaaactggattgtctattgaaaatattaatgaagaacaatggagatgacttgaaacacattatgataatgattccaaattcttaatcttatgggcttgaatagaaaagctttcagaaacttcaacaatttccaccaaacgagtaaaaacatgagagagagagagaga

SEQ ID NO: 49863 - DNA, 596 bp, Cannabis sativa
tgatttcaaaaatgttgtcgttgccgcaattaaattatagttactattacatttaaagttagtgttatcatcatatttcacttgtagttattattactattaattcaaatctatattaagtatgtataaattatttagaatttttattgatttcaaattatatatcataaatatatttaaacaatatttattaaatcaagttaattcaaataatatttactattattaatattttttattttctttatgctaatattaatctagtttctaaatcgatttaaatctttaaatttgactaacaaaaaaaaaaaaagatcgccattcctgtagtgatttattataaattaaaggtaattaatattaaaaaatgattaaaaaacttaaaaaaaaaataagtaaataaataatttgcaaagaaaaaagatggaaaaaaagacaattaagtaaattgtagaaatttatatctacatgtaattattaaattattctaaagctactaaatttaatattaaattatattgttgacgagaaaaaacataaaaatacttcaaataaaaaaatatgtattgtttgaataattaatttattattttcaa

SEQ ID NO: 49864 - DNA, 2954 bp, Cannabis sativa
atatatatatatatacaaacaatataataagatttcaccaccacaataaactacatcatcttattaaagtttcaacaagacgcaaaaacaataaaattcaaactaatatacgcatatacacaatcttttagaacgtgaaatataaaaaatcaaaaaataatatccaaagtttaagcctcaccaattatgtcaattattatatatatacataaatttttaaaacattaaaaagaaaataatgttgaaatcttactatacataatttacaaaagttagaaaaatgctcttagattataacattcaaaaagtaactaaacattacttctactttgtagctcaaacagctatgccatttgagtactaatttaattttcaaattaattgttaaaaaattctatagaacataatattccaatgaaatgattagcatagttctagaaacatacaaatatagttttagcaattcctcccaaatcaagagacttacttttatcttctcttaactaattaagagaactttcaacttcttagaaggaaaaatggtaattgatcaaacttttgaagtttgtaaatgtattcattttgcactcgtaagagaaaagtgcaaaagggtcaactatatcaatacgaatatagtgaagggaaatcggttgaaggtgcaaataaaatttagcatttacatgcttatcatacacaaatctgtgatgaaatctcaaatgaagaaagaggaggaaagcgtttacccaaaaatttgatagtggactgtaaatatacatctctcctgctcaaacatgacttcgcagtttccatcagtttgaagcatattgcagatatttctggacttggctgcataaatatgaccccaatataattatatattgcataggaatgcagagcaacaagcatatcaagcactagttcaataatttaaaatagtgacaaggaaacatctcatcatgataatcttctcaaatgaagatttaaaaaatcatccttaagaagaggtttaaacatagactagtgtggatactgaacaggactgttaaatgatttgtgtaagaaagatcatcaacaaaagaatatatagatatttgagaggtctttctgcggtccttacgttgaaagatgatccaatgcagttgcaagcttctagtgccaggtttccacgaggaaccttaattttggtcagtagcatcatatcataaacagcacaaaaaaaaacaagtagaattttggaaacacaaaggcattgatgtcatatataagtttgtatttatataaatattattatatatatgaaaatttttaggtaggggcatccaaaacttttgcccctaaaggcatttcctgtttttggtatataaagaaattataaaccaatatttttttattgtgtacactatagttatactaagcattttgtctgttttcgaacaattctaataatttatagtgttaaaaacagaattcaaaaaaataaataaacaataaataaaaaaagaattcaaacaatcagttgcacgtgtctgtcttattttttacgtgcaacaatctattttaaattttatttcgacaccgtaaattatttagaatttctaagaacgggtatgatgtgcctattacaactacaatatataaggtcatataaattaagaatataatttatatagactgataaatatagataggtaatatttaccaacgacggttcttgctgaacggaatcaaccaagtcttgcagaatcagcttagacaatgacagaagttcatgtgtataagataaatcgccatagaataagcaatcatttcctagaacctgaataatcaataagattggagaacagtaccaacaatgagatattttgtacaagcacgcatcagaagggttctttatttgcagaatgattgtcattaagtagagttattttagttctgatatataatgaattaaaacatgggttggtctcactataaacaatacttttcatttgagagaaaaaaaacaatactttcaatttatgaactactacggaaaatttaccttcccacaatcagcactgtaaggaagcttattttgagatagggatgcagacagtgacactagcgagcacagaatctttcccttgatttttggtttcaccctatatcatttatagataactgaagaacatcatcataagaactacagaaaaacttgttgaaaaatccaaagacaaaattttaatgataaaattttgggaaggaaacttaccatgactgagagttcataagtgataaaatggttttgaggaagtaagtagctccaatctcagggttaccttcacattggtagaaaagtaaataatcagaaaacgaatacttaagcaggtgttcgcaccaaactctagtacacaaaaagaaatacaaccaaccataaacttgttttcatttttcaagtgccatttcatctaccaaaataaggcctttctcctcatattcatcttttccaagtactcaagtattctatgtatggttttttatcagttgcgtaggttaatcaagacctcaagtaagtacaccaattttgaaacatcttaacggaaattagtgttctatttgtttcgaaattggcgagctttggctcattcaaatgtttataatacatgaaatacaaatatacaacaaagacaagaaaataattagagatctccaacctgggaccataatcaagagactgcataatttgcgaactgaagatagtatttcatcaacatctttcaccatttttgagcctattcaagaaagtgaaaaagaataaccatgaatattacatataataaaaaaatgcaataataaatctacaagagattaaaaattagaaaagtacaatcatcatttatagtatgtgtttaccgagatttttgaaaacgagattaaataagagctcaaaaaattaaatgagaaattaaataatt

SEQ ID NO: 49865 - DNA, 1667 bp, Cannabis sativa
ccctttgcaatgagcacaagtgggtttccactcataattgatagccactataacattggagccaaattcattttcaaactcaattaactcaaggaattcttgtttcatagatacttcaatcaggaccagtggaaaattcagtttatccgtctctttggtcaccccatccaccattaatggtttccctatctgccctactatcttgaacagagatttctgctcccagtatttaagttccagatcttctagttgaatccaaattggaacagtacgtatgtcttctctcttaaagttcacatttggatcccaaggtttcataatgacatggcgtttgttaaagaaagtataacctccattcaacacagaattcctatctttaatattaaaaaatctgataaggaagatgccataagagatcatacctactttatcgattttttccttccaaattctccttgcaaacccatctagaactggcagagggggattaactcccacgacatagcacactattgaggagttccgaaaatccacctcctcctgaatgtcatcagctgtgatgttcactttactctgtgctgcgtatgctgattcaagatttcgaataacaccgcccgatcgaagaacaagtggtattgcttccataccttgaccaacaacagaggagcacctctaatttgcttccatgaacattgcaaagtcttctttaattgcatcttgcctctgaattgtcttcaaagaagttttaggggatagcagaggcataaacacatctgttagtcttccatcatcctcatctggttttgtttcctcaccaatcgattgtccttcagcatcggagaattctagaggttcaacccctaaaatttcttccattttcttagttttcttcacatcagctgaagagttcggacctcgtttcttcttcttccttgcagcagcctggatcttggtctgagtttttgcccttgttttagccatggcgccaactcgagagagctacaagaacaatcgaactcaccttatttatttggctaagaaagaaaatgagatgaaaagaaaattgagagaagagctatccctcaaaattctcaaaaattaaccctgaccatgctgaagtgctgttagttaaataatatcattcaagtttttgactttttcagcgaccatgctgaagcaacttaaatatgcattgagagactccccacgttgttgttttatgttggtcaaggacgatgcttcaggtcgacggtctcttgcagcttgaaactgctttttaaagtccctcgacaactgttcccaggatgttatggaatgatgggtgaaattatcgaaccagctactcccagcccctgttaaggaggatgggaataaaatacaacgcaagttattcgaaacattacttggtcgcataatagtgttaacgttgtttaaatgaacgaccgggtctatggtcccatagtactgcgagacatgtggattctttaatccatgaggaaattttgaatttaagatatctggatggaatggctcgatttcttcatccgagtcgtagcctggcaatttaccatgttctccatcttgatattttctaatttctcctctagttcaattattcatagctggatgggatccacttgttgctgatttgtattttgattaagttg

SEQ ID NO: 49866 - DNA, 929 bp, Cannabis sativa
ataccatataaattggtcaaatttaaatgtgccatatttattataaaaacttttaaaatcccatagtaagtgtaatttcctctttttttttaacagtgttcacattacaattcttttgatggaaatttatagactatttttagcaaacattattatttacatatataacagtaaaaattacacattgtgcagatttttatacaatttgtgcgagtatatgtaaaaccttggaccaccacaaggatttaggatcttgggaatgagattgtaaaactaaatctatgttaggtatcattttagtgaaaatttatgattaagtggaatcaactttttaagtataattttggggtaatcttaaattcttttaaacccaccaactgaatactaaacagcccataaaagtaactggttactctaaactttttttttgtttaactttttttgaattttccccataatatatattgtaaaaaattcatatttttgtaaactttgccaaaaaaaaatcataaaaataaaaattcccctataacatatttagcctgggcctaaccgttatttatgcccttaatgttcctcgatgaccgactaaatatgatgtgatactgctagatgccattatttgaagagataattcactttggtgtctatttgaggttaataaaaataatggtattttttttttgacaataaaaataatggtatttttgtttttcaagatatattcatttaagatctgtagataaataccacacatttgagatatgtttttaagttaatattgaattttagctgtgtaattagatatttaattaaaaaactgatccaatccaatagtaattggtaggagtgtacagaaagtcatccaattcaattccaaccgaccgatccaatcccaaccgatccaatagaatcggatatccaatcat

SEQ ID NO: 49867 - DNA, 927 bp, Cannabis sativa
atttgatgagcagaaaagtacttctagcaagcagttttgacttcaccccatttatagaaggagggggaggacgacgccaccataataacaacaaacgccgtcgttccacaccagacacggcggcccacgatgatgatcaagatcaagatcaagcttcttcaagttcaacttcgagtagtagtagtggtaataataataataataataatgaaaatcatgatcatgagattgatccaagatatggcgttgaaaagcgacgtgtcccgactggtcccaatccattgcatcattgagaataataatggaaattttctcagtatcatatagatgatatatgatatgatatgatcatggaaattaagtgtgcttcaaaagaaaagagaaagaaaaagaaaaggttagtggtgggaacttttataattacttgtatcataatattattgttctttccaaatctttttacatcttttctcagatatataaatccattattgactcgatcagattagctacatacattattatttctatttgtaataatttatacttatatatattaattcttttaatggatcgcagtccaatatgaaattgaaccaagatcaaatgtgaagagttatacaagtattgatggctctacaagtatactgaggtcatatatatatgttgtacatatgtgtattgttgttttattttagtccttttacacgcaaatctttctttgagttcatgattgcttctgaattattttcataaaaaatgactaaaatatctctaatatattcgtttgtagtgaagtaaactacttttgactatacatgcatatatttccttggtaaaattttctttataaaattgtaattaatttggaggaaacatgagtagctgtgacggcacgggatataaatatatatatgaagagatttt

SEQ ID NO: 49868 - DNA, 781 bp, Cannabis sativa
ttttctgacaatgatgacaactctggtgactattccagtgtcgatggttttttcggttgcgataaattttctgacacagatgacttttccgacaactttctcaataacgatgtatatatacttcagcgacttttcgggcaatagttgttattataaattttaccaactttatttatggccttttgtttagtttcccatatattttaattattgtatatttttcgttcccatattttcttacattatttatttctatcatgtaaaaagtaaattctattattttttttttcatatttatgaaaaatccaatcaatatacatatatatatatatattattttggctaaaggaaaacttacaaaaacattagaatttggattaatttttacagaaatactaccacttgatttttattttttttcaaaactactatttttttataaaacaacagtggaacatgaaacgtaacaacttaaaataacaatgaaacaattaaaaaataacagtggaataacgagaaatttaatacaatacacagtatacaaaacacattattttttaacaaaattctgcttagtaaaaaagaaaaaaaatggaaaatttctatgtaaaaaacccaataataaaaatggaggaaagtgcgtggggtacccactttaagttaaccattttaatttttaccctctttttaatattttattttttttacccactttttatagttaatgttcctataataccctttcttcaacccaaaacagaaagacttaattttcaatctt

SEQ ID NO: 49869 - DNA, 906 bp, Cannabis sativa
tacatacagaaatttatagttctcactacaaaattaatgtaacacatatatctatatgtgcataataattgggttaacctgttttaataattgttttttttttgttgaataattgttttgttgcttttattcaatgtagatggcttcattaggactatcacacaaagatgtttgaaaatatatattacaatgaatttaagtcactacacttattactaattgttggtttggtttgtttagataaaaacgatcgatcataactctcaacatgataatattaagagcctaattttatactatatcaaacactgaatatatatatatatataaagatgatttcaaaaaatatatatagagatatatattgatagtactacatgatcatcagatttatgaccattaattaatagaactacatattaaatcattctctattaaaaatttagcaaaagtattataagcatcccatatgattttctaattagctttttgtataaattttatagaagagatggactgctccaagaataatcgataaagctcttgaatatattccagagttagagaatgaaatagaagaattgatcactctgaagaagaagaccctatcagctgttgaaaatataccagtagtagaagttgttaaccaaaagaatattagtagtgctacattggcttcaccagttaataattctctcacagtttcagtgaatgaagttaaaaaggatgaggttatcatacaaatttgcaggccaagaaataaacaaaaagatttcccaagcttattggaatatattgaagatcaagaacaagggatattcattattctgagtgcttctactcttcatgtttgtgatgagagagactgctaccacattcatatccaggtattatattattatgtat

SEQ ID NO: 49870 - DNA, 1084 bp, Cannabis sativa
ttctacccctatttaaattattagcactaataatgatttcttggtagaatgacactgagtgtaacagtcacagcaaagaggaagatcaacaaccctgtgaagtttactatgagtccttcttggttcaatcctaaccctaaggtaataaatctttgaagcagccctgtctcggcggtgcataccgccagcaaaaagatcaccatcccgaaaaatgtgtgccatggtaggatgtttgctcttgccggcattgcggcacccgagaagaaaaaggtgaagaaacctaacaagaactgaaagaaaggatctgaatttgttcaattattgaagctacatatattcatactcaaaagaaaggatcttaaaattatcttctgaacttatcagactgttatgatttggaacatgtcaaagttcaagaaacatgatttgatacatggacaattgctagtattgaacggaattgaaaattagtacatttacctgtaaaccgtatgcggtgatgacaatgatgcctagccaagtgtgtaaggtgacaaaatctttagtaccggtttcatctttaaacttgaatactgcatatgtccctaaaattccagccaacaaagctaggagatgtagtataatgtgcacccctttgtgtgctcttcttgttcccggcattgtcttgtatgccatgatagctgcaaaaattagttttacaccaaattcgtctttttattagtacaaaattttaattagagaaatttgcaggctcaaaattttgagtttgtaacttgaataaattagggagcttgtaatttttgtctagttttatcttaacagttcacatataacattcaaattctaaattattaaatttaaacaaaaatatgtagtataaattatttctaaatcttcattaaataaatttaaaaaatgtagtttggctacaaatttaacatactaacaaagttcataataatgaatttagatgaatattatagttttactaacattaacattatgtatttatatcaataaaaaaaatcattaaacttacaaactaaaaattttaggtataaaattagatgaagataacttggtt

SEQ ID NO: 49871 - DNA, 1200 bp, Cannabis sativa
tcaaaaagggatttgcgataaggagaccccatgtccccctattatttgtgttgggaatggagtatctaagtaaaatcatgaagaaagttggactgaaaaaagacttctacttccatgaaagatgtgatgaactgtaacttaattatctcagctttgctgatgatgtcttactattttgtaagggagattttaagaggatctactatatgctgaagctattttttaatacatatggtttgcagccaaatgtatccaaatttgttatttattgtagtggaatgcaagaaagtgagatcaaaagagtactggagatgtcatgatttagcaggcatacaacaccttttagatatcttggtacacctatttgtgccaagagaatctcagcctcagaatgcgctggcctggttcagaaaatgactgctagaatcaagacttggagctctacaaacctctcatttgcaggcccagtagttctcatcaattccgtgcttctgactattcacacatattggagccaaattttgattttcccgatgaggataatatcagaaattgaaaggaactgtaaatgctttctctagaaagggcagagtcacatggatggtgtaggaaatgtagcttgggatacactatgcaaatacaaaaaaaagtaggagaggcttgggatttttgaacatatcagacgggaacatagcagctatcataaaacatgtgtggtcgatagctaacaagaaggacaacctatggatcaaacggatacacaatgtgtacatcgagtaaactgattggtggggttataatgctccatccaattgcaattggtattggaaaaagattgttgaagccaaagaaagagtaaggcagattatagacccagtgcaatttttaggggaaagttaccaaattgcagccagctataaaatgataaatccatctcaggagcacttccattggagtaaagaggtatggtgtagagtaaatattccaaagcatagctttgtgctttggttggccatccaagatagattaaaaacatgagaaatattatataagttcaaaataatagatgatccaatgtgtatactctgcaagactgtagctgaaataattaaaggaccatttatattttgaatgcccttttttgaacatctttcccaggtgaagaggtggcttgattggaacacaaaagctggctcttta

SEQ ID NO: 49872 - DNA, 1364 bp, Cannabis sativa
cttgctcagccaacgtaactggttttggtcccctgccttttctattaggttttggggacgagttgtggtggtttggcggcccgatgtcgatcctcctccgtcatcgaaagtttgttagtggccgcatgtttcttcatttctcgttgttgtggagtctttggttatgtttttatttttctattgatattttctttaaatcttcgactgtttttagtcttgatgttttattttggtttcttggttttcctttttggtccagttatggacattctcttgttagagatttaggggtttgtatccttgattttttttctttaccttccatctatagtggtatggtactttacaatgactttgactactatgaatgtaggtcagtctttaggccttgttgccgtttgctcgcctgtatatcgggattgatttgcttttgcttatcgttgagcagtgtaatggactttgtcttttgttcctttgttgaatgaaatcattgatccttccctcaaaaaaaattattcaaaatacatcattaaaactctagtttcttcatttcacatcatacttttatatcctcatacaaaaatagttatcaaaatccgaataaataaataaaatatgtttaaagcaatgaatagtattctataaatgtagagcatgggtagtgtattttaaagaaattttaaaatgaagaaaaaatttagagtatctgctataacgtatttttagtacgattttttaaattttttaaaaattctatattttagagaagctattgtaagtgctcttagagcatctctaatggtgacattctttaaaattgtcaaaaacctccatatcacttaaaaatatattattttattttattattttattttatattttattttatctcttttattttatctctctttctttatctctctttcactctctttcacattatttttgtcatgccccgagccctagatcgtgacagatatgtaatatctataatttgagtggtcaaatgtcacactttgattcttgtaggaagataaagcctataaatgattttttttttaatttatattacaaaatacttatttaaaaataataaattaactcctatattgataagaaaatattagtaacaaaatcaggaccactcattaatataaaagaataacaatatccccacatttatgtatagtcaccgaatagagacaataaaataccaaaataatatctagcatccatcattcatcatttctaactagtacatagttgatttaagtcatccagaccatccattctaacttaaatacaaaaattatgaaaaaccgtgtttttgcaaatgtcagttgtatataagaaaatataaaaac

SEQ ID NO: 49873 - DNA, 1728 bp, Cannabis sativa
tttccaaatgcaaggttagttaaccttgaaatttccccctctgaccatagtccattactgctcgaatttgttttacctgatatctcggcacctagtcgaagatttcgtttcgagaacgcatggcttaaggagccgttatgccacgagatcgttaaggactgctggagtactcctggtgttgctgatattgagtcaaaaatcatgctttgttctgagaaactagctatctggggtaaggaaatcacaggaaatttcaagaaacggattggtgtttgcaggaaagagcttaaatcgctcaaaaataagcaggaccctgcgtctatatctcgttatgctgaagtgaaaaagcagctttttcttatccttgatcaaaaagaggctttttggaaacaaagggctaagcaattttggctcaaggagggggaccataatagcaagtatttccatcgtgcggcaagtaatcgacgtagtttcaatcaaatatcgaagcttcaagacaatgatggtatatggagagactgggagtcgggtttatcttcggtggtggtgagttatttctctgatttatttactactactggagccgattgtgatgatattgttaattgcatttctaataaagtcactcctcaaatgaatgaaactcttctagcacctgtttgtgaagatgaagtcaaaaaagctattttcgatatgcaccccgataaatgtcctggtccggacggaatgactccggcgttctttcagaaatgttgggaggtagtgaaaaaagatgtcattgcagttgtcgagaatttctttcagtcagggatgtttactccgaatggtggtgatgcaaatgtagtaatgattccaaagaaaaaagtgcctgtaaacatgggagatctgcgacctatcgctctttgtaatgtcctttataaggtcattaccaaagtgatggctaacagaatgaagagtttcatggatagtattgtctctgagtctcagagcgctttcatcccaggaagacttatttccgacaatatcttagtctcttttgagatattacactatttgaagcggaaaaggaaaggcaaagaaggtttcatggctctaaagcttgacttgagtaaggcgtatgatcgtatagaatgggatttcctgaagaaaatcatgctgaagctcggctttgcaaacgaatgggttcagcttgttatgtcctgtgtttcctcggctaagtacaactttacccatggtggtagagaaatgggtccggtgataccttcgcggggaattagacaaggcgatccgttgtctccttatctctttattatttgtgctgagggtttgtcttcgctgatcaagaactatgaagttaaaggatggattcacgggtgtaaagtggccaatggagcgccaagagtcacacatatgctatttgcagacgatagctatttgtattgcaaagcaactattcaagaagctgtaagaattcgtgaccttctatttaagtttgaaagagcatcggggcaaaaagttaatctggggaagtcatcaatcttttatagtatgaatacagagttgcattggcaaactagtataaatgctctacttcaaatgaccactgcggatgatagaagtatgtacctgggccttcctagtaccatgggacgtaataagtcagcggtgttgggttacttgaaggatagagtgcgtaaaaagctacaaggatgggactcaaaagtgttg

SEQ ID NO: 49874 - DNA, 1375 bp, Cannabis sativa
  modified_base (755)..(755): a, c, t, g, unknown or other
tttgtacagaaccctcaaacttgcaaggattctgtaaaagacggggtttagttgaaacggggcaagcccgaggtgattcatgaagtctttaaagtagtcacgcaaggggattatagctccaaacctaatgtgttgaggctccaagcgcctatactagtcgagccagttgtactggtctcgccactggccccctcagaggtatcgcgtgtaagtcgcattggttggtaacaactgaaattgccagctcgcactgacctaacccgacagtctcgcttgtatttaatacaacaggttcgtagtgaatcacctacataacctgcgatggctcgcaccttcgactctattaactctgcctcaaaagtgacgttggggtcctggggagtctttgatttatgtggcttacgagatattatttcaaaatccaagtcacctggttcgaaagcaattttgaccttaggtaaaaataaaggcttagccaaaggaatataggacacactaggaggttcaggctaggcagcatctcacaagaaacggtgtttgccttctgtgatctcttgcaagaagcgcctgtgacggctgtcaatatcatcttggtgggttttcactaagtgttcccttactttagcatcatttatctccaatttgaatttgggttttgcagttttgggttcgtacggaatggaaattttagtaggatactcaatttctaaatcttctgggcgataaacttctaaaccagattgggacattgctgnaaggagaaagcaatcccaattccttgaagaaatttatgaaactagaagttggtgaattggagattttagaaaacccacgtattgtctaaacccgaacatttacccagatacaattcgacccttaaaattgctaaacccaaacgagataacaacgatgctgaccaagaagatggtaactaaacccaaaaatacaacataaaaaacttgtaagaaaataaggagaaaagtcacttactgtttgaagtttgtttttgggatgatgaacggctttacaatttgtgaattagcgaatgtcgtgaagatccctccgaatgcttgaactcaaatattaaatcggatgaaactcataggaaaaatgttagtgacaaagatggcatgcaaatttttgagtaaatttggtgatggtttttcggcagaaaagtttgaaaatttctcagaatttctaaaatggcaaaagttgtgcaaaggtggttcctttctccattttatactcctgagttaatctcccttagattagagggatgattgatcctacggtagaatttgaaagagaagtggaaaagatggtcattaattgttgatgtccctcgaaaccacaaaactgctaaaatcagaggaca

SEQ ID NO: 49875 - DNA, 1124 bp, Cannabis sativa
ccgttttattttttggagcaagtactattttgactaggggtgtacgtcggtcagtttatgctatattttattcaacccaatataaagatcgggttaaaaaaatctaagtgcaacctgtccaattaagaaaaaagaaaatagtaactcacctaatgaaattagtcggtttggtccggtttaaattttacattcattttttatagtttagtgaattgtaataatgagacaaatatatataaattgaattcaaagttcaaatcaactattataagaaacatattagtttgaacattatatttaaaataattaattgggttagtgatgaggttaattgcttaattcggattgattagacggtttgatattattctcaactcatctagtataaaaattaagcaggttatattttggtcggatttttcagttcgtaattttcgacaaattatcttaatttgatttagataggttattcaggtttacaaaaaattcatttaaaaccctaaatcaaacacgtatcaatcatttttttttttcatgtaactacattttttttaaatatcacaacagacaaggacatgtctatgagattatgatgttgttgggtgtgatttaattgaaggaagttacaagtaccttaaatatatgcacgacataagtaacatatatattaaaataaaagaaatttaatgatcattagttttttgttttgaagtaatttacgatatagcagtgtaatgtatatatatatattatattatatattataacagtgtaatatatttttaatatgcaataaataaagttagatatattcaacaagaaatgtacgcttatttttaaaaaaggactttgtgatataagtttaatttttaattataaataaatatttaagtatattttttagcgttaataatacttaagttatatttttaaaactacacatgaccattaaatgtttagttattattcacgtgtcatttttttattgatatatttaaactattctcttaacaaataaaaactttaatgacttgaaccaatcagggtattattatcgtgaaaaattaaacttcggtatttatttataactgagagttaaatttaattatttataccgcaaatta

SEQ ID NO: 49876 - DNA, 679 bp, Cannabis sativa
ttccacatttatgtacttcaacatcttcaaagaatgatccttccaacaaagttataaaccattcataacacacgtcttccaaacattgatcttgacttgtatttgttaacttgaggaaccctgtgccatccaacggttaattaaatttcccaccttaatttttttgttttaggaaataagaaaagcaaagtttggcaagatcatcataacttaatttgagagtggacaagatatcatctttacgttggggtattttgaaaattctttattaaaggaagaacattttaattcagaccttttaccatataataaatttcctattgtttttatggctaggggattcctttatactatttcacaatctcctttccagtcttcacgatgctagagttatctagctcttgtgagtcattttcaaaagccactctttaaaacaaagaccaagattgatctttatagaggtaaaaaattgcttaatatttacaacatgtttaagaagcgcaatatacaagtaagacgggctcattagtaatgaatccgatattattaggaaaacacacgataaacgttgtaggtgttggtggattaggaaaactacgcttgctaaaagtgtttttaacgataagtaaccaaaatatcattccctgttacttcttgctaattaagagagtcaatattt

SEQ ID NO: 49877 - DNA, 1553 bp, Cannabis sativa
aaaaaagccactaatactggtaccaccacactcctctcgaataacgctttctggagggaagcagctaaattcccctggagcaatggacttgatatgacatcctcgcctttgttcaataccacaagactctaaaacacaacctacatactctccattggttctgaccttggattcgatgagttcagcttcaaaggtgacattaggatcctgtagggtctttgacttacgaggtttagtagaaataatttcaaaattaaggtcacctggtgaaaaagcaatagtgactttgggtaaaaacattggtctccgtaatggaatagaagataaagaatgaggttcaagccatgctgcatctcgcaagtaacgacgtttaccctcagttatctcttgtagaaaatgcctatagcaactagcaacttcatcctgactggttttttctaaatggtccctaatctttgcatcatttatctcaagtttggattgaggtttcagaattttgggtttgaatgggacgatcgattccttaggacattctgcttctacgaattttatagagtaaatatcaaaaccaaattgggacattttttgcaaaaagaacaatcgcaatccctggaagaaatttattaattctagaaacctatgaacacaataaaacctaagtttttctctattaaaaccctagaaattacccaaaattaagtcgaaactaccaaaaccaagcgaagagaataattatgcaattagttataaataaataactatactaggatgaaaaaaaaataaacaacttactagttagagatggacgtttgcacaaggaagaattctgtaactgggattgagatgaaccactaaatgaactctgagaagttcttaagttgaagactaagtctgaagaaattcgcagaaaatagcttaatgaaaaagagggcatgcaaaattttaaaaaatcaggaaaatggtttttgcagaaaagcttgaaggtttttgaacacagaaatggtgaaatggtgatcttctctcaagctttatactttaaggatgatcactgctacattagaaaagtaaagatctaacagctcaaaaacaagagagaattggaaaagatggacaattaatgctaatgatgtgcctcaaaatcataaaccgccaaaattcgaagcatgcaacttttcaaattaagagtaagacaaaagtgcccttaattataatcatttaaaaagcacattctattaaaaaagaattttttaaggggcaattgttatacctgaaattcgactatccttcaggggatgacacctgtcaagtagtggaatatgaaccacctggtataataaatttatatcattgaatgcaaagaggaataactcattaaatataaaattaatagtgtatttataactcactggttgtatagttataagcaagataaggatacaaaactattaatacctatattgacgaggcatcaacctacgtcagaatacacaagtctgaggacaacattcgtttatcctaaatgaataagtgaagttactcaatacaaccttaga

SEQ ID NO: 49878 - DNA, 1182 bp, Cannabis sativa
aaaaagaggtctctagaatatttttaagtgagatgttctgtattaattattattattttggatttttgtcaaagaaatatattatttattattgaaaagaaaaataatgtataaaaatgaagaagtttttttcttcttttctttcgctgaatgaaatgaagaaaggggtggtggaagaacaaccacgtacactagagggctagaggctccatatatgcacacatatatatttgataagctaattaagattttattaatatttttttcattcaaactttaacatatattaaattatgtgttttgaattcaaagattttttgtccaaatttactaacgaaagtcgatgaaagtttatgagacacaacttagtacatgctaaagttcggggacacaatttaataaatattaaagtttagggacataatacagtatatgaacaattaccacattagtaaaattgaatgaaattaaacaaaaaactttaattcaacaatcttcgagaagaatttataacagtataattaagatttccttgagctcatcttcatccaaccaaaacaatctaattaagaatttataacagtctaattaagatttctttaagtgcttgaaaagttgatacctaaaccaaaaaataccaaacaaataaatttagtaagtttataaagaaaaaaaaaaagctaaaataattaattttaaaactatgtcatataaattaataacattgtaaatttttaaaaattgtattgaaataaaacttatctttcgaaatccttgtatcttaagatgtccaaatgactaaaataaaaatacacatatatgaaagatataaaatttaaataacacattatttggtaatattaaattaaatatttttttttatttaaaggttaccaaaatattattttatgaagaaattttttttatttgctatatgtggaacggatagtaggagtataaatggatcaagtcgaatgtgatctggctatgatccaactcgatccaaatcatgtataattcgctctgtctcgctccgctaaatcagatacccagatcgaattagacccaacccgtcttattcggattggatactgacttatcttcttcttcttcttcttcttcttcttcttcttaagaattttaattttatccgagtctgggtccggagtctcgggtcatagg

SEQ ID NO: 49879 - DNA, 1520 bp, Cannabis sativa
cagttaaattttatagtaaccatcaataagtaatactcattaagaagtgtttatatataggagatttttatttatacgactgtggctaaattattttgcacaaatacggtaagtaattttttgtggaattaatacggatataggtttcattttacaaaactagggctaaagccacaccccatctccaaaggttgcaatccaacaagaagaaaaaaaaaaagaaaaagtggtttggagcttcacgtacatcatcatctcctttagcttcgacaagttttcgataactattgttggagctactgacctttggctcaagagaatggttgataaatgaagaagaagaaagattgtgatttgggttaagaaggggcatagctgagattgcaatatagtttaatgaatatttagggttacgatttgggttgcggcaattgagcatgactgagattgcgatatgtttaatgatgacttgggattgcgatttggattgtaatggtttcgatttgcattacaatatcaattgtgactatttagttttgtttaggaaatcaggaaacttcatatggtcttgcaatttaggttacaattggagcatggttaagattatgacatggtttgatggtgatttaggtctgagatatcagttgtgacttcaatttaaatttagaaatcgatggaagcgtcacgtggtggtctcgaacaatcacagagaagagagaatggctcagaggatgaagaagaaaggggttgagattacaatatatgctttgataatgatttagggttgtgatatgtgttgcgaattctgcttcaatttcggaagaaaccaagcttcatttttcatggtgatgagtgattggtaatctaggaagaagaagaagaatgatattcattttatgttacaccttcaagctggggagatttaagcgttgaaaagaacaagaattcgtcgcaaaagaaaataaaaaagtaagggaaaagtggtttatgaagaaactgtaaaatgaaaataagcactgctacaaaaagcagctttctcaactatttttaacagtcggggtaatttattatcgtcagtctatataactatcgcctattcaaccgtcattaaactgggtagaataggtgtggtggaaaaatatcgaaaaaactttgtctcgacagtgtaaaagtgtcaataatactgatcgtcgcctatagtatctacgacagtgcaaaaccgtcaataatacctttattgccgataattttgcacagtcatctatagagtgataattttttttttttaattttgtatttatttatttaattatgaatatttttttgattttaattgttaatattaaattttgttagtgattatatattattttttgttgaaataattataaattaattgaatgataaagattaatttgaagaaaatttataattaaaatatattaacaaaattaaattttacaaaatgataaatacttacaagtctaacttttaataaaaatttatgatacaaaataagt

SEQ ID NO: 49880 - DNA, 1180 bp, Cannabis sativa
tcagaaatgtcctcatcaagtttttctgttgccatttagtccttatgaaattggttttaattggtattcacgtccctgaaaataaagtttaaaaataattagcatttctggaaaattacatataaaagagtttttttttttttttttttttgataaaaattactataataagatacaattatttattttctaaaacattttcgccaacgtgcttaattctttatttaaattagaaaacgattttgtttatttttaagtttatatgtagtttatttatattataagtattttatgtttgaattaatttagaaaagtgttattaaatattattttataatttttatccaagctttgggcacgatgatgatgtgtagaatttaaaaactccaatatcagccaaggccaatccaaacctgagctcactctaatttattattcgcataaacgattaagtcacgctattacactctggacatgggcttaactcactaacctgccaaggcaagatctcccttattcaaaaaagatcatttggcccaaaagtgcagagtctgccaagacaagtccgaataccttcaggaggccattcggaagcacgggtaatcaaagaatcgtctagatagtatctaaacgtctacttacacagaactctccagacacaggatcccacaaagttagaacctgtcccccacatcagaccggcagagtgcatacgttagcactgctaacttttgaggtttgttgactaagaaccaagcgactaacaagaaaacattcgagaatcttatacttactcagcatgcatttcttaaagtcaccattaatacttacaattgttgagatgcgtctaagcgattcaaggaccaaccccatggtgattaacaaacaagagaacgacaaaaagaaagggcctaaataagtgaagtcacagatgcatgtgtgactatgagtgcatgtgttgtgttgtgtgtgtgcattgagggcttgcctgcgaactcatgtgaggggctcacatgcgagacatcgtgcatgaatgcaagtgtgtgtgtgtgttgcatgcatgtgtgtgtttatgcgcgttgggggctaacatgcgagcccatgtatggggcttgcatgcgagccatgcacgcatgcgggtgtgtgtgtgttttgcatgcatgtgtatgttgtatgtgtg

SEQ ID NO: 49881 - DNA, 1501 bp, Cannabis sativa
  modified_base (26)..(27): a, c, t, g, unknown or other
  modified_base (56)..(57): a, c, t, g, unknown or other
  modified_base (85)..(86): a, c, t, g, unknown or other
  modified_base (114)..(115): a, c, t, g, unknown or other
tattgataacaaattagattatattnnttgataacaaattagattatattgaaatnnaacaaattagattatattgaaatgagtnnaaattagattatattgaaatgagttttnnttagggcataaaatcccaacatcatgtgtgttcatgatcaataagagttgcatctgttggaaatctcaacagcaacaagtggtggcactttcaacaacaaaattagaattcatggccaccactgaggctttcaaagaagcaatctggctacagggaatcctacaataattatagctgctcaaggacaagggaacagtgtattctgatattctttcattaattcacttgtgtaagaatcttgtataccatgagaagagtaaacacagggttagatttgtaaaaggttcacacaagtgataaccctgcagacatgagagcaaaggttctcactttcagcaagttgatacattgtcttagcttgttgaatattggtacttgctgaaattcttgagaataacatcatcaaggcttatgtgaaaagggagcatgtagtctacttttgagaatcaaggtagaatttgtggaagttgatactctaaactagcctacaactaacttaactaattttaactaactctgaaagttaattacttcgggcattaggagacgttccttgctcctattttcagttgtaaactatgcctataaatatctttctttttcactactttgagagagagaatcggagggagagagagtgaatgagagaatggtgctagagctttgtaatcaagttcttgtggggtcaagagcttgaaggtgtactcggggttgggtgtgagaactgtgactgttctctgtgtgtgtaattctcaagttcagagtgttgtgtgctctgccattggtgtttttaacctctcttatcctccattaatgaaagcttggtgatgtttctcaactggagtatgaccaaggatcatgtttgatctcgaggaccagaactaggataaaaactggtgttcttctacttgttatttgttgttcttgttcgttgagttgattaagtgtttgttgatttgttgttcataacattagttgttttgcagattttactcaagaatcttggtgttgttaccatcaaatatgttatatgttctaactaaaataaataagtaaacagcataaataaaattaaatttagtgctagtttggcacagcttttgaaaaagctaaaagctacttctcaaaaaacttgtgacaaaaatgtgtttggtaagtagttaaaaaacaacttattgaagaatttatggaaaagctacagctaaaagctaaagctggtacaacccaacttttagaaaaaactgttttgattaaaagactataataaattattttttactaataatttatttaattattattatatattacaaaaaaataaaaatatttttttgaaggaaaaaatatttaaaataaataatatttaaattttaaattttttatttt

SEQ ID NO: 49882 - DNA, 1210 bp, Cannabis sativa
ttttaattttagaatttgctataccacagtagtaaaatgctaatttctgctcacttcgatttaaacccgaagactccaaaaacaatttgagaccttgcaacaagtaatatattgatttaaaatctccatgacaaaataaaagaacatcattaacaaagcttaggtgattaagcttcaactcggaacatcattcatgaaatttaaagtctacattcttccccacccgatctagtattcttgataaatattccatagttagcacaaaaattaatgggtacattggatcaccttgatgcaaaccccttttagcttcaaaaaagccatgtaaggagccattaaaagttatgctaaatcttggagttcttatacaaataactagttgtgtgaatttccgtcagaaattgagagcctctaatattttctcaatgaaatcccattctagtgtatcataagccttccttagatcaagtttaatcatgcgattcagtctagtggcctttctcccatagtgtttgacaagatctttgcaaatcataatgttatatgcaatatatctcccttgtataaattcgctttggttttgggacattagaaaaggcaaaaccaatctcaatctagagcaaattattttagtcgcaactttgtagataacattacaatacacaattggacgaaaatcacttacattgctcgagcattttacttttggaataagtgtgatgacggttgagttcaattctttgagtaacttccctgaatgtaagaaggaagaactgcttcacaaacatcctctttgattaattaccctgcaatctactcttctagagaaaatcaaagaagcacaattgcaagatccagagttagtgaaatctcgagatagggtttcggctggaaagattagtgactttacagtggatgacatgggaatgttacaatttatgaatcgtgtttatgtgcctatggatgataacattgtaagagaaatcttgaatgagtctcatacgactccttactcagttcatccggaaacaacgaagatataccaagatcttaaggcgatgttttggtggcctggaatgaaaagtgatatagttgaatatgttgtaaagtgtttaacttgccatcaagtgaagaatgaacaccaaaggcctgcagggttgctgcagccattgaaccttccagaatggaaatgggaagacattgctatgga

SEQ ID NO: 49883 - DNA, 1338 bp, Cannabis sativa
tatttatatgaaacattaagtatttataccgcagtttagtcaataaaattttttcttcataaaacaatgatttttttttctgacttcttttgatgctggtggtttagaaggcaacaaattacaaaaggatgtgtttggtcgtccaacctttaggcaaaatggaagacaaaacttcacctcagcgaaggaagcttgactgttagagtagtattacacgtttattttatagagatgtgagggataccacttttgcttatatagttagggacatcaattaattctttgctattttaaaaaaattataattcaaatttttttatataacaatttacattataattacaattacagtaaatattttattagttttgaaaaattctaataatttaccatttggaaaacagacttcgaaaactcaattgcaccagtgtttttatttgcatgtatgaagctcaatatttgaattatcttcttttcctcattataaaatgttctaaattttctaaaatcaagtgtaatatctactataactatattatatatataaaaaaattaattttagtttctctaaacattaaaaatagaaatattcctgtaataataaaaatgatatcaccatgatagaattttcttatatataatgagattggctacattttatatttattaatataattaataatgaaaaaggcatatgacatattagattgggatttcctagaggaaatgttgtatgctttgcaatttccagggaaatttattgagttagtcatggtatatgttaggactccaaggttctctcttatgttcaatggattatacatggattctttgaagctaagagaggacttcggagatcctatgtcaccactactgtttgtacttggaatgaagtatctcagcagagtaatgaagaaactagggaagaaaaaagactttggctatcatgctgaattgggcttaaatcacttaagttttgttgatgatgtgttattgttctgtagaggggattttaaaagtatctacctaattatgcaaggtctcaaattgttctctgcaacatcaggattacaacctaacaatgcaaaattagcgatctattgtagtggaatgagtgaaaatgagattaaaagggtgttagacatgtctagatttgtaagacatcatgatccattcaagtatttgggtgtgcacatctgtgctagaaggatctctacatcagattgcagcggtttagtgaagaaaatgactcctcggatcagagtttggagcaccaggcatttatcctttgctggcaggttggtcttggtgaaatctgttttgatgtcaattcatatt

SEQ ID NO: 49884 - DNA, 1171 bp, Cannabis sativa
tgtcatatcccacaaatattaaatgttatgtgtttagagaaaaaatattaggtatatgtaaggatagaaaatcaaatttcccttttcttcatgaatgcatggtaatattgtttttttttcttttataaaatatcaacttcagtaaatcaactttctgagtacaaaatgtctagtatagaaactagaacattagacgcagaaataagacgaccagaaagagaccgtgacatcctagcaacagcatgtactagacggtttgctgatcgtttaacaaaagttacaaaatggattttaacaaaaggcacaaaaaacataagtgaaatacaatcttaaaccaaattcccaaaaacataaaaaagaggtgagcggctccgaatagcttggatagcatggtaatattggttaattacttgtacatatacataatagaggaaattaattattattattagagtatatatattgcagatataacttacaaatatatatatttctgttacttttgtgaacgttttattaattttattatatatataccaataccactacctatggggtacctaattgcaaattttttgtggtgaaagaaaaataataatgtatattgtgagttgctatgagcctattgattatttcctgttttaaagatgatcgtttctggttctgaaaattctaatttgcatgaaggattagggttgaacatcgtacgggtttactgggtttcgagttcgcgggttttgggttcaaaaaaaatgaaaccgaacccgaacccggatagactacggattggcgggttggcgggtttcggttggccggattgaccgggttagcgggttgacccggtcaactctttaaaaaaattaattttttattcaaataattatttcatttatttttgtatttattaaattaaatatatatatatataatataacaattttagggttttttatttttaattatttttattttttaattaatatatataaaatgtaattaaaaattaagtagtcatgaataatcgatggcttcactacttaattaattactgataattcattattggctacctttttttttgaataaaaaatgattttatttaataactttcagcataaacaatagactttaaatcaagaggagcattatgctcactgaaagtacaatctga

SEQ ID NO: 49885 - DNA, 1342 bp, Cannabis sativa
  modified_base (35)..(38): a, c, t, g, unknown or other
aaaaatgcaaaaatgcaaaaatgcaaaaaaaaaannnnaaaaaaaactgttttgaagtataaaaatgaaaaaaaccttataaaaaatatagtaaatagtataatacaatataatttaatatgggttactaaatgaacctaagagtttttcttatcttataattagggtggacatctaattcaatctaacttttttttttctctaatctgattaaatctaacgagtaattgaatttaaaaaatcatctctaattcaatctagttgggcttaaaaatatgactaattagattgaatcagttttcttaattggatttcaattcgaaacttgattgtaaattttaaataaaaaatgtgaaagaaaacacataaaactaaactacatatatatacatataaccataaaaaaaaagtttgaattgaagggaaaatgaaggaaagaaataagaggggatacatacatatatatatatatatatatatatatatttatcgatctttgagataagttctttatacaacttaaagaatttttttttttatatatatatatatataggaataataattataaatcgaagaaatttataacctgaaagtgagtcaacaaattctccattgatgaacagcttggtgaattttatggttggcataatattcccaaaagtagtagtactgctgctactatgaccactatcactttgactccccatatatatcacctctatatcgatttcagattctcagctccaaaatatatatatatttagaaaagtaagaaactagaaatacttatggccctgttctctttaatttaattatctctgctctatattatatgtatatatagctactatacagaaccacaatgtataaatgacattattaaatgtataagtaactgatgaaagtgcttacctaagcaaacaataattatgagaaataaaatgtataaaataaaatgatattgtatgtgtcacattttgtatcgcccacatagttatattattgtttgattaaattagctacttaaaaaaaacctaattattgtgatcaaggaaagtcttcatgaaacttttacttattaaacaattaaatatggagaaattcgatgtgtacctaatttgttttttcttctaagtaaataattagaataaactttttcttttggttttaataatttgctccatatctgaaacaatttgtttttattataggttttcggcaaccaacataataatagtatttaaaaaaactgtaaggagttaatgcacaagatttttacgtggttggggcattaatgaaccttagtccacgagtctgtatatttatgagagtatttatt

SEQ ID NO: 49886 - DNA, 971 bp, Cannabis sativa
tttcatagaatagtacatatttatatacaaagctaggagactaaatgagaaactactaaatacaaatcggaaactactaaaatacaagttttcctattttctctacaactaatattctaacagttttcgatagtttatcgatggttttttgctattttgtgcagaaatcatcgataacctatcaataaatttcaaattgacaaaacacaaacaaaaatcattcgtaaactatcaataacctattgataaaattgtgttacacaaacaaaatttattgataaactatcaagtatattttggctaaaaaaaccatatggggcttctggcttttgcaagtttcttttgatatcaacgatggcgaaggacaagttgccttcgacctagaatgagaaggagagagagaggatttggaggatgggaaggagcttcgaccttcttccacccgaagaaagaaaaatggattgagagacaaatggagggagtgcaacatcatcaacaacgaagaaagatagagaaggagactagaccttcaacatcatcggagatagagagaggaaggcaaagggttgattgagtatgttaggtgcgagtgtgaatgagagattagagagagaaagactttttgagatttttgaaaaaattaaatgaaaatggtagtttgggtaagagtaggaattattaggataaaactgtatagaataatttaggaatatttttttagtaattgggtatagttatagtggatcttaaaaggaggcgtgtgaatgggaaagaggtgcttggtcattcaagtgaagattttgtggggccagtggtgattggtgatgatgtggacgtgggtatgtttcaagaaggaataaatagagaatgtggcattattgaaaatggggtttatgataaggatagtgagggaatacaggttgtaaagcccaatggtggaaatgaacttttaaggaagaattctgaagcta

SEQ ID NO: 49887 - DNA, 1191 bp, Cannabis sativa
tttacgcttgattctcttgtttcacgtccccagatgtttaaaggatgtattcataagaatacaggacaaaacatgaaaaagttgaggaaaaaatatatcaagctattttttggcgaagcccgtcgtgatgggaaatattcctagctgcggtggggattggcagaacgaatgccaatttgagatgactcaatcgcgactagaggatttggtggttgcggcgaagccttccatatgactgcatgggcagtttcgtaatttcaccaattttaaagagaaaacttggctcatttaagaggggagctcatgatttttgaggaggttggagattgggagccctagaaatagggagagaacttcaagagcggcttgtgacgatccgaattaatttctccaaccagttctttcttctctcttaatttttctatgttattttttgtttcaattttaattatggatttgactatggagattatgaactaaactcctatttagggagatgatgaatgttgattgatattatttcttcggttcatgataattgttatttctcttttctcaattgcgaatttatctatatttgtgtttaattacatgtttaagattgatcacctctttcatgctctatgatcccaatacaaaatctgaaaggtgagttttgggaatgctaaaatttgatgaacgaggttttaatgtgaaacaaaagtctttgcatagccttagtgacattgaaattattgtaaaatgttgattatatattagtctaattcagagatgattagataacatgtgatttagggcctaaaagatctaaagaagagttggactaatttttataatctgtcattcaccttaagaaagagaatagtaattagaattaactgttgggtaattaaatcaagaggattattttcttcttatccttgattaaatacttttattgccctattttattttatttttattctttatttttattttcatcaaatttatcggttaccaaatagaaatataagtctaatttagtggtattcatttcaattccctgtgggatcgacctcacatgtgtgagtactacttgattacatgcaactgcgtagttgttcgtattttttgtaacaggggtgccccccatgttggaaatattttaccgggatctagatttactaccaagtatgtttgattaacatccta

SEQ ID NO: 49888 - DNA, 795 bp, Cannabis sativa
ttctgaatggacagttttaataatgcatggatgataggtcatgggcttattattattatcaatgacgacgcaacacccatttatttatggtacctgtttactactgcatcgtaaactccccaaacaacaacaacatgtcatctacttgtatccaattcaaaaaaattaaaaaaaaaaattgattttcttatttcatttcctctaaaatatttgtcttaaagaaaaattaggcaacaaaaaaagaagataaattttatatttttgagatttataccccaaaatatggtattgttctaaataactttcataacatggcaatgttaaatacagcatatgtgtcatggtatcttttaaaaagggttttggtagtttttttatttttattttttgaaaaataacagaaacttcattgatgagaaagtacgttggtcataatacatggagaagttatgtaatttatgttaaaattatataaaaaaaatattattatataaataaagaaagagtgaaaaaagctttaaattaatataaataacaaattagtggtaaaatagtaaaaaaaatgtgacttagtgtgaacaaattaagtccatgttatattttgtaccaaatttaatacacattttgtattattattggagtatctttttgtcaacatgtgctaaaaaaagaggaaattacactctataccttttttatattgttctcttttatttttaccttcttttttaaaatctattatttttacctctttttttaaacattataccgattttgcccatatcacttcaagat

SEQ ID NO: 49889 - DNA, 1689 bp, Cannabis sativa
agatgagcttctgccaaggatttctcgtacatggaagtggtcccagtaccgcattttcaaaaggcagacaacgtgttctcagaagcctagtgtagttttccttcatatcaaattgcatagaataaggaattaactcttcttaaatcttagccagaagatgatatcaagctaaaagaagaaactacctaaaatgaagatcatgttgttatccacacttcggacattggacatgtggactccaggtcagccaccaggaccatcagtgggaccctcagcaaatataaaactggccaagctcatctagatatgtccttctaggaacgtaccttagttccgcactcgtagagtcttccgccctcagcaagccgtacccgaaagacatctccggtaccatgagatcggagaggaaagacagtgtgttcctagaacacccttccaatttccctttatatacctgcacacaaataagaaaactccaattttcatatcacaacagagtatcgtatcaagattaaaggggaaacttcttgtaaccaatattatgcaattaattaagattaattgcccacaatcaatgtacgtggggttgaccagatcaatccaaatcgaatatgcctagtcagtagatcgtcttctccatgggttagacttcatgagaaagcccatgagaattgtttactaactcactagtagagggaaaagaaaacctaatgtaattctcaaactactataaataccccgtgaatcctttgaattaagggttgaagtctcttgcaaactttgctcaggcaaacttgagaacatacattctgtgtatttccttaggcatttacaagcaaaagacttactgaatgataatgactcgtggactaagactagttaatgtcccaaccacgttaaaaattgtttgtctcattttatactttctcttttgattatttattctttggttctttttatttttattccgttttcaaaaatctcggtaaatattttggtgctttcatcgagagttgaagaaaagtgagaccacttgtagagattacgttcgagtaatcatggccctcaccataaccaaatatggccttcgttcactagtcctagagtcagagctggaaattctagtgaccctcaagaggtgactagtcgttaaaaaagtcgtcgagacgaagatcagaatcgagatgatcccatcatcgaggatgcaaaatctggagaaagtagttatgaggatgctgaatttaatacccacgacgcgccggaggatatgcatgaagacgaccctctagacaaagtttctgaggacaatgctgaggagaagagccagtctgatgagtaagaccctatggtcatcatggcgcgacaacttcaactgccgaaagtaggttaactcggcagggtcaattcaacgagttgctactcagtaagatgaccaaaatggaggttgtgaccactgccctaacaaaactatctcttgacgtgttagctcctccaacaacagacgcacctgagaaagcaaatccaaaggatcctggagctttaggcgtccacaaagacaaaggcaaaagaatcactgtggaagaaccaaagaaagctccttctgcaaaatagcctaaaaagtctaaagctgttgactaacctcaacagaagaggaaaggaaaccacgcctaatgtaacaccctaactaac

SEQ ID NO: 49890 - DNA, 2220 bp, Cannabis sativa
cccagttgatacagcaatgacccagcaatgactcagcaattctgacagagttaacagataaaaaaaaaaaaaaaaaccagcaaccgaccaagcccaaaagagtcgctatactggattggtggagatacagtcagagatactgatgtagctgaaggataaagacgtaattttgcatattcaggaaggaagagtaataggaagaaagaaagggaaggggggaatataaaatactagaagagttttctttgagtcaaagcagcacatcagatcggacatattattacccaaaaataaaataaaaagtagaaaataaaaaagttcaaaaacgaaaaggaacgaacctgaaatgttatcttcagaggctcctcaactgccattgttgttaaaaagaaaaaaaaatgtcagtgaagacgaagaaggaaaaagggaaattgctaattttacagtccagagagaaagagactactgaccttgatccatgagagcttgtaaaagcttgatcgcttcctgaggaacatttgccatttcttcaagtgttttttttttctccaacaaaatccaaaattatcagaaaagttgcttctacttccaaaaattcctgcttttttttttttaaccagctaataatctattatgttgtgttctaattgggctcgttttcttctctgtactcctaatatggtagattttagagccaaaaaaagacaaaaaattattagctaaatatttatacacataatatacaagagagggagagaggagaaagactagaaaagaaagaagaaaatgaaaagcgaaagagggtcaagattcaataaaggcggacctacgatacgaaccactactactactgctctcactaaagggctcaccctctctctctctctctcctccaccaacaacgtacaatatttctctcttacacatatttattgtgagaagaagaaaaaggaaagtgaaaaagattgaaggatattattattagtgtagaattctgtagcttcctaaatcgttttcaccgctgcaattagggtcctactgttggaacgtggctataatttgaaggttgacttttaatgttgatttgattctaattgagattgtaatttggaaagcttcgttgtgtaatatctaattcaattagtttcatcaattattggatggtaattttaaaatctatttcaatccaactatatttatatttagtttttattttacaaaattataaaaatataatagtaatatttttttaaatattttaataattttataaatttatttataaaaaatacattatttttatgttaagattttattataataatgataatgttataatcaagttcattataatcaaaattacattaaaaaaatatgttatataaaattttatttttatatatttttatttatttttttctacaatataaatttatatgtttttgataaaaataatttattatatatttatcatttctaaaagaaaatataatttataagaaattctaagctgatgtgctttattaataataaaaacaaaaatataatataaaatattttttaaaacaaaataaaaaaataagaaatttaaatattatttattttaaatattttttttttgttaaaaaagtactttctattttttataatatacaataaataattaaatatattttagtgcaaaataatattttatggagtctattaattaaaataatctttttcaaaatggggttttaccaattttaatattaacggtaattaacttctctataaaattagcctttaattttttcaaaaattttgtcaaacaaactataaaattagtgttgcatcaaaaaaaaaaaaactataaaattagtacaacgtataaaaaatataaatatcttagaagttagaagtcacataatttttgttgtcaatattattaaagatttttgtaattataaaaatgtgaccagttaaattctaatttagaatttcttatcctactactatttttttttttttttagtaatttgcggcataaatacttaagtttaactttcagttacaaataaatacctaagtataatttttggcagtaataatacttaagttataactttgaaacttttataggtacctggttaaataaattaccacgtgacacttcctgattagtccaagtcattaaatttttattatttaaaaaaattagttcaaatataccaataagaa

SEQ ID NO: 49891 - DNA, 1518 bp, Cannabis sativa
tgttataactagaatctaagaaacctttgttgattcaaagagaagaactcaagtggcggaagcgtaccttaatccatagatagtgatagtcttaatccatcttgcagagataatctttgtggtgattttgggtaatgatctttcaagaaaacaagacttaaagttttgtaattttctctcttgatgggggaagatgagaatagaaatttgctcttgtttcttggggaccactacctatttataacctcatagctaggttattaattttaagtatttctaatttagcccctcaataaattaaaaatatcgcttagggtatctacacatttagcccatgaaactttaatacctaatgatcccaattattaaaatgatcactttatatatttgggtcaaactttaaatagcaatacacacaaatacatatgtgccacattagagattttaatgaactcatagttgttaaaacttaattcttgccctacaaaatttacaattgttgttttgatttttattgatgaaatatatgttatatatgaaatatggtatagttacatttttttcattgcaaatatatgagaatatttatagtaggtgaagtgaatatttgagaaagttttattcaaaacacaattgttgagaagaaaaaattctaaaccatatgtatatataattagttgatctaggttttattccttagacatatacgcctttcttgtgtttttttttttctttttttcttgaaatggatgctcttttgttccttttttattgatctaaaagtacaataaaaaatttaaaaatccattatatgtatataagtctttaagaatagatggattagtgagttgattaaactaatattttttattatgtgtagtgaacacttgataacaattttgatccatgtcggtgttctatacctcgactcgacgctctctacagtaacgaggagatcaatgcagtacgggataagtggacataatttatgaatcctttgattattgattaacaaggttatcactttttattttgatacatggaatataagttttatgattattgctataaactcttttgtattatgtaattagtctattaacaaggttattactttttattatgatacatgggatataagttttatgattattgctataaactcttttgtattatgtaattagtctatagttagttttaatgatatgtagaatataagttttaggattgtttctattaacaattttagttttatttaattagttatagctttatcgttattgattatagaattgattactaaatataaaatttttatataagttttataatcgttattcttactttttcttatattatgtatttactgttatataaaataatttatgcaggtaggaaaaattgcatggaaatttgtaattttctcttacttacatttatgtttcattttataaccgacgcaccatgtgaaaaaaaggtatttgcaacaggtcatgcgtcatttaagaactgacagca

SEQ ID NO: 49892 - DNA, 3292 bp, Cannabis sativa
atatatatattctatgctctgttatttataatatacaaattttaatattctatatatgtataacatataactaaatatagagagcgattgtaatgcatatatatacacgttagtaggattgataaacttctcttcctatatcatgagtttgttgtgtatatatgtcgttagtttcttatccattatcattatttttattaactccattaactataaatacattaaaacacagactacaaatgttattgttaaatgaataaaagtctgtatgccctgctatttgtatataaattttatcaagaaacaagataaatatttatatatcttgattaataaactaattaattaattcccgttatatatttaaaataataaacgtacggtgcattttcccctagctttcttttgcaaggataacagatgttcctatgaccacacattttcgaccttgcagtatttctttctattctatgccaataaatatgttaatatatatatatatatataaatattccaatatctgtgtacatttagctttatgtttatattgattaatatatactagcaaaaaataatggtggaggactagattaatttgaagtgacaatttaattgaacaaaagaaggttgaggactctgtattcagtgggtcacaagatcacaaaaggttgaaaaggcatatgggtactacctactagtacttctacctatttcggttgccttatggccgaggaagattgggtcatgtgatctttttaaaatttatttttttatgtattttttaatatatttatatttttgttctgataaattttatttttattttaattttaccattacatattataattttggctatataaatttatatatttttttatttttatctttgcatatttttatatttattctcatatatatctatcttagtataaaatttatatttttttataataaaaataatattttttttttataagtgtccttttatagaaaaaaaattccctcctaatatttgggcttgctccgcgaaatttagattgtatttgtctacgcacatgaatgagcggtgagcctctcattcagtgaaggcactcttttttattttattatattttattttttcctttttttctttctttgaattccatgattgaagtaccgctagttaaaaacttaaaagtaatgtgataaaattaacattaaaagtttgccacccaagagctgagaccacgtccacgtgtatacaaaaatatgcatgccattcccattttgagtgaactgaattatagaaatgtttttattgtctttaattttattatagatatttatttatatagtagaaaatatttgaaattattgttcttgagcagctgagaaagtgggattgccaacttcgccaccatatctgtctctgaaatccaaaaagaacacgactttgttgataaacggaactagttttgcctccggtggagcaggaatttttaatggcacagacgaagtttatgtaagtgaattacaataatcctatctctcatttgtcacctgttattatggagaaaagtaacaaaaggaatgcggtgagcgtggatcgaacacgcgaccttcagatcttcagtctgacgctctcccaactgagctatccccgctgatgaaacaaacctactaataacttttacttgaatttgaattttgtagcggcaatcaatacctttaacgaagcaagtccagtactattcgattgtacatgacaaactggtgcagcaactaggacccacaagcgctgagcaacatctctcaaaatctttattcagtattgtcattggaagtaacgacctctttggatactttggctcctccaagcttcgtaatcgaaccaccccacaagagtatgtggaagaaatgattgttacaattaaagaacaactcaaggtacgtccacctactagtgatcctaatgctcaaagaaatttctcatacttttataaccttgtttattttttgtctcttttacttcacagaaattacacagttatggtgctcggaaatttgtggtgattggtgtagggccaattgggtgctgcccggcacaaaggaggaaaagctcttctggagactgcttccaagaaatgaatgattgggctatcaagtataacgatggtctaaagtcaacgttgggagagctgaaatcagtgttgaacaacatcagctactcctactttgagacttatgatgtcttaaacaaccttgttcaacaaccagcatcctatggtactttatattacatccttgtttccctttctcaaactttgcttttatgcaagtttattggatcttaatacacttttatgttggcttctttttgcaaaatcctattcttcaattagaaaactgggcccattttctatttttggaagtacatggtgaagtaggctctctattttaggcatccctgtcacgggttgccatcttttatcactaataataatgtgatgtgtgtatgtgactgacacagacaaaaatttcatcttatttcaggatttacagaagttaaatctgcttgctgtggtcttgggaaattcaggtccgaagcaccttgcctgccaatatcaaaatattgctccaacagaagagatcatgtcttttgggatctataccatccaacagaagcgacacatagcatcttatcagattatatctttgatggtccgccaaaatatatatttccactgagcgtcaagcagttagttgctctttagactcgtaacaccagaccaatacaggaaagcaccataatatagtgttacctcggttagctagctaatattatttattgatataaaacaaggaagattaggatttacagctacaattcatcttatctctgtgttttttatatcgaaacacaaccaagcttaatttcacactcactcaagaggaagccagctttttgtagcctagctagtataaaaataggtaaacagaaaagcatttgtagccatatttaacgtcaaatgaaatcatgggtctacatgatttttctctaaataaaaggattttcattttaagtgttgtttgtaagcattaagggcatctccaatgaagaaatttaaatttggtgttaaattaacaccaaaaaactactatttcaacattaaattttttttcaattccaaccacaacactaaaaaattacagcaaatattatattttttactattctattattttattaatataataagaatattttaatattaaatatttgttaaatccaataaattatattagt

SEQ ID NO: 49893 - DNA, 1217 bp, Cannabis sativa
  modified_base (1187)..(1191): a, c, t, g, unknown or other
aaaatggtatttacccatattttaattacaaaataaaagtacatatttgtttttaaaaatttatttttgaaaaataaaaatacgttttgtaactattttggtttttcaattgtaaaaacaaaaatcaaagatgtgttcggtaaagtttatttatttttttattttttgattttatttaaatcgggtctatgtctagggtgggattcaagtttgggttagaggctaagttcagcgctagggccgtagggaaatttgcgtagggatctggtcggaatctaaaatattgattaagaaaaaagactgttgtaaaaatttatttttagaattttaattctcaatttaaaaatttaaaagtaaaaacagttttatagaatatgattttgaaaaatatttttacttttttaattttaaaaacaaaaagctaattaaaaaaatgttaccaaacgctacttatatttttataacactttgtgtaaactatctatcttttatatttaggtaccaagttcaattaataaagggtatctttttatttttatgttagtaatttaataaaatatgtttgtttaaattgttttatctttattattttttttcacttaccatattctcttttagcaatagtgtcttacacttgtagtgatttatttatctatatacaatattttatatataatagagtatttatctttatttaataaataaaatttaaagaccattgtatatatataatcataaaagactattaataatattggtcgaaagaaataaatttacactctaacgacttcgacattaattatcccaatatagttgtgtcactgacaaacaatttatatacatatagtttattggattatcaacttttttgtttttgtatcgagcaaaaaaaaaaaagtaaaaaaaagaaataaaaaatattttgtatataaagcacaaaataaagtaaagaaaaaaaaaatatattataaactaatccaaaagagaaataaaatggctaagctgttaaggtaattattaactccaactagtaacaatagtatattgttacgtgcgatgcacgtatgctatgttttaaattaaatttttatatccagtataatgcagtttaaattaaactacaaatgttagtaaaaacatattggaaaccataataataaggttataatatctttatatattaaaannnnntatctaacggcatttcttggtttaac

SEQ ID NO: 49894 - DNA, 1303 bp, Cannabis sativa
tttatttcatatcgttttagaagtccatgtttaggatgttaaaaacatacttgttagtaattctaaatcttagtaaaataattccaacacttttgttatgtgaaaagtacaccccatctagggctacatgttaaaccatgtgaaagactcactttgaaaggtttctctgatatgaattgagcgtgtttccatgatgataagtgcctgttgctggatattgtgtatattttggtgatacacttgtttcatggtcctcgaaaaagtaatttgttgtctctcggtcaagcacataattaaaatactgtgcactagcttaggtgacatctaaattctcctggatacaagccatgctcaatgaatttggttttagtctaccagctactctaattatgcggtgtgaaaatatgggagtcgctgcgcttgcttcgaatctactttaccatgctcataccaaatacatcgagttggatgttcattttgttcgtaataaggtgctagtcaagaaacttgacattcattatgtaccatcttcagacccaatagctaaatgcctgaccaagagtctttccacaacacattttcaattgttagttgacaaagcttggtatggtgtcctccccattaagtttgagaagaggtgttaagaattgattagttttttttgttattaagggtcaaattagtttttattttgccttgtattttgtggtcttgcgggccgctacattgtcatagtcatcattctgtaatcatcttaccttgattttaatatcatgcgaataccctcacactacaaatattttacttttagtcacaataaaatctgtgattaaaagtataaaaaattgtgatttataaataataattcttatgttgtgattaaaaaattcgtagctaaaagtattagttataaaaattaaatttgttgtgactaaaattaaatttgttgtgactaaaattaaattagtgatatcttgtatataaatactttattttggttataagtaactttctgttgtgactaaaaaattatatcagtatatataatattttttagtgtctaatagttagaatttgttataggcagtccatgtattatatccctgttacaatgcttttagatatttttactttgtatcaatttctctatataatgaaaggcatatatcagcatcatttgagcttatcaattatcaattgttatttcaactttaataacttaattaatttaacaagaaaaacatattactcgatcaaagctcttttaactccattagtcataacctagacagctaatttccat

SEQ ID NO: 49895 - DNA, 908 bp, Cannabis sativa
cttctagtcaaatatgtgcgccatgaaattcaatattttttcaactaattaacgagtaactactggttgtagaataacagcgaacaccgataacgataaagtgtttcatgtatcggtggaatgattgtacgttttacgaaataatagtgagaaaagatacattgaattttaaaaaaatagttaaatagaaaaattgcatgtctcaactttttataaaatcaactttaatttagaaaaaatgtaaaataattaattgtatatgttcaacaactcagttgaagaatatacactcattattaaaccaatcaaaaataaaagaaattagtcttatgggtaacccagagtgctttcacctaaaaaaaatcctctatatattgatatatacgtaccaaagagtagtgcaataaagagtattcaatatgaaaattgaatcaatcatgcatattgtcatcatttttatggtaacattcatgatgtatatgattttctgagaaagcttatgtaaatagttttatgaaatgtcttgataaccataaataatgattattaagctcgtgattttttcaaataaatatacatttacaccatgaataattatacatggtacataattttaacctattaatagattaaaataataattaacacagtacctcttctttacaccgattgctttttaatttattgccttataaaataacaacctaacataattagtagaaaatttaaaaaaagaagaagaaagaaagaaagaaagatagaaattacttatattattaaaaaggaaaaaaaaaaatcaatctgatcaatatgaacatctcgctataatctgatcaatataacaatgaagatctaagctttacaatctgatcaatgtaaccaagaagatctaagctttacaatgtgat

SEQ ID NO: 49896 - DNA, 1167 bp, Cannabis sativa
tttgacgtggtgaacagagtcacacaagattaacaatgcagcaaactagagttcgtggtggaacctcctcgaaccataatagctcattttctaaccgaaagacatattttacaaaccataaaattaaaaattccttttttttaatattgctctacaatttttacttattattattatcccccaatcccacttttgtattctacaatatatatcattttaatataattatactataaaaattaacattaatccaattttaattctgtccaaaagatttcaaaatattgtccaattattttcaacggtccatttcaaaaaaaaaaaaaaaaattattttcaacggtacattcctaaaaattaataaatacagatttttttattgtcagaaataaataaataaataaagattttgatttgggatttggggaattgaatctgtgactcggcccgccattaacatcaacgcaaaccctctccaaaaccctattttttcactcttcttctgtttggtccccgagaaagcgagggaaaattactccgctccagattcccttcactctcttttctctttcgtttcaaaaatcaaacctttatcacttccttcccgctccctaaaactttagggtccgggactaaatgtcgagggaggatgagctcgttttgcgggatgtaaccagtgccggtatcgtcgtcggcgatcgaattggccgagaaattgcttctcatcttgatcttgaagaagccctagaagcttcccgttactcgagccatccttattcaactcatcccaaagaggtaataataataatattttcttctttcttcataccatttttttttatttacttccaaaggtttgaactttatctattttttttttctttctattacgttgtaattatgtattgaaccatttgcagtggcctcctttagttgaggtggtggatacttgggagttacctccggtacttgttgaaaggtataatgcagccggtggggaaggaactgctttatgtggcattttccctgaaattcgtagagcatgggcatctgttgataattcactttttctatggcgttttgacaagtggtgagtatatagtttgtaaagtagatgtaagatgaatttcaatgctaccaagatgatataatgagctgttaaaaaat

SEQ ID NO: 49897 - DNA, 1659 bp, Cannabis sativa
tgtggttgaacagaaacaactgtgttttcaatggtttttcgagcacaattacatctattgtacacgatattaaaaaattatgttttacagattatcaatagcaaaaaaagggagcttgaatagatatgagaggaacttcatagagcaactatactgtaaaaattagctgacttgcagctggttttttccttcagctgagttttgttagtaattttttgttgattaatgaagttgttccttcttgataaaaaaaaaaattgattatattgaaatgagttttatttagggcacaaaaccaaatacaagtaacactgccctatcctgggatgcggagcccccaacattttttttcttcgtgccacatgtcaaaaatagtgtccacatcatcaaactaactttttggataaacaatatttttttaaccttatttttctataccaatttcacactatgggaaaatgatgatccggaaaatacaaaccacatgtattttactttttaaaaacaaatactaaatacttgcccattacttcatgatgctccataacttgtcgagacaaccgttctgatactctatttagttgtgctaatcttagagtggcctatgaaaagtttcatataaaacaaaatacttttaactttagaaatatatttgactataataatatatgagttccgagagctattggcaaacttgaaacactaaaagctcagaaaaacatgttgaagcttaattttaaaagaaatatattatgattataataactatatacaatagttatatataatagtatatattatgtacttgtgtgtttttgacgaagtagtgagcttcaaggagtatcagtagtcacgatgacgagataggaatagtgactacttcaaagatttttcgaaactccagtcgccaacttcaaggattcttcgcttcaagaatggcagtcgagagaggaaagaccgattgggatgcctcgaggttgggtaaagccgacgggggtttaaggattaatgggtgacctccgacggtaagggagatcaacaagagagaatgagagagagcgggatcgataggggtttcgtggttggggttccaggcttaggtttcagcgtagatgaaaatgagagcgggcaaggtttcgtagtttgttttgatctttcatgttctctttgatctcaattctcaactgagactatagaggtgttttgcttttcttttttttttaaaaaaaaaatcttttaaatctcaattttggctttagtgttagtttactgacccacaccattaatttttttgaagtgtcaattataaactgtcatctaaaaatatgggtactctatatgttgtcagttttttaatttaaacaaccgtcaaattgagattagaagaatgtaatagtgaaacattaaaattattcagacctagagattcgtcccatgaaatataaaaaattacagtttcaacttcagccacaaagatgtttttatttaattaaagaagtcataagagagcctattgcctttaccacccaaaagataacaaacactactctaatctacacattaagatgtaagtaaattagttaaaaatcagaaacaacttgtaacaccctaactaacgtaggcgtattacgtgattttttaacatgttgtgcagctcgt

SEQ ID NO: 49898 - DNA, 1927 bp, Cannabis sativa
tctctctctctctctcaaatatatctcttaatttcttactctaacttctctctctactatgttgtgtctctcttgttattgctctccttattctcttatgaaatgagatgagtagtcctctttatatagaccaaaggatccaaaaaagatacttgttgtcctatttttataatagttaagttagttaatgaacaactaacaaactaactgaatcttggttgggagtttgaagaataatacaacatggttagaatgaacaaaagtttgaatcgatttaatttatatgtgtctaaaatttgatatattatatatgtaatagttaaatagttttctagaattatttgagtttttttttttaaaattttttataaaatagaccggaaatataaataaaaattacaagaatatgtcaacatcgaaaaatttaattttttttccttagaacttttttatttacaaaaaataccttttcaataaaattaataaactatttttatataatttatttataattgtattatacttatgtgaaataaggatggatggatgtatgtatgtatataatcacagaggctatggcccccctgaatttttaataatttatatgtactatataagttgattgatattaatatatgtatagcatatagcatctagtaaaaattgatccatatttttattgcaaagagtaaagttataattgggtattgacttatttaaaatcatataaaattatatgtttattataattctatcattcaataatatactatcctcatttgtattaaatatttaatattcttttttcatatctttattaaatttaaatgtacatatataaaattaaaaaattaaaatattttaaattaatattagtgtacacaatttttttcctttttgaaaaattacaagtaaacatcatgttcactagcctttggtaggtagccccagtatttttgagtccaaatagcataactttatagcagcaccggccaaaatctatccggaagctagtgtattcttggtcgaatggttgcattcttatttgattataccctgagtaggcgtccatgaaaattaggatttcatagcctggtgtagcatctaccagttggtcaatctttggaagtgaaaaatactcatttgggcatgccttgttaaggtcattaaaattaatgcacactcactatttctcgtttaacttgggtaccggtacaggtttagctacctatgtcgggtataaggcctgaatttttaatttatttactcaaagtctttatacctcttcttttaacgcttgtgcacgctctttacctagcaattttcttatttgctggtcacgacgagagttgggattaatgttaaggacgggagacatgatttttggatcaatcccgaccatgtcttcatgtgaccaagcaaaaatattaagatttgctctttgaaattttatcagagctgattttatttcaagtaacaaacatttgccaattttgagttttctggttgatatagtgggatcaatctcagcttcttctaattcttcaactggcctaacatttgcacttggttccctaaggaagagatccatatctttatccccgccttgggcagattctcatttgtcaatgtttttaacccttttctaaactctaaccggatgtttcttcttttttttggccttagttaaagcaaggttataacattcccgtgcaattccttaattgcctctcaaacaacctaccacattccttgttgtaaatttcaagcataagtgatatacagagataattaccttcaagtcatatagagctagatgacctaacataacattgaaagtagagggaacatcaattaccaggacttgggccattatagttgtggttgtcagagttttccccactgtaagtggtagacgggtatgtcc

SEQ ID NO: 49899 - DNA, 1113 bp, Cannabis sativa
aggtatttttaccgccaaaaataagacttaagtatttatctgctactcggcgtaaaacttaggtatatatgccgcaaattactcttaattttttgaaaaagacaaaaataaatatcattgccgaacataattttttattttggttcaaattttttaattaaataaaaaaattaattaattgtggcataactctcaaaacttttattttatttatacttaacttctaaaatttaaattttatcggtaaaactcaaaaaattagaaaatcgttaacaatttaaaattttcatccattttaggtgttaagtgtcatgttggactgtctacatgtacatttatatagactcagtgtacacataacataattttattggtccacataaataaatatataaaaattaataaaaaattataaattcaaaaaaaaaaaaaaaaactaattttttttccttttcttcttcttctttttttttttttttcagttatccacttttacgtatattatcaccaccataacccaccaccatcctccacaacccattcaccattagcgcaacaaacgccaccacttcaccctactgtttgtatccaaatcacacatagaaaaaaattaaatagaactcaaattaaatttaaacaaaattagatcaaacaaacaaacacacacacacacacttatatacataacaattttagatctataactttgaaccagatatgagatttctactgtcattgtaaaacccaacctcgactaaccacttacgagatatccacacgaacccacgaacccatccctcctcgtcgaaccaagaatacaattcccatcatcgaacaatgaacccacaaacccatactgtctccgtcgaaccacgaacccacgaacctgtccccatcccgttcgagccacgaaccccatcgtcatcctcgtcaaaccttcacaaaaaaaaacagagagagggagagagaaacatagagagaaagagagaggcgaaacaaaagggacgagtttggggggacctaagttttgggagtgtagatctcaatttcgtggtccaaatgcattgccagagtgcatctccaccaccaacgacgacttctttatgagtgcat

SEQ ID NO: 49900 - DNA, 2457 bp, Cannabis sativa
  modified_base (1368)..(1374): a, c, t, g, unknown or other
tatatatatatatatatactgcatgcacatatattcagcttatactccaaatatatatatatatatatatatttcagtccatatatatttattagttttttattggtttttatttaatttgttaataataaaaaaatctaaaaattattttatttaacatagttattttttaaagactaaaaaaaatactacgttgttataatatgtgtgagtgatttggataatttatattatacttaccatattgttaccaattattaagtcataatagagttttaataattagataaaatattttattttggtataattaaattcaaataaaatgttttaaagaaaaaaaaatacataacaaaaaataaatatatatatatatatatatatatacacaaaagataatgtggaaggaatcctaaattaattttcatatattcttgtgtaaattcctcaaacatccaatatagacatttttgtaaatgtaatcatcattttttgagatagtcatataacaaagttgtagcatttggtgtgtatcaccttcagtcaattgaaatctctttcttaattttattgtcatatatgttgaccaacacactatcatgacccatatttgtacctcaaaattccacgaagagttctgtgttcgaaattaatttttgaatgagaaatgctaaaaacgatcagtagtgcatagtattttttttatgtgttaatattattattgatataataaagtatcaaatctcatatagtttaatgtaataatttttagagagtatcgataactaatcgtaaaataataagtttaaaagattaggtactattaatattcaataacaatgttctttttgaatatatgataattagttaggttcaagttgaattgttgaattctactctataattaattaaagtaataataatatcttacccctaaaaaaatatcttaaattaattccaagtcaataaaacaatcataaataagtgcatgcgtgcctaaataattgtcagttttctttttctcttttgacaatttggtcaactttaaaaataaagtaggcataatagcattaggtttgactgtatttcaaattcattattgcactgaaaaatgtcttcaagggtttggccacactacaaaaaattactatttttagtaacaattttttagtcttaacataattttttttgtgactaaatgtaatttttagtcacaacaaaatgttacttgtaactaaaacatagtattttttttttttgaaggacctaaaacatagtttttagttacaagtacgttatcactaatttagttttagtcacaataaatatttgtgactaaatgtattttagtcacaacaaattataatnnnnnnnactaatatctttagtcacaaactttttagtcacaacgtaaaaatgatgatttataattactcacaaattttattgtgactaaaaataaaaaaatttatagtgcgaaggtatatgaagtcatgggaggatacaaaaccaaggtcaagattagtgtttggggccaggatttgaggccatggggtttggggtcagggacctggcaagggttgggtgcggggttagggtcccggcccattgaaggttggggtttgagtctgagtctaggtcctaggcaggattcgaggtctaaggtcgggattgggggagtctgaggttagggttcacatccagggtagagtctgagaaagtgtgcagtcggatttatgataaaaatagtataattttatacaatttattaatataagcagtataattttatacaatttattaatataaatcaatatgaagcataatatattgtattaaaaccaacacagtactatatatatataattatataacacaaaacaatagtgtatcgatcaaaagaaccctaaattaagtggattattcatgtaaatagcccccgtagatatttttattttaaaggtagaaaataaatttaagtagtatacatgatcaatgtaatagttaaattgcttcctaagttaatattattaataagtgatttgctgtaaaattatatcttcacacatattgatacaattaactctacaatctaaaattttggagacaaaaccctcctttgatctgtttgcatagttatattgccataaatgttacaagatattcatttataaattttgacccttttttttcatttccaaatactgtaatatatattcatctaataaaaataccatatacccaatggcattttggtaatataacacacaatcatgagcatattcacactccgcacccttataaataaatcatgtagcagaaaatgtccctcctcatgcatgatatattgtatcatatctatcagatcatcaagaaaaacacacacacatatatatatatatatatataaataaagtaaaagaaatattttccaaaaataaaaaagaaagaaactaa

SEQ ID NO: 49901 - DNA, 941 bp, Cannabis sativa
gggcatccttcctaggaatgacaaccctacccatactgtcgtctgaaccacctgtgcctgccagaaggccaaaaatcactccctctgcctagggagtttcccctaagactttctcccctagagcaactggtacctcggacgtcttcctgatagtggtgggagttttctccacgaaagaggccgaggaacttggagctgcagagctcgccttagtgggaggagtgatcttccgaacatttaacgacgagaagttaagggaggacgttgtgtatggttcttagaggcctgggacatgatcttacccttccccttctcttgagtgtctctggctttggccaaggtggcggcaatcttgttactcaacgacttcaacatcctagattctggagtatctgcacacataactgcaatataagcaactataaaataaaagccaagtcaaagcaaataaaagcacaatcataaaatagaaaaatccactaaaaatactcgtgcatgagtacaaccattcagtgagctgctataaggttccccacgagcaaaagtatttatatctccttgatcaaggaagctatcatattccttgaaattaggcaatgacatgatcgtgaaaggatccaccctaacactgtttgaggacgctctcagattactagggctcctaagaattctgtctactctatctatataatctttcatgggatatctatggtggtctaaactaagaaagtatttatcaaagtgctagctcccggattccctacgtctagatatgcaacagcaaatctctcagagatttcctcctcctcagatagggaatttggatggtggatcagccaatcagactttaggcgtttgtcctctttggtcgcctcaatgataacgacaactagatctgttgcagtggattttttctcctctataagagcctagcattgtcc

SEQ ID NO: 49902 - DNA, 1007 bp, Cannabis sativa
aactgatatattttagggggtatttttaactacacttataaattaaggggcatcatagtatagtgtcataagtacagggactaaaaaagctaattattcttttatattttattattcgtttcttcctttcctatgtttgacccgaatgataaacgggtttggtttgggccattggcccatcaatgggcatgaataagacctaaccgaaaacccataattttgggaggaaaataggttgtgttttgattggtatttgaaaatttcataattgtacaaaataaatagaaaatttaattaaaaaaaagttctttaacacttggaaaataaactactctaatcttttatctgaaactaattaatctttcaacgtgatttatgtttttattttttatcgaaaaaagtagactacgtggttcaaatttcttcgattctgaaaatcatataaattttaaataatttaatctgtagaaaattttgttagttgggaccaatttaaataaaaatttggtagttattatttatcaaactactgagctccctcgatgtccgtctttctcattctctcattctcaattatgcacaatggtgccaacttcggtcatcacagaccgaaatagaggccatggatggcctccccaagtttcgagaggcccaaaaatgaggaagatttcatcgaagaaatagagggtatggatgagttcagagaaattggggatttgaattttggttttaggagattctcaagataagagtttcatatcgtagactatttgagtcgatttttatttccttctaagcattattttatgaacttatacccttttacaactgttagagtactttaaagaggaatggcaagtggaaggtggttgtggtgtgttctgatggagctctcgtggttagtgaagaacaaaagaaaacataagtaatttgcggcataaatatttaagtttaactttttgttgtaagttataattcttgaacttttgtaaatatttagttattaa

SEQ ID NO: 49903 - DNA, 799 bp, Cannabis sativa
aagaaaaaaataacatttatatctattctatatacgtatgtatgtaaaaatagagttgatgtaaaatgacaaggagaaaaatttgataaaaaatttacttaaaaaaagtgattcaattttataggagagagaatggaaaatgaattattggtgatagatagggacaatagggtaatgatctactagattttgtctagttgcctcttcttgccaattttgatacaaaagtagtgataagcttgtttctatgaaaaatagaaagaaaaaaactcttgtattcttctacctacttcttcttctcttctcttctttaattaaacattactatgcattttcattcaacataattttaattagaaaagattctttaatattattaatcaagattgaatgtgaggtaatacaaaacaccaaatgcaaagaaaaaacaagatgctgtcaagccacaatacttggacatttttcattatcatccccactcaagcgaaatggtgtggaacacagtttgagcttggacttcaagtaggcaaagcaatgctttttagtaagaacatcatctacttggtctatagatggtacaaaacgaacgtcaagctcatgagctataatttgatcacaaacgaaaagaaaatctctatttcaatgtatttggtacgagcatgaaagacagaattagcagcatgagaagctgcttaaccttgattatggaagagtgacatggagttcacggcgaatggaggtgagccatttgatctctactgctacaccgagcaaagcaactatcgattgtttttttcca

SEQ ID NO: 49904 - DNA, 945 bp, Cannabis sativa
aagccatgtcttcggagtatgtaattggaagaaccaagcttaatcgtgtctactggaaaaacactctctcaggtacttattcccaatctggccgagaacccaactgtgaaaagtcaagagcagctttcgatcaacgactctaagtgggtccacattcacaagtgtcttcgatgccctggacttcttcttcatttcagtgtactcattgaaccacctaggtcactttctctttctttgattctccactaattcttgagctgtctctaacacatgtatctcagaatcttgagtatccccaatgcgggtgatcttcgtgttgtcatgtgtacagaacatatcatcatcatccggtctataatcatttgggagaataatttcatttttcgatgactgaggctcttcttatggttgtggttgtggctctgtatctagtgtcggccttccaggatcttgtaggagtcttattatggtcttcaactgacccataatctctgtctgtcatcttaacagagtggtctggcctttcctcaaagcaatcagctctctctccacagtctctaaccttgcaaaaattgcagggtatactagttcgcgagcctctgaggtgttgagaatagatgctgacgggccaagaggaggatcctatgatgctgcagatggggcaacactagactcatctggtagtgaagacggtccatgttgtggagatagtgcaggtgttgtagagtctctaaatattcaggctgcatccgctcgttcttccaatgttgaggcaagcttttcggcctggcttcgcaaagtatcctgtgttgattgcccattgtcacccaacacaagttcctctaactcaacaaataaaggtgcctcaccgccagtgatgcaactacaaactcaatctcattcgctcggggacataacatagagtaaactgtcaactgaaaaata

SEQ ID NO: 49905 - DNA, 1385 bp, Cannabis sativa
tagttggttgttttgtgtatttatctttatgatattttgttctattttattatttagaaatgtttttgttttaattatttgaaacttttagttgcattattacattgtaatgattgtatgtttatagagtattaagcttaattaaatggtgatatttattttttacctattttttttatatatatttttattttaatattaaaatttaggtagtgtgtaattggatatccaattaaaagatcgatccgatccaattagtatttgaattggattagattttgaggtctaattagactggatcggataattttccaaatcgaattactaattaaattggatcaaatgagagaaaaaaagtttaattagatcgggtgcccaccagtaattgaaaaggaattagttgccaaaagtatattttttcataacaattaaatctctcaaattaaaaatgctcagtccgttgtcatacacaaatcaatacacactcatgtatggtagtgaattttttttttttttatttaattaagataaattattaattaatcgggaatcacaatgaaaaattagaaataataaaagacgcaatctcaagtagcttgggggagccgttaaatgaacagtagtatctggattaagatatgaacaatataatatattcattttccctactttttatataaatacagtaaaggtagtcaaataaaataaacatattaagttttttggattttaattaaaacaaacataatgactcaagattagccaagctgtttcatatctttgccttctatacttaaatgttatttgtcttataatatatatatatatatatttatatatagtggttaggatttcttaaggaactattacgtgtacaaatccagataatgaacaaaagctgatccaatgtaagaatagtttaggtcaaaggatttgctttggagttatttaaggagtggtgttctattaaaatcattacatatatttgttataaaataatgaagaaaaacatcatcaaccatatagggatgaaacattttttaatgcatcatggatatcagaaaattgtctagctaacgttagacggaagtatggaggcacagagtacatatatttttatatacaaataactaggaaatgttattcttcatcacccatttttttttataacaattgacaactacattttgatataaaatgatatcatatagataaaaaaaataggaaaagagatgagacagggtgaatgagaaaattttatggtgttttattttaatgaggtaatccgctatttatataaaaatatgagctataaatttaggaaactaaaagaatcgtactaattacaatcaaagttaactattagaagatttagaaatcaatat

SEQ ID NO: 49906 - DNA, 533 bp, Cannabis sativa
aacattgatcaaacacttagcgtagaaatattgaaaaagggtactctttgcattttgaaggaaattcttgcacaatatggccaaaactatatcgaaaaatgcaagtaaaatcaaaaaattttgctaagaaatcaaagaagaaaggacctaattctgcctcagatgtaatacgaacaaaaccaattgatgttgtgattggtatagctccattggaactgtcagaggaagaatatgaaccagatgcagctcagactgggaaaaggggctctggatagcaacctgagcttcagcaacttgtttaaacctccattgtctcctactgcttctctgaatgagatcaagagagttgatgatgctcgataggagtttctacagttcattcgagccaacgagcaatgtaacattacacttgctaaaggtaagtccccaattcctcatgttctcaaatttggatccattgtgaggaacttagaacaaccgtttaagcaatcagcaaagcctagtaaggttaagatcaccttggatgatattga

SEQ ID NO: 49907 - DNA, 1104 bp, Cannabis sativa
tggcgtggttgagaacttagtgtttgtgtcagataggcatcataacatatcgacatgacatagacactattctatatttgtaggaaaaaaaatatagccaattaatttagaagattatcaagaacatatcgacatcatctcgacaatgtggacaagaactactttgccaagcaaaaccacaattacgctcgtatgtcgattatatatcgataatatgttgatgatatgtcgacaaggtactttactttggaaaacaccattgacaattaaatgttgattaatttatgtcgataatatatcgacaaaatatcgatataccatcaacaaaccaaattattaatatgtattttaaattatataaatcagagacaatattgagcaattaatgtggatattatatcgacaacctgtcgatataccatcgatatacaaacacataaatctgtattttaaattatgtaaattagactaaataaacaatgtatttttaagtatacagaatgtataactgtatttttaattttgtaaattgcacaaaatatacaatgtatccataattgcacacatatattcaaccgatattctggtaaaacaaatcaatgcaccaccgttcacgaaacatcttcatcccatcttgcgtgacattagctaatgaatgttgtatgatgagatgctccacatactcaatagcataaacgccacaatcaccactaaatgcaacataaaatatgaaattagtacaatgtaaaacatattttatcactacagtacttttttatcgctatgtaccttattttttcctttggaactaagtcgtgattggctcgagtcaaatgcatattcggaagcaccttgatctcattcgtagttaacgccatgatctggttattatttggaaaatccctggttccatagattaatgagggcaacagttcttcccaagtcttcaagatgggtgccatgttggtccaatgacaaatgttggaatcacagtcatacacgttaattttccacagctctatgtcaacttcaacagtcacccagtgcctctgtgcgagaagatgcaaaataaagtaaatgaactcatgaccccccccccccccc

SEQ ID NO: 49908 - DNA, 1869 bp, Cannabis sativa
tttaccaaatgccaagccaactagtacaattgtccatccccggtggctatcttgtaactaacaataataccaatattaacacagctcatcattcaattaatcaatgttcaaattcccataatactgtttagtttccacatatagtactagaacaattccagccctcagaattagaatatataaaaaaaaaatactaaaagaaaaaccgaagtcttacctcataataattaacaacagagattaattccacgattgaagcataactcagtttctaataaaacgtgaagatttgcagataaaaaaaaatattcatatatgtattaaaatatggagttattcttacgaaactgacaactttctcagccacaaaatcttccaactctgttttttcttatcacataataaataaataatagaagacatttgataacatttctatgttttaattataaaaataaaagtaaaatttatgttattaaatataaaaatatgttttataaatattttattttttaattttaaaaataaaaaacaaaaactatatattataacttttatttttctattttatttaaatcaggtccacatttgagtttaggactttagctgtggtctgagtttaggattagagtcgaaatccaagtcctaagattcaagttagagttcgagtccaaaatattaattaagaaaaaaaaaactgattaaaaaattttaaaagtaatttttttttttcaaaattttaaaattttaattttacagaatatatttttagaaaatattttaattaaaaaattaaaaagtaattaaaaaaatattatcaaataatcttacattaattcatttctttggctaatcaatcatgctaattatttttctttttcctttttcaagtcaataatttaacatgattactaatgagctattatccaattattggggttagccagatgggctgttattctcaataagctccccaacccaaagaccttcattcggatggatgccacgtgtaccgacagtgaggcttggacggtgattgttcaatgatacatttgggcggttgatgtgtgatgtgtggtggttaaattttcacaaattattaatattaattattatatttatataaagtataaattatgagtgattggtgtgtctgcatgtgggtagggccgacatatatggaaattaagatcgctatctttttactaatttattaattttttcttttaaagggaaagctttttgtaatttgtacgcccaatattttttgctttatatccctttcaaatatatattttttttattagataattggtttgagaatctccaaattataaaaaaattgcttagcattacttatcaatgctctttttattattattctcatttttttagtaactagttttctataaaagtaaataaattaaagaatggctttcaatattattttaggcttgagtaacaaattattaaatattaggtaggtgtactttgttttttctttaactataaataatacttatttaccccataactataaaattatcagaaaatgatatttttgccaaatttatttaccaaaattacttatttcgtaagtgttctaactaataagatttaaccactttttattatatgatacacttcaataataaaacaactaataatattaatagttataattataatattttagttatttgattattagagttctaaatttattgagtgattcaatttattaattatttaaagtagtttgtgttcagagtttacataatttactgctattattaattgcatttaacatgataaatgttctaatttgccacttaaaacaactattattactatttatcaatactgctt

SEQ ID NO: 49909 - DNA, 1740 bp, Cannabis sativa
gggcataaaacccaacaaattgacctttgagttggaggacatgagcttttgtttgactggagaacctctactaaagtgcacgccaaacagagtatgaggtgggaaatttggccaccaaagcaagaacaggttcagacatggaagatcgcagccatgataatagtatttgatctttctttttccacaacatatactctggattaggggaaccaatgacaagattggctagaggagacacatttgagaataagatttgatcaagaccattactgtaggatgggattttcgcgataagaagttatgatgatcaagtttcagagtaagagaggaagacagagaatttgagaacgagttccatgttacgttgagattttcaggatgatgggaagcataattgaaggatctgatgaggaagtttccatggatgtgagtcaagggacgatgataccataaagaaggtagagaccttctgaaacaacatctagagagcgagatgaaagagagagagaaagaaaccgagtaacataaaattgaatgaaaagcatttcatcaattgagtaacttagccctttatttatacatgaaggttgatacaaatgattccaaagcaaaatagtattgtaacagtattaacagaagtagttaagtaacctaacaaatttaaccactaactaatacaccatagttatgtaatagagtctaaaacataattaacggtacaccacctgttagaactttttacaaagtttaacaaatttttgacaaaataagagaagtcttagtgtatgtgaaataaaaatagttcaacatgagatttgagcccttatttacaagggtatatacagtataattttagcacttgggataggccccaaggggtacccaattttgtgtgaatggatgaggacacacacatacttgacccaccataaacgcacacatgacgtctgttcgagctggtctagtgtggaactttactttttacaaaaaaattatttaataaaataattattttttattttatttatttgaaaatgtgtttaattaaaactaaatgctaaatcgtatcaattttatgggatacattcagcaacaactcttccacgattcagaacagattattgttatttgtgtttccaaagtagacacacgtggcaaaaaatagatgatgattatccaacttattattgcttaaatctctctaatcgcgaaggttgtgagaagacttagctaacctagaagaggcctaggtccagcgcctcaccacaagacaaagctaaactcattaagtcttctagaagatacctagaggccaactaaagagtctaagatagattccgtgtgcccaaggaataccaaaagcctactacgaaatggaaatcgggcgtctcccttgacatgtttaccttttagcacaagatcagatcttgttctttgtgtcagagcatggtagtgcacgcacctcttctaaataccatgttttgtctgatggctcctctgagcactttatttgccaggcgtgacctttacccagcacgtgccgtgcaccaacagtggtcctagttgtatagaaccattgccccacgagaggacaccttttcaggggcccaatagtcatgtatataatgtattttatccaaatagtgggtagacattttacaaaaccctaaagggcccaatatcatctcaattagtgcggggtccatagacctatggcccaatatcatctcagttagtgca

SEQ ID NO: 49910 - DNA, 875 bp, Cannabis sativa
ttctttatgtcgacatgtctctggaagcccttccaaaagtactgaataacttatttgaactttttgaagagtttaccaagaatacaagaaacaactttgatcttgcatgaagtatttgactcaaattcgaaatgaatatgttaaatttctatcatttgccttttaatctaaccttcaaatattaatgactttctcaagataaattaatcctcaattttgcatctaaaagtcttttttctcttttaaattctatttttgtttcctaatattggttctatcggggttgatcgattggtaacgacccttgactcatagaaaaagccaatgtttctttcaaaaatctaaaagggtggtctttgagatgtaaaatatgtaataatttattggttatctttatcaaattacagtaatgcgatacgtatatttatattatgatatatagttttacattggtatttaaaaacttaagatctctcctttattattgtggacattaaaccaatatatctttcttttagagttttcattaggtttggatacttaatacttctaaaaaaaatgtcacttttatccgtatatttttccgctagtaaaaatttggtattgtgctagcaaaacgaaatttattttctgtgttggcaaatcaatattggtattagaacttttgccaacgctaaatgaaaagcactagcaaatataattttttctagcacattaaaagttagacttttaacatttttgtgcgttggtaaaaattacttttactagcatagtagcgaactgcactggcaaaagtgacatttctgacagtgtaattatctagataactatggggaaattgattcaagatgtgagagaaggaagtgtaaagataa

SEQ ID NO: 49911 - DNA, 1322 bp, Cannabis sativa
ttacctccaaccaaacgccactatgaaataagctgacacaacaagtatagagttatgcaatttttttttttaatatttgcacagctgttattggccaagtacgtttggaaaagttcgagcattgatttcctatataactgttgtaaaaacattataacaaaaatggacaaccattatattccattatagtagtttgtaatccaaaccaatctgcgaatgctaattcccaagaattaaattatttaacaaacagagatagagagagctgctggccaattaaggagaataattcccaagtcagccatgtgttcgattgtctactaactatttgaaaaaagatacaagtttccgtactgtactttagtcaaagaaaccaaatatttacgtatacagccttggaactggatactaccagtttatgaaaatcaatcatatgactaattaattaaattggactaagactgacttctgtcatttatactagtgcctagtttctactctaaacttaatggttagatattaacagagaaaagctcataaattttttggtaaacaacgaagaaaataaataactaaataaatataagaaagaaaggtgaagcagaccgtgacttcaatgggcaaacgagtgtcgatccgatgctggtaatagagatccacacaatcaacttggagccgatttaggctggcctcgcaggcggctctaacatacgccgggtcacctcgaatctccctcttgtcgttggcaaagcttattccaaacttggttgctagctcaactttctccctcaccccttgaagcgcctaatcccccattttaatttcatttgaaaattcaaaagtcgatcagtcctaaagtcccagacaaaaacagaggaaagaataaaatataatatgatagaagtgagtaaaagaagagaagcaacctttccgagaaggatttcgttagtgaatggaccatagatgtcggatgtgtcgaggaaagtgacgccagaatgaatggcgtggtggatgagagcgatcatgtccgtatcaggcttgggtgggccgtagaaggccgacatgcccatgcatcccaggccctgagccgagacttgcagaccttgtgaacccagcttagttcttctcatcactgtacccatttttgtttgatttccttcaaatacagaaagtggttgtaaacactaagcagagttagagtagtgactagtgagtgcctcaatgttggtatgggacttcttcttataagattacgaacaatgaagacagattactgccggcatgtttggattgctgggtgatctaaagtcaaaagtttctaa

SEQ ID NO: 49912 - DNA, 1944 bp, Cannabis sativa
aagaaatttcctctcgtcatttaacattctgggatatgaaaaattattctcatattccctggcgcttcatttctaccttttcatttttttttttatttttacattacataagatttttatttcttttactttattttattatagtacagaattttttttataaatactgttttaatttttacgactgttttacgattattttttagttgatatattgttgttttaattattttattttattgttataattattttataaaaatataatgtttttgtaaaaaacatcgtgacactaaaattataattttttactcaaaatgtaatatttgtgtaaaattcttttttttttccctgaaaataacctcctttgcgcctattaattatcattaattaattaacgtgagaatgacatgttaggaacaatcatatgtgacaactatttaacatagaccaactcttctaagttactagttactactacatgaggtggtgaaagtaacctgactactgactatatattttaatgacatgtggcttaccttccacttctgtcatgactttcactattgtattaaagttacaccatcatttatgtgttacatctatttgaaactaatagatttattattattattattattatgaaagaagggggtgtagatccctttttactctttcttttagtgatttagataattttgggatcatctcttagttataagggttttatattttattatctacctcacaagagttctcatcccaataaaggctctaccatatataagaagctcaccttcaagagtcaagtataatcttacataataaaaattgtagtgaaattcaaacttttgatccaaataaaaaaaaaacccaatattaaaaatttctcttccattacatcacactatggtattattattattgaagaacaaaatttatatatattttcggaattataaatgttctacatagaatatattaatacaaaatttaaaagagttcgttccgaaccctagtgatactagttaatataagcaatattgttagctcaattatttattatatgaattaagtttcgttctgattatttatgaaaactagggagtaggatttgagttgatgtgaattataaattaatagattctttcttataatatatggaagtgatcaggattaataaatatattaattgagctatatatagttttgttgtattatatatattattacatctacagccatatttcaaaaataatataataaaaaacttgtacactacatttatttcatcgtgtagggtttattagtaccggtagaactgtatatctaaatgagtttaaaacgactatatctgatccaattaaaatatctgattcatatatcgacataactcaattatatatatctggacaaattactatatttctcttccaaattgctaaatgttttttattcgattatattgttccacaatgaacaaattaatgtaaaaatattgaattattccactaattattaattagttttgatatgaagtccaagaataatgacttgaataaactatgataaaattttctcaaatattaagttataattttcatcaaatattctctaatttttttagtttgatttcaaccaatcacaaattcaatttttataacaatcaaaacattaaataacactacaacaatcacatttttaaaaataacttttcatatgcaaaatctaaatttttgtttcactacaaaaattttacttttagtcacaataaaacttgtgattaataattaaaaaaattataactaattataaatcatcatgcattcctatatcgtgactaaaagtatgagtcacaaaaattataatttgttgtaactaaatgtatttttagtcacaatatttattgtgactaaaacaaaattagtaacaacttgtattaat

SEQ ID NO: 49913 - DNA, 2238 bp, Cannabis sativa
  modified_base (476)..(476): a, c, t, g, unknown or other
agaagtgaaaagcagcttttaaaagtccaataaattaagactataatgatttgaaaatttttgttcaaaaaatattattatgaataaaaactatatacgtacataattggtaaaagtcataattcttgcatgctaagtggagcttagtgaattcaaattcacatatagttctgacttatgagacattggcaataacaaatttgggaagtttactataaaaaatcttactttttgttacaataaaatttgtgactaaaagtgaaaaagttgtgactaattataaattctcatttttatgttttgactaaaaaggttgtggctaaaagtattagtcacaaaaattacaatttattgtgaataaatgtagttttagtaacaatacttgttgtgactaaaactaaattaattagtgacaacttgtatctaaatactatgctttagtcagaagtagtattttgttgtgattaaaagtcacntttagtcacaaaaaaattatattatgactaaataattatcaccaaaaataataatttttttgtagtggttaattattgggaaataatgagaagaagaattgattatatcaatattattggtttgatcatgatgatgttggatgtatctacttggaactgtcaccatattggggtcctttgtcatttatagtacacttgtagcaattagctttcaaactccattatgaactataatttgagattattttgaagaggatcaataataatatatagatatatatatccaaacaacatagatatgcccccatatatacatatttatataagaatatgtttttagaataaaattattttggcacgttttgttttgtttttttttttttgtttgtatcttacctacttttatatgtaattaaatatacattaaatatatattatttttaaattattgtatggtggggaatcattgactataatattaatagtagatagaaaagtaggaaacccacaccgacagagggggccaattgaaaagtagggcaaatcgttaacaaatttattttgagggggcaaattataaaattatatattctgagcagtacctaatatcttttataattggtgtttcacgattagttagcgatatttctaaaagttatttttttaaattatatagtactcaatacttaattacactaataacagtatgtgaccgagaaaggtaataaacactaataatacattttaacaatatattagcatatttaattatatctatatctacttaatatatataaatttttgaataaacaagttgatgacattttgtactttttgcttttttttaatctttttataaaacattttaatgcaatatttaattttcttatctaattttaaaatacaattacattaatgctcaatacaatcctgaacaacacttcttcatttctaaaatattctaaggttatatactttttcccaatatcttacattagtgaattggacacaataaaatgacacgaaaagatttttttttttttttgaaacaactttagtttaattaaggcaaagagcaaaaattggggatcacagggggatcaccctccccacaatacaaaccggggttaataatagaccttctaatgtttctagccagacagtctgctatagtgttctggcttctaccaatataaaagaaactacaatccattaccgaatcaattagctcattaacttctaaagacaaattaaaaaagttccagtctaagtgacacttcctcaaagagcaagctctcaaaacagttctgcaatccgataaaacatgcacctttctccaggaattccctgcaataaggctcaaagccatgtgaacaaccaatgtttcgcttccatggcactagcagccgccagattctcaactttgtagaaccaagaattgtctacaagattgataactaccaccgccagaccacttcgaccttccttccaagatgcatctgtaaagatgatttttgcatttgccaaagtttcaatcgactggtctgcaggagggggaatatcttgaatggagggtcgagacctgccatcaaggaactcagaatagatgtttttaattgcaccaagggttatattgatatctgatactcctcctttgaatttaaccttatttctgcacttccaaatctgttgaaaaacacagccaacataagttagaacctccaatcttgaagtaccggcaagcatcggaactaagatttcc

SEQ ID NO: 49914 - DNA, 2299 bp, Cannabis sativa
aatggattattaccatcaataacgacttaattgagggtacaatatccgaaaattgttgatggggtgatagaaattgccctagaacaaacaagaaccattcgagaactgggagaaaaagtgtcaaacgcatccaattctaaagatattgaggggaaaacgagcccaaaagcatctattgaagaaagaaccagtgaaatttagtgtgaatacaaccatgggcagccaaagtgccacctacatggaaatttcatggaaatcgtttgttcgataaaagatcttatgaaagaggagaatcaacaactcattctagacatgtgaagagattaaaagaactaaaatttctgacctttgacaaggaaaattttgatagcgtggatactatcatttgtgatgaaaacaacattgtttcacccaaggagatggtgtttccattgaggaaaatcgagcttgttggagcagtttgcaaggatgaacaacaatagagtaatagagaagagaactcaaaggcacgtcaaaaggagtcaatttcaaggggttattttttaagaaaaaacacatgtttgttgtaagaaagaaacatttattctctgccacaacaaaacctatacgatggacattgttgacggtgaaaacttgtcaactaactttaggccaaaaaatcaaaactcaaacacaagacttaaaaagaggatgaaaatatgaaaacttaaagagatgttcaaagccataatgaaggacaggatattattgtatttcattgggtgaagtattccaatgatttttcaacactgtctcacatcttagaaagaggtatttataggctctaatggcatgagatacaagtgtagtcctaagggacaaggggacatctaggagttacaagtcgcaggaggtggacttgcaccttgtacctttgtttggtgtcaggttgtcccaggtatcagagatggtagtcattgtgcaccacccttggtcatgatgtcagggcttgtaggtgtggtgcctccactactcgtacccttcctcatactcaggtcatgtaggtgtcatggttgtaccctaacttttgcgaacccacgtgctttccttgtgttcttgattgtcagcctaaggactatacctttaacacttaagaaaaattttgtaagtgttgatcatggaatgggcatgcttgatgcatgcagagtgaagacttataactgcaacctcattcacacataatctctctcttgctcatttcttttttgaccttcgctccccaagtcaccaaccacttcttttggcctctccatctcgccaacatcacccactaggcttcctcatctcgccaatcaccaccctcaactacccatctcgccaatcaccaccctcaacagcccatctcgccaacacccctatcttgcaaacaccacccatcttgccaacaaccccatcttgtaaactccacatttctcagacccccatgttgccaacaccacaatcctcatctccacatctccctaagttgccaagatcatcatgctcatctcctcaagtgaccaacacaccatcctcatttccctaagtcaccaacatcaccattatcatctccccatctccctaagttgccaacatcaccatcctcatctccccatctccccaagtcaccaatatcaccatcatcatctaccaatctccccatctcactgagacctcttctcgacctccccatcttgcccaacactcgtttcatgggaagccatgagtctgacttttaataacttttgaaaataataagtgccaatttttggggttaacaagcaatcttttgggtacacagccattgatcttctggttaagcatcagctaatctcgaaagttagccttgctaatttttgggattaacaagtagcaattgttgcctaaagaaaagaagacaccactggtcatgctacaacatctaatgagattttagagtttaataatcttcgttgatgaaggaacttgtacgattggcatgcagaatacaacatgagtcttctaaatttaatggattttcataaagggaaaaccaaggaaaatactaaccaaaacatagtccattgccacgctcagcagcaggagatgaagtgttgatcaagtggcactctctctcagaattttaacgcaacaaaggaatatatctttgagattgaagaacaatttcaaagttttcaccatgaggacgtggtgaacattcttggaagggtattgataggcctaagacttatcttttatatcacataatcattaaatgatgaaatacttagtctcttatgta

SEQ ID NO: 49915 - DNA, 726 bp, Cannabis sativa
tattgatttattatgtttagggtgtatatgttacagacacctgtaattctcttaagaaaagtccttaattattatacaatattagttttttatataattatcttgtgagagtataattattacccaattaattagaacgtctaataaataaacattgtcatttcttgataattaggaaaaattaaaaagaaataacttatttttaatttttttaatagtgctttcattttttttctcatttttttgaacaattttccaagtaaaaaaaatgatcacgtgggcagaaagatagaaacatcatgcatgccatgtgaaaatgcctttattggaggaagagatctactaagttccacgtgagcaccaaaactataactggccaatagcatatactacacgtggacacgtaagttgacttttatcttaacgacttttaaatagaaacttgttaaaagagtattgctatgagatacaacacttgggcggtcttgaaatttgattttttatgcttacatttagttaaattttttttcctaaacaaataataactaatatttgtaggatatgataacttttatgatatctctaaaatactccccatttacatcacccccatttacacaatctgaccacccatcggacgacccatcggaccactatcggaccatatctgctactaatttttttttttatgtttttataaataaaaaaaatagcatcaggtgacca

SEQ ID NO: 49916 - DNA, 1796 bp, Cannabis sativa
tcaagagacttgattggaagaacataatagcctgcaagtggttattcaaactcaaggaaagaattagaaaagatgacctaatgagatacaaggttaggcttgtagctaaggggttcacacaaagagaagggatataaacttcactgagatattctcccctggtttgaagaataatgctagccttagctatgcaatttgatctgaaaataaagcagatggatgtgaccactgcatttttgaatgtatttagaagaagaaatcttcatagaatagcctaaaggatttatcaaaatgaaagaagaggagatggtgtgtaaactataaaagtcgttaaatgggctaaagaaatcacccaaatagtgaaacaaaagatttgacactttcacgatgtaacagggattcaaaaagatctattttgatacctgtcactacaaaagagatcagattacatcatctgcatatctgattatatgtagatgacatgctatttattagcaaagagaaggctaaggttgaaaagttaaaaaacatactcaaatatgaatttgagatgaaagacttagggagtgcaacaaagatcctaggcatgacaattaagaggaacatggaaaaggaaaagataacacttatctagaaagacgacattattaaaatcctagagaaattctccatgacggatgcaaaagttacaaagcaacctattacaagtcaacatcaactatccaaagctcaatgtccccaaaacaaaggctgaattaaaagttatgaaggacattccctactctaatacaatgggatctataatgtatctcatggtgtgtaccaaacctatccttgcacacaccatgagcatactgagtaagtacatggccaaccctggcaaagagcactagttggccatgaaatggacagtaaaatatctactgggaaccactaaggtaggactaaaatacaaaagatgaaataaaacctaggcactgaatgatatattgatccaaattatgttggtgatagcgataacagaagatcaacatttgcatactatcaatgggtgttgtattagctggtaagtccagctccaaccagtggtagccatgtctaccactaaatctgaatatattgcagtttcagaagcaattaaggaagcagtgtggctacagggattggtagaggagatactaaagaagacagagtacgtataatctattcaaacaatcagagttgcatacatttatgcaagaatcatgtattccatgatagaacgaagcatgtagaaataaaataccactacattaaagataaagtggttcaagaaaaaatctacacatagaagattcccgctgaagaaaaccctactgacatgggaactaaaattgttaccctaaacaagttcaagttatgtatgaacttggtgagtgacaccagactagagctaagaccctcagatcaacatacctaaactaatatccattatgttgaagctcacctagtatgaagacttgggtgaaattttttaaatcaaatctccacactaggctggccacatcagcacctagacagaagcgatttccaactgaaatcagttacaagaaaaagaagaaagactcgaccctacttcaataaattataacaaacttttagttaataccaaacttgtataaaaatcaaaaagctcagctataaataaaaacatacttgttatagaaaaagtcaagttgaacagatcctagtaagagagagagagagagagagagagagattgtgagttgcaatattgtaaaactaattcttgaact

SEQ ID NO: 49917 - DNA, 1219 bp, Cannabis sativa
aatggctagctagacccatgtatggatgcctaaggccagccagccaaatgcaagaaacaccatggccggccagcttatacaatgccaaaaatatgaacaaagctgagaatataactcaccagggaaaggtcccaaagtccaacagagtacagcctgtcaggcacgccgtcacccaactcctgcaatgcttcatccaagaaagggatagacctctctatacgctgagtggctgactcaacagccctcctactagtagctgaccctgatcctctactaggcctccatgtaccttgactggtaggctgaattataggctacccagtaggtgcaggccttggtggaggggaaggcagtgatggtccactagcatctacactacgagaggtcctggccaccttggccctcactcgactggtatgctcatcttaaggcccacttgcgagacctctcatcctgaaagacatggttgcaaaaagaatgtagcaaagttagaatgcattcaaaaatattcaacacaagaataaaagcatggtgttataaactatcaaataccattgtcatcagaagaagagctaccaaagctcacaactacaatttttcccttgcccctaggtgtaggcacagggtcgtgtacatctatcaaaaagtgggccttaaggctcgatacgaagagaggtgtcaccaattagacccacacagggcaggcacctacagtgagccctcttctcctctccaaattttgtacaatacgagacaatggtacatcatcgtcatccatgtccaggcgttgcccatctctagggtaggcctcattagtagttgtcatccttgcaactctaagagtaggaggatataagccatacatccagaacttgtccacactagtaaagcgaataatgttcctctgctcagctgacaaagaaaggatgtgattcgctctatcccttatttgtaatgtggggatggaacatttgaagaatggtactttctagaagcttcaatgacggatccctttaacatcacaagcaatgaagtaattgttggcatgctcatcagcatttggcatagatgaggtttggaatcatctaaccactgatggccaacctggctaaaatagaagtactgagactgatgttgcttcaaagtaaatgttgggttttgtgccctaaataaaacccatttcagtataatcagatttactagttaataaagatcaaaa

SEQ ID NO: 49918 - DNA, 1268 bp, Cannabis sativa
ggtttagctaacatgtctttttttttttaaagaaataagaaaaaaaaaaaaaaaacgtttacatttccaccaacatacaaaaaaaaaaaaaaattattattttctcactaaaatttgttttaacaagtagtatttgtttgtaagtatatttatgcaggatcaatgatatttaacaaattcctgagaatatatgggcagaaagaattaaatttttgcttctcactttcaaaatatacatacaaaaaattattcaaaataagtgtaatgatataatataagaaaaaaataataataattaaaatagagtgacatggaattcgaacttaacttataaatatttattgtttataatatatttaatttttttaaataaaactttaattaatttttttatattttattttgagctctaaaaaaatgtgagccctaaacatggaactaacttaagtcaaccatatatacacactctttataaaatataaataaaatttataaatatatttgtataatttttaaatttcacactaaatgttaataaatataatataaatattaacttatttaacttatgtatttatatatttaactttatgtgtttatttttgagaaaattaattgataataatcaatttattgaaattgtaaatatttaacaaattgtatagaattttgtaattatgtttttttttatttcatatttttgtaaaatagtaaatttacttgtatataagtgaaaatgttatataaattgccttccaaataatagtaaaacaaataatgttaatattgtctaattaaacttaagttttaatcaaaattgaacttaaaataatatgggtaagtgacatttacccataactactatggtatggacgtatataccgaaaaacattatctgtaatcaccaaggtctaattttgatttattaatctttttataagaaaaataataattgaacatacttttgtacaaataaatttaaatatttaaactaaaatatatacaagttgagcacagatttagctacgatttaagttgctctgttagttgatttagagatttctgtgtgataaaaaccgctaataataataatattaatggattttttattttcacacttcaaaataattttttttttacatttttatggaattttacacagaaactcgtacaacaactaacggaataacctcaatcgcaattaaaatctacatagcaatttacataaaagctaccggagcaacttaaaccataaatttaaaaaaaaa

SEQ ID NO: 49919 - DNA, 1789 bp, Cannabis sativa
  modified_base (28)..(33): a, c, t, g, unknown or other
  modified_base (73)..(75): a, c, t, g, unknown or other
tgtatttatttcatatcgttttagaagnnnnnntttaggatgttaataacatacttgatagtaaatctagatnnnggtaaaataattccaacagttgaggtttggaattagtgcaaactcgaccatgccaaatttcatctcgttccatccgatgtaaaaccaaatttcttctgctttctcaacatcaaccttcattttatgaagcatcagttggtgaaataatacataagaaaatgatggaggaccagcatgccgaattgatcgaaaagactttccttcaccttaccagtcaaactatgtttatcaaattctggtttaataatcttattgaatataccactacctctataggtgacaaaacctataaaatattcagggacaggaactataaattttataggcatctgtgaaagacaaaaaaaaaaaaaaaaaagttagtaaacctatcgataaacaatcgacaaacaatcgataaccggttaatctacacaataatttaggcaaataagaaaccatcgatatagtatcgtcaaactatcaaaaaacaaccatatggacaaattatttttggcaaactagaaactatcgataaatcattgataaagtgtctataacctattgacaaaattaaaattcttttgaaaacaaatacaagcaaaaaagacatccaacctatcgataaacaattgacaaactatcgataattggttaatctataaaataatttagccaaactagaaactatcaatataatatcgatgtggtatcattaaactatcgataaataatcatatggacaacatatttttacaaacttgaaaccatcgataagccataaataaactgtcgataacctatttacaaaatataaatccataaataaagatcaaaacctaaccaaaattatcgataaactatagataaagtattgatatcctatcgacaaacaattaaaaaatttgaagaaaaaaaatagcaagtcacaatcctaactaaaccatcgacaaacaatagaaattctatcgataacctattgacaaatattaaaaaaaattggaaaaataatcaagctaaagaaaaatttcagtatgaataaataataaaacctatcaataaagtgtttataacctatcgttaaactattgataaactatcaactgtcccttggttccataatcgataacctatcgatatcactgtgaaaataacagaccaccatcaacaagacacataatctacaaaaatctataaaagttcaactaatctcaacaacatacacaaattcacaatttaatgtatgaaaaatctacttttgaagaaaatttacaatttgactatgtttaggttgttgttgttcgtgatggtctgagctttgttcttggtgatggtggcgcggtggtggtctgagctctatccttggtgatggtcgcacgcgttcaacactgaaaaatggtggtggtttcaaacatttattaagtgaatggagcaaaggagggggttttcggtttagagtttaaggtttgattgagttttgggtggcgacgatggttgggcgagaaaaatcgaggaggaagatagaagtcgagggaggaagagagaagagggaggaagagaggtggggtggctggtggttgggttatcttggtttgtagccgttggaggccgatgtttgtgttcggtggagagagaaaccaagggaagagagaaagagagagagagagaaagagagagagggagaagaaattaaatgaaaaggacagtttaagtaatatggaaaagtaatattatt

SEQ ID NO: 49920 - DNA, 1597 bp, Cannabis sativa
taaatagaggttctactgtagttacttttaatatataaagataaagatatttatattttggaaaatttgcagcataaataacttatatttttaagtttatacacttatataccatatgcttttattaaatactacaagttacttttctgttacatccgttactaccaacaccttttaagtgctgattaagctaaccatattgacaagcgtcgacatattattgatccatgtcattatttgtataaaaaaaatcttttaaaataattttgaaataaaaaactaattaaaaattattttaaataacataaaacaattattagataagaaatttaaatgttttctctctctcgatctctcattcactttcttctctctcctaaacaaacttaaaaactctctttcagaaaaccatggcagacaacttgattaggattatagagtagcatatctggattgagaagaaatagagaaaggtcagagtttgggcagagatgatgcgaaggagggaactttaaccagatccagacctgaactcaaacttaggacctgggacctggacccggacccagaccgtagttggtgttggggtcgagtgtattgaaaatatattataactttacacgatcaattaatataagtcaataccaaaaagtattatatatgaatatgttaattattgaaaaataattaaaaaaattattattcacatagagagtgtttggtcttgtaagagtacaagagaattaagatcataccatatgaataaaactaataggtagtgtattcaagtatggaatctttaatatagaattactaaatacgatttacaaagcactaaaaagtagtgtcatgtgattttaaatcggatatgtggtggatagacacatttatagtaataaatgtattgtgtataatttgattgtacataattggactgatataaataaacatcttttatttacatgtcgtttatcataaaaagagttatttatatcccaaaatcattagtatatctatctaaatcttgagcattcgtgaactcttgtttgcgttctttaagttctttgattcactcgctaaagtttctcaaaaaagatgattcttataattttatttcgggaacttaataacatagatgactgagaatataatatacaataagtgaaacccaagctttccgaaaggatcagatattagttcccttagggcctgtttggtaggctatataagggtcgtattgtattaaataataaataacactatgttttgaataaagcaatgtattgtattaattattacgacaaaaaacttaatacaatttaagttttattatttaatacataacaaatagtccgtattagattgtattataatatttacaaagcatttggagtcaatctcattctctaacccagactcggacccagacccgagatccgaccttgggacttggattcgagatccgaatccagagccgagaaccagacccagatctagacctagacctgggcccagatcggacttgagacccaaacccaggatcgaagaccggacttgggacctggacccagacccgaacccagacctgaacctagac

SEQ ID NO: 49921 - DNA, 1142 bp, Cannabis sativa
attcttaacagtatggaggttgatttgagtaaagaactcacaactcctaccaagcgtgagatagagctgcaagtagagcctacaactgaggtacattgcctatgtgagttgctattgtctaacttgtttatgctacagctgtgcatattcaaatgtatcttattctatggaaaaatattgattgtcagtttaaagctagcacggtgaccaaatggagaccagcaccaacaaggcgagagcaagataagtgggatagagctgcgaaggctgcaactggaggcactgtgagccttttgttctaccatcttttttctccttcgaaaaatcgctttgattaagttcttattgaaatcctaataacttccagaatagtcacttcatttgtagttttgagtcttttgacacaattttagcctgcaggaagcaatgtttcgggaactaaggcaaccaaaaggggaccctgcagttcttgctgctcaatcgagggaacagtatactaaggtaatagaagtatattgccttgttgatgcttgtatttcttttgcttctagagtagagttgaagagaattgtaatttttcttttgttgttgttgcttttgcagttaaaaaacaaattacagatcctgacagtgggtgtaggtggtgttggtttagcctcagcttatgtttcctattctcccgaaattacagctaggtaaatatagtttgtgcaatctttcttgatgatacttcatattcttatcaaataaataagtccttacatctaaagctattgaaaggaaaagtggttaagtttctttccctgctataaaaattggagtcttttcaaaattttgcatgttgtacttggtcactatttggtctagtagttttagctttcatcttcctttttttatttcactcttaaaatttattgaagaggacctgaaaaattcctactgtttctggtcatggagtaatgtgagaagatgctcttctttatgatttcagcttcggtgctggtttgattggttctttggtatatatgagaatgctgggaaatactattgattccatggcagatggagcaaggggtcttatcaagtacgtatacaactaaaccatcgttaatgttaaattcttactacaattacagtgctac

SEQ ID NO: 49922 - DNA, 922 bp, Cannabis sativa
acaaattagacattcaagaacaatgagaatgaaacaaagagcaaagcaaccaaaatatgttaaaataataatgttccaacctccacgagtaaaaagaaaaatagggtgtgatatgattagctcaaagaagaatgaacaaggtctacaagacattgacataaaatatagctaactgaataggtagtcaatcataggagtgcatccaatagcatacagaatacaagagcagaaataagttaccttctggtccagttgcaataaagtatctgtgccactgtttcttgtttcttcagggagagatgataacaccagatctaaaattgaatctttatcaattccttcaagataattgcgcaaagccattatctctgactgaattggcaaccctttcgaaagtgcatcttccagagcaagtgctccctacaaggcccaaggtctagaatatgagataataatgggttgaaaatatgcaaatgaatgtactgttacttttttttaccaaagcaagcttgtgagcagagtgactccggcgagcctcctcagaccgtgcatagaatgccatacacaaggcattaatctgcaagtagaagatattataccgtttcagctttcattagagataaatttagaaatgatatataatgctttagagattatcaaaactacagacagatattcaaatatcaaaagttatacatgaaactagtcgctttcaaaagatttcagtggatttccttgttttctgccacatttatatagcaactattgaagcatttagccaactatggtcactcttctcttcggaaaaatatcactagcaatttgatacaaccacttgggttgaactcactcccaaaagctagactaggaggagggatactaacaaatcccataattgatcaatgtgggatcctaacaatac

SEQ ID NO: 49923 - DNA, 1189 bp, Cannabis sativa
aaaaaaatattctgtttagtaataggttattctgttaaagtaacgtagaaaccaaaaaaattatcgttaaactaagaattttgttacatagccacactttatatagaatggatataattttttttttgttatttgtttttaatttgtgcaactttcttgtttagctttgctagacacgccaaccaaagtctgtccaacaaaattggacgcaaccccctattaattttaaataaataaataaaatagattatttcacaaatatataacaacaataaaaaaattataaaaatacagttatacagaatttttaatatttttacgatttttatgatttatttacagaaaatatggtcttttatgttgtactcttgttaatttattgctgttttttttgttatttatatgttatctttttgttgttcttttgatattattttcttgttacttttatgtaatttttttattgttttcgtgttgtttctatggaaaaccgtaaaatgtaaaaaaattctttaaacgtaaaaatattattatttttttttattaaaaaatggtgtcttaagtaattatccctaaataaaagggaagtttacaataatatacatttttcgaatttaatttacaataataacattactattattactaacttatcacgtcagccaaatctgatatttttgacgttttttatttttatttttttttcttacgtttttataaacaattttttggttactaataataattttggtacacttgtttagattacataaccaaattgttaactcaaaaatctgaaaaaaaattctctaggtcagattaagtatcactgattgaatcccatacctccttagttgttttcatgaatgttgaggcattcatggaattcagcaaccatgcaatgacaagtgatttatttgattgccaatgtccatatctagcatcttccaccctcgactgcttctttctctggtcaaaaatctcaattttccacgaccataggtggtgtttggttggaggtaatgaaatggaatggaatagaaatgaaacaatcttcattctattcctttatttggttgcatattaaagtattggaatgtcattccaatggaatgactattctttcttgaaatggaaggaaagaccattccatgatgaggaaacatttaataatttttttatcaatttt

SEQ ID NO: 49924 - DNA, 1070 bp, Cannabis sativa
atgagatgatttaacttccattcatttctttattggttgcgattttgcacaaagctgctggatgaaagctttgggttttgttagagacaacattgaaggtatgtttgctacttggtttcaatatggtctcgctcattagttaagggaggatattgatctcatctccatgttgtgtcgggccttatggagatgctgaaatgatatgatcttgtctgaaatagtatcaagccttcattagaaataattatctcgtctgcaaaactcactcttgatcaatagaaatgtgttcaagctttgtcacgtatcccttcattgaactctcagtctcttggtgaaggaaatgagcagtggtctaaactaaactactctatgatcaagattaatgtagatgaggcaattttctctaatcagaatagctttggctttggttttgtggcaagagatcataatagcttattcattaaagcctttcaagctagtaaatttggagctgttgaagctgagattgctaaagtagttggaataaaagaagcattaatattgtccactctattatggcatcttaattaatgagtctaaacaattgttatttgttcttaatgtgtttattatttttgttaaacaatctgcaaataaggtaacacattttcttgtgagggattcttattctaaaattaatgatactattagtaagaattccatctctgctaatttatcgttcttacttttgaagaatttttgttgaatgaaatttatctcttttcaaaaataaaaataatgataaattacatcgattataacgagaaccaaactatatagtttggaaaaaaaaaaataagaaagaatacaaagaaaatagagtaattttttaaggggagacgcatggcaaccttttatacaagggtggctccgttcttaccataaacaaggtgataaacgctattattattattataactaaccgtgttaaaacactataaacaagcaactaaaaccctaataagttaaactttcttcttaaaaaaaaataaaataagctacgcggctgccatggaacttggcaaagaaga

SEQ ID NO: 49925 - DNA, 1964 bp, Cannabis sativa
attattagttttattttgacaaaaaattaatccaagatcatatttgtaccattttgaaaaatacagggtcaattttgtcatttaacaaactaaatggtcatattgataacttttacaaaatacgatatctaaaatagtatttactcaaaattaaattatctttcaaaaaaaaaaatatcgaaggccacccaaaaaataatgcttttagcgataacaaaatatgtgataaaaaatacaccatcatatttacttagcaataacaaaatatgtgacaaaaaatacaccatcatatttactgtaccattaaaaagtcaatgacgaactaaactagtttagtaaaaaattatcaataaatattacttttagttgcaaattctagttacctttcacgatctatttctaatagtagcttttatggtcagttaaaattagttaagatttaatttggtctacaaacaacagaaaggaggttgttaaggttgtttgttagttttattcatttctcatattaattgtttagctaaattgtttactataagtattggttattcactctatcaaattttgttattgattgtttttacagatttgacaagacctttactggtatttttactacagtagatcaatctcaaccacaggcctatatagctcacacaactctggatcaagatgacaactggtacctcgactctagagctacaaaccactgcactcccaatggctaaaacatcatgatagaagatgaacatgaaggccctgatcagctatatgttagaaaaggagcagccttgcttatctctcaaactgataactcatatatgcatcccaatacttgtcaaaaaccattaattctgcataacttatttcatgtacttgaaatcacaaagaaccttcttggtgtctctaagtttgctgtaaataataatgtgtactttgttttttctatcctgatgtttgttatgtcaaggatcaggtgagcgatttcattcctgactgggagacatcacaatggcctatatacttttgactctagccaactccagttttctgcctctccatccccatgtacaacatccagtttcactaagcacccttgtgtcaacatagtcgctgcctcctctcaacagccttctagtccatctgtctgtgtcaattgtaatcaatctgtcaatgagtatgagttgtggcataatagacttggtcacccttctaaaaagggttgttaaaactgtactctctcattgtaacatctctaatatcaataaaatgacacattttgtttgcactgcttatagtttaggcaaaattcataaactacccttccctaaattctctgaaaccagttacactgcaccattacaactcattcacttagacctatggggttcctcatttacaccatttcacaatgggtataaatactacattcactttgtagatgcctactttagttcacatggctctatttgcttaaaaacaaatctgaagctatcaaaacctttcatacttttaaagttgaagttgagttacaactaggcactaaaattaagttgtttcaatctgattagggaggggaatataggtctttcacagacaccttacaagctgctggcatattgcaaagaaaatcatgtccaactacccatgaacaaaatggcatagctgaaagaaaatatagacacattttagaaaatagtctcacacttctagctcaagccaatctacccttaaaatactgggatgaggcttttagaacagttgtctatcttcacaacaaacttcccacacctattctatcctttaagtcacctattgaagtattattcaatattaccctagattactctaagctaaaagtgtttggctgcacttgttttcccaacattaggccttacaacaaacacaaacttaagttcagatcctctctttgcgttttcataggttatagccttaagcataag

SEQ ID NO: 49926 - DNA, 1880 bp, Cannabis sativa
ttagaagttcatatttatgttgttaatcaacatacttgtgagtagttctaagatcctggtaaaataattctaacagaactccccaagcactttaagatgcctgaaatgacaacttacaccggagattcggaccccagtgaccatttgtcccggtttaaccgagtgatgactgtcatgagggtcagcaatgacgcaaattgtttatgctttccactaacgctaagcggttctgctgaggaatggttcaaaaagttggagccaggatcattggactgctggagcaagttacaactcagtttctgaagacaatttgtcgcggcaagaaaaattaaccttgaagtcagcaccctgactaatataaaacaattgcctacagaaactctaaagaacatcataaagagatccaaagaggaggcttcaaagaccaagaaggtgaatgacggacaacagctggccctccttcaggctggtatccgcacggggacccctttctggaatgaactacaacaagtgggagcagctaacctccaagactttcagaaaagggtccaaaagtacatcaacttggaagaagcccaaatagtggcctatggaggatactacctgatcggagtatcgggacatgcacttggagcacagcttctgggagccccatctcctactactcctcaaatgagcagaatacaattctccgctacctcaggatataatcaaagcctcaccctggctcccgcatcatcacactttggggcacgcatgggcaattcctcggggatgagtgtccaaatcctgtcccaatccgcactcgccgccagcctggcaggacctcctcggagctcccgaagtaaaaggtcctcaaagggcagtacccggactgaggacaaacgatagcggagagggtatacctctcaatacactcaatacacggagctcacggatacgcatgagcgtgtatactttgccacctggtagaatacgcattaccggaagcctcctcccttgtatagggatagctcccgaagggatcccaataaaaggtgtgaatatcacagcgacattggccacaacaccaatgagtgcaagaacctgaaagatgaaatcgagaacgtaatccaattaggttatttatacgaatgaatcaaaaataggttaccccaattaaacccggtccaagcaggacgccccctacctcaaggaggagcagggggtatgcccggagggcaagtaccccccagaggagcactcccacagcaggtgcttggattaccaccacggccaaatgggagagtggccatgatctccggtgggcctcatattgggggaaccaccagaaacgagttaaagcattacgctggggccataaaacacgatgaagtatgggaagttactcaactcccaacacaaaggcccaggctcatggaccaacccatcactttcacgaaggacaacgcgaaaccggtgcgcttctctcatcacgaccctctagttatagaaactcccatcgccaacaaggtcgtggcgaggatactggtagataacgtaagctccgtgaatctattgttcaaagaaaccttcatggccatagggctcacagatagggatctgtcgcctagcgactcccagctcacaggattcaatggaacaacacttatccctatggggaaagtaaggctttctgtcaccctgtgcccaaacaccccacagagcactttcaaatactgcacctttgtagttgtagattgtccaaccgcgtataatcccatccttgggccgaccgaccttggtcggattttagagcgatcacctccattcgacacttatgcctcaaattccctacctgggaagacagagtgggaacagtgaggggaaaccaaggagag

SEQ ID NO: 49927 - DNA, 2443 bp, Cannabis sativa
gagagagagagagagagagaaaaaatgacttaattaggtgattttaaatttttttagagaattctaaattatttatagctttggttgtaattatctaataataataataataaaatgattaatataaatctaatgtatattttgggtaaaatttaccctttaacgtatatactacacatatttaaactttaggggtaaaataatcattatttaaatacttcatacaatctcatgatttctaagcacccataaaatattcggtatctctaaaatacaaattatattgtcatgatatttctgactaatccgttgagtttatattattattaaaaataaaaatattttattacacataatgcatctataatacatctatattttgataaaattttcataattgagaaattatatttaatttactcatttctaataatagatctaatttttcataataaatatattaaattataatcttactaattaataatttttcatattttataaaatgtgtttgtttatttaataatcattatttaatcttccaaatgttacatcctttctttgattaataaaaaaaataattttttttttgatgaacaaggaagtattgtattgctcaaaatctgatttttacaaagaaatagcatcccattttagggacccatatcaaaataaatctgtacatatgagttcaaactaaattcaattcacaatgcactaaaccagtttgtatcctcactactaactttttttggccagatttgtgctactcgattcttcattgtctgctttgtcttcctcactatcaccactgcattttcattcacattataccatactttatcatatctagcataccaaatgtggtacactagactggcaaccactgctgccatgatttattttttgaattttgacagcttagctctttcgatccaccttattatctgggatagattgacagtttgtactctccaattcatccactgtttgatttcacccaggcactcacgagatatgttacattcgaagaataaatggccatttgtttcctagtttttcttgcagaatacacattcatcattgtccactagattgattattttcaatatgtccattgtctttagcctgttctgaatagccaaccacaatataaaactgtctttaggtatgttgagtctgccccaaacttcttgatcccaccttactctgttctgaagaggacacagcagctgataaccatctgctatctgatatgaagcttgagtaaaaatctgtttgcctgtcaaaattctttgttgttctttggcagcaacaacttagtgtctttgagatacacactgttatctgatatgttatcttgtttgtttgctattgcccaaacatacttatagattacatcctggttccattcagatattttcttgaagccaattcccccttcttttttaccttgacaaaccaaatcccatgccactaatccagcccattgcatttgcttttgacctttccaaagaaagaatcaacaaattgattctatttcagcaatcaccctcttaggtagcctcattatctggcttcaataagtgtgtatcgacatgagtactaaattgattaacaccacacggcctgcaaatgaaatattcttagtgctccatgtcttgattcttattgccatctttttaactaacttctcatagtcatgtctcgatattctttttgcacatattggtatgcctaaatatgtaaagggggcttgcatctgagaataacttgttgcatctagcactctttgtacctatgagttgtgcataccactgcagcagatagcagatttggaggggttcaggtgtaagcctgatgagtttgaaaacaacttcaagccttgcatcataagatagatacttttaaactcttcttgcagaataacaatacatcatcagcaaaactgagatgattcaacttcaaagcaccacatcaatcatggaattgaaattcaggcttttgactgatcttggccaggattcttgataggcattccattccaattacaaagtgaaaaggggatagtggatccccttgtcttaaaaccctcttggattcaaaaaatccatgtaaggatccattgaacataagggagaattttggagtcctaacacaagtcattaccaattggataaattgatcaagaaatttaaaagcagagcgcaactcttctaaataatcccaatcaatggtatcataggccttttgcaaatccaatttgattatgcaattggcttttgatacatttctcccataatgcctgattagatcttgatagatcattatattatatccaataaatctgcccttgatgaagcccccttgattttgtgccactaagtcaggtagcacattcttcaatcctgagcatataattttagttgcaatcttatataac

SEQ ID NO: 49928 - DNA, 1862 bp, Cannabis sativa
tttgtctggtacttagatcttgtaaaggaaccctgtcaagggcttagatcctgcgtaggaactctgtccaggacttagatcttgcgtaggaactctgtctaggacttaagctcattatatacccctgttcggtacttagccccttttagaagctttgttaggtacgtctcgggctgaatcttccctggccgatcaatggccattaattcataggctgttcgattcataattcttgagcttatacttttgtcgatcaacagctttgtatttcaaggctgtctggttagttcccttaggctttggctagttaaccgtcctttgtctaattctttttattttctccaattgttcacctccctctgcctttttgtagggatgaacccgcacggcttttggggaggtgacaaccgaattgacgaagagttatttaatctggacagctagtctttctcacacaactttgaaccctgtcaactccagttatttttttaagacatttgaggactttgttgtttgtttttatgcttttattttgcatatttcttgttcttgtatggcctttaggctctttacttttgaacaatgattgtgtatggccttaggacattttacttttgaacaaacgactgaccaggaagtctttaatcctagctttaacttcttttgttagacatatagctaaccaagcaatttatgtctaatatgaagtatgtcattcgcacttacctggctttcaatttttcgcttagcaagcttttaaattttgcttaagtttagaggtgcttgttcaatgttgtacagtgtgagtgccccctaagtgatcgagcagacttatggtctcttagtaacttgcaactcaccaaatactatagatctttgcctgtgtatttttttagagggacatgtttgtacgcatgttgaacaaaaaatatatattaactttaaaaagttatcttgttagcaagttgtttgacacaatttagaaaaagaaactcttttatccatttattagtcttacatatgttttgttgttgttgtgcaacgtacatattttttataataaaagcttacaattataaaatatgctttcattcattattttggctacccctgcagcatactgagcatgggccaccactgaagagtggtggaaagttagctcttttgtactaattcttgtacggtgagttgtacaggtaccgttactgaagagtagtgtttatccaagttggtcactcgtagtactttatgagattctctccattccaataccttggtaggagaactaattccatgttctcattgtacctgtcaaacttgtacgcaactttatttattatctttctaacttggtacggacctttctaatttggtacaaacactcctcttgtatgatctttggtattaaggaatactctccgaagcactaagtctcctactgagaatttcctttcattgacttgtttattgaagtacctggaaaaatttttcctggtaggcatgcatctttaagttggcttagcctcttcttttttctatttcgtcaagggattctgtcagcaaggtgtggtttatttcttagtcatagtaggccaaaaattaccttgtctgagtatctttttggataggtttttcccactggcatgattgtcgcagaagccttcatgcacctctactaatagcccttcgacttctttcttggtaacatatcttaataatggcattaaaaaaccacgtctgtacataaccccatccaagattagatatcgagtaacttttattttcattttttgcttcattattattttctggcaagattcacatctagaggtatgatgatatatgtaacaccctaactatct

SEQ ID NO: 49929 - DNA, 1024 bp, Cannabis sativa
tagccatccgaaacttctttttgaaggaaggctagctttcttgaggactcttcccagaaggacaagaaaggcttccaggacttacttttgcgaatcaacaatttttcaggaatgatgataacatttagagaccttttcatctggagaaactataccacaatatgttaatatataattcaaacacaatatatacattcacttttttttttttatggaagtatacattcactagatgttgttgtagattggatgcttaaagtataagaggttgttcctcttgattagtttctaaaataattttaactgcacttaccactaacctattttgctctctctcgctcttttcttcgtaagaaaaacaaacttctatatacatatgaaaaactaatgcaagcctagctaattcattagtaattagttgatgacagtagtcatagggcagagcaatgaggaagaagaaccgggagactcatgtgatgagtagagatgatgatggctttgatgaatgataatgttggtactattgttgcaacccaaattattcatggaattcgctattaacatcccacgatttattgaaagctcattctccaaatacgataattcatcagacattgatgaccacacaccactatgaataatactagtattaagctcatcatcatgatcaacctcttcttttttgactggctctactactacttcttcttcttcttcttctacctctagctctttaaaatcgtcatcatcaacatggttttcctctaaattatcatcattgatggtgatgagatttactatgagtcggccgttgtgacggtggcactcaaggtagcggtggtgttgcactctgtgtcctttgagtatgagtcttccgtcttcattatgtcgtgtcaaaatccacggcataattattgcaccagtactacccaaattccttgttcccgccaccataggcgccatagatataggcggcggataacaagggtgctcttttttcttttttactcttgaattataattc

SEQ ID NO: 49930 - DNA, 838 bp, Cannabis sativa
atagataataaccaaaactacttaatgcctccacttgtggacgaactcttgcaagttatcatagggggctcacatattgttggagattctaaaaaggcaagggaaagatatgcttgaactcttcagtacgagtagaaagatgaagttttggtcgtagaggagagaaagcccaaacagtcgtgcatggaggatccaatcagaattttcagtgatgaagattccaatcatgtgatctatccgcacaatgatacccttgtagtggacgtgcaaatcgcaaacaaaacaatggcacggaccatagttaacaatagagcctcatctaatatcttttttaaaactacctatgagaaaatgaatcttcaactcaaagactttgttatagactacttatgacaaaacacaaatattatcgagttttatcaattgaatgtggtagatacataacatattatataaacaagaaatcctgtgtaaatactatattttctctgtacataaatggttatatgctaaatgaaattgtaacctcgtttgatatggcttaccttctgttattgtcaaatttattcttaaatgtgtgaaatgagtggactctgtaagaaaagatgtaaatgaatcgaacctcttaagaaatgaagtaataatcacaatccagcatctagaaaggttatatctagaaaatggatgatggagtggtataaaagaaaatgtctgagcccgggttcgaaccggggacctctagtgtgtgagactagcgtgataaccgactacaccacccagacaattgatatattgggtatatttttacaataagattaatgaacgagtaaaaataagt

SEQ ID NO: 49931 - DNA, 975 bp, Cannabis sativa
taaaatttatgcaaacataaatcacttcaaatttcttatattgataactaatcaaattgtaatgggttttatttagggcacaaaacccaacaaatatgtatgtattttattcattaattatacttataaagaacaaaaatatgtataattatatatatatatatttcactaccatatattcatacatatatataataattttttttcagaagaaaagaaaaataaaaacacaccattttttctagatactaatgttaaaaatctcatgaaaaggattatatttttaattgaaaaacatcataacaaaccaaattttataattgtaatatatacataattgatgtatctatctatccatatacataatatatatatatatatatatatatttatacctgtggctaatgagttgtatccatgggtgaaatagaagaagatgaagagagattattatttttaaagatacttttcttaaagagagaaagagaagtgctgtaaaagaatgcttttgagagaaagagagaggttggccttcttttttacggagaaaatacaaagcttttaggattttgcaaatcttttgctcttagagcatcaagaaattccagagaattataaaggaggttcccacagacggcgccaaactgttttgaccaaaaatggttttatcattgataaaaaacagtcaagaattttttttttttttttggaaccctttaccccctgttcattcttgatgctttcctcttcccctcatctcttacactacctcctctacttatttcattcttttacccttaggtgtcaacttaaggggattttactttgacatatgtcattgtcaaggataaataagctgagttgtacgataacagttagaacagttagaatattgttaggaaatctgttatttagttgtaactgttttctgtctttgcacctggtgctatataaacattgtactgttcttttatt

SEQ ID NO: 49932 - DNA, 2735 bp, Cannabis sativa
  modified_base (156)..(163): a, c, t, g, unknown or other
  modified_base (211)..(223): a, c, t, g, unknown or other
  modified_base (2663)..(2664): a, c, t, g, unknown or other
tgaattgacaaatcatgggaattaaactgttgaacatataatcatgaatatattccactatgctgacgacacaatatccatgaacaaatatatatacatatttacatatgttttaaacttgatagaatttatacattaagtataatcatgaaatannnnnnnngaaccatgcaacataaaatgaattttaatctttattaattagtaaatnnnnnnnnnnnnnaatgagttttatttagggtacaaaacccaacacctagtactcctccatggccggccagacctacaaagggtagggtttggccacccgtgatgcctctttggctggccaggcgtgcattgggcacggtcgggctgcccctgactccacggtcgactgatggtggatgtgtgttgactggggtagatcacataaattgttggagtttggtggatctagatgcctggagtgatcggtttcacttctcgaatcaccatttttggtgtttccacccttgatcctcatcggtcaaagattgacttttgtgcatctcgcgccacttgaggaggaagtgatgtactcttgccggccatggatactcctattggtggctagccggccaatgattgcacaatggggatgctattgagccagagatccctggccaacccccatgctgctggttctcgagatctggctattcttactatttgacctttgaggaaaggtctctccttcctttggcagaggaagatctatcctagttcctgaaaaaaaacttggcggcagtcttctttgaagttgatccctaaggagatcatggcctcgtctatcagttctctgattgaactgacgtattagatcactgacatctaggttgaagcgatctaactatgcttggcgagattgaagaatgtactcctggtcatccattcatctcaagaatttacgtatgttgagaaaaaacatcgcaatcagcagcgcgtggttcttcaattaggcatgcacgacctacagcttccctaagtctggccaactcaaggtcttctcctaggtccaagtgaggctcaccaattgctggctctcccgctctcatgcctctctctccatttgtagaaatggagttgagatttagttgttgttcaagggggctattgcccctgggtccttccttcagttggaggcgccaacgttgggtctactcttggaggcgtggaatttccacttggatccacctgggtgcccgtgtcagtttggcaagttgtagtggccagacttgtagcacctattgtggtgaacagattcaccatatttgtagtattcatagagattctagttgtgattggaacctgagtgcctggatctgtgatctgcgggccttgagggagactcgaagaggtagatggtgcgacatgagttcttcttgtgtttaccatggcgttcaatcaaattacgatatctacgctctcaatgaaagcaccaaactgctgacctcaaaaagtgattagctgacagtgggattgtacaaatctgaaggttgcctcgtgtttacacaaataagaatgaaaaacaaatagacaacaagatttgttacagaggtttggcccccttgtgatagtgggtaaagaccaactcttctcttagatgtatttatagcgagggaaatactatccagatcactataggtgggatccactatagtacccttaggattacaaggtatgaatcaatacaggaaaaactcaagtgttgagatgtgctagggtaggtgtgtgagagagaggaagtgaggaagggagagtttatcagacacttagagtttaggatcaggtttttagcttagaggaaacttaggtttttagtctaaggttaagacttttatataggaggcctcaaatcctaggtttacaattcaaatcccttaacttatgcataatttgttagatatttacaaaagaccaaagtgcccttgattctagatattattcatccattctgttgggcttttagggcctaattcgcagcccatagcttgttgtccacatgtagaagtgtccagaaaagcttgcagtgcactccttggccggccatgcccctgtggatgccaggctggctgaccaagcccctatggatgtcagactagctggctaggcccctgtggatgccaggctgcctggccatggggcaatcccaaggctggccgaccatagggctagctaggggtggccgaccaactcttgagagggagctggtctaccacttgatgcccgtttgagtgtcagagtttcgtttgttcaggtgctgacttgatcttcctttcagtgagttgtactagcacgtgctactggttctttccatgtaagcatgccatgtcatgaggaaacatattaatataacaaatgagatcatattaatttgatttattacaacttagtgctctgaagtatgattattcatgttttggcattgttataagattaaaattttatcatgtaatgttgttctaaattttttctcgctcgtctgttcatatgagttttttcatattttgtagtattttttcatagtaattttttttctttttagagttttttttaaaagatactaaagtgtcatttggtaacactattttcaatcagtgttttgtttttaaaactaggaaagtgaaaatatttttcaaaannatgttctataaaactgttttcactttttaattttttaattagaaatctaaattttaaaagcaaaaaaaaaa

SEQ ID NO: 49933 - DNA, 753 bp, Cannabis sativa
cagagaaggctagtttaggagtattagatgttagtattatctaatactttttaaatataaagagcattgttattcgatactagtagtatctaatactttttaaatgtgtcgcgttatgattaattaaagatattttttttaaaattattatattaaattatatgagacccgatacttaactaaacaaataactatagacagataaaaaatattagacactatacattatacattatttctctttttttaaaccataggagttatgggaactgttttctattggtttaatatagccatacatctgtatgcagactcaataattgtattagtatttcttcaaaaaaaaagatattaaataattgtactgggatatatgttatgtctagtcaatagttatccttcccaacttaaatccaccatattcaagtaaaaccattggctaatgcgagtctggtttttttagattacgtgtcattattttaggcctcaattcattaattttaaaatacgcgtgaacaaaatttatcctctcctgtttcgttttttttttttgaaaagtatcctctcctgtttcaatatatcatattgacttagttttttttaattaattttcccaaaatccttgcgaaattttgaaacccacctcaaaatatttccctttttttgctcaaattttctcttcatcatcttggtcaaaccaggcaccaacgactttccaactgaaaaaaaaaaaacagagcttcattcattcat

SEQ ID NO: 49934 - DNA, 801 bp, Cannabis sativa
gctttgggttcattcactcttgctattaactcagaccaaatgatcgtgtggtggagaggaagcaattattgggaaagtgggccgtggcgagatgggtgttttgatccactacaagacgagttctgtgaccattacaagtataaatttagctatgtatcgaatgaggaagagacttacatgaattactcagttagtaaggaaatcaccattttcccaagacttagtctgagctcagatggtgaaatcaagggatatgggatgaatgttatgtttacacaagtttcatgttattcttcttcttcttcttctttgagatttggttgcgtggagcagaagctgccttcctgcagaagcagtagaattgatcataataagtttgtgtccaaagtaggagccatgtctcgaactgggtttaagttcgatgacaaaaacaatctcacaatcttagattgctgggaaatgtgcttacagaattgttcttgtgttgcttatgcttctactaatggtgagaatggtattggtactggttgtgagatttggtccaaagattcgagttttacgcataacaatttggccagtttgagagagattcgtctccttgaatccggaggtaattttatacttgaaatctctcttttctttcttcacatgcagtagttattaatattgactatcatagttcaccaaacaaaaaaaaaaagattttgtttacaatttggctaataagtaatttttcccccgaactttgacatgtaccaaatcatgccacctgaactttttttgtcgttaaaaatttcccct

SEQ ID NO: 49935 - DNA, 785 bp, Cannabis sativa
aacaaaaacaaactagttttagaatgggtattgttattggacacattttataaatgatgtcttacaattaagattcaattattatttacactaagtgctaagcaagtaattctcttttagaattatgattataaaattaaacaattagtttatgatgaagacatagctacacataagagatagttcatttcaatttagtcacttgtatttttgttagacaagtagagtgtagagaagaatgtatgtaaattacaagaaaacaaataaatagtaaaaaaaaaatagagaacattgaaccttcttctgatcacttggggcaaagtcaaaaataaaatttaagtaggacgattatctatttttataataaatttatggtgcttaacaccctttatgaaatgttataagcaattgtgcaatataatatcgaatcttagttattttacttttaattatgaatataaaaattaataactattcacagggcgccactcatggtggtactaaaaatcacagtattattcttatattatgtggacttgaacatttggtaaaaattatagaattgactataataaaatataatataataaaaaataatgttaaaataaattttaatataatgccattttaaatttattgttaggttcaaatcctccataatgcataaagtaaatgaagttttgcacttatgatctccttaaattttacatataaatttaccactatactatacaatacaatttgataatatttgtataaaggtcaaaaaaattatttaagtttaa

SEQ ID NO: 49936 - DNA, 1245 bp, Cannabis sativa
aataataattaaaaaaaaaaacattatgcaaaataattttaaattataaaaaaaatataaatagtatatcatgtctctatagaaaagctccaaattaattatatatgtattacaaaatatgtatacattttgatagatttttttatctattttgacacctaaaaatattttttagtctattttttatgaccatatacgtgttgtagttatttatgatcaattataaattttttttgaaaaatttaaataatttacaatatcgaaaataaaattaaaacaattacttaccatgagtatacaaaaaaattgttacatgcaacaaaaatttttaacgttatttttaacatcatatactattcataattttttaaaaatttacaggtgatctttaataactacaacgtataagattataaaaaaaaaaattaaactaagaatctctcatttatgccaaaacagataagagtctaccattttcctctaaaaaaataagataaaaatttacccaaatatccttttaaaatagtctaaaactataattataattttgcacacatctttttaaagaaggccctaggtagctagtttaaaagatctttcaaagatctataacatgagcaagcatgtatatatataataatatatatttatggaatggattttataccataccttataagtactatatcacatgggcaaggacatggggtaaagttcataaaattaaaaatgttctaagtatatacatattaattgataaaaataataatagtgttatgcagatgtgatgtgccaaccctaggatgactcaaaaagaaacaaagaaaaaaaaatgtcaaatagaaaattgagcatatcaagcaaaagatagtttggtttggtctttaaagggacccctttcatgtgcaaaagctatgtaggtggacaagtatgttttttttgaaaaaaatacctttacacattatagaattaacattttacggttgaaattatacttcttaatttttaaacttagttgtcctgtcacacttaaactaacctttatgtaattaatattttgtgattgaaattatatttgttgagtttcaaactcaattctatacctaagctaatcttttcatattgtagaattaaaattatgtgattgaaattatttttggtgagtttcgaatccagtttatccgttaaacctaaacttcgatcgaatacataaactatctttttgaaattttcatattttggagt

SEQ ID NO: 49937 - DNA, 3471 bp, Cannabis sativa
aaatatgacccgaaacttagactaattttagcctaacaatttttcagattatattattattaattttattttatttttttgagaaaatattattattaattttagctatagtaatatatatttttttgtccacacaaaaaatttatgatttgtaaaattataattttataaatgtaatttttttaaaaaacattatacatgtaattatatttagagattattatgtattgtatttgtaagaccatctactctaatggaagatataaaagttgagttatattttgtacaaaaaatagttttgtgatatttttacatcaatttttactattgtgctctaatgcataatgataaatcttaatgcaaaatttaatgtgttatttaatgttcacttaataatttattaaaaaatataaaacaataataatacaaaatgaaatgtaaaatttaacaataagataataataatgcaagtcacttaatacaaaggaatatgttagctaaaatttataataaaatattaaaaatgcagaatagtaaatataaaagtataacatttattgtgatgcaaattaaatgtaaaatttaataataataataataatgcaagtcacttaatgcaaaggagtatgttagctaaaatttaataataaaatattaaaaatagtataatagtaaatataaatgtatagcatttattgtgatgcaaattttgtatcatgctatattctaatgtaaatttgaatcaattttgattatttgagatttttgcattataatttaacacactattggagtaaacttttaacaaaatgtttggtgcctttatacatttactagttttaataaatattttttagatattcatttttcttttaataatttttaatcgaaaatattatttttgtcaaataaaatatttctataatttttggattagtttaatttttttataagttaaaatatattttcattaaatttttaaaaattatttggtagtgtaaaggcaaatattgtaagacttttcgtatttatactgccaaaaaaaaataaatttaagtggtgtttggttaaaaggaatgaaaacataagaatgaaaatgagactaaaaattcatatataaataagaatagaatgaaattaaatttaaaatatataataaaatattttaaaatgcaaacaaaaaattaaatagaatataaattttttttttttttatttcattctatttcactatcttcaaccaaccgtcacttaagtgtttatctattacattctttaaacattgggtatcattgtcctaatttacccatcactatttcaatttaagtaattgaatctctcaaagctagcttcatataaaggcgcatattttaaagctaaaatctataattattggctaaccaagcattaaaatgtttttagagcttcaaaaatccaaaagatagtgaaaaaatatagaagtataatcatcgacccggcctagctagagcaaaaaaagcatcaggttttattgacatcaacagctctatgacgacaatcccacttggataatggatcttgagactaggttcaattaaacctgcttaaacaacccaaaagaacaccattacaaacaatatttacaaatatatattggaaaattttataaaatgaatatcattttgtattgtttttatgttcaatgcagggagaaattataatataaatttttttatataccacatattttaccgatttttaaaaaaaaaattgaaataattacagtaattagtagtactcatataaaaataaattaaaatatttgtacaattgactatttaaaccttatttataaggtcaaaattattcaaaattttctgaaaattaaaaatgataatatttttttaattaattttttatttttttaattaaaaaagtaaaaatatttttcaaaaacatattctataaaactgttttcactaataaattttttaattgagaatcaaaattttaaaaaattttaaaaaaaaaaacacttacgaaatttttttaaacaagttttttttcctaattaatattttggactctgaccccaacttgaaccttaggacacggactccgcctggctccagtgccgcaccacggtctcgacttcagacccgacttaaataaaaataaaaatgtaagttataaaacacacatttattttctatttttcaaattaaaaaataaaaatagttataagaacacatttttgtgttttaaaaataaaatttaaaaaacacaaattttacttttatttttgtaattaaaaattaaaaaataaaagtattaccaaactttctgtaattttttatctctccacatacccaaaacaaaaatgtgacaaaaacattttacctctactatagtgttgtcttctaaattaatataatataaatatatattggtatataaaggaataattgtcatataagtatccaaaattttatgtttgtaaccaatataaatctaatgatttcttttagcagcataagtactcaaagtaattttcatcaatacaaattatatgtttctgttaagacccaatgatttagaatttgagtttatacatgtgtcttattgaaaacactaataaagtttatattaacatttggtacttatatcgcttaaaaaaatcatgaaatgtatatttcatacaactcaaaattttgggtagctatacggctatttacccatatataaataattaaatgtgacaaatacaaaacataatagaacatacctggtgaaagcttttttccaccgtataattcctttgctaagggatttgcagcccactgattaacagctacgcgactcattggttggaacccgattagcttcccatctaatgacaataccacctaagtattttaacagaaaatacaataacacattcaatgttagtgtatctatatatctttaaaatatactgacaattttgtggaagaatatccaaaagagtacagtaaattttatgtaaccatgtaaattatttacctgataactggctatgtcttgtgccgatgtcttgatgtttgcatcaatgttttctataaaagaagtagttgacccgtctttgctattagaatcattttcaatcgcctttaccaagaactccggtaattcaccggcccagacacccacatttctttctgtgattatatcaccaggccagcataaatcatctttaatctttttgacgactgatatgcagaatgattccaactatttcacatataagcttgaatgttaatttcgtgcggaagagacaacatttatgcattacttacaattggattttagaaaaattgtaagcaaaaagagtaacaaagaaatatagaagaatatttaaaaaaaaataaataaaaaattgtattgtagacttttctgaaattgttttcatttttaatatatttacaattgttctaaattttgtaaaattacact

SEQ ID NO: 49938 - DNA, 1794 bp, Cannabis sativa
  modified_base (47)..(47): a, c, t, g, unknown or other
  modified_base (1567)..(1571): a, c, t, g, unknown or other
atttttttaatcattcaatatgattttttttaagatctaaattaatnttttaagatttactaaaaaaaatacttaatctttctcatttttattttgagagggtatgatttgatagctgtcaaagtttaggaagcaaaattgctaattgacaaagacacatcatcatttaaacgaaataatgggacgaaacttaagagaaataactaaatttttgtaaatataataattcagggaattcttaacacaccgtatacattttagggaccaaaattaatattgtcgaaagcttgtaagagaatatggctaattattctttatatatcaattaaagaaaaaaaaaatcatttcatttttttgaattaagaaaaaatatgtatattgggaagaaaagctattgaaatttatggagtaataaatattgactgttgatatctattacgtacctacttaatttatgataaatatgtacgctaattaatgcatatagtattcttttccaacatatcgatttcctatgtccattgccttcccctactttttatttattatttttttaaaaaaataaaaaacgcatatgtattatatatatatacataaaccctaggtagctagagaaaccaaacagtgaccacacaagtaaatacagtcagtcatcaaccatattcttctcctcagtaactccgacgtcgttaccgtcccctttctccccagtaagtcatatatctttaatatatatatatatatatgtatatcaacacgtattaatttttttgatatcatttttgtcgtgcatgtttttttttttgataagtttaatatatgaatattttaagaaaaatcacttgtttgattttgaaaatttgtgcagaaatggataaggagaggacacttatttatgttttgtacgatggaagatgggttattgatgagaaatccaagtcaagaagttatgtggatcaccaagttaagataattatgacaaaaggttacgttctgcggtcaccatattacccatacaatgggatatatgattggttcattcataaaatatgtgaagagcttggattggattccaaaaccatgaaacattccatcaaaatgtcatttgatccaaaacttggttccaacaataaaggtatgaaaatagaaaatgctgacaatttttctgtgtttattcacttaatcgagaatgaccccaattttaaaaattgtcctattgtggtagagtgggaaaagtgaaaagtgagatcatgacattaaattaattattagtacaataagttttgtttttggatcaagtcaaaatgaccagtcttgtcagttttcagtattataagtacttttaggtttggatcaagtactatagtcttgtctttttaatttcaagtgtgtttctattctgtatgaagaatgaaaattagttatgtattaatttcaatattattctaccttattattattattatttattaaaaaagaattttattaatcaaacggaacatctgttataacaatgagcattacaagtagggacggacccattaatagcccccactaacaaaaatannnnnttttaaaaaattaaatgtaaattttttaatttaataattataggccaaaatagtagaaaagcccccactaaattagataaatttaataagagtgattataatgtagttataaatatttttttttatgataaataagtccccacaaagtaaaaatcctggatccactgattacaagttaataataagaacacttacatatatatattacaagcaaaatcataaa

SEQ ID NO: 49939 - DNA, 2532 bp, Cannabis sativa
aactataaatctaggcgaacatgttaggtttgtgacaaatatggactctctacagttgtgtgttataaccgttatgatgagaactttatgggaacaaatacaggagcaaatcaatcttagttcaaaggcaattctaatgctttcattgctactcctgaagttgttgaagtgatgtttggtttgctgatagtggttccagcaaccacatcacattttattcctcatcaatgagtcagaagcttgattatggtggtatataagaagcctgctacggtagataatgttgagaaattatctattgctcatattggtagtggctatttacatactcattgtggtatttccttcaagttaaatgaaatttcacatgtatccaaagtagccaaaaatctaatcagtatttcaaaacttactgttgataatccaatactcattgaatttcatcctacttgttgtttgatcaaggacaaggtaacaaggagagggctgcttcaaggggtgcttaaggatggtctctatcaactcttaccaagttacaagtctggttttcttttatttttgaataataccaagcctacaactttctctagtctagcaatgtctaaaacatcagatgtaactcaacatgcaactgatagaactttaatttctaagcttgatgtttggcataggaggttaggtcatctatcatcaaaagttttgagtcatgttttagagtccacaaatgtaaccatttcaaaaatgaaatgaaatccttttgtatgcccgtcaatatggaaaatctcttgctctaccatctaaactttcacaaaatcatgctaaacatgtgttagacctcaagctccacctcaagctcagtttcatgtgcttttgttctctcttgatcaaaattttctctagcttcaacacacttctcaatgaatcccatggatgcttcatttaatgtcacatatctgctaattatgcattttctcatttttggttccaggcaccacaatctataacctttgactccttctgaataccctaagaaaatgcattttagggctctagcctcaagcttgtcctgtctcacatgtgcatagcaaacacatccaaacaccttaacatgttcatagcttgatggctttccagaccacaccttatctggtgttttaaaatctaatgtaattgggggacatttattgatcaaatatgaacctctcagcaagtccatttttttttggggggggggggggttcctcattattttatgccttgctataccacatttgcacaacatgtcaaaattatctgagcaatattctaggccattaccgatcttaagtctcttgattttcttactagtttggtttttatcattattttccaataatgtgtgaatttctctaacacttcagttttacttttcaaaataataacccataatttactagagaaatcatcaataatggatagaaagtacctttgtaatatctcagaaaatctaattttaataattagagcatattttataaaatatgagataatatgtgtgctatgagtataaagggtaagattatgattttactaatctaattacatggtaattaggaatttaagtataaatgaatgaataagcataatttatgaattatgaaaattttattagaatatatgggtataatatatgttattggtaaaataaaaatatttttcaagtctggcaattatggagacccgactggcggccagaaatatcacaacattattagtttgtgttaccggtggtgtttttgggtttggttgtttttggtattatcggggtatttcggggtaattagttctgattaaattacccctaggttaaaaattacttaagtgttaagttgagaattagcttcccggaaaacgaaacttgtaaccataactaatatatatatatacgttctacaagatcgtgtgaaattgacatggggtgtaaaaggggaggaggttgggtacgagaataggtaagcatgggagtctgaggggcagatacgggaattattttttattttaaaattattaaaataatttgaattaaaaataattagttagaggaatatggatcaacacatgatattttttggacctacaaaaggagttgttattgatgggaataatgaaaaatcgataatttgagtacttgtgcggttatttttcaagatttgagtatttaattactagcaaaaaagagtatgtattgggaaattccataaaaataataattggatcaattaggttattagattagacatttttcaactcatatagtgtaataaattggttttgggagaaaaagagactcttattaggaaaaaaatactaaagatgacatattattattggtgtatttaaatattgtatctcatatattttaatttaaatataattagtacaggaaatcatgactaacaataaagtatatcgagtgagtatagttaatttgtcaaataataatactttattagaaatgacttattatcaaattttcaagttaaaaatggttga

SEQ ID NO: 49940 - DNA, 1320 bp, Cannabis sativa
aacttgagccaaagctctgtattccgattctgtactggatcgagatatcactgcttgtttctttgaggaccacgacacaagagtgtctccaagatagacgcaatatccggctgtagaccttcgatcatcggggcaacttgcccagtctgcatctgaaaatcccatcaaattctatcagctgtcacagaccttaatgtgtaaaccatgaaaaattattccctttaggtacctaagtatcctttttgcagcgcaccaatgtgcagttgtaggtgccttaagaaatggactgagtttattaacagagaaactcagatcaggtctagtgtttgttagatattgcaaggctccaataagacttctatactcggttggattatcaagcaattcaccatcagaaatagaaaaagtttttcccacagtcattggagttgaacaaggtttgagatgcagcatattagttttctccaacagctcacgaatatactttgactggctgagataaatacctgtgtcgtctcgatatacttcaattccaaggaaatagttcaactctccaagatctttcagggcaaatctttgattaagtttggtggcaaactgcttgagtttgggaaagttgttccctgtgatgataatatcatcgacatagattaggacgaggatgatatcaacagcatttgaataccaatacagggaagaatctgctcgagaattcatgaatttccaactgacaagtgttgttttcagcttctcgaaccatgcacgaggcgcttgccttagcccatagagagatttagtgagtagacagacatgatttggcttggatggatcgacaaaaccctctggttgtttcataaaaacttgctcttctaactgtccattcaaaaaggcgttatttatatcgagttgtctgatattccatcccttggaaactgctatagtgagaatgattcgaactgtggaggctttgacaacagggctgaaggtttccccaaagtcgatgcccggtctttgggtgaaaccttttgccacaagacgagctttgagtctctgaaaacttccatcggcatttctcttttctttatacacccatttgttatcaattacgttcataccagaaagataagggacgactttccaggttttattcttgacaagtgctataatttcttcatccatagcatttttccaccctggatgagctagagcttcagagacactagttggttctgcaaaagaataaacctgtttagcagcacctaaatacactttcagtttaaaaattcctgccttccctcttgttgtcataggatgtgtagg

SEQ ID NO: 49941 - DNA, 2138 bp, Cannabis sativa
tccagaaaagaaggtcgaagcagccaatacagcattaagccgtttgatggcaggagactttttggaatccttgggtaaagaactaggtctagaggttccgcctgatccgctctactcgactgacaaagctggggcatctatttcccagaaagtagatgagaattcaggggatgacaaggtcctgcactttcaagctaataagcttcttatgaacactaacgctacaggtgatcatatggtttcacatgatgacaagaaagttgaaatatttgactcaaccaagagtagtaggctgcttgagattggctcttctaagagtaaaaatgataaagtgaatccaaaaaagacttcatcttcagaaggtgaaaagagtagaagacactctaggcgacaccggaacatcagtgattcagatagtgattcagcaagtgatcatcgaagccgtcaccattctagatcaaaaagaaggaaagaatcttctcgagaaaagagccgcagcagcaaaaagcattctaaacaccatggtcacagaagcaaggcctctccaagtagatctcattatggcagtgagaaggaacgctcagaatccaagaaggagaaacataaaaggaagagttgaacatgaagtttggtttcattgatgaagatctgcccccacgagtaaaaaagatggattcaagtaatcgggaagattttattgaatcaaatttagttggttggaccttaagggatgattcccaagctttaaaattaaactcctaaaagaatggagatgccacatgtacgtgccctgaggaaataccccataaaatctaattctgtacttacaaagaaaagaaaagaaacaagtgtagttgcacttttgatctaaatattgcatgcaattatgcttctaataaagcaattattattagggaagtttacgaatctatatttatctattagtcgatgtagaggtgcccgtgacacctctatgttagtattttttttatgtatgctacggataaaaataattaataaaaaacattcataataacttgaaagtcaaatgattataattaataaacgaataaattacggaaaaattcttaatacttaattagtaattaattttcaaaatttaaattttggcgctaaaattttcaaaactcacgttctgttatcatttagcaatttttatccatcaatgagagttaagtgtaagttgactgtccatgtgttcatagaatattgtccatataaatatattgtacaagtgacacaatttaattggcccacgtagataaatatttaaaaataaaataaaaaaaataaaaaatacataaaatttgttaaaaataaaaaatttaactaataagtaaaattaaagtaaacttaaaaaagaaaaaccctaattttaggaaccctaatcccctttcccacttcttcttcctctctcagtcgctcttcatgttcacttttttattgttcccttgttccctctacctttacgcacagtgatgctccaagtttgatcggccattattggccgttcccgttaaaagatgatcgaagaaacgagagctccattataatgattgcttaattaattatgagaattagtagataattagagtttaattcagaatttagacttttaattattatttatacaaatgtggagatatatttgaattctaggtatgctaattatgctatatatgaattttatgatttttttattttatgcccagtaacaatagaatgcgatgtatgtcctataaagtcactctattttagtttgatattttaggaatagcgtggcgatttagatagacattgaaaatgttgggaatatttagggttataagtttgaccaaaatacccttaggtggcaagattacttcttggtgaagcaaaggataaaatagtaattttaccctagtttgtctttagtgacaaaatgatttttttttttaattatttactttaattaatgttatgctgaataaggaagtgatttttgagactgaatttagaacaaattagaaacacaaagtctctttttctctctcttgggggtcggtctaagctagaaccataggagcttggattttcttgcatttcctcaacatttgagaaggttttctatgggaaaa

SEQ ID NO: 49942 - DNA, 1679 bp, Cannabis sativa
gtaactagacagcatttgttaagaagaagacatgatgatataatgaattcgttgaatgacatggtaaattttgattacgactggtactgagatccatcactttagggttggagtcaccaataccctccttattgcttaaattcaccccaaccaattgagaaagaggagtgtaagccatcacttgcagaaaaaattaatcgcttggcggagatagtaagatctctatgtaataattttgtaatgcctatagattagacacataatcgtgattttaatttattgtgcacatctttgcaaatcaaaggatttattgaaaagtgtgaataattaaaattttaataattaaactttaattttaactacataaatactttacataatttgagattccattttaaagttacaaccattttacaaaatacttaactacaaaagttatcccctagcgactaataaaataaagcctactgtgtcccaaaaatcgaacactccaagtctaactgtcccgatatgtacaatcttcattttctcaacctcactattattcagcattagccatgcctttatctatacatataaacaatatatgtgagtcgacagccgattcagtaagaaaagcataatcataacataaacataaattggtttataacttggcgcccatacacccaatcacaactctatatcgcgcccaacgcatactaagtctagaacgtttgtaccgtaataccgattaaccataatatcagcctatactcggtactctagtcgtatcgatgtgataacgtcaattcgtactttgcaaaacatatatctgttggtattcaatttgactcgatgtatactaataccgctcttactgatatgttatataacacgcacgttaaaaatgtaatcacatatacaattattatactaattttaccttgattttgaatttaggtgtggtcaacctgagtggaactgctactagacgatttactagtccctaagtcacaacatatgtaaaattggcaagtgatatgataaatcacttttcggggacttaaactcaaaactaaaagttttcctatcgataaatagtgtggcaataccctaagtatcaagaaaatactaaaaaatgagattttgggaaaaatataccccaaaaacggtaggttgtttcttaaaaacggcaggtcttttttcatggttttgcttgctaaaaatgattgactaatttttgaaaaaacaccatgctattttttaaatatatcgttatattccatttttcgcagaagttttagcagtattaatgagacaacaaattcatcttataatgttttaagaacaagactaatctatatctatatatatatatattaatttatatatatatatacatataaataaattaagaaattaaaatgtatgtacttatcttaatatcttaatatgccttcaaattctaaacacattttgatacatactaggttattgttacgtacattacacgtatatttaattatatttttagtttttatttttattatgtgtatttttaaaattttataaattaaaaaaaaaactaattaattttttaattttgtttatttttagaaaatatttagagttttaacaatttgagaaaaatctttatatataaagagtgactatctaactatttttgttggtttaac

SEQ ID NO: 49943 - DNA, 2345 bp, Cannabis sativa
gctgttttagttatttgtaaaaatgattctgaacactggtaaaaaattttattttgttgggggtcaggaatgtcattgtaaatactaaatagcaattaaggttttctgagctctgtaatgcatagctatggtatttacatttagcttctggatgctttagaattaagtgtgcaggttatttgttccactgtttctttttccttcttgggaggtgagagctgtgtgtgtgtgcgtgtgtgtgtgtttaaatttattttttatgaaaaacttgtgcaagtccagttcataatactgcagggacctattactctatgccatgaattttatagagaaatcaaataaaaaacttgtgcaagtcatttggctgtttcaaaatacttaatttaaatattgatgtttttttaggtgtcaaagaagctcacaatgtcctatgtgctggcaacccatcagcctgaaggatgccaccaggtttctagttttgcatgctcattgattttcattgatttgttaatttttgtgtgcacacttcatttacaaagttttgtagatacttttcaataaattaatgcatccttcatgtttgcagccaggagttacttgagggtgttgagcgggagaggagtttaaggtttaatccaacgagaaatgctacaatatttcatcatcctactcttggagattttgagttgcaacatgtttgtaaactgactactaattttgtgctcaactagttgcatgttagctgctgattctattcaattaggattgtattaagattctattttatgtccctcatttcagttaccagtgggtgctagtgattctgagctagaagagcgaataattcagcacttagctgctgctgctgcaatggggcgagctcgacacattgctagaagggaaggccatagaaataggtcatcagctcagggtcgtccccagtttcttgtattttcaactcatcctaatgatagtggagcatctactgctcccacttcttcctctccagatcagaggggggaaggtgagccagttcctgcaatcaacctagctcttccttctgcaaatcccggagaggaatcatcacagtcggttgcttcacttccatttacccaagctgaacctgtatctgctgcagcttcatcttcagcttcagcttctggatcaagcgacattccccaaccagggtttgccttaaataacaggtacacgattaatgattttgcaaaattagtgtcttcatcagtgcaaaaatgattactattttaataaaatgtatttatttatttgttaacaatcattttttgataattttgcattagtatgccaccaagtcagtcatctccaaatagtcaggatagagctggaccatcagattttcaatcattttccgaatctctgaagtctcgattcaatgcagtgtcgatgaggtataaattatggtgaacatttctttttctgaaaggaaaaattgaatttttcaattttttgaattcatgctttattttgctttctttcagatataaagagtcaatttcgaaaagcacaaagggttggaaagataaattattctcgcgcaacacttccatggcagaccttggttctgaagttaagagggaggtcaatgcaggtattgcaactgtatctcgcatgatggagcgtcttgaaacgagagataatagtagaactggcgatgcaccagtatcaaacaatttaaataattcagtttcagtatcagacaaccagccgacctcagattctagtggcgacaattccttgagtgacactactgtcaaggcatcaggcgcgggaggttctagttcaaattaagcactattcttcaatcgaatcagctcagagcagttcttggtcaagggtaagtttggaactttagattgattattttctaacctatgtatctataatattctatgtttggcacatttttctttacacctcagctcagtatgatatatatgagaacttgggctttcatttgttaggtatagtttatacaaatatgggaatatcagtagttgtctctatgacgtacccctcagccatagttttcactaaatggctttacatacccgagaatattgccatagttaatttaacatattaatttgattagcaaactcttgcaaatggggaggtatgttatgtccactcaatgttagcgacatgaactttgtgcctgacacaaaatctggtctgaatagctatgttgcaacttgtaatttgtccaaacatgaagtactccgaattccaatttgtgccgttggttggacaaagtgagttgacctatttttattcttgtaattttaaaatttaaatataaaaaa

SEQ ID NO: 49944 - DNA, 919 bp, Cannabis sativa
tattgcaatgtactagccaatctatgcatctttatgttcaaagaatgggggccatattttctagttatatcacagttgtgcatgcctttaatgatatccaaggaaggaaactgttatggaaagagttgcaggattgtaatacagctgagaagtggatagtaatgggtgacttcaatgatattttggctaaagaggagagaattgggcacagagtcaaatataatcctgatagagatttcattgattgtgttgagagatgttaagtactcagggtgtttctttacctggagcaataagcagcaggggaagatagaatcttttcaaagattgatcgagtcttggctaatcaatcttttcaaagatactttcggatgtcgcaatctcataaggactttgtttcaaagctgaaaggtatatgggaaatccaatatagaggcacaatgatgtatcaactggtgtgcagattgaaggaaatgaagaaggtctgtagggagatcaataaggatggtttttctgatgttgcaactgatgctattagggcaaaggaatagctggaacattgccaaaatgcattgagaaatgtccctctaatttttgtttttacagagagaggagcttgaagcaaggcaactactagtacagaaacagcttaattaccaatcctttctccaacagaaagccaagataaattggatcaaagctggtgatgataatactgcaatctttcatgccagtatcaaagggagaagaaggcaaaatagaatcttgtccattgaagaaactgattgcactagagttcatgaacctggtaagatcactagtgctttcttggattattacactgatctgttgggttctagtatgcaaaacagaaagaatgtgtgtaacaccctaactattttaggcgtattacgtgatt

SEQ ID NO: 49945 - DNA, 1142 bp, Cannabis sativa
accctaacaacagaattatatagatatatagatagatagatagattgtagaattaatataataataagagaaaaatacgacataaatatcaatgttttgggtttgtgctaacattaaatacctaaattttactctttttaatcaatattaccaaaatagtgtttcttgcactacctttgttagtacatttaaatattgagtcagtaaacacatgttatatttaaattcatccactttataattattttaaaaaaattatttgaaacaaattttaaaatagagaaaagatttagaataaatttaaattgaaaaaaataaataaacaaatatataataaacgagccacattttagcgcttcttcctctaaacactcatggcacgcttgctaaatagtaattagaatctgaacaaattaataaaaaagtgtaacgatataaatcgaaaagaatcataattaatatttctaatatgatctttactaaaattattttaaaacgaattcctaataattttatcttgtttattttattaaaaaaaatataattagaatgtgtaaatcaaccaaatttaaatgatcagtctgcctaatgcactcttgaaaaagatctcttgctatatatttttgttgatcttacttttagccaacgattatgagtcaaataaaaaccattaagaataattaaataattatttgaagagagtttaaaaaagtaacaacgaaaaaaataactttaacaacacaaaaataactgaaaaattacataaaaataattaataaaaataaaaaaaacacctaaaaatacatacagatgagctaaagttttatataaaaaaaacaaaaaaaacgaattagcaacatacagataaaaatacataaaacctacaaaactttccttttttcacaaaatgaaaataagaacacaaaaaaaccttaaaaaaatacattaaaaactaaaaaaataactaatcagaaaatgtctttttttgataaccacaagcctatggtacatcaggaatattagacattcttttctttgcaatacctttcatatccatttgaggatcactttcaatctttggtttactagatttcgtaagagctttcttaagtttcttagcaatttttatagcaggagatggg

SEQ ID NO: 49946 - DNA, 1217 bp, Cannabis sativa
aattgttaattgataaatgaaagaggtacttttcaataaacccctaaaaaaatacttatcaaaataattagaaatagaggcctatttatgatggttaaaaagttgtaacttgtaaagcataatagtttcgtttgtaatacttcaatcggacatggacttgaagttgtcgcgacccaatcaaaactaaaatgggcttagagttttgctagtgataaactcaaatgggctttaaggactagcccacgtatagtattattctgtttgacttttcttaaagaaatagtttacaaaattatttttttattatctcaaatattatttttttatatatatatatttttaaaatttatgatttgagctgttagggtagtttctatgtagattgttatatgaattttagtagagatttaagttgctccattaattgctataaggatttctgtgtgaaattctgtaaaaatatatatatataaaaattattttaaaatgtaaaaattaaaaaaaaaaaacccttcaattaatcatggttatattatatcagtcaaattttacaacaaactaaagatactcactctgggaaattagtgtctatgttcatatgatccccaaattacctttctcatttaaaaactcacccaaaacacatctccctctttctttgtcttctctttttccctctcttatctccacccaaacccacgtctcctcccattcttgtaccaaaaaataattatccatatatttatatgtatacaaaaagagtttaattacctaaaaatattaaaaaaaaaaactttagataagtatatttgtaaatattatatcatttttgggtattatgaaaatatcaaaaaaaatatgtatatatttttgtttcttttattattattattattttttttttgaataaagagtaactttcatgaaacaagaaagtcgtccattacaatagttagtaattcaggagatattttttgaaaaatacgacctgatcaaaaacaagagtcacacgcaaaataatagacaacttcgcacaaagtgaataaaaacattacataaagaaaagaagatatgttgacaatcaataaccaacaaaccaaactcaaaaggcatatgtaaatcacactaaatagcataaacacaaactaaactatcagtttttgataccacatcaaaccaagaatgctactgaatcaaactcaatgcctctttaatac

SEQ ID NO: 49947 - DNA, 1807 bp, Cannabis sativa
gtaaagcatgtaaatttccctatacatattttgttgtatggtatatagttttgttgtgtgtagtatatcatttatttaagatgatatttaatttttattatattatatataataattatgtctaaatttgttggcatgtatactatataccccaagttttgtttttttttttttttaaaaaaaaggacataattcgttaaaataaatctgctgttatagaagaactcaataattgttgacaagcatccgtccaaacacaatcccctaaactagtaacagaggttgttagtgtgtgggcaacaccattcgccgatcatggaatggcgctgcaagaactaccactaacagcagctaataaagaatagatatctaataaaatagagtgtaaaataaaatttatgtgaagcttattaatctaaccaactattgataatagagatgctgaaaccaaattgatgcgcaagagtcaggcccagacgaatggcaagcagctccgccatattaaccgaaaaataacctaacacactagatgaccacgccaaccaaaccacgccgcatcatcccgtatcacttccccataatctgagaaagcccctccccagaactattgaagcatcagtcgctagagcaaaggaatcaagaggaggtggcatccatagagtaagtcggttttcaattgggttcgcagggccaatcccaaatgaagaccacgcaaaatatactccttaaactccgagcagtgataataggctaaatttggaacaacatctaattttaactgctattaccaaacaatactgagtttagatcatactaaagtcaccatagggtagtcatcatcaatttaaaagcctcacgggatagcctatcaaagagaaataggagaatttcttgtcttggtccatatacacattgacggagcactgccacactggaatcgaaccagagcaagaaaatagatcatgttcaagagtttcagattcttctccgcatcgtgaacaacaaagaggtacctaaactttttgcgagataaactgtgttgctactagtaataccaaatgaaataaatgacaaacaaaaacattcacctttggtggcatagcaagattccatactccattctaccaataaattaacctgaatgaatctgtgactccttcctcaacctggagcgaccacgccactggtacccactcttaacattttaaatctcgtctcgctcatagtgccaacacaaaccatcttctacctctcgcctcgctaatgaaatagacagaattatatccacattcattggtaaaaaacttgttgaagcttccacacatcccaatcactagagggaaggataaattcacacacccaaaaaatcatcattaatcctccttgtgatttgctaaaaagacctcgaatgcgggagccacgggtccttgaatgccaaacttgtgttcaatctccaatggatctccaaagaccgcatttaagcaaatccattccccagatcaaactcgaccaaagatgagagaaaccatcattttcagtggctcttaagatagagcaatttggagtttgggcaggcaatgaatatggatataagaatcatctccacacttgttagccaaaagagcttgattaaaaagttgaaaatctcaaaatccaagtctgcccatcgccttaggctgacataccatttcctattgcacccaaggaatcttcctttgatcacaacatggacctcaccagaattttctgacaataaactttgtttttcacaagttaccactaagagctcaaagacactcatcatata

SEQ ID NO: 49948 - DNA, 1074 bp, Cannabis sativa
ttaaactgaaaaataaggtacattccgttatgattttaggttccatatttgtgtagtttgtctttccacacaataaagtttaacacgatttaatgacaccatattagtagtcttatttgtaagaagattattaaaaataattttatgtttttatcaaaatataaaaagaaaacagaatcaaaactgatcaaatccataacattattatttcgtgctcttctgcagttccacgtagtcgaacttgatatgatgtgaagaatagtatcgtattagaattacttaataagatttgttcgattttattatattattaaatgttattttcggatctaataacgactttgtgacctggtagttcatcatttacgatgactcataaatttatgtcaaaatggcaaataattactatattgaaatttaatgtttttctaaaaaaaaaataaacatagaaatttaatgaattttgatggtactattactatagacgtattaattatatacaccgataattatataagggaaagggatgttataaattatatacacgtggagatggagtagttagccttcaaagaaaagttttaaatattgaagaagtgactggggagacaatatgttagttctaaagttgtttaagctattgactagttttaaatattaaagagccatttgattgttttttcagaagatttttgtgtgtatcctatatggctagaaattgtatagtattaagctatagcaggatatgaaatataaaacacattcttcaacaccactctctaaagaattttgacaaatgataatatagattttgggttgttttgatagtttagctagtttatttatatattaaaaaaggttacaagtatcttttaaaatttgtgccgtttctttacaaatgaggaagatgctgtttgaagaagattacaatttaattaaggtacgtacatgttaataaatcatggaaattggaaagcttaactcaatatatgccaagctataaatgagttattatggatgggatttgggcttgaccacttgaggcttaaacatttccattattgttcttgatca

SEQ ID NO: 49949 - DNA, 1043 bp, Cannabis sativa
tacttagactctaagagaaagaggacaaggatttggcattcttgtgtccaaaattccaaaggacaccaatgcttcttattctttgcaagagccgactgaggtaaattaagtgcccatatacaaactctttattttttattggcattattaagcatagattccaggccatatattttaaatattaattgattttcctttttcatgtttctctttttatttaccaggttatgaacttccttcaaaaattggtggaatggaaacgacagtcaattaggaggcaggccacgctgtaaaattgtatatatattatatatagaatatattattgtatctatcttgttcacccttttccaaaaatgttttaagggtgtaatcgatatcggtctatatgtaatttcttgttcaggataattaagaatagatagagtgggggtgaaggggacaagaaaaggggaaaagaaatgttttctaacttttttcttggcccgaagggccttgtacattgtgttgtagctatccttgtacaagcattaaaactagtactaattaatgtgtaattttgccaagttttctaatgcaaaaatctctctctctctcagatccatgtgactcatatatataaatatatatatttataattaatattaatattaatatcctataaaaagtaataaattattgtaattaactatatagtcatgcggtgtgttgcagtgcaaagttttctggggagaacattaattttatgatcaaaatcaatactagctagcttcttgtctaaacaatgatgtatatatatatatatatatatatatattctgggcatttttcaattaatatacaaacactacaaaaaaaaaatattttagtgacaatcttttagtcataatataattttttttgtgattaattgtgacttactaaaaaattttggttaaaagatttaatcttaaaaaatttatatgtaactggtactttatattaataacataaaaataataatttatatgtatttagtacacaaattttatgtgactaaaaga

SEQ ID NO: 49950 - DNA, 547 bp, Cannabis sativa
ttttattaaaaaaaaaatcatattcaaagtatacccaataaaacacgttaccggtagaagtagaagtcgtcagacgctgcttcttattttgtatcccaattacaaattagaaatccactccttaaaaaacaaaaaaaaaaaaaaaaaattagaaaactctctgaagcttcttaccgcttagaaaatctgaaatgtctaaaatgccccacttatggcacatttgcaggggtaatttcgttatttcaatatcataatccgcgtcagcattcccggtatgacttttttgaatccacgatccctatacacgctaacttaactgtctctttataacaacttctcccaaattaaaattttcacaggaaaagaagagatacaagtttttccgagaaagaagagataagtttttccgagaaagaagaaacagagacaatgggagattgcagacctttgggttttttaattggactgccatttgcattggtggccctggttttatcagttttgggtgcaataatctggattcttgggtatgttctctacttcgtaa

SEQ ID NO: 49951 - DNA, 2466 bp, Cannabis sativa
caaaacccgactccatgatccagatcgatttaggttgttttggctttgggtgcagttctaactctcaaagattacagagaaaacttgagctctgaaagatgaaaatttgccattgggggaaaagtgataactagagtattttacgggtatttatacccaacatggctatccacgtaagagggatggacgatccacgatcgtatctctaaaagcacaaaatacattcaacggtttgggactccaatggtcaagcatgtcaacataattaatgcactttagaattgaagcacaaatcaatgatgaagatgctattttttaattctcgcgccaaaaactaaacagtcatcaaaacaaaagctttacctaaaagtaactccttagtatatgtgctcctccgccactaggtaactgtcacgttgacctaccacaactgaagatggaagttaccttccatgatcaattaccacctacaaagtcgtgaaagaacacgtttaaacctccacatgtcgacatcgatagaatgccgcaagcttccaccgtacgcaacattcttgaagcttgggggtaaatgttatctgtgtttccaacaagggacacatagaaccaaggtttgcaccaaaaactcactagtgggtcccaaagatgataattttggcgaaccccagatcatatagacccttccaagaatatcttagctccgtgaccagatggaatttcaccactgacagcctctacccagaagcagtttcggtacttgagaccgaaaggtcagatagtgcgttcttggaagacaagtcccgtttccctttttaatcaagcacacaaaataagggaataaacgttcctcggatctcgagaaaagatcgtatcaagataaaagaggaaactacctaaaatggaaatcaagcaattaattcatgattaattgcccacaattatagtacacaattttgactaattaaactgtatctaatctgccaagtcaacaatcatctccttagttggctggacttcacaagatgacccaaattatgtaattcaatgtaaactctccattaaagggaaaaacgaaaaactaagtgcaattctttgaacactataaatatccaatgaatccttttgattaaggattgagttcacttgcaatacttgctcgagcaaaatggagaatttatgatcattgtattcccaaaggcttttctagctttaattacaaataatatcgacttgttgataaggctcattaacactccaaccacgtaaaaattgtttgtattattcttactatttctctttgatttatttatttcttcattgctaattatttttaattcatttttcaaaaatctcggtaattaaacacgaacaattatgcaattacagtgcaaaaggtctgaagatgacacaagttgcacaatgctcgaacacctactcttaagtggtggccttctgagcagacctcgatcaaaggtttggaaaataactagtactaaggtcggatgaccattttcaaagtacatatttttcaaaatcattactcttgactatgtcttttggccggaatataccgttgagttgctttatgttttaattagctaaagatcagttagatcatataatagcttttataattaaatatatgtacatcaccacgataacagcacatgtcgaccaataaatgaataaagatattaattatcattcaaatggtgtagattttatatcttttttgccaattatagcaaattatttaatcacgtaaaatgcgtacaaaaggttttcttagacctaataacttgatggataaaataaaacttatgaaatgcaagtgaccaagagtcaaaagtctgcttggtcacttgaggggcaactacgcctgtacaggcattggtaaaaaacaagctcaagcaaaaactaaaaaacaaaatttccgacttaaaagaaaatattcatattaagataacaaagaaagataagtccaagattaaaagctgcctggacagccagttttcttaaacaaaatcaaaatattttccatgtttagaagttgcgtggtcagctttattgtactaaaaaataggcccataagcagaacagatgaaaaaattcttaaaatatcaaacatcatgagtcccaggctctttatactgattggataagtcttcagcgacagggtttttatgctcttggatggtagaagagttgttgtcatccatcttagcttcctcctaagatttttgtgcctcgcaaaagccaagataagcatcctttttgtccttgaggtaatcaaagttttccttaggattctccttccaaaactcataataatatccaagacagctgattcaaagctcttaacttccttttgaaatgcgtcccattcaacctcaaaagtttcttgatcagaactaaaggttttatgtgaaaagtcaagagtctcccgtaaggttttcttctcttcaatca

SEQ ID NO: 49952 - DNA, 1335 bp, Cannabis sativa
  modified_base (1071)..(1080): a, c, t, g, unknown or other
atatatatatatataaaaagatgaattacttgcggttttcttacgacaaatcttatatttatattgatatagatataatttaggaaaagtagttaacaattttatgggaaccagaacagagctgatgtggccatttagtaattcaggtgtaagttattgattgtgacaagaaactaaaattaatatatgttttctcatgtgagagaatgctagctagtataattaaatataagatcttatatataatttaatataacaatttttcgcgagttaatcaaattacaatgtgatacgtttaaaaagtagcaatattatgttaatagtgtaccttataaaaagatatctatatataatctaattaacagcttttcccaccttttatcaaaacaaaaagtcttcttctaatagttgttcacagaagcatatatatatgtatataatatgtccataaataattaaaagggactaaacaatgtatgcacacataagtttttttttggtttcaaaatgaaccctgagaaagaagcaacaatcacatgcaatcacgaaatcaaatgttgtattaattcaaaagtcaaaacacattaaaggactcacacgtgagttagcagccacagagctggcagtcattttgtatacatattatataataataaccataatatatattatttctctttccccttccaccatcgacgctgatccatgatcaatcccagcatagatcagagacctttagttaagggttctgtttctctggaaaacaaaatcaacaatataatattatttttcctaatcaaagatgatatcctcctacatcaaagatgttcataacattattattaccaaaaattgagatttcaccttactatatcccaaatattattcatactaacaattccattcgcctattaatagcacacacacacataaatatatactaatattatttatatatagaaggaccactttttcgatttatcttgccttttaagtacactctcctcttcccttattttactattgtctttcccttctatttccccctctgatctctctctctctctctcnnnnnnnnnntctctctctctctctctcctacactccacttgcagtgtattagacactaagtctatttcttatctcattcattcgagatctacattacattgttctcactattgtactattcatagagagcaactatagaaattacaaggtaaaagcttgtaagctgatcgttattatatcatttgattatagcctggaatatattttgtaaaaatttatgagtgtcacataaatattgcaataaaaagttatttatttggagct

SEQ ID NO: 49953 - DNA, 1471 bp, Cannabis sativa
ttgattttttttataacaaattaggttattcttgaatagagtattcttaaataaaggttctactgtagtactaattattctcataatcaatcataattcaatttaaataaattacattgtgtatttagattatctttgcaaactgactactttaataactctatcagaattactttctacgataacaaattgtaagccttagtattgtcctaaagtatcttcccaatgtgttctcgagccacaagctccttaactatcacatcgcagttaagtttgatccattctacaagtagaggaacgcacttggtgatagtaggggaagattgagataattcaaaagatagtaatcatattcttatttacaacaatgaacaataaaatcaatataaaaattgaggctataaaaattattattatgtaccttgtcatttatcgctctctaaatagtgtcaattagaatagatgcatataaaaacacatcatcaatcttcacgtctctcaatggaaaccttcaaatgaatttgacttagtcccaccttctagtcctcggttcctgaggccctaaggagatgctctccaaatatgagaagtcatgttacgtacagtgaagaaaaagatgctacttagtttcttcctctctcccacaaataaaataaggagtcttcaatattcattcgttctttaagaagggatcaaattgaaagcgcattggatagaatgctctaccaaaacactttatgttgtttaagtgttttgctatttgaaagtttattctacaaaaaaaaaaaaagtgacatgacagtattagtttcgctcaagagcctgcaaaaagtaagtaatttgatgaaaaaatttccattcaattttttaatctaaatttagcgatccctcccaggtcctgatcgccttccctcctgccaaaatggaacttactatgccatgttcatacaacctatttaatttataaagatctctacattctcttcatttccttattcttattgattattcttctcaaataattatcaattccataatttagtatatctccttattagaaccgcatagttttgcttccgactaacaatttagattaattttactcatttaaacccattaaatgatattatcattccactttcaaatgataataaatatatatacataacacattattaattgaagtagaatcgttcatatttttctctgataaattatgtacgagagagagagagagagagtgagtgaggaaaggtgatgaagagtcaaagaaagtgatgagaaggaggtgagcgtgtcgtttagtgggggcgcgcgcgcgcacacacacacacacgcgtgggttgggaagaaaggtcggggacagtgcgccccacgaaccacgcctggctgcgaccctattgtccccagtcaaccaagcatcccacaattccaatttccctctcacttattatttatatatatatatata

SEQ ID NO: 49954 - DNA, 1455 bp, Cannabis sativa
atctgctgctcccttttgttcttgattactcttctctttcacaacccattgctaagttttcccttccttcttcttgcagtcagttgttgcgtgccccagccccttgcaatgtgcacatatcaaaggctaccactcataagtaatcgaaaaattgacattggcaccataatgtccaactatcttgaaaagggatttttcaccccagtattttagttccaagtccttgacctaaatccaaattagtaccgaggtaatgtcttctttctggaaattagtatctggattccatgccttcattataacaggccgcttattaaaaaacacataaccaccattgagaattttgtccctagtctgaattgaatcaaacctgactagaaacacaccatatgtaagcataccaactcgttctagttcccctttccaaacttttctaacaaatccatccaacacagacaatggtggattagcacccaacacatagcagactaataaggatttccaaaattcaacctcatcctctatatcctgcaatgttatcgttacttttggcctattttcatgctcagaatttttaaaagagatttcccgatttctcacaatggtaccagttctcactacaaggagggttgtgatattaccttgagcaatagaggtagagcaccttcaatttgctgttaggaaatattcaaaatctgcctgcacttcttcctgtaattggatttgtctcagtgatgatcgaggagttgatggtggttgaaacaaatccccctgcttcatctcctcggatgtgggaacaggggcatcatcttcttccttcgagaactccaacgcctcaactccaagcacttcttccagtgttttcattttcctcacatccgtagtagatgtaggtcctttcttcttagttttcataggtttatttgcttcagcgctcaccttcccgtacaattttgccctcgttttagccatagccccaacccgttcaggtcgcgatgagagagagagagaggagaagccttacacagacaatttttttaattaagtaatatatatatatatattttaatttatgaaatggagtttgagattttaatctttaagaaattttttgtagctattactacattggtgtgacatttgaatgtgataatatatatatacacacgtagtttttaactttttttaattaggtaacgtatttgataatgcatatattgtactttactatatttttaatcaaaactcacataatcaaatttgagtgtgtctatatataggcgattccgtaaatttgatataaaaaaaatttattcccaaactttacaaaaaaatatatggtgtgaattgatttaccataataaaatggaaaacaataaattccttaatataatcatttcaatttaaaatataaaataaataataataatgttaaaaaatatttataatatttta

SEQ ID NO: 49955 - DNA, 835 bp, Cannabis sativa
tctttcataattataaattaatatatatatatttttttatgatagtacacaaagttatacttaatgaaaccaaaaagtaggattgcacatgttattattattattggtataattaaatattgagttttgtaaaattcaatgtacaatttttataattttttatagaatatcattaatcaaccgcaagacacctctaagtaatccttgacactattgtgctcagtattcattaaataaaaagttaagggctcgtttggaatatcgtattaggtcgtattgtattgtattagattatatatatcatatttttatataatactatattaaactttaatttatactaaaatattatatatttaagtgtgcataaaagttaataccatatatagttttacataaaaatattgtataaaatacaattcaatataatactatacattacaatatggtgtaataaagcataccaaacgaaccctaaatacatataaccacatttttttttcgtttaagtttgtagtgctaaacacacgtatttaaggaaaaagataaaagaaaaagtataataataataataacattttagaccttgtgttttgtaaaagttacagattagacattctgctttgttaaataataaaatggaccctgtattttctaaaatgacacaaataagactctaattttttttttactcaataataatctgacctagaagtattatgacaaagctggttaaatttcttacatttgttcgtgttaagaattgtcttcaaattgattatattataaaaaaagttgtcaaaaattaaactcaagttcttatttgtaccatttt

SEQ ID NO: 49956 - DNA, 1594 bp, Cannabis sativa
aatgagtaaaatattgaggaggggtcgcagattcatctaggttaattcatttgtgaaatggagtatggaattttaatatgtcatcaaaggtaaaagtatttgtatggcgtatgttacacttgactttaccagtagcaacacaatttatctctcagaatgttcgggtacctctttactcttctcaatgtagagaagaatctaaaactcttgagcatgtactatttttttgttctggtttaattccagtgtggcattggttaggggtttagtcggtgctctgtcaatgtgtttatggaccaatgcaggaaattatcctatttctctttgacaggctaccctgtgaggtttttgaattgttgataaccctttggtggttgtggtatgacaggaactcagtattatttggcaacaagcagtcaaaattggatgttattccaaacttagtcaatatccatctagaggagtttaaggagtatggctggcaaggtcttcatctgggattggaccttgcaaacccagttgtaaattgagctactcgatggatgccacctcctcctgaattttttgctcttgtgacggatgcttcggtgattctggggagggactttattggatccgagtgagtgatacgagatgcaaagggtgtggtttggttggcgtggtcatcaggtttgttaagtaatttctctgctaatgtggcagagttgcttgccattcgtctgggtttgactcttacgcatcaatatggtttcaatatctccattattaatagtgattttattgtggcaattggttggattaataagctccacattaattttagttttcattctattttattagatatttattctttgttaattgttgttggtagtaattcttgtagcgccattccgcgatcagcaaatggtgttacccacacactgacaacctttgttactaatttaggagattaaatttggacagatacttgtctacgattttttagtttttctgtaaccgcaaatttttcttaatgaagtttatctttctttcaaaaaaaatgttaacaaaaaaacaaaaagagagagacagaaaaaatgagttattataacttgtttattgaaattttcaaaaatcgattataattatactaaaatcaaagaaatagactaaaaataaagatcaataagagatttttacgtaattcgaatattaacgacatctagttcacgagtcaatattagtatgactagaaaagcctttgagtattacataagtgtctaaaaagtttatgaaccctaaaatttctcttagcgtgcaagaattcaaattctagccctttgcatgaataattatttttatatttataagcatgaggttcttatatgtaaacgttgtgtgacagtcagtagtcccgtgatccgtaaggagaaataccaggtaagctgtgcaatctcacaccgcctggggaaggttaagtaggatgattctgagagtgtataagtatgggactacacagttgaagagggtattgtgacagtcagtagtcccgtgatccataaggggaaataccgagtaagctgtgcaatctcacaccgcctggggaaggtca

SEQ ID NO: 49957 - DNA, 1333 bp, Cannabis sativa
caataaaaaataagaaatgctacccaaaataatatatttaccttaataactaccaatacttatctcataaaaatctaccaacatataaaattattccataaaaatgcaactataaacaccaattacatatagtgtgatcctatatataaccttacattaaaatctaaggcaagtaaataaatttatcctctatccaaccatcaaattaaaattatatttgaaaatattaattatgaatctccaattgaaaaataaataataattgataaataaaataattgatgcaaaattacaataattaattcattaaaaaaatcataatactattataaaataactactaaaaaaataaataaaataataataattgatatttataacttctttgaaaaagtagttaaaaataactgcaaaaatatacaacaaaaatatgaaatttaaaataaataaataaataataattaaaaataaaataactgcaaaggtcaaagttataaccgtaaccaccacatcaccatagcctccgtcaaccaccatcaccgcaccaattacactcagatttgaaaccaacacactactacaatacccggatttaaaaatttcaaccatcaccactaatcccaaaccagaaaaactcaaacactagcatcacaggcattgatcggaattttactgaactaagtaaatcggaagaacaaaacaaaataacttttttcataaagaagtttaataaaaaattaaaatttcaaaaacaataatgattaataatatcagtggtaactttgattaaaaacaaaataaaaacttacggtggtaactgaaatcatagaaacaaatgcttcttttccgctaataagaaatatctcagagatgaagatatatgagaaagaaaaaaaataaaaagggactccattcgaaggggaaaaaatgtcctagtcagaaatggtggaataagggtgaaaaaatctcagaaccccccctttttttttttagatctgccatggaaggcagtcatttttcttttaatcaaacatgtaattaaacagaaacctctttttttcctcaagggcatccatcggaggggaagacaatggcggagcattgactaattcaaaattaaatccttaaattcatacagaatgggtcttaacagtactaagatgtgttcttttcttgaatcaacttaattcaattcaaataaaaatcacaaaaatacccaaaagaaaaaaaaaaaaaaagaaggagcaaaccgagacaaggcttttccatggacgagggagacaaccgtcgatgttcttgctgctcttgcactcaacgaagtcttgcctgtaag

SEQ ID NO: 49958 - DNA, 997 bp, Cannabis sativa
tctcaggcaatgaagttaatagtgcctgctttgcaggctcgtacacacctacacatacagcagaagccctgtgaagaaaataatgcccattaaccacaagccaccaaagaagaaaacattgtcattatgaattgtgaaagaattagacaactggaaaagaaagaattaagaaattgtaaatcgtttcagaaagtgaagactttgtttccaaatgacaagtaacgaaacaaagcaagcaaaggattacataacattaaaaataattctagtctctgatataatcagagaaagacacaccctaaaactcttcaacattatatatcaataatgatacacattgtcttatcttatccacactctttgttattctcaacatcttcaaagatgatcctttacatcgaaagttatgaaatcaaaacaatgtgccggaatacttcatagcacactgaattccttttataactaacacaaaagctatagggaaattttgtttagaaacaaatcattcatcgattgtcactcttattcccaatatccaagaagttagagttctttatttggtttatacttctgtaccgtttcttcaagttacttaaaaattaggttcggcttagaaatcgcatgtagaatgatagaaaaaatagaaacaatacaatcagactcatgaaaatagaaaatgcataatcttagacaagtgtacccacggtaaagaaccaataagatttccgttcaatccagaatatagatcctttaagattattttcccgccaacatgagccacctaaaaatgaattaataggcacacacacattataagcacagttgtttaaagaatatacagcacagaatatcaagaaatataaggtgattaaagttaattaaaaaacagtaaactctgcaatttagtaagtgagctgctacaatcattgaaaaactgtaacaacaacatgcataaaccatattaaaatgttagctagtaatattaccctgagaaacc

SEQ ID NO: 49959 - DNA, 1190 bp, Cannabis sativa
atccacataattattaatatttataacataattatttttttctcttttctctttttttttttcattttttttccttttcttcttatttcttctattcttcttcttatttcttctctctctctctctaaaatgtttaagtttgcaaccctagctgcacctcattgtgaagaacatcgccggagccgaagctccatggcgacgatttcgcactcaaaaaacctagcatcatctgaggaggtccaacgacgtgaatgagaagatgagaaggagatttgggataccgaggacgttcttcagatcctgggagaagacgagcaagcaagaaggaaatctgagacaccgacttcagctccagtgacgttctttagatcttgggagaagacgacaaggcaagaaactgagagagagagagagagagagtgaggatgacgaggttgaggtgaggagggtcggacggtgatgataaggtaagaaatcgagagagagagagaggacgacgaggttggagttcgatttctgggttttgaattctgtgttggggttcatgggttttttggttagatgttttttggttggagtaatttatatgtcgattatttgggttggggttagagttttctaggtttgatttttgggttagagttttttaggttggggttcgatttcttggttggtgtttgtgggtgggggtttgatttttgagaagaagaagaagaagaagaagaagaggaagaaagaagaagaagaaagaaaaggaaaaagaaaaaagaaaaaggaaaaaaataattatttttgttctattttgaaatttttaaatattttaatgtattttttaatgattaatattaggtatgtatacacttgtgtatactgcagtgacaatttattttggcacttaactaggaacgaatccactgacgctaataaaaatattacgtaaattttttaatttgataattatagattaaaatagtaaaaaagctcccaaaaattaaataaatctggtaagattgtgattataatgtatataagtattttttttaatgataaataagtctccacaaagtaaaaaattgggtttgtcactgcacttaataaatcaaagtggacggaagatatacagagcaaaatgatatagatgttgagaagtttagcctaaactccccctaatttttccaattttggaagtt

SEQ ID NO: 49960 - DNA, 734 bp, Cannabis sativa
agttaaaccatctccggtgagagataaattttaatgcatgctttataaaatttctcttctataattaagcttataggtaaataatgacataagtacttaattttaagtttataattagcacaaattcaataattattttagcagttaatgtactcttttttttaataaagtacccaaaatttttagaatgtaattctgttaagatttgtctaagttgatgactaatataacaagtgtcacaatcatattgtttggtcaactggtaattatttttgaaaaactattttaattaattttaaattttagaaactaattaaaatccattaagtattttacaatacatttaaaataaataaaaaaaattaaaagtatgagaaacctggtgtaaaaagaaaaacaaaactaagttaaagtctttcaacaaaaaccaataattattatgcaataccattatttattcctataacgatataggatattatgcatgggtatgcatttctctattaaaaatgatttcacattttaaagtagcattataaggttataatataagaaaatctcaaccaccatagggtgtgtcttggagatcctgggatcgagtcccaattaaaacatgattgtaatatataaaagcttaaataaaaaaaaatatatatatatataagaaaatctctaccatgctgtgcatgcatgaagggcacaaaacattccatgatataattatcccttcgttg

SEQ ID NO: 49961 - DNA, 3452 bp, Cannabis sativa
tcatgtatcattaagttttggcaccaacttttagtgacatattttctaagtaattttttatggataaatgtaatctcataaatatatgtttccaatatttttattgtttgctaaaatatttcaatatttattattaaaataaatgatacattaaataatggagtgtgagatcataataccaatataatattaatattggagtagttttagaagtaaatgtgctaaaattaatatagacgagaaagaaaataaaatattatatttttaaataatgtagaagttgtttatgctcttatataactaaattaatatctcatttctcttcttatgttttatgagtaggagagcggttacaattgacttcgtccccattatagaaaagtagaaacaaaaatgaagtcagagactttgactttagtgttggtgaatctggccggaatcatggaaaaggccgacgaggctctcttgcccggagtctataaagaagttggggaggctctccacaccgacccaactggattaggctccttgactcttttccgatcaatcgtccaatctttgtgctatcctttcgctgcttatttatctattcgttacaataggacccatgtcattgctctcggcgcttttctttgggccgccgcaactttcctcgtcggaatttcctccacttttttacaggtacctttatctattctctcctttgactttttgttatcggtatagtaagcaagtttgactacattgtttcaattaagtatctaaggttcaaatttacctatgatcacgtttgaatagattttgctaatgagtaaaccatctccaatgaatagtgtaaattttgtattaaatttagctaaaaaaataaatcaatattatattttaaccaaattttataattgtgttctaatgtaagtaaaataaatttcattttaatagacttatgtaaaaaaaagttgacattaatattaaacttttattggaagtaaataaaaatcgtgttaaatatataaataaaaattttaaaacttagtaattacaatactgagtgtaaaaaaaataaataaaaaagtaatatttattatgctgtaaaatttgaatcatgtaataattttgttagcatgtatcaaatttagaccacattatacactatatttatagcactctattaacaaatcgtagatttatttatttatttttgtacaacattgaatgaatagaacatatataggataagagaagttggttaaaagaagtaacaaaaataaaatgttatgtattaggtggcaatttcaagaggccttaatgggattggactcgccattgtaataccagcaattcaatctcttgttgcagactcaaccgacgacaacaatcgcggtgtggcatttggatggctaaccctaacaggaaacctcggttccatcatcggcggcctttgcgcagtcttaatggcctcaaaatcattcatgggaatagatggttggagaatggcttttcatgtggttgcactcgttagtgtcatagttggtgtattggtacgcttgtatgcaaatgatccaagattttccaacactaaaaacccttacattatgtccgaaaaatcatttgtttcggagatgaaagaactcataaaacaaacgaaatcagtaataagaatcccatcttttctaataattgtggctcaaggtattcctggttcatttccttggacagctatgtcgttcgccacaatgtggttagaactcattggattttcccatgagaaaacggctttgctttggactatctacattgtttcttgttctttaggggccctttttggtggtaaaatgggagatgttatggcaaaacgatttcccaattgtggaagaattgttcttgctcagataagctcgagttcgaccattcctttagcagcgattttgctactcgcattgcctgatgatccatccacaacattcatccatggactaatgttgttcatcatgggatgttggatttcttggaatggtccagctactaacaagtacgtatatatatatatagatattaatttttttgaaaaaacctctatgccttctttggaactaatttagagcaagaaaataattttatgatatattttgcattaatttttgataattataaaatttaatgtttaattaatatttgtattaaaaataaaaaaaataataataacttttcagtaattttattattattttaggggagttctattgataaatatactttattattaaaaaaaatatcaactcaaataatttttaaaaattactcttaatttatttttaaaacttttttctcatttattatatgttaatttcatttcttattttgattttattttcataattttttctaacttatgtatatatattttttattttttttaagaaaagttcatataattttttattttaatttttttgtgataatatttaaaataagtatattttttaagaatatgaattggaagaaaaaaagaatgaaaaaaacttagtacaattaaagatataaaatttatataaaatagaatgtgtttaaaaaaatttaggtgtaaataaaatttctcttataagagtgactaaaagtaaataaaaaaatagcacatatacaaatttagcattatacaaatgttttgtcaaatttctcttatttatagtgatacaaatttagcattatacaaatgttttgtcaaattttctagctcaacctaagtataacttataacaacatgctcttagtaccttaatcaaaacaaatatataagtacataactatatatacaatgtgtattaatgctgtatcacagtccaatttttgcagagatagtagctgagaaatctaggacaagtatatatgctttggatagatcttttgaaggagttttatcctcatttgctcccccaatagttggactcttggctcagaatatttttggctataaaccaatttcgacggggtcatttgatgaggcgaaaattgaaacagatagaaagaatgctgcgtcgctagctaaggcactctatgcagccatgggcattccaatggcgatttgttgtattgtttactcattcctttattgcacatacccgagagaccgcgatcgagcgagaatggatgctttggtagagtcaaaattgcctcgacaagatgaagatgaagatgaagatgaagaggaagacaactctctttcgagagcggaatcaagtagaatttttgttgcaaaagataagggatgtgtggttgaagatggcattggtcatgaattagatgataatgagaagtattttctttctcataagctaccacttctttcaaagaaagtataagaaagaaagaagttgaaataaggtttgtatttttcatttgtgtacatttgatgattatcaagatcaacatttgattatgatatacataacaaataa

SEQ ID NO: 49962 - DNA, 697 bp, Cannabis sativa
atttttccactccgtcttctccaactgaacagctacggtctcattacacgaaagtacctccgccaccacctcctccgccgttcaaaatgccggagttcaagtacttggttagtggagacttcgttaaaattagaagcgctcaaagctctcgctgcgactcccctgatccaatggacgaggctgtatcatcgtcaataacaaaagaagaatcagaatcagtcaacatgatcaacggtggagatggacttgggtcagtgttttgccctagcccagacgtactgacatcaaggtcggcactttcattgaaaggttgtagttgtacgatgggtggaggcttgagaagattataaactcgatcaagggaaaacgaaagctgtgaaattggcaattatcctcaacctcaagttgtttgcttatggggcttttgctttctttgaagggacatacagaaacatctaataaacataatatattataaaatagaaaataatagtactattatgatatatgttgttggaagaagagtgtaaagaaataggctctgattttggggtctcttttcatctttgtattttggagcattttcttgcatatagaaaggatgacaaagtttttgaatttgcattggagtgtcgtttggaagcttcatgagtgtgaacagtgcatatatagatatgtattatgtacgtagaagagg

SEQ ID NO: 49963 - DNA, 994 bp, Cannabis sativa
  modified_base (907)..(909): a, c, t, g, unknown or other
ttgaggcgtagtctacttattagtggtaataacatgttctgtatttgttattcaaaactgctttaaaataaggttgagattgataattttttgttgttgtcgataatatatcgataatatgtcgatgatatatcgacatggcactctactttggaaaacaccactgacaattgattaatttatgtcgacattatattaacaatatatcgatttaccatcgacaagccgatatattaataagtattttaaattatgtaaatcagagacaatattgtgagcaattaatgtggatattatatcgatagcctgtcgatataccatcgacatacaaaacacataaatttttaagtattttaaattttaaattagactaaataaacaatgtatttttaagtaaagagaatatataactgtatttttaattttgtgaattacacaaaatatacaatgtatccaaaattacacacatatattcaatcgacattctggtaaaacaaatcaacgcactaccgttcatgaaacatcttcatccgatcttgcatgacatcagctaatgaacgttgcatcatgagatgctccacatactcaatggcataaatgccacaatcaccactaaatgcaacataaaatatgaagttagtacaatgtaaagcatattttactactatagtacttttttatcgctatgtaccttgttgttgccttcggaacaaagtcatgagtggctctagtcgcatgcatattcggaagcaccttgatctcattcgtagttaacgccatgatctagttattatttggaaaatccccagttgcatagattaatgagggcaacaattcttcccaagtcttcaagatgggtgccatgttggtctaatgatagaagctggaatcacagtcgtacacgttnnntttccacagctctatgtcaacttcaacagtcacccagtgcctatggtcgggaagatgcaaaatgaagtaaatgaactcattaccc

SEQ ID NO: 49964 - DNA, 1118 bp, Cannabis sativa
tctactaagtgccaacagaagccactaagggtaacttagtggtgagggaagaatgagaaaaaagagagatcatgaattcgaactcaagacctttaagctattaaactattaattgattgtaaaatactattacgctacacttgaaaaaaaaaaaaagtgtcaacagtgaaaattctatacagagtatgcaataaattatatcagctcaaatgatttcatttatactaacagaagtaaatataaggtaaaattgactgccaatagaagacttacacgtatagcaagtacataatagaaaaaaataaatgttcctaatatacccttgtatatttatctcttgacacctcccctcaagtgaaagggagatgaagtccctatgagattgtcaatcaagtattcaaattaagaatgggtgagatccttcattaaacaatcaactagaaggcacataacgaatctaaagttccttttgcagtaccttatctcttacaaaatgcacattcaacttgatacgcttgtgctcatattatcacaccatattaccatagctgctgggaatttgaacttgaattcttctaacaatttttgaagccacgaatttttagctgccaactgagctaatcctcaatattctccctcaaacgaatggcagcagaaaggacttcagtcaacaacaaaaataaataaaggaacaaaaggtcaccttgcctaattctcctagtggaaacaaaactatcagagatacaactattaataaggagcttaaaagaaacaacttaataagaatagacacaaacgtagaaggaaaaccaaaattatggaggattgcttcaataaaaccccattcaatacgatcaaaagctttctgcattcaaagcagcccaaccatatttccccttcttcctatgatttatagcattaaaaatttcattagcaatgagaatgttgtaaaaaattaaatgatccgaaagaaacacactttgattgcgagaaattagagagtttagcataagttttattatattagacaagaccattgctaccactttataaagagttgagcagagactaataggtttaaagtcatgaatttttgaagcaatctttttttttttttt

SEQ ID NO: 49965 - DNA, 1153 bp, Cannabis sativa
atttttcctatcttcttttttgaattggcagcatagctattcaagaatactaaaaaactttgctcatctatttgtgtgtcttttagtaatatttttattttttaattttttaattataaaaataaaagtaaaatttatgtttttaaaattttatttttaaaaaataaaaatatattctataatcacttttattttttaattttaaaaataaaaaataaaaatatattctataactttcattttttattttattttatttaaattgggtctagattcgagtttagagccgaggttgtggtccgagtacaggacgggctggggcagagtccacgtcccaaggtcaaggttgggatcggaaccaaaatattgattaaaaaaattgtttaaaaaaaatttaaaagtaattttttttatttttaaaattttaaaattttgattcttaattaaaaaattgaaaagtgaaaacaattttatataacatgttcttggaaaatattttcacttttctaattaaaaaaataaaaaattaattaaaaaagtgttaccaaacgcactcttataaactcttttttttaattatcattgaagcttccttatattatgtttgagatacatcactccctacacacaccccaagtttgagaaaatcttaatttttttagaaaaataatagattaaaaaaataaagaatatagcatgtttaaaatttaacatttccatttttttattgtagcttcattagcgctcttttgggagtagtaagtgtttgtgtgccttattaaatcgaaaaagtgtccccaaaattattgttaaaccgaaaaagtgaggatagaatgtgcaccacatgaacgaatttatgttgtagggaggggtggccatgaccccctcatcttttaatattttttaaaaaattatattaatttttttatattttcttttaatttcttttaaaaattatgttttgaccttgtttaatcttttcttttgcattttggcccccttaatttgagtttttgcctttgttcctagatccttttttaattatatatatgaaaaaaaaaaaaactattttatcaaaataatgaataaattgtatcaagtcacaagacacaggactaccagtcctgagtcctgagatgaggcgagcaaagcg

SEQ ID NO: 49966 - DNA, 1141 bp, Cannabis sativa
attataatatattaaataaaattaagtatatataattataatctagtatatatatatttaaaatgcatattaaaattttaaatgagtagattcggagattgagaagccatcttctaaacatacatagaagctttttattattattatttggtttagtactttactacttttcctatccttgagttgtctaatgcaattgaaccaaacaatatggaaaagcaagtacaatagatctgggttgtagataaaatgagcttcacttttcatcttttgatctttggatgctcttctcaatttttacaagacaagatcagattctttacaaaaattcagaagaacatgttttactggtatgagtttggttatgatagtctaaaacccatcaaatgtgattctcaaagacgatggttataattatttcaggagaggagactttagttgaagattgtacaagaaataatactgaaacagaacataaaagattacacaaacagctacacaataacagaaatatgtgctcaacttcatccacatcctgagctgagctactaaagaagcaagagtcatgtcagaagcccaagcagagcttaaacatgtcattgataagggaaaccaagtgaaagattcagacataacaaggcttccttacttacaagccatagtcaaagagctcaggtactagtcaatgtatggaggaccatttccagttccagagacaacaaaatacgggacaaaccaaatgagttcattccaaagaggtttttggaatcagatactgatgtgaaacaatgaaaggtcgacactttgagctcactcccttcggcagtggacgaataatatgtccaagtttgcctctggccattacaatggttcacttgatgttaggctcactgatcctctcctatgattggaagttggaaagatgaagttgcacaaattatggacatggatgacaagtttggcatcacttggcaaaaggttcagcctttgagagctctcctttggtataatgtctacaaaaatcatgtaatcatccaaaacaatacattgaacactctcttggcttttgatgatcgatatgaactacaaatctacattctgattttgctttatttggacaaaaatatgtggtttacatgta

SEQ ID NO: 49967 - DNA, 543 bp, Cannabis sativa
tcttgtacatttctcgatcttaaaagagggagaggaagtgttaaggcccaagttgattcggcccaaattttgtgctcttgcagtggctaataatcttaaaaaaacctcttgcatttaacacacatccgctaggagattgttgtgttgagacagcctattttttaagaaaaagaatcatagttatttggttggataaaacgacgtatatacattatttttctttttttattgagaaaaattgacttcattaaaatttcaggagcaaatgcaatggtaaaaacctgaaaaagtgtgcctagagataatattaatcaatcataatttaccaccaaagcggcacttatacaatcaagatagtctcaccaccacagtactaataacattagcatatttaacaaaaatatatatttattagttatttatgtacttctaaatgcattgatagcaaaaaaaaaaaaaaaatgaagaaattaaagaatctaatgatgatatatttccacctaagttattctcccagggaaagtgagacatttaccaattgat

SEQ ID NO: 49968 - DNA, 822 bp, Cannabis sativa
aagagataagtagataaagggtcaccttggcgaatacctcgggttggagtaatagagccaacaatataacctccatggataacattgtaccgaaccgaggtgagacacgacattataaggtagatccacttatcatgagaacccatgcgactcataattgcctgaagataactccactcaacccggtcataggctttgctcatgtcgaacttaagagccatgaagccttttttcccttttgtcttgcgctttaggtagtgcataacttcaaatgcgatcattacattatcagagtttaatcttccatgaataaacgcactttgagtggttgcgataatcttgtcaataatacctcgcattcgatttgccggcactttggagataattttatacaacacgttgcaaagagcaataggccgcaagtcgttcatagacagaaagttcttctttttcggaattaagacaaggttgattgtattgaggtctcttggaagttccccaatatcgaaaaaatcagtaaccaagacaacaatatccgctcaaatgatatcccagtgcttttggaaaaatcctggccccattctgtcaggcccaggggctttatcaggatgcatttggaataaggcatttttaacttcttcaattgtcaccggctggagcaagtcctcattctgagaattattaacaatgccattaactacatttactaccaaatcaggatgagcaccactagcagaataaagatttgaaaaatactctaaaattaccttatccaaaccagtatcccatcgaacacagttgccatttgagtcttgaagttgg

SEQ ID NO: 49969 - DNA, 1143 bp, Cannabis sativa
tgactttgagtcgctcttgaggccaagtaaaattagttactctcaaggtcgagtgacatttggccatcatgaggccgaattactctgagacattcttagggcggagggacattcactcattttttggccgagtgaccttggatcttgtcaatctcgtaaatcatttggtaggatgattgttttgacgcatcattatatatatatatattgttgcaggtatttcacctcctacttgctgaactttgcatctcattggctttcattcagcacctcaaaagaagtcttcctttttctggtgaagttgttgattatttactcatttcttatgtgtgcgagtcttgtctttcttacgactacagaatcgaattgcatgttgccccatagaacccttgtatctattttctttgctgagcaaacttagtaatctctcttatacctcttaggtgaaggtgtcatgttattccacctcgagttggccatgaatcccagacaaataccccttcaggacaactttatttacatctcctcctcgaactatgaaagtcctcgagaggaccctttcgagagatacgttaggttgttatttgagagaggcgaccatttaggatgcatcataaactgcaagaagcatctggaaagagttcagtataaaatttatttagtcctatgagggagaaaagtgaccaaattgctaaccccgaggtatatttgcataggcttatgatgttgttagctgagactgagaatgagttgttgcaccttgagaatacctttccctggaaacctattcttcctccttcacttgagtttgtcttacccaataattgtaggatggaattcaattcttcttcgtcccttgttggattacctcatattaagactcgagctcacaaagttctcaaaataaattgcaagttcgaagcctgtgctcaccatcatttccttatgtttgtaggtatgccttctaagaggagggtaatccccagcttgcctatgtcgttgggcccatttgctcatgccaatgtttctagttctatcaccatgaatgaactttgtgatattggggccgtttactgcattttgcccgatgccccttttcatttattagttgttggtgacggggaaagtgttggaattatttta

SEQ ID NO: 49970 - DNA, 728 bp, Cannabis sativa
aattgtagggcatttggattctctgccggcataaccttcaaaggtataagcaacatattgtaaggacctctaattatcagaacaaacgtatgatgttggggtctatcagaaacctctaacactcttaccgtttcctgttgggcatcatcacctatagtctcccagctctcgctgtccaagcataggaggtctatggtcccattatcgcatgcaatctgtccatcaatccaataacttaacaactagctcacaagacaacaacccatttagaaaagaaaatttctgaattttatttttcgggacttctctgttattaagctggagttatttttccataaaacccttttggttgtgagttactttcaataaaagcttcgtttctttgaagaaaaaaataacaagtcgagtacattttagattgtacccactcaccttatgagtattgttttcagaattataactatccacggtgcctgcataaaagctggaaaagaaaaataataaattatcattcgatggacaaatcaaacaagattcaccagctattgtctccagttaaattctcaccatcgttcaattggtgataacaatttgatccgctttccaattaatgcctctcccgtatcagtagttttctacataattcatatatattaggatattctgatgaatgattaaagaataaaaatttgaaagtaatccaaataggctcaattaaattcataatt

SEQ ID NO: 49971 - DNA, 1240 bp, Cannabis sativa
tgggaatattcattttgagcatatctaagaccattggtggatgtcacttcattattaaagggttgatattgctcatcttgactttggatggtgatcattgatattggtgatcaggtctggattgtcagatcattttttgatgttttgatactaaaaatttcactttgacttgagagccaatttttaatatgatatcattgaaattttgatatgactattagacgtccgtagaaatatcttggaacaagctttccaatacacttaaaatcacgtcagttcgagttgtatcaagtgagatatggttgaaaaattgaaaggcattcaacaaccgacagccatgttgaggtataagcgcctaggttgacatccaacgtcaacctggatgcctacataactctgtttagcttgttcttagccttttttgggatgccaaggtgatattagtgcatcactaagctaatttttttttattttagtgaagtagttcactatctcttggtgattgagctctgtgcgcaccaagtgttgaactgggctcatgtatgtcaacttggcacatgtgacaaatcgaaatgagattttgactttcaagacccctacatcttattcttgaggaaaaataagatggaagtttagagtagaatcgtctattgacgaatgaaaacatgtgttctaggctctaggttgattgtgttgggccccattcttccaccttgtcgggctgctacctcaccttgactctcatatttgtatgatattgtccgctttgggcctaagccttcacagtttttatttttaggcacctttctaaaaggcctcatactaatggagaaagtggaacacttatatccaagacaactcttgcatattattcaaatgtaggacttggattgataccctaataattctcccctcaaacttaggaccacatactcgtggcctccgctccagcaaaaccaccttataccgccgctatcactaacagaactcatcacctgaccatcacctttgtcaagaagactttcgacacaggtcctaacaccgctctccatcttgtattgccataatcatcaacgggacacgccacctgactacctcaatatcaagtagactttcgatacaaggcattatgtagatcttcaatcgcgaggtcatcacattgaaggcttctcccccacatcgtaaatgcatcccattatcccagtgctcttaaacttttggctctaatactacttgttga

SEQ ID NO: 49972 - DNA, 1061 bp, Cannabis sativa
ataaattgaatcatttttttttttaaaataagttcagtttgggcggtttaaaccgaccaaaccgaggttaaaaatggtcggttttaatataggttctggattggtcggtctgttttcagataggctttggattggtcgattggcttttggattgcaccaatccaaatcgaaaaccaaatttaggatttttatatagaaaaagaccgaccaaaccgaccgatgctcagtcctagtgtctaaaataatacttttgtctataatggttaacaaaccatgttttagggttgcatgatgaagttctatagcaagaattacctttccaacttctcaaattttttgttttttttaccagttttccaatttttttgtaaccacttttggccattaaacattaatgataatggtccttttgcctaaaataaaataaattatgaggtgtcatttttgaactgagtagaaaaaacataaatactaaatagaccaccactatttacaaccaccacaccaacttagttttccatattagaacaagaaaataaattggcaacttgcacttctgaaaagaaaaaattgccatttcaaaaaaaaaaaaaaaaaaaaaatgatgaagttagtattatatttttgtttctactttgtttaagtggcactctgattttatacataataataatgtgtacagtgtgatgtggaagaaatggagtatttgtgagattcgattcgattcacgtggatgatcattcgaaacagaaggtttcagttttttcttccgttttcgacaatctactaaatgacaaaagtttaacgtttcttggcaagcggtgtacggacttgttccgaatccacatcacatgcatacaatgggactaagcagagcatcactcaacaacccttatagtcaagcttcactatttagtcttttctgtcgtctaaaattatgaaaagcccgacaaatctttgttttaggatctgggttcttacttcggagcctttttgcttcatgggtatgccaatttctgtactgtattttcttgatctttgtgctctcatgtgtttcgttt

SEQ ID NO: 49973 - DNA, 1205 bp, Cannabis sativa
  modified_base (1080)..(1080): a, c, t, g, unknown or other
ttcattctagttacgaattcctccgccgcacaacatcataaatgacaaaaaaatatcaaaatcaccacaacccttttgcgaaccaccaccatagttccgtccgaagcactgtgcacgtttccttgcaacaagaagaaaaagttagatcaaaaactatttagaaccgagaccaccaaagagaaagagaaagtgcaagagagaaagagagtgcaaaatctacaccactagagccaaaaaccaccgaagatgagaaagagagcatttaagattgaaaagagaaagagatgtgagaaacgtacctgggtgttgtcgatcagggtgtggctactgctacgctcagttcgacgtcgtcgggtgtggccggttgctaggcttagtcaccgagatggatagagagaaagagaaatagagagagagagatagatatggatttagaaaatggtatatggggcggctaaaagtagaaggttatatatatttagggtttgtgaaatgggtttggcccatctgttgatttaatttttttacgtaggagtttttgcgtcagttgtgaacagacgcaaggttagcgtcagtgcataactgacacaaaattcatgagttctttaatagcgtcagtttttaaattttgtcgacgtgagaaccgacacaaaatctagtttttgtagtagtgatggttgaaataaagtagcaaaattgtaactattgaggtccacatgtgtggccggggccgaccacttagtgtatttttgcctattattttatcttttttaatctagttaaaatactataaaaggaacatgatgatgtcattctcatccaacccttcaacctatttaaacctagttttctaactctgttaaataactagtacatgagagattcatttcataatgatttcgaatcttattattattattcttcatcaatcttcaagtttttagtgataaagtaccatgtccactcgtagcaagtgaagtactcaatcatagtgcagagaacagtggttaaccaaactgaaggagagaagatccatgtttagatcttgataatgctctgcgacagaaatgaatcaagggntagagatctgaatggaaggagtcttattatttcgctgccataaatgtaactgttgaccgaggttttcggcaactgttaaaatataattataataatgagctgtaagaaagtgagatgaagacttt

SEQ ID NO: 49974 - DNA, 1586 bp, Cannabis sativa
  modified_base (28)..(39): a, c, t, g, unknown or other
ttttaaacttttttttttttttcaaatnnnnnnnnnnnntttctaaagtggttgcagtgctaattgtaataggggtttttgtactattttttgttgcaatttaggttgcagcgctaattgcaataggcctatgtagaattccgtaaaaatgcaaaaaaaattgttttaaagtgtaaaaataaaaaaaggccctaattttaactcatctagagataatatttgtggtgatgttaactaatacaccaatacatatgaacgaggattttaatccaatagccttagcaatatttatgtagaaattactattgtgttttcctactgtgttcacatctatattcaaaacaatataacaatctgttacctagcttggcttcgattaattggtcaaacatttaataagaaagtataatgtagtaaacaaatcggagtatctcagtttcatatatgttgttatgtaatacaatacaacctctatttaagagtttctactgtatgtatatctgtatatctgtgtgactaagttggaagactttctttttcatttattttattttatttgttccaatttataagtcatgctatgaaatttctttcttcaaatttaggtttatttgtgtcacactttctaaattatataagttttagtaaattggcctccaaattttattttttaacaaatcgattcctaaactatataagttttggcatgttagttctcaaactttattttttgacaaattaatctccaaacttttattttttttttagcaacattaagttcccactattagatattgacagttttattgatttttatttattctacatactttaatttatttttatgttaaatttaaataatcttttttaattttaatactttgacattaataattatattaatattttttaagtactcatataatatatattgtataattatagtatttaattttttttaaataatatttaaaatatactttatgcatatatatatatatatattaattattaataagaaaaaagagtataaacactagcgaactcatataatagctagagagaattttagtcccctcatatttttatactttagcatttataatatattttattgttgatttatgaatatgtggtattataattttaataatgtttaattatatctatttattgattatttaaattttacatcaacgatagtaaaatatcataagtccctgcggagcataagttaaataaattttaaaatataatttactttagtagtttatataaaaaaaatattattatttaaactttttcaattattcttttcatcttcttattttgacatatttgggaaaaaaaaatacatacaaataaaaaatatttatttatttaatttaataataattttatttattaaaagtagccatgtacttgaattcatggtttaacttttttatttgtctttcctgttaaattttaacagaatattttattatttagcacaatattttaattagaaaccaattaattatattcaattaattttagtcgttaacgtcctctggtttaagtctttattgggctcttacacccac

SEQ ID NO: 49975 - DNA, 1192 bp, Cannabis sativa
gaacttcgtgagcttcaaacatagagaagaaatgaccaataaagtttagagcttcatggtaagcccaagacttaaaaaatatagaaaaattaaatgaaatacttaagtctatgtgcataggctaagtggtcttaattagtgtcttaatcctaaggtggcctaagtattttttaagaccaatgcttataaatagagagaaggcaaccaataaagtttagagctttaagtgtggaagacagaggttttagtgagtgagagatatcttaccacaccataagaggactttgtttggaagtttcttcatttcttcaagagaaggacaagcctttgattcaactacaaaaaagtttcccacagagacaccatatgcctgaaatgcatgaaaagattttaagcgtgtttccatattttattgctgaattacaagttcttctttgaaaatatttatatatatgcttacaatatcaccaactttgacaggtttgtatgatgtgaacattactgataaccaggtaataaaactatgtcatactgcatttaattactccaattaattattatttctcaaaccttgaggctataaattaccctttgatggctctgttgcatgttcatgattccttttcaatgtgccaaacaaatctcttccatcttcatcatcatgtgataaaaaagattcctcattgtcttgtaacgagccaacatcaccaaatcttttgcaaatagtttcctttattaaatatcaaatgtctaccaagtgtgacaaaaaacaaaagtaaggtctagcaggctatggaagtagttttgaagttttatcacattaaaagagaatacaattgacaatcacttcaaactactgacaataatgagcactgtggagagtaacacatccactcaacaattcaattaatataaatctttaacctttttatgggaaatgcataataacaaaactacttacaataatgaacttaaataattaattttgcaaatattagagcgatataccctgtctaagaggttcctcttatcattactctagaaaagtaagacatattcaagtcattactctgaaacttgaatctgtatgaaattttgaaatgaagtgctagtatatttactaagaaaaagaacaatataagagggcacaaaaatcagggaaagattttcccactctgaacttctcaagtgt

SEQ ID NO: 49976 - DNA, 1175 bp, Cannabis sativa
gcatcatcactagctttagcaactcgcatcatgcgattgtatttggataagtggtccctggggcccattctcccttcatacaattccatctgaggcattctgaagcactccagtagtggtatgtctataattctcttcacacacgattttatatcttcttcttttgaatcagagatagttccattctaccttccaaaaatcttctccatgaacttcgttaactcttcaactttacgttccaagtgcttagttttatcacttaatgattcccttacacggacacgatcgttgatataatttctcaaatccttcctgtaaggtttggccttttctgtttcagccttttctttcttttcctttcattttctttgaaagatcattcgtggagagacttcctctgtcattgtctaaaattggatcactttgactgctagaatcactgcatcaattcttatccttctagatagtaggctttttcactccagcattagacttatccttctatgcagctttgccactagaattagcctagccacccttccctgaagcatagtttcttttcttttttttttttgaggttggctgacagatttagatttcttatgttgttcagcctgagaaggctttttcgaggtttcgctcactttccctttccttttatccttatgtggatcataatttccaagattcttaggattagccttcccaatggcgtcgtttgttggagtcgtttgtttagtttattttttccaacgatcagggttgtcgtcatagcttatattcttgtcttttctcaagcattagcaaagagccttagaaccaaagaataattcgaagagaaatagaacaacaagtttttttacgttgttggggcgttaaagagccttagttcaagagttgatattattatgtattttagctaaaaaattctttgggaatataattaatatatgttccctatttttgcctaagaaaatattgtaagagagtttaattcttaattcaaaggatttgttgggtatttatagtgtttacatgaattatacttagtttctacttttcctctaataaggagtttacatgaaaaatacatagggttgtattcgtgaggctcagcccatgagatgatagatgagctcactagccagatcgaacacgatcaattatcgtgtcct

SEQ ID NO: 49977 - DNA, 996 bp, Cannabis sativa
  modified_base (47)..(63): a, c, t, g, unknown or other
ttcattgttttagaattcatatgaggatgttaatgaaacatacttgnnnnnnnnnnnnnnnnntggtaaaatatatccaacagttcgaaggctggcctccatctccaaagcttggcctccatctttaaaggattgcctccatgtccgaaggctggcctccatgtccaaatgctggcctctatctacgatgcttggcctccgtctgcgaaggctgaactccatctacaaaggctggcctccatctcttgacagacacacaggtaggtgccatcaactctgtccaaacctttggtggcaggacacttaggggtcgtcattggcagagtcgataccgctatgctcggacactctatcataagacccaaagcgacatcccaataggaaaagaacgaaactctaagaaaccaaagcttagagagcctatgatctttttctcaaaatgagattctgcccaagtcaatttcctgcataacgactccctgatcattactacataaattgggaatattgactgtagcaagatatatgatggacaatggagcctccttcaacattcttttcaaatcaacatttgaaaagatgaggctctaactcgatgacttgggacaatgtagtcaagtggtgtatggtctctttggcaaaggcattgcacccaccgagtatattagattacctctcactgttggagaaaatccaaccaccaaaactctaatggcataatttatcgtaattgacgttcccttggcttccgaccccatgatgggctgaccaacccgaaatgacatgaaggcagtaacatccatcaaccacctctgcctaaaattccaaacaatctaggggtaggatgttgagagaagaccaacaatctgcccgtcactgttacaacatggccttctccaaagccaagaaagggaaattgcaactaccagattaggagcatacaagcatcatgacagacttaggcctccactgctataaagtcatgcccttcaatgc

SEQ ID NO: 49978 - DNA, 1656 bp, Cannabis sativa
attagctctaaaaatattacataaatactaatttaggaagtgtacctgctcaaggagaacgttaagagatcccctagatacgtgatgggtctctccaagaatggggttataaggagaaactccaaagagtaaagggcgcagagtagatatgttccatgcaagaactgctttgaacctctctattgggctttctttagtgttgcacttccctaacaaatcatcactaatacagtataccgactctccataacattgtaaatgtgattttggaatgttgaacattggtggcaactgttaagcaaaatcaagaatataaatatgaatacatgatgtaatgttactaaaattgcattagttatttgccaccatttattcagttacataatttcaattttatattattaattatcaaaatattttaacaattattaatctcgcatctcatatcattctatcaaagcaccattgaaaagagcaagtgagtgcttagaagatctataactcactaattaatttctttcttatttttatagatctggagatctacatgttagtgtggattcacatgtatcaatagctagaggtattggcacacatatttcgatcatttcgttgtattgtaaatattcaatttacaatttcattctgcactttataatcatttatatatgtttatatttataaataaatttctatcagttaaagcaaagaatgtgtatgaatattagatttgtgactcttatatatatgttgaaataataggttaaatcttataaaattaaaagtgatactctcatcagaataactttttgtgtgaacaaaatacaacccaacatttagtcaatatttaccaaaaaatatcaagctatatatcatttatatatcaatatataaatttcaagattttacaatttaaattacctgcaaacgagttaaatcggatcctggacgtacatctttcaatagactaagagcacgtcgaagcatattaggggctttgtattcatcataagaatcaacacattctattgatataggcttcgttaaaacaactttcctaccctttgtctcctgcttaaacaatattctattaattgcaattaacaatcttgcaattataccagtttattataaaagttaattttgtaactcatgtatatatttatatataaatttgtaaaatattcaatttgaatctaacaatacgtatataaataatgtaataaattataaatgaatctaacaataacgttgttatatttggtaaaatgtttttgggcacaaacaactataattggacctcataatagaaataacaaaactttgtgttatgatagttggtattcggtttatagagggatgttttagttagtctacccttttgtatataaggctcttactcccctatctaatagagagaaacagagagagtcaagagagtaaacttgtaccactgttcaagagatactagaagaaatactccattgttatactctttttttcttttttgaaagaaactccattgttatactcagtttcaataagaaagattgcatagcccttgtggctggtttggatatggagtagaatggtgtctagggaatactcacttgaaccacgtatgacattgtgttatttatgttttaattaattgtt

SEQ ID NO: 49979 - DNA, 1402 bp, Cannabis sativa
aatcaataggcaaatctcaagtaagagagagagagagagagagagatagtctgggcatgtagaggagatgggaagagagaattagggtttcaaacttagagcttgagagcttaagacttagaataattacggttaggttaatggtctttatataggagagcttatgagatattaataacctaatgtccctacaaaaataggaactataaagtatttattacaaaattaaacaataaataataaataggttacttatcccccaagaattggtaagtaactgatatttctcccttattttcatgggttattgaagcccaaatcgtagcttggcttgttgtctcggatgaaggttgcacaccaagtgcctaccaggtgcaagctggccatctaagtgcctgccaagatacaagctggtcggcccttcatttgctggaggctgactggccataaggccggctaaaggggtctgacctgaccccttaaggtggccagttcatcgtcactttgtcctgcttaagcactctagcttctcctcaattgatgtgttgtgtagatgacttggtcttttccttaacaagttgtacacaacgtggcaatgatcttgcccatgtggaaatgccaggtcatgtggacaaaaataggaataacattttccccttaagtctctgtgcggacgtctgtatggatatggactttccagcttagtttgaactgatggagccttaactgggcaggccttgcattgtatttagtctttgaaatatttgctcttacttgtctgaccacatcccttagcagaaatttgaaaatatttctgcatgttattttttgcatactgcatggtaagtgagagagggatccactagaagctatttaagcttattggtgcaactcacttctcattccacacttctcattctctctcttgaaaaaaggcaactaaagatagctcttcacttcccattgaagtcgacgcctcatattcctccaacgctcgggatttttgctttgtatcgataatccaaactttccaccatgttcctcgaaggtttctactagtgggatcaatctctacacctcatcttgacgaggagtattacagtcctcttgagaattaattatcgttagttggttatgctgttagtctgattgcgttaggcttagctggaattgtaacaacctcatggttcttaagctttgtatatatatatatatgtatattctgttttcatcaattgataagaatatactttcgatcactaataaggatcccaagagatatagtaaatatgattaatgaaaaacaagattaaaatatatttatattaataaaccaaaatattaaagggaccatggccccgcaaaggaggaatgcatgtagctagttcagctcctggtttag

SEQ ID NO: 49980 - DNA, 1266 bp, Cannabis sativa
  modified_base (197)..(198): a, c, t, g, unknown or other
atagaacgcccaaaacagacacccgagtcaaaagttatgacaaaaatacgatttctgatctcctaggaatttctaaaaactatataacacaaaaatctcaaatttcccactcaccgaaacactaccaaaacttattcaaatcactccaaacttcatagggcgcatacataccataaatattaccatccttacataannaaattaaaatcgagcccttaaatgaaaaatgtcattaacgttcggactaagctttaaaaagttctaaactcaatttctaacccaaaaatcatgtcagattcaataagaaaatatcagagctagtcccatgactacccgagaacaatcttataaggtcagaaccttcataactattctaattcacaaagaccctgaggagcctgaagtggagatcaaaaaccctgaggaggctgatcctcgagagcctcaagtggagatcaaagaccctgaggaggctgatcctcgggtttcttagctcagctaaactgtggcgacttgcaaaaatagatgcaagactctcttaataagtgacatgaatagtttcaacactggttcatcgaaaatcggaggaacattgaaagccaatgtgttgagcaggaatattagagagttaacttatctcaacaaattagagaagcttatcgctctaatcgtagaactacttcccatgaaggtttatccgagttggtaagagagactccttgtcgaccaattggtcatgtggaaactagtgcccaagtctaaacccttaatgctcgaaacaccactgctacacctggtaatcgagcaggcattaagcaaacaccaggatggagatctcccaaagggaaagtacctttgagcaagagctcgagaggactgaagctcgaggtcaccaaccaatcggccctctacatgatgttgaacgacctcacaacaacgagataaccaataggactcttccacccagtccttctcaacgttctcatgatgtcaggccctaagaccctacaaggggaaagggacgtactactcaaaatgaatgaggtagtagggacgtacaaaagccgagtggatataagtattgtctgaagatttgttatgtgtataagactcttcatttattcccctactatcaaagtatctgtttattccttttgagatggcattccacaagtttgtgagacactcaaatgccaatcctacccgccacactatggaagatgagtgtgacgaccgcacacttggaaggttttaattttattaaaa

SEQ ID NO: 49981 - DNA, 1540 bp, Cannabis sativa
  modified_base (1481)..(1485): a, c, t, g, unknown or other
tctctctctctctctctattctctcatttagcatcctccaccaccttccaccaccccaccaccctaaaagtcatcctcgccaccttccccaccccatccccaccactgtctctatctctctctctctctcagtccatatgtatattcaaaaaaaaaaattactccgggcacccacttgcacacctttgttttcaccttcggccacctacgtgcgcacttccagccactaattttgttattaatattagatagattttagagcactcccaatagcttctctactctatcatttcaaatagaatacaaaaactctactttatctattttaccttttacttttacataatatcatacatcaattattctattttctctttatacaatttaaatattatatttgttaatatattttattaatttaatttatttaatgtatttatagaatatagatgatgtgaaacaaaaaaaaaaaaacaacaaaaaaaaaatagctaataggtaagccttaactaaatatggagatgcactatttatgagataaaattttgaggtattatagctgatttattgaaaaggctactttaagagttttgaggcataatttaactttttacctattatacctcatatattgggagtgctcttaatgttctaaattttaattttttaaaaatataattttttttaggtatatatatttttgtgtataaatgcatatatagatttttagattgtgtaatcaaattttttaaatatatatgtatgtataaatgtgtacatatatctttacacacatatattttattttaattttgattaccatagataattgtatatgtgtgtgcttaagtgtgagtatttatatatgtatatgtgtgtgtagttttttattattatatatatgtgtgaatatgtatatatgtatatatgtgtatgtgtgtgtgacagtgtgagtgtgtatatgtatatgtgttgtgtgtgtgagtatgtatatatgtatgtgtgtatgtgtgtgtgagtatatatataaggggttgtacatttgtctgcatttttgaggcgatcagtgaaccaagattgcagtgtcaacttgataaattcaaccaaagtagttattggatatttcctaaactcttctgtcacactgttgaagctttcagcatgttgctggtcatgatgttgtatcgatcacccaaacaataagggtgagcccacttctcaaaatctacactctccacatatgtagcaatggtaggattcacctttctaagcttctcaaaatttctatcacattcagtttttgaccatgagtaagcaacattatatatttggttgtaaaagcatcagccttgaacttagagttcacgttcataacaatgtagtgataacatgcacaatggactacttcggggaaaacaagttcaacagtatgataaatgctttgatacctatctgacataatgtaacaccctaactagcannnnngtattacgtgatttttaaacataccgtgcagcttgttgctaatcaacgaggttta

SEQ ID NO: 49982 - DNA, 1166 bp, Cannabis sativa
tgtagcgacaaaagggttaaagagaaaccctagtagccaaagagaatccaaaataatcaagtgttgttttaataatagaattaaatttgtcaattatacttttattattgttaaaattgacttgaataataaaattattgataagttataattaataatttgatttgattgaaatgaatgttaaaaggtaaattatgaatttttaaaatttaatctactattgaattgagttagttaagagtggaaattctaaattgaattggatgattaagcctatttattattaagattttttttaaaatattattcactcaattttttggcaacaaagtgattatagggattcaagaagagactagatagtgttaaaggatgtttgagacaaattttatatgttgttgtactattaatgagtcttagtctacgagtcatttatgttgatgacgaatataatattctctctagaatttaacaacatttaggcttaatactaatcaatgagagaaaaagagaagagtctctttacatgtgatcttcctatttatatgtaaccatgaaattcatttttttaatagtttaaatttttcacttatgaaaaaaataacaatgataaacataaataaaacattaattgttacgaatagatttactagggagataaatgagaatttatattaaaatgtataaaatgtaattattatagataagaaaaacaacaaattttttactaaggagataaatgagaatctatatctatatatataaagaagaagtgtgaggcagtgatgtagcggtctaaaaatgctagaaagtactatttcttttttcttatttttttcattttttattaaagtaaattattttaaataaataaaaattcataataaaaatctaattcctaaattttctcaattactatcttattttgaatttaattaaaactataaaatatatgtacataatcttgtaggtatatatctctcatattttctacttttttttattaaaattaattatttttaataaataaaaatctatactaaaaatctaattcctaaatcttctctattactatactattttgaatttaattaacaacaataaagtatatgtacgtatattttttatttcttttaatataaattttctatacacatatatattta

SEQ ID NO: 49983 - DNA, 1338 bp, Cannabis sativa
ttgttttcgtgttatttttttgaaaaattgtaaaaatgtagaaaaatattctttaaacgtaaaaatgtaattattttacaaaaaaataatgtcttatttaattattccaatatttaaaatgggaaatttaattgtcaaaggggatgacaagaaaatataaatgtaattggattaatttggttagctcatataaataaattactggatccatgtaaaaaatgtaaactaatggcaagaaaagctgagaaactaaaatgatgtgagatgatatcgacaactaacctctcttaggagagtttcatcatagaaagtcagtaataaaactaatcggccaagcaatcatttcattttcatacaccattcattcatattcaagattcaaccactgaatttagacacataatataatatgtattttcatttttacacatttcatataataataaaggaaattagaaaaggaaaccatattattgacttgatcagccaacattttagcagatatgaaatgaataatacataaatatttcattgtagataatatttaaaaacccggttgttaattttctattaaattttatccttattgcccgttactcaaacttgatttgttttaaatattttttttaaacctatccaaaacaaaaaaaaaaaactccttccctacaataataaaatataaatatatacttatggtagggatcttgaccattaattaataatcaaataccttacgaatggtagggattagtttgtggaagtagaaaatggtagctccacttcacctagaagaatacaagagaagagtatattgtatctgaataaaatgtaataaagaagaaactaatgaggtgaggttataaattattctatgcaagttaagtatattgatatatgatgtgactatttagataatcccaaaattggaatagcccctacggctctctttaactaattaaagtttattaatcataatgcctgatgggtacctttatatatatttaaattttaaataatacccacttgagctgtttgtttaacaaacagagacacactatccaaagttatataatatcaaaattttaaagtaagcctttctggtctaattttataaatttttaatatagaaaaaaactacaacaaaattatttttttttagggtaaataatattttggactatattttataaaagttattgattggacccatagttttgttaaatgacaaaatagatcctgtatttttcaaatgataataatagaaaactgagcttaatttttgacaactttttctttttaatataaccaacttggagacaattcttaacacgaacagat

SEQ ID NO: 49984 - DNA, 783 bp, Cannabis sativa
agttctgactatttggagtttctgttgagttggtatatgattatgttttgcttgttctgtcaggacatttgttgcacctcttgagagactaaagctggaatatatagttcgtggtgagcagaagaacctttttgagctcattcagactattgcatcttctcaaggggttagaggtttttggaaaggtaattttgtgaatattctccgtacggcaccattcaaggctatcaatttctatgcctatgatacatatagaagccatttgatgaaaatatctggtaatgaggagtccacgaatttcgataggtttcttgctggagctgcagctgggataacagctaccattctttgtttgcctatggacactgtaagtagctagaccaactggttgtctttagtttcacatgactttctatttccctcaacggtatagatatctttctttaaattttgcatgtgttaccaagttgtctttaagctcttgaaagtaaactactggcttgctcaatgtatttttcaacttgtagtagtgaaacaaattgtgaatattttcttaattttatggtgttaaagcaatcaaatgttgtgaatacgttgatggttgggctaatcactagtgtcttctactcgagttttaaaacaatgttttttgaaaaacttcatgctttgataactttactggtgccaagatgcttacgtttgtggcgtagaggctattctcacggttatttttttgtatatgtgtggctaaatgtctctttcaattggtgaaataaagcttgt

SEQ ID NO: 49985 - DNA, 2065 bp, Cannabis sativa
tggaagagaaaaaaatttataagaactaaccaagtccaaggacctgttactgtatatcagagaaaatgattgatattctttctccggctgaggatagcgctgaaatacagcctgaaatatacaaaactttctcacttgttattgtgtcaagctaatgcagtaaaatctaccacaaaaagatgattttttgtaaagtacaacatgaactaccagatttttcttggaaaactttgaacaaatatacacgtgtatgtgtgtgtgtcagtatgtgtataaatatgtgggacaaacgttttcaaaaaaatgcgggacaaacttacagtacgctgtccgggtattatttttgagacttgacttagcttaagatgtttctcatgtttcccgcggtaccatatcaacaatttctcatcctgtaggtataatataagaacttgagctatagtacatgcactatatgatcatacagatgtttatatgtatacggataagaggatatacaaagcttttgaggaataaaagaaagagtagagtcaaagtttgcaaaactcaagaaatgttttagcttccaaaatgtcagccgaatcctgtcataactgtaaagcttagcagaattaaaccaatgcaagcttgtgccaagtcttgtcgaccattttctgcgttttaaaccttttttttctaatcacattgagaaaattactaaggaattttcaattccaatcttaacaaaagtatgttttcattacagccataaattatcacaagttttcccaacatctaatatttgtgttttcaaaggaacttcattagaatggttttgtctcctcaacaaaagccaaatccaaatgtgttaaaaaaaacaccaacattaaaattgatgaacttacattagaaagccggaaggggcaaaattttggacttcccctacgcccaaacttcagcaaatgtgcccctttcttcagggctataatggcctatacgtaaggacattgaatgactctttcagagttttaaatatggatacaagagcaggttccatacaaagttcaagattctcgtaataacaagtgaaagatttaaaatgccaaggtacctgtgaggtatccttatcaaaaatatattgattcctctgcaaatcagccattcaagttgcagaaaagtccagccgttgtaaacgaaaccccctcagaccacatcaaactagtagaacatgtaaattacagtaaaatggaaatcaaagcagcaagccatatgtttcgctcatttgaaaatgatgacatgaatttgttctatttcagaatagagacctcaaatgaatagactaatcttcaaagagctgacaagatataacttgataaacattataaagcccaatctgtatgcaaattaaaattataatgataaacaaacattataaaactaagaggaagaatgttttacgtatataatcaagctatatgcaaatgcaatgtagctcaatcttttcagccaaagtgattaaaattttgcgaaaattgtaagtatgaaatttattcagacttgcaaaacctttccattcttattttggtctgcattttcttttttctgaatatctcaaaaacagaaacttgtatagaagaaatgttaacctgagttatgatccaaactctgcaagatgatgataacgatgcgatcaatgagcttcgtcttcatcagattagggcggaacaatggtcgttcgcaacagaaaaggaattgaatagaatagaatcgtagtgtctgtccgccattgacgtacatttctctttatctctctttctcatccagcgttcgttaattttccctcccataattctataatcgtcgttttgtccagtttcatagccacgtcacagattattggtattaaaagacatttctcctagttaaattacaattatatcttctttttctgttatttttttttctcctcataacgaatttatccttataattaaaacattaaaaaatatatcctactatatactaagagctgatatacctttttgctaaaagaaaatcgtccaataatttcattttataccattca

SEQ ID NO: 49986 - DNA, 1297 bp, Cannabis sativa
  modified_base (278)..(284): a, c, t, g, unknown or other
  modified_base (787)..(792): a, c, t, g, unknown or other
tatgttgcatggttcacatgttttctttcatgattatagatttaatttataaattctcttaaacctagaacatatagttattcaggattatactattgtaaacacagtggaatataatcacaattatatgttgcaaagtttatgtgcaatgattttttcagtacactgtgtttactgattttttcgaaaattgaataattttagagcttaaaaaagtgatgaagatataaatgatgcaataataaagaaaaaatattttacgtggtttaggcgttaannnnnnntagtccacgagtccattttattacgctctttgggcggttattgtttatacaaatacaaaacaatggacttctactcccttcaaccatattcctcttgaggaagatgaagcttagtaggaatattttggagttaatagtgggtttatagaaatttgttttcttgatgaaggatgggtcttcaatctcaaggtgaaggtccgaacaaccgatcagaatccctctcttttgctttctttatggtatttataggcatactccatttcttgggctaccttggatggatattcatagggatacaacatgcattggaaagataaataggagatctaaaacttttatgttttgactttgtccaaaatctgagcagaacatagtagaaagtaggcttgaagttttagctttattctctttcgaaattttctctattttatagatgactattttctgaaatttgtccaatttatacattccaagcgtagaaacctgaaatccaagaaaacaannnnnnttctattccaaaaataataataaagaagaaaaataactataaaaaatgacacgaaacataggctaaaaatagcctaacaaattccctcaaactaagtccttactcgccctcgagtaagactaaaaataagacaaaaaaaaaaaaccaaaaacgacaacacaattaactaagccttcagacaatcaaactgctgctacaacctgtgaaacttcaataaattatttaaaccagaatttcaatcccaaaactgtaaattaattgggatgcttactttgaaaaataatgtaaagatgcaaattaacttcaatatttgaaaaacatcatatcaattctactctttctaacgtttcacaattcaatgatcaatatgcttgcatgacttacctctctccacaaatgtcaacaattcttgtttggaatcaaaaggactttcaaggttgtaatgtattggcttaggtaataggtagatgaaaagttatttaggctatattataccataagcaca

SEQ ID NO: 49987 - DNA, 1142 bp, Cannabis sativa
aaaatcgtagaaaaatttctattgcaactagcgctgcaaccactttaaaaacttaaaccgtaaatttaaaaaaataatatataaagtattctcttattttattttagatatatatttccaaattctctaaatatttataattgttatatatatgattcgaataaaaaaaataatactaaaagtattttattttataattttattgcaatggtaccatttttttattattaagtacggattaagatcattaagtgtcagctcaaaactacgtgtggatatatttttttaacttatttaatagataatccaataacgtgtctccacgtatttttgagttgatacttaataattgtaataaaatcgtaagataatataattttaccgttatttttttaattaagattatatatgtaataattataaatgttaaaagaatttcgtcgcatgtatcattttatttacttttttaacaaaataaatttaattttttagttaatattaatgcgatgattggtagttattattataattttttattacaatttctttgttaatttttatgcttgaaatcaaatgtcataatatttttttaaaaaaaaaaatttatagccgcattcgctataattacaatattattcttgtaaatattaaaaaaatttgtatagtttaccgtgtagaaatagaattactgatattccagttcaattaccacttgtcttcaaaaaatttcaaacctatttttaacactttaaattatttaaaaaaattcaaaaaatttatagggatgatgttgagtataacgaacatgttatgaaaaaaatatttcaacatgtatttttaaacatgaatttcgactaaaaaattataataacaagttgacgagagcactcctctattgactaatactccacaaactaatgaaaactatattattttacttaacagaaccaacaaaagattttaactacaatctcctatattataatttttttcaaaagttttgcgagaaaattaaaaaaaaaaaaaaaacatttcagtatatgtttttagatgtagagattgagtaaagaattgttattagcactcctctcttacttaataatactcgtcaatatttcaatatatatatatatacagtagaa

SEQ ID NO: 49988 - DNA, 1183 bp, Cannabis sativa
gaaagcttaaagtgagtgcagagaaagctttgagaaaggatggtggatcttcttatgattcgctaactcagttaactaatgatttgatggtttcgcgaatatcttcttaattaatcttaattaatcaaccacatcaatatcaataatgtatattttcaataaacgttcgcataagtcatgataactatgataaagtgtgtttttttggtcataactacgtccacgtataaatcataactatgttaaagtatgtttgtttagttgaaaataaatatatatcaagtgatttacattgctattgttttttgtttttttattttcaaataattattttttgaaatgagaacaaaaaaaataggttttgaagttttcaaaagacaaatcggtttctagtgttttctaaaaatatataatattgaccaaaagtgaattattttttaaaacagaaaataacattttgttattttcaaaatctgtaactttattttctgaaaactgttttaaaaaattaagaccaaacaagcctaattgttttcaaaacataattttctgttttttaaaataaaaaacaatttttagttatgatgtcaaacatgtacttaggagtactttagataggtctcagggtacgttaccattatcaacccaatacttagatcaaataactcccgcatctaacagcatacaataacaggataaaatcgtatctatatatatcttacctactataccttttttgaaaagatcttacctactatacctaatatattataaatgcctataaataacgttgtttgttacgttttgagagattaactaaaaatctaacaaactcgtttagaaagttaacaatctatatatataggagaagtatgagacggtgacatgacactctgtaatcactctaaatagtttaatctattctttccttaattctctcatattttttatttttttattagattgataaatattaatcaattaattaatctactaattttttgttttttctaatattttaaattaataattattagtagtgatgtggcagttttaaaaataatatttattatatacattctctcactatttgaagctcacgttttcataaaaaaaaaaaaaaatcaatattaatatatagttaaaaatatcaatatacatttaaaataatatcatagcaacc

SEQ ID NO: 49989 - DNA, 1070 bp, Cannabis sativa
ttatttatttattttataaattgaacttgaaatattggttaaggttctctgcgtactgcatgtgaaggtatgcaaatatgagtgggattccattatatgagttttccactttaaaaaaaaaaaaaaaactaaaaagcaatgacattaattattaatcaaccttaaacataattttattttattttttgaaataggaacattaaataaattcaaataatcgagtctttatttcaatattttttttaatgtattttcatacacactctgaatttattttcattattgttttaaatttaattttctatattattatttaataaatcactaaaatttgtttagtataacaaaaaattatttattattataaattgtatttaattagttacaacttattatatttttagtcgtaaattctaataatattttcttaaccagaatttttttcgtgatgatgagtaaaaatttttatgttgaatgtcaaacaaataaattctcaagttgattgtttttttataagatcagccgaaatttgtaattaattaataatttgaatcataaaaatttgtggttgggatttatttcaacattttttgggagagagaattaccaaaatttatgccagaattaatgcatgcttttctatgatcagaagatcagacaagaaattatcaaaagtagaacagtaaataaatatatatataagtgacccttcgaaaggtacaaattaaacacaaagaaagtcttttgtttggatgctgagaaaatatatatttaaaaagtttatctttaatttgtattggctggaccactggaaacagagtcacgtgagaaaattttgatggtgctgtaatcgaaattagataagatcgattattcatcactttatatatatatcatgtttcaattttagcaccaattattgactttaactatcaatataacataataccttaattaagttgtgacttattataatacgagtggtttaatttctttctttttttcttttttttttttaaaaataattacaataaattttactttagttataataaaacttgtaattaaaa

SEQ ID NO: 49990 - DNA, 1001 bp, Cannabis sativa
taagtattttaagaataaaatatattgaagggtagaacggtaaatttgtccatactcgatgtaaatcatttatagagaatatttaattatttggctattttccatacccccagaaggagatcatggaataaattatttgaaagagcatggaacccaaagaagacccctaaatcgcagttttattacctctggagccccctcgttcaatgtaggatcatccatggtaagagaaatagaacaaagaaatccactcaaaaatgaaggagaaaggaagaaaaattgcacggtagagcaaagagcgaacaaaaaccctaaaggttactctcttcgagagaaaactcatgttgagtcaaaagaagttctttttttgggttttttgtggtgtaattttctctcaagagctgtaaattattattttgagtaaatatttgttaaaaaaaaatcacaagttttttcatttacatgttttaccatttcacttgctcaagatgtttgtgtaaatctctcaaatatgcgtataaatctcttacatgtgtttttgaatgcaaagattgagaaaaatgttgaaataagatgtttgatagtctcattatacattgttattatttttttttttttcaaaaatttagtcattattattaacaaaacttaaattttatattggcatctcacagaaaaaaaaatgttttaggcaaaattaatatttcaaaacaaattattataggggtaagaaaaattcaacttatctattaagatatatgttttttttaaagaaaaaatgcaaaaataatgtgaattctgttttttttttttttttgttattaaaataatgtgaattttgttattactatttttagtttctttttattaaaaaataaaaaatataattagtatttttttatgaaaatataattattatttttaagaagagtaatttgcggcaaaaccccctcaattatcaatttacttacaaaaaaccatccaacctcatattttggtgg

SEQ ID NO: 49991 - DNA, 1876 bp, Cannabis sativa
ttatttatttatttttttaaaaatgttacctcacacttttacattacctcatacattaacttctctattttttctttataccatttaaatattatatttttattaaataaaccaaaaaaaaatttaaatattaaatgaaaaaaagaataaaatagagaaagagaaattattaaaataatatttgaagctaaaactttgagctatttttgctcactcgacggaacccctttttaagaacatttatttatatttttatcttttgagctattttagctcatgaaatatgagtgccctttctctattttatcctttaaaatatttcttcaaaatctaattttctttattttatttcacacatttatattacataatacatcaatttctctatatttttctatattatttaaaaataatatttctttagtatattttattgtttcttaaaagaaaatgaataattatacatattaatgaaatttttaaaacattaatatagctaaatagtgtttctctagtttctttagagaaatactattcattgatctaaaaaaatgtataataggtcaagtttagcatttgttggaaacttactttttctacattttaaacaatgagctataaatagctcaagtttacctcatttaatggaagtgctcttagcaaaaatgtatattgctacaagtaaaaaaaaaagtatattacaataattgtattatttttttattcatttttatgtccttttttattagtatatttacaaatagtattaaattatagactatctatattttattgttttacatgatataattttgtaattgtgcattagagcacttaatataatttttatatcttcctaagataaaatttatttttggtgtgtgttttcttttgttgggtaactaatagaggtgatgataacaaaggtaagtatattacgtaaaaagtaaaaagtgttggacctcgcttttagccaacgacagtgagtcaattaataaacaattaagaatataataaaaatagagcaaaaacaaataagtaataaagagcactagatttttaagaggtttggccccgtaagtgtggtaatatcctactccttagattgtattaacttgagacaaagaacaaagtatttttctctctcaaagctcttacattgaaatctcagagtaattcttcttagatctctctctaaagtaattctttcgatccctttcatagtgaagctaactcactatttatagaaccttaatgcatgatggaaggttttccttttgcttataatgtataaaataggaaagtacattcattacataattatgatacacgaaagaggaaattgaaataggttgccatattcctctgactcactctcacgatcgtagggattgtcttcgtgcctggacttcacgagatcattttgaagtagttaagtcttgataagtagttcagtaagccaaatctatgcctgcttggatggtatgcccttcaccctattcagagaattagaagttatacatgcagatgtataatataatgtccattctggatattcatccctgcccagatgcaaggaatgtaggacacatatcacttgtgtattctgccacgtcattatgcaaaaattaggataacatttgcccccaagtctgcgcggaaccttcttggccgcacgtggacttcactcggtctggattcttgtctgaacgggtggcaagtatttgaagtgtcgattgatgacccgatgtgactctgaccaagggtctcttcagtttttggctcattaatgctaactaacatgtacctcgatccaagcctttgaattagcacgttttgacggttattctttagataactgagtgcataatgtaca

SEQ ID NO: 49992 - DNA, 845 bp, Cannabis sativa
atattttctttttaaatctatttttgcctcgtgctttacaaaattttaaaaaaaaattacgcccccttcactttaaattttgggtcaactactagtctcatccattgcaaacatgttggatcttgcctctcaaaatacttacttggggcctagccgacaagccatgaaagaaagacatcccttgtttaggaaaagtaattgtataaattacagttgaatggaggaatgagtttagctcttttctaaaaagcacatccattttccctataaataaagggataagttcattgtaaaagagaatttgattggatccaatttgaggattaagagagaaaaactctcccaaacaatctctgcataaggaaaaatatataattgtaattgtaactttgttcaatataaattaagtgactcgtgaactattaacgtttcaactacataaaattactctttttaaatatattgcctttcattttgcccaaaatacgtgggcctagataaggacgacacgtggaactgagaggactaacttttaaagaaattatctaagtcttagacaagagaggagggcctctgggaaggtgcctcccggaggagacatgagaaggacttccacgctcccggaggccaaggacatattaaggcagttccgggaggtactggactctattgaacaatcacctcgcatttaatgtcgcatgggggcagacgtattgaaactaccattaacgatatgacagatagcgtaacccccctttctcagctattatcctatgattaatgaggctagtgacggctactttatgagaaatcacatcaatccagaagggataaaagattatatc

SEQ ID NO: 49993 - DNA, 1265 bp, Cannabis sativa
tcaataattcagggagaatttttaacgtctagaaaaattcatgggacatgatttagtatacattaaaatttaagagtaaaaatccttattaaccttaaattttattgcactccatcgtattattcttattgtaatttttatttccattcatcccaatataaaaaatgtagtcttaaagttgttcccttaagctcctaaaatacactaaccaaaaaaagaaaaatgtgacaataatgaataaatgcatgtagatgtggcttacatcacaagcataaataataaattcataatatgtattaatcaagaatgaaattttgtttcatatagtattattaaataaagggcattactattagtagccaatagcaacaagttttgaggctactcattgtttgtcttaagaaactacaaactgtctcaataatgaaaattacttgtattgtattatgtgcaacaaagtttcatatgatgaaatcaatgcattcattttgttaactattacttctatattagattataaaaacaattcaagtctttgatttagtaggtgggttttttaatttttatcttattattagtattttttttaaataaaaataaataatataattgattgctgcaaaacaggcacttctcaagtgcacttcatttcatgtgtttgggttcagagattttaatatataaatatattttctcacaacagcaacctaactctagggtgtggaccaacacaacataacaagttagtaccatttataaaatggtttttgttgacacttttttttttttttttttaaaaaaaagttttaattataatttaaggattattttaaaaaaaataaaaaataaaagaatatggttatacaaaattttaaatatatttacaatttttaagattttatttacataaaatacaaccttttaacgtatttttatattgtatatttatttatttttaattatttgtacattatttttttatgttgttttgatttcatcttttttattgttattttcatatttttttttttttattatttttatgaataacataaaattacaaaaacaaattgtaaaatctttagagttgctcaagcaacaaatctctctctatctacaaatatcgaaagagagagatgtgaaagtaataacttatggctgctctcgacatatggcttttacgctactattactatgagcggtttaaattagtttgctttttcccaattatctcaaaagtagtaatttatgtaaaattctctata

SEQ ID NO: 49994 - DNA, 895 bp, Cannabis sativa
aacacgctattcactagatgttcccaagacacattcattacttttctggtatatgtgaatgatatcatgattattggaccaaggaaaatctatttctttcacaatgaaaatgtaccctgcaacttctcaaacatacgagttacactggcaacaaaccagccaaagcaccaatggatccttgcaccaagttagatgaacaacaaggagaattgctagacaatccttctacataatgtcaacttattggatgacttaacttatttatctcacgctatctcgaccagatatcacctttgttgttaacatccttagcaaatttatgtccatgacacacattacacacaagcaaaccttgcatcatttgctgtgttatctaaaagaatccccaagccagggcttctttattctgcttccacttctatacacttaagaggttttttagactagattgagaatcttgtctaatcacttggagatcagttactagattttgtatcttccttggagatagcttcatatcctgaaaaagaaagaaacaaacaaccatcttgaaaagttttactgaagcagagtattgcgcatgggctgccacaactagtgagctcacctggcttagatatttgctcaatgatttctcaattccacaaccaactctggatttcatatagtgcgacaataattcaactattcatattgctaacaatccaacttatcatgaaaggacaaaacacatcaaaatagattatcatttcattcgagaaaagatatcaagaactccaccattcggctcatacccgtcaacaacactttccaactcctagacatttttactaacctttagcttcaaccactttagttactcacttagccaagatgtttgtacatgatacataca

SEQ ID NO: 49995 - DNA, 4571 bp, Cannabis sativa
tcaagaaactagaataatcattatgctaaattcataaaggcacaagtgcaagtatgcagacatgcatagacaataagaacagaggaacaaaatatacacttcacaatcaacaagagattgaactgcatatctaagtattgacaagtaatgataaaaatgggagcaaattaacatgagtataaaataaagcacaatcatatttacaattaccaggatgcatcataatatatattcaaatgtagtcacttgtaatttctacttgaaaagattagatagaaggttcaatatttgtcatgaaacttcattaaatgagttactctattagaaattgaactacataatattcaaaaactgagacagtagctgcacttacaattctatcacaggcctaaggaaaggagcaactctttcaagaccatccaagttagcaagtgtttgcacaaaagctatgggtatcatgtagaaaaacaccaaagcaaaaagcgatatagatataacaagctttcgaatgctcaaggaaacaaatggtatagccaaatttcgccaatatacatctcgaggttctggggcccaattcgtcaaccatagcgtgggattcttgctttgttgtgtctgagcacaaactgcagctccccaccgtgacttgaaagagacaaaagcgactgggaggatggattgggtatctttaataatgttttggcgttccaatgtcatctaatatgatgagcacaaaagtgaaatacaagtattaggctaaaataatgttagaaaacataaaaaagaaggctctgactatagaaaatgcatccaattgaggaactgatggcatataagaacattcacgcatttcatttaataagaggaaattgctgaagtgcaaaatttttaatcacttactcttctatcaagatccttaatctgctgtttgtagtactcaatggaatcaacttttttaccacaaagtcccataaatccagtctgaaaaacataaacaaataaacaagttaaaaaaaaaggttccaaacaaaaatgacattggatcagcactctttttcagagttgggctacacaatgggagatggcatccttgcactccataaactttccacatttgtaaaagggctgaattaaataacacgtcttttgaacaagcttttcaatgtatatatgtaagttcttgaaatactcaaataactttggatcatagttgtaagttagggaatcagcacataagcacacaagtgcaatactaccttactagttggcctcttgtccggatgcctttcaaatttaagctggttataatctagccaattttggagccgagctctccttcgtgcatgtttagcaaacttgttggcattatagactgcctgaataaacaaatcacaattaagcataatgttataaagactaaacatacacaataacaagagttaatgcaaagagacatagaaaatggacaaaatataaagtttcacacaattgacactgaaattgtactacctggtgacaaagataatgatctgggtggtttgtcttaaagaattggtcaatagcatcggatgctgagcgaccattagtatatggtacatttcgtacgactacctgcaaaacataagcaaatttataatggttgtatagctttggaatctttttacgtgtgaacataaattagcagattgggaactacctttgacaaatataactaaacatggagtattgagcttgggcattgatgtctaacaattctaatattttaccttgcattcgttattctcatcaaatagtatgatagcaatgattatgcatgattctagttcactttggagctatattttaaaatgaacccaattagcatataaaaataaaaagcatgcgaaatgaaataggttatgaactcacaaaattctgcacaatgttgtctgaaataaaaagggaaaaataagttccaagagttatcttgatgactatatcttttaacttaataaggataatgtaaggtttaacaaagcggttatgatttcagaatttttttggagagaaatattttatggtactgttctagactagagctgtcaattgtatattgtcaatagtatcacagaaacaaaagtttgaatctatgagggactcttaggattattcactggtagacaaaatcagtcttgaaaagtatagttttgaaaacgcttaaacaacatctgattccaccagaaattgagtcacacaaagagcattggatgaaaaagtggataggagtaggagaaacttcaaaatttcatgttcactttctctggtcttttttatagaaaaaagaaaataacataataaaatagatcctactatatgtaagaaactaatcttcattccaacagagcccattaaaatacaatccagccatttcaagcaagctaaaaatgtgtaaagtgaaatttcaactaatcaattatggtcctaataactataatttgcaaactcaaaaactaattacacagaatcctctacaatcatagggaatgttaacaactgactcaccgtaaattgttcagcacaacgctgctgtgaagccaagaattttaacctcattgatgcaacataatcatattccttgtataacattaaacaactccagaacgtaaagaggtattgcaaacctatgtgaacaaaaaacctgaaagagaaaagaaaaaaagaaaatcacactttgtaaggaattttgctttgcctacattaagttataaattagaaaatattcaagggagcagaaaagatcatccaatctttttgaagttactttgatcataattatcaagaatattgaatcttctgcccgcaaagtgatttagaagttagagcaaagaaaaattggttaaacactctatacacctccctcgtatgagatacaaattagcatttattcaataagcgtacctcactgatttagggcgtacattagatattgagagcttatcaatatcactcatgaccaactctttcttcaagaaggatagtgttccatttgacacattgactggaataagtaggagtagtgctgtgactgcaatgggaagaaaaatcttcaatctgcaagaaatggaggggaaaaaatagttataaacatacattacagctcatacacttcaaaaccaaatctatttatttatttatttttgagggaaaatacataaaacagaacacttaagggaaggctatatgagcacaaattgctgatgtagcaacgagaggctaacctccactccatcccagtacaaagatgctttcaaatttaaagcatacttagctatggtttgagagcaactacattagaagaactaagaatgaagagaaaacccagaaaatcacagccttccttctctttttttataagactaaaacttcgatatcatttaactccagtaagtgaaaaaaaaaaagtatctgaaaggtacataaactgtgtgaaagcaacttcaataataattctttaaagattctcatatcactataacaaactaaaatagtagaatactatcattccatcagtcatcaccatcatcatcatcatcatcataataataataacaactataatccgcaagatgtcatcatagccagctcaagtcagctacccaaatccaaatgacaaaattattaaaaagatcgaaattaacaaaatttaatgcttttcagtctaaagtcaaaattttgacccagatggtagaaatacaagattattaatattaatataggtaaattttccttataaatatgtgtgatgaaagttatagaagaaaaagagttaagacttaccccagaatgtaaattctgagaaaaacagcagagtcaaggcctgcatggttaataatctcggcctcccgcatcttcatggcctgaggcatccagttcaagaaggtgaagtaagtcctgacatcgagattaacaaatttgctcacaaaatttctagaactccttgggcttgttcttcctccattaatgtaccatttaggaaagtaaactctgtcattaatgggttgaattctgagcaaagcaaaggccagtaagaatgcaaaagcactcaaaatattgatcaatgcagagaccccaatatcactgagagacgccattgaagaagatcaaaaacaaaaagacagagaagagaaaagaagagtagaaagtaaaggtgaggacgagaaaaagaaagaagactctagtaaaggaaaatgccaagtcttgtgtaaggatagatagatagtatggaagtttaagaaggaaaagaatataactttgcaaatattttatttcaggaaagtgggacaaccaaaggtaattctttatttttattttattattattattaatgttgtaattgtaggatttggttggatttgaccagagtgcactatcaaaaccgtttgcatgtgctgagtgagtaatgctaattttttaatacaattctactataatgatgtatttcttttctttatcgtcttgtgaagtgagttaaggataataacataacaggtagttgcgttctttttgaaagaacaggcagttgcttgcttttgagt

SEQ ID NO: 49996 - DNA, 1807 bp, Cannabis sativa
atgcaacataaaatacgatttctgagggcacaaaacccaacaaaaacaattgcagaaagattaattctctttgtatagatttgggtttattgagtttttccacttttattgtttcagatttttgaaattctctttgtgatttttttcacacttttcaaaagcccattacaatccgctatcaaagtctctgacccatagttgatcgttcctaccaactcctttaagaatgttacagtgcaatcttttatttgcttcttgttgtgttcttttcagcactagtagtctagtatggtttttttattacatacatattgccaagccattcgttaaggtcattgttttttttgttaatgtaaaaaattcaagttctttttcttttcagaagagctcttcaattcttttaagttttcttaattttgtaaaaaggatttgatcagccatggcattataaaactcaaggattgataataatgaaagggtatatttctctctcttcaatttttttctctgtttttttttttttttgcttcttctagtttttaactttattttgggttgtcttcattcaagttgtgaagaagagtctccctaagcctgcatcgtccgaattcatcaagtaatccaatcctttgaatttaaagtatcaatcgatctgtacctatctccactcaacaaatcccaacaatttctcaggctacgagtgagtatctctaatcttgaagttgttgttgtcttttttgaagacgtcaatctctatttagattattggtcaattatataactttgagttcttattagcaatgtgtcttcttaattttttgttgtttttctcttcttgattctatgctatatgattttaatttattaataaataatctctttactgtgcgaaaaattaatattatgtgtatttgattctcaaccttgaaatgaggagttaattatcaaagaaagtgctacttgaactttagaatagaattctatctatcgctattttcaactctattgttcttagttactgatattttttgttttttatggacttgtgaataatatgtcttgtttttttttctttcaatgttccatttttgtccacttcatttgaaggaaataatgcaactttttgaatatgctgacattgatacaaaagagttataattaagacacatgttttcgtatttattgaggccatctactagaaaataagaacaacggtaatgtataacaaggttgtacactttcttttttgggaaaaaacttccctgaaaaaactagatttctctgcatggtgaaaattttttgcctaaattttggttgccatgcaatagaaagcaaatgaattcttgacatagtgatttgtcattgtattttttgcttcatatgcaaaagatgtaataatacatatagctattttgagtccattgaaattagtagaaattcaaaatgactgatatctttatcttgtcattgttattggttgagaagtgaagttaggtttcttgaggtatgattttttgctccaagtatgggcattcaatgaaagtggctttcctacgagttagactatactgaccaattcggtagttgtttattttttttagaaacctttttatttatgaacaagggaactaagccgcgcttcgcgcgggttcgacccaactttaataatattttaaaattttaattaatttttgtaccaattaagttatataatttataatataatattttgatgtgtatattataaataaaatatcaactttgaaattagaaacatggtttactattttcaaatatgtaaaaagat

SEQ ID NO: 49997 - DNA, 1365 bp, Cannabis sativa
aaagaaaattaacaaaactaatattataccataatgtttaagtaatttatttctaattctaaaaaaacaatatgaaaaaaaaattattgattttttttattggcaaaagacaatataaataataaatagtctaaaggggtcatttctttacaagttttgaaatgaggacatttactaatgtagtcctatggtcatttgctataattttctaataattattatttttgggttcaaagccagctttttaaaaatgccataaaaattgtcagtcttacaaaaagtacacttaaaaaaagacttttttctagaagggcataataataaaataacataaaaatatgaccaggtttttaacaagttattaagccatggaattatttccttaatggagataactttttgctattcttaaaagaaaaaagaaagatggcatttttctaaaaaatgatttatggcatttttcaatttaacaaagagaaccatggatataaggttgattacttccaaaattaaattttattgtgcacgatagaatactaagagttgtttagtggttaaggctagaacgtacacggtacaagctcaatattggaaactcagttccacaattgggaccgcatggtgcttgagtagttatgggtaactacttgaaataaggtatataagagtttagtagttataggtggttactacttggaatgaggtatatgttagtcgagtaattatgggatgctacttactatatctagaaatatgcaagtagcactaaaatgctacaaaatggatgatgggatagttagttacaggaaactactatttttgggaactagttctatctttgagtttgatctagaatgcaggcttgtatgtataggtaaggagtactatacttgagaagcctttagtagtagaatataatctaaattaatagttttggtgcctggacatatatgagaattactaagtcagctgtttctactaatcctaactgcttctcctatttatcctcaatcggttatttcagtttagatatgtcagataggttagttatttagttgagtcggttgattcttgtcctggtattttgcacatgttaaattgggttgatgtgtcaccactgatctgccctgtatatataaccttgtaaaatagttcttattcattcattcaataatacaatttttattctgcctttttctcttttcgcattatggtatcagagcgggaaaggaatgctttcccttgatcgagcctgtccttccgcaacctctcgccgtgttcccacctccggcgacgccattgttgctgtctctactctgctcttcttccccgaattgtccactcggcgcaactaatcttgctatc

SEQ ID NO: 49998 - DNA, 1327 bp, Cannabis sativa
tgtaataaattttgactttttttttgtgctcaacattaatttggttagtgtattattttgcaataatttaatcatattactaaaattagtttaatattgaattctctaaattatatttttaagaaaactttactaaacgactagcttacattttttgttccaatctgataacggggtgttggaatttttattaaattttacaaaaatataaaagaaatactcacatgagataggaatgtgaatgaggttttattacaaaattaattgataatgagaagaatagcatatgtatcttatgtatgatatttaattttcacatattatcaatatgtgactctctaacaatgtgaaactttgacacttgatgagttggtcgctaagggtacccaattttatgtacatgggtgaggactcacacaccaaaccaccacacacgcgctgccgcttgaccgagttggtgggtttctatggtgtcactttatttattatagaaaaattatttaatgaaataaatattttattaattatttttataacattaattaaaagaaaataataaaagcgatcagtgaatgatctgttttttttttactatgaaaccaatgtctcccacgatcttatttactattttcttaccgttttattttgatcgacttatccatataagtcgtattagaacaacatgagaaaaaaaatctcatattccttacgattcgtatatggtgattgttttattctaggaacgccatagttgataaattgttatgtacactttcgatagagtcacaaaacatcttaaaaaaagcaacatagtttgtgacttgggcatgaattttattcggtaattcgttctaatttatttaatttttggtataacaccagggctcatattttctttaacctacttaatcagtctagaaaataatgatgatggagatgtatttgcgacattgtcatgttcatcaactcacaaccaaacgagactagaaaaaaaaaaagatgagtgaacagcaaaaggtcaagttggtgagtcctacgtgtgatgggaaacctttcaacaccgtttggagagcatccccgaatcccctcttttaaaaaataaagaaataattaatatattcaagatataaaacaaaaaaaaatattaataagagtggaagttagaaaagtatattacattttagaaaaagtatattacaacatacatactattcgatttgatgaagttgggttttaaaaaaattcttattccatagtccatatagttcaatatgcctctactaaactatcaaatatgtaatccaatgaatttggtagtttttcaact

SEQ ID NO: 49999 - DNA, 1425 bp, Cannabis sativa
ccgtcgtataacataaatcattttgatagtaatttctgttgtagatgtttcatcaacgatcttcttcgatcggctctcaaattttgctatcatatacatcgaatcctctgttttctttggttctggatgaggtatcaaactattcatatactcatttatttggacgtgtatatttatttaattagcaaaactaagcgtagatttttgatataatctgtggtgatttgcttttgaaattatttttgtgtgaacagccagaggaaactctgtaaaatagttagtacatatttgcgttcttcatgtgcaagacgaaagtaaaggtcttccacctcaaaagaaatcctcatcaacctctgctaccttcactccacatatcctttacaggccagtttcctttgctccatttttttcatatcattttgcttctacaaattgaacattttagaagaaaaaggaagtggcatttggtgaaaaaaagaaaatcaaatcttgaatatagtatagtaaaatattattgaaaaattatagaattagaggagttttggtacccaacttaacactatatcttaattggtattctactttaaacttagcaatattctatttttccccccaaaaaaattcagttgtaacggcggatgaaacttttacatgtatatttatagtcaaggtcgctcaacttttgggacgatcttttggattaaaggttatctatgtggcataattgactttatcgaccttcaactacggagatggtggcctcattcacagaagaggaactgggcatttgtgttcttgatgagctttgaacagtaaagacaggttgtttagggtgaggacattgagtttcattactaagcattaaaactacatctgccatggcgggtctatcttcggcatggtcctgtacgcacaaaagcccaacatgtatgcatctctttacttctgatgatctacgtaagtctcccaatattgcttcatctaccaattccattgctctgcattcactccataattgccatgcctaaaaatataaatagacatatatattatgttacatatttatcttcttaatgcatatatatatatatatatatgcatgtatgtttgaactcacataagtgataaggcttcgatggtgctcatcataatagaagcttgtgttcttcctaccgctaattatctccaatatcaagataccaaagctaaagacatcagatttctcagaaaatattccactcatagcatattctggagacatatatcctctgcacttgattgaagagcaaaaatatattaatcgtgattcattgaaaactgtactaaattcagaattttgcttgtattacttacaatgttccgacaaccctgtgagtattagcttgatctaatgatttatgaaaaattcgtgcgagtccaaaatct

SEQ ID NO: 50000 - DNA, 1569 bp, Cannabis sativa
atcattttcactaaaacctcactcttgttttgtttatctgaatgatctcttattcaatttaatcatatggcgtactgtttttttttttaaacttatattgatcttctgattatctagctgaacattttggtaatcagtagagcagagtataattgataaatatctaatgttaatactatattgtttcttgcatagaaaaaatacagtatagtttttttttttttatatatatatatctatattttttatattatgtgtggacgagtatcataaacactagctcttcgactaaatgaaaaaatgccatcaaaacatgggagggctgtttggtataaggtagtcttttaataggaatagcaatattttatattctcatgtttgtcagatttttctattggaggatagtattaagagttagtctcacatttgtcaataagtggaaataaattatgatatataataagatgaatgagctactactcccatagctaattgattttgtgatagaatttcatttatcttattttcaaatcctaataaaattactattatgaaaagattaatcttaaatactttcaaaatcttaaaaacttttataaaaaaattggttccaaatattgcgttcaaccttaatatcgtagatttaatatattaatattttcatataattttttacaatatttatcatattcctgtgttcaaccaaattaacaatgtaatttaattaataataataactaactaattaacaatgtaattgaattaatttaataataactaactaatttatattcttatacataaccaaacacaattataaaataatctgattgtttaatttattattccaattaatcatattatttttaacactttataccctgaaacgggaaacgaatgtcaaataattttatatattgatcataatcgttagcttgcaaaaagagggaagaatacaatgagagtagccaactggccactcatctaaaaaaagagctagcatgtactattagtaattttaggacaatgagagaattagagaacaacggtacgtacagaaaataataatatcactcctcatacagccaagataagagttatcatcttaataattaacaggattaacaacattagagcaatcagactcaaccacaactttcaaaaaactttgacgttacgatcagtatatcgcagaataataattcccatgcaagaccgttgagtgaatttgttcaaaccagcatcactattcaatttcagaagcccttgacgtggccttaaccatcttacctaatacgtttgcaacacctgacaattcatgctaccgtagttatatatagaattcaggtacctatgtatatagtgttagtcatgctttggcacgttgcatatacctgaaatgtttgtagaatagttatgtatttatttaagaaactcataaaaataaagtggtatgattataaatttatatcttgaagcaagaggtaaccaagttcattacattatattgtaaaaacttaaaaaaataatagtattggtgtaaactcaaaagagatgaaaaagttacaa

SEQ ID NO: 50001 - DNA, 1116 bp, Cannabis sativa
gagggattggacatgactctccaagcttgctttgcaagcatggcctaattatgatggtgaatagatctaaaatcctgacttgcaaagaactttgaatcacaaacctctaatcaccccttctaatgaatttttccattcttgctcgctgcccccaccagaaattagccataaggctctcaatactcttacaagtggacacaagtaatttgaaataggacatggcatacgaaggaacagcctggaccacaaccttaatcagagtttctttaccagccttagaaaaaaacttttcattccaagcattcattttagacgaaacatattgaatcaggtaatgaaagacagatttgctaattctactaatacattggggaacacctaagcactggctaacaaagccatcattacaaagacccaactagccataaaaaactctctatccctagaactagtgttggggaagacagaaaagaggacttggcaaaattcactacctaagtagtagcatgcttataaacatcaaaactttccttaataaccaaacaagacttgttactaacagtagtaaacagaaggttgttatcaataaaaagcaagagtgagataacaggggtaattctacaaatagaaataccagcaaaatccttaacttgctctctgacacgaatggctgctgaaagaccctcagctaccagcaaaaataagtaggtaaggggacaaggggtcaccttaccaaatactcctagtagaaataaatctgtttgaaaaacacccgttaatgagaaatttaaaggaaatccagaaaatactcttaataataatggaaacaaaactagaagggaaacttaaatcatagagaatagctttaatgaagctccactctatcctgccaaaggccttctccatgtcaagcttcaaggcagggcaaccaattgtccccttcttcctatgatagagagcattaacaacctcattagtaataaaaatattataaaaaaaaaatcactgtccaaaaggaaagcactttgattttgagcaattagagtgttcaggagaagcttaatcatattggacaaaaccttggcaactactttataaagagtagaacacaaacta

SEQ ID NO: 50002 - DNA, 2608 bp, Cannabis sativa
  modified_base (1776)..(1781): a, c, t, g, unknown or other
gtgtaagtggaggattaatttttttaacaattatattagaatatataaatctttgaacgttataaatatatttttatatttaaatatttaatttaaattaaatatcagataacaattaagggaatatcgtaattttttttcttgaagaatatatgtcaactacttagaaagaatctctcaatcattttaagaaaaaaaatttgctaaataagactattcccctagttaaagtgttgtggaagaagaaggaactcaagtcgcatatgtagaattaatatcccgaattattcagatacatttcatagacaaaatattcataagaaagaaatagttgtaatatttcaaaaattaaataagaaatataaaataaatagcatatcctatagaatatggcgacttattgtagattatattataatatagtttaatattaaatagaattgttaattaatcttgcttgccatccaaaaagtagaagtttatgccttcaatgcttctcatgagaggaaggttttatggaattaaataaaggtgtttgggaatggtccttggaatgtgttatttcatgctacatggaaatcaaatgaaaaaattttaaaaaaaggttttacttatatttatttggatttaaaagactacatatggagctggaggatatcaagacttttggaagttctttaatttagaataataaatagaaagcaactgatggggtgtaagcaaagcttgactaagtagttgttaatactgtttggcttcattttctagtgttattagctgtctatccagagcaggaagggggtaagaaatctttttgttatatttagatgtggaagacatacccaggttttgatgcagctgtgatacatagttggaagcagtcttgttggggtactgcaatgtaagtggtgaaaaggaaactaaaaaggttaaaagaggttctaaaaggcataaacatggatgtttttgggaatattcaggccaagaaaaatcaaccttatcacaagtttcttgcttgacagaaggatctttatcttaatcatttaaatgatttgttaattcaagagaaaattttagccagagaagagtacaatagatgtcttaagaactatatctctttctttcaacaaaagtctaagattaactggcttaagaatggagatgtaaatagtaagttttttcatcacactttgaaacaaaggacttagaatatagtttataaaagtcaggatgcttgtggaaaggtagacacgactctgggtgaatgatgctttcttggattttttattgagctgttgggcctgttgtttcgagtgtgattgatcttgggcctgttgtttcatatactcaaagttttaacttgttgaaagagttttcaaaagatgaatgatcgctcttttatctattttaaaaaataaagttgtaggtcctgatggatacaatagtggtgtaacgcccttataattaggtgctacagtaattttctaattaatgtgtcatctttgctaatcaaaaattttcctcaaaaatcgtgctaaattaagtttttgataaactttaaactttataaacttatatatatatatatatttatttacataaattgggatctcgtattctaacatttacaaacattatcaaaatacatttacaaacgtatcccacagcgactacaaaatacaattcaagatgtccgagaccgaacactccaagtcgcgtagtttcgacatgtacaatcaccatttaagctgagagctcactcctgttcagccttcnnnnnncctttacctacacatgaaagtagcaactatgagccaacagactcagtaagaaaagcatttaacaataacatatcatcgacttgtatctaggcagccagacttatcagataagtaagaacattcttgacatttggtactattgatcatacacctatccacaaggcttatcagataagtaagaacgttctcaccatttgatactattgactatgatatcagctactacgagcactatgattgcactacgggcccgatactatattcgtaccgctgtgattgcatcagtagtatccaaaagtataattgaccataatatcactcttaaccagtattatgctcatactgctgaaccagtactatgcttgtacccctatgatagcgccaactaatactttctggaattgaatatttgccaaacccaatactatgctcgtactgccgacccgacacgatggttgtgctgctatgatatcaattcataacttttacaactcacatacaacatgtatataatacagatacacataatatcatatataacatgttctatgctagtcttacctcgtttctgaattcaagtgagttggctgaacagttaacctcgtgctcgatggatgccctaagtcacatttacgtaaacgggtaaataacacaccaaaaacctaattcgagaaatccaaactcactactaaggtgtctgatatcaatagttcttataacaacaccctaaatatcaaggaaataaccaactaaggttttgaataataacacgatttgacaaaatgaacttttcagaaatccagtccctgatctggttaatcggtttt

SEQ ID NO: 50003 - DNA, 1423 bp, Cannabis sativa
accaaatgatccccacccattgaatctcctccttcccaaagaaaatctctcatcattttttctaacgagagtaaccgcttttggagctttaaaaagagagagatagtatagatgaaagcaccgattgaatcagtgtaagtctcccccctggataaaaaagaggatttccacccatccagccttttagcacatttttccaaaacaggtgcccaaaacaactttttcctgggcgagccacctaaaggcattccaagatatgacataggccaattctccatttcacaaccaatctgactagcgcactcagcaaccacactctcgtgcatagagatacccagcacttgacttttattcatgtttactttcaatcctgaaatagcacaaaaagcctcaacaattcttaccaatatttgaagtgaggcctcatcatttgcaaacagaagcgtatcatccgcaaattgcaaatggctgacttgaaccttatctttgcccactacaaaccccgagaaaatacttgaattcacagcttggtcaatcatccttccaagtatatctaccactagtgtaaaaagaaaaggtgaaagaggatcaccttgtctaaggctccgagatcctttgaagtttccccttgttcttccattcacgaataaggagaatgatgttgacgagatgcatcctctaatccatttcctccaggtttccccaaaccccttttttgacataaccagatctaagaaatcccactctactcggtcataagctttctcgaaatcaatcttgaataccagcccactctttccgcgacaccgataatcttccactgcctcattagccactagaaccgaatccaaaatttgtcgcccttctacaaaggctgattgtgttaccgaaatcgtttcccccaaaatacctcgaagccttgcggccagaactttagcgattatcttgtaaacgcttgttgtcagactgataggcctgaaatcttttaccaaacaactattaagtttttttggtataagacaaatgaacgtctcattaatgcttccctcaattctgccctttctttcaaaagccttgaagacttccaaaatatcattctttaggagttcccagtttgactgaaaaaaagccaaactaaatccatcaggaccaggtgatttgttaccttcacaactgaaaatggcatcttttatttcgtctttttcaaaggatctctctaaatctgtagctaatgattctgatatttgctgccactcaatgccttcaattccccatcccggtctcctctcggatgtgtataatttagagaagaagtcaattagttcagctactatcacttcctccttgtcaagtgtcgagccaacaattcttgagatagtgtttcttgccttccttgcatttaataaattatggaacattcttg

SEQ ID NO: 50004 - DNA, 1527 bp, Cannabis sativa
  modified_base (127)..(127): a, c, t, g, unknown or other
aaaaaagccagggatagaggattaaccataaagctaattgataaagtcataatgttgatcagtttgctctataagtcaactttccaataaagataaaatagaaaaagaaccatatatatatatatanatatatatatatttatacttactcagaattaaaagtctaaaacctacaaaataaagaagacaattaatgtatttattataaccctgacgacatgttatgtaatacttacctcataatatatactctacaaataaatagatatgactaagaaaatcaaattaattaaaaaatcttaaattactcttaaatcctatataatcaagttaatgagttaagagtttataacttacatgtgttattgtctaaatttttgagagcatctctttcgtatatattagtcacaattttaatattacggttcatgtatgaattaatttagcatactctttgattagacaataattttttttggaaaaaattataagtgtttaccaaattaaagtctctctgattttttttacatcttagaaataatgtgtacaattattaataattttgtgaattatgattataattctcaatttgagtacacatattttatagggaaagaggagtatgagagttgttttgagaggatcaaccaacaacatcacccaaaaggaccaacaatattctatctaaaaaagtaaaaagagtaatgctatatatatttatatacaattaattgtgaccttaaattttgagtcaaagctttgaatattatttcatgttattacaactactaagccattagtgtagtagttggtgagagcttttgctttgtagaattaaagatattcaaacatggaaattaacaatattatactattaatttaattatatggaaaagaaaataactttcgtacttaacactaatgatatgtttacttatagaatttgagaattaatggggataaaaaaaattgagatttattattttgtttacttcattaattttataagaaatgagaatgaaatgtgagtctcacattaatttgggttgagaaatgagatcgaggttggtggaattgccattcccatttcttttaaaattattaaatgtaatttttaccattgtggtatgattctttaaactcccaactaagatttagttagttagttagtctttaactaacttaattatcaaaaaagacaactgatatattgaatcccttagctcatataaagagaactatcatttcacaagaagagaatacaagtcaaacacaagagacacaatacattagagagagaggttagaatgagatgaagagagatatcgaagagagagggagttgggattgggaaattggagcaatattgttgattatgtttggctcgggttattagtgatttagtgttgagggattattcattatggatgacttgctgtgattattttcttgtagcccctgagattgatacctcttattctcattatcaataaagattggtggcaatactttcaaactagagtatga

SEQ ID NO: 50005 - DNA, 2051 bp, Cannabis sativa
  modified_base (311)..(313): a, c, t, g, unknown or other
aaatgatattttagtaaattaatataattactgaaatgagacatcaatcatttagctctatcagcccatgctcaaaggaaatcatcatttcacttctatatacttatagaagctatagattccataactatgattagcgctcccactctattgaactaccatgttcccaagatataagtgattagccgactagactttaacgaacaactttaagcacataaataatacaattaagattgaacctaaccatatcaggattaagatctgcagacctaatattaaccaacgatattgacttagaaagatataannntaagtttatgatatcttatccaaggtcaatatcgatctagtccaatgtatacttcatacatccaatactggtatactttgccaatgtctaggaaatgacataacacttatccaaggtgtaagtatgccttatcgccgattatcatgtcagtctaaatccagtgtactgacaaatcacaggacttaaacttttgaacatataatcatgattatattacactatgcagacaacactataatcttgaataaatttatgttatggaattaatagaatttatacattaaatatataatcatgaaataaatcatttaaaccatgcaacataaagtgatttctgttcttttattagttagtaaatctgattatattgaaatggattttatttagggtataaaacccatcagcccgaacccgggacacagtcttggacatggaccgaaacccaaacttggacccaattccaagactagacctagactcgaactcgaacacctagacctagacccggatttagacctagacacccatacttgaacctgaacttcagaccggacccagacctagacctgattgccaccccaaccctaagaccgaattcggaccagacacctggacttgaacgcgggaccgggcctaggacttggacctaaacccgagaccggactcggatgaggacccagacataggacttaaaaaatataagttagtgataagttagaaaaggatagcactcaactctctctcttttcctttctccttgcccgaaccctaagttaggttgcaaccaagggattttcttctccaattgtcaaatttcagctgggttatcaagggttagcgactgttcaagctttgaggtaagcctcctttgtgaatatttaaggattttataagttttaagttagttttgggttagggttttagaaattcggggctgtgatgttaattaagattagattatgtttttaggtttgttttagggtttgtaggaatttagattgggtaattttagtggctgtttggttaggtttggtttagttgaggattttttgaattttatttcacttgagtgtgcaattttgagttaatggatgaattgttgtaaattagtgcttggaatacattgtatttatggtattgtactgttctgggaagtttgagcaggtttggatgagattgagatttgtgtggttttggggtgaaaactaattttctgtttctgccagctgagaaaccggttaatgaattttacaggtactgtaaaatcggtcaaccagttttcccggcaggggaaattttttttgttttagcctcgaaatcagcttttgttcggggtgttcttcagaacttaaattagggtaatttagaaatattttaattgttccaatccagtgggagttagatgtttggttatggagattatggtttgattttggagttttgataagttgtttattggattttattttcatgacataggaccgggatcgcctacctggttttccactcagggcggcctgcaaacttgagttttggacagaggtaagaaaagtgttatgtaacacttaggattaagtgattaacaattgaattgtttaatctcaattatgatcgagatccagtttatttgtttattaagcctcggttatgactgaatgttgggaaatagtcattactcttataagtaattactcttgaaactacggataggtttcttacttatcgtttgctttatcgg

SEQ ID NO: 50006 - DNA, 1587 bp, Cannabis sativa
ttcttatcacgttgtcataaaaaattattaattcttggccttgggctatatataataacataatatgagttgaaaatttacatagagagaagcgatcgatcgaggagggtgtgaggaaaattaagaaagaatagtttataatggggcaatattggaaatggttagggtattatttgatgatatgggagatagtattagtcttaggagtacttgggtcatcgactcatttaggtggatcaggttcgtcgtggaaaaggtcatataaaaagatagtaaagcagataaatggtaaaggaccctatattgggcttatcactgtatatcctcctgaagaagatgctttcttctctactggctcttttcaacccgactccgactacccttttctcgatctatcaggtaaatcaatcaatacaatagcttcccattaataaggattaatgttaattaaatatctttttaattttgcaggcaggcgatttcgagtggggaatgtttatggcaagagagtcatttatgtgaaatgtggagttggactggtaagtaatcttatttgttagtctttttaaaagtataattattatgtgattgatttttaataagatcttgattatcatcatcttcataaataatttacagccacacgatatatgtttgtttacttatattaatgggtccatcagcgtcaccataagctgcatgggcctggcgcagcccaccaaaatcttaaaataaataaataaaaaataataaaactcgtgtgaatttttattaaaagtcatatcttgtatgaattcattaaaaaaaatatatatatttaaaaacaaaacttagttttcaaacaaaaatatgagaaaaaatcattttaaaaaattaaaaaataaacaattttttgtagctttcatgtttatattattttaaagatatgtttattatatcaccatcacttttacaaatatttaaatatatatattcaaattgtaaaatattattcggcatttttatatttgtcaatttatttcgtattagttagatcttcaaaatcaaaacgttgtaaaaaaaatttatgcttgcatgtactaactaattatatatatgtaaaaaaatatttgttttagaaaatataaaagaaaaaaacaatcctcatatttattggcattaatactattggtggcctttattttatttggttatattatgaagcaaagaacaatgtcgttggcttcccaacctactacaaaagtcatcccaaacccaactgcccttcactactttttgactgattggtgtaacaaactacaaaaacaatttgtatatgttggtgctaatttagttttttataaatttttttggggttcaatttaaacgatttcagttattaaatttagtaatttatataatatcatttcatgtacagtatactgaactattgttacatgctagtgattttttttttttgagtacaacatgctagtgacctaaatttataattcattaattcatattataatatatgctttgatttggtaggtcctaatttaatttttataagtatttttctgttcaattaattaaacaatttcagtt

SEQ ID NO: 50007 - DNA, 743 bp, Cannabis sativa
gtttagtacgggcatgaaacacaggattggaggcaagagatccagctcctaagttatcacaacagaatatgggacagtgctgagtttggagaccaatttctttgagcagggattggatccataccagttcaaatgtggctagagcaagggtacggtactcagattcagttgtacttctagccactactgcttgtttcttggagtaccaactcaccaagtttccaccaaagtaaatgtagtaccctgatgtactttcgatcatcatagcatccatcccagtctgcatctagaaatccttgtagatcaagtgtcatggctggtgtgaaatgtaatcctccatcaagaatgcccgagagatacctcaaaattcttttgcaagcactccagtgatttgaggtaggagcctactgaaattggcttaatcaatttactgcaaaggaaatatcggtctggtcatggtgagatattgaagtgctcttaacacacttcgatacattgtgggattcttcattggagtactagtgtgttgagacaattttgtggttgtgcacataagtgtaggttgtgatttggagtcatgcatttttgcggagttcaacaagtctttggtatatttgtgttgactaagatataagttactgacatcacgaatgacctcaaagcctaggaaataactgacatgtcctagaactttaagagcaaaagtagcttggagtgtagaaataacatgttgaacttgagtt

SEQ ID NO: 50008 - DNA, 972 bp, Cannabis sativa
aagaaaatcatgttcatagacccatcatggaaacaatagttctcatgctcaacagttattctgttatacttctaccacctcaacaaccagcaacccattctcatcataatagaacacaatcaggcacaacaacaactagattaatctaaggtagatttcatgtatctctttacaaataatctttaatatgttatattatgcaacatgtatatacatgagtgacttaatagatatcaatgtttgacattgtgtatcttatgtaaataaatagtgtggtagaatgactaatgaggcaatcatacaacttgagtatcatggccatatattatatgtatgattatattttatatctatgtttatatatgtcacaaagaaaaatattgtttagtttaatttttcaaattttgtaattatttctttttaattatttattttcattaataattgttaacatgtcatatactattagaatttgtcaaatataacggcttacaatttttgctctaatttactagtacttaattaaagttagaatgctatttattatttgtttaatgaccaatatatacaaatttggtattgtttatatcatgtgctttagtttatgcttttggtgacagaagaagttcctaaggccatcttaaatttgtggttgtaagtcccactagagcagacaggggtacgagaagggtactcttccaagtctattcttatttttttgcatatgtgtattataattcttttctctatttgaagaagacaattcttctttatttgcggttacataatgttttttaaaatttacaaaaacagatatattgttcttttgaatttttcaaaaacaaaaaataaatgttgaactcatattgttataatttattataaattatttttttacattaagaataactactatatgagtatgtatatattgagtgttagagattttattacaatggaagaaaatcaaga

SEQ ID NO: 50009 - DNA, 1245 bp, Cannabis sativa
taatatttttaaaattaatatttgtagttaaatttgtttagtaaccattcatgggtaatacccattaaaaaatgatccttataaatatatatttttttatatatataaaaagtagttatgtaacagaattattagtttaacaatattaattttctctgttaactctaacatattattacttaacaaaatattatctataaattttataatattattacatatatatttaaaaataaaaattagaggttttctcattttatacttcaatatatatatatattttttgtatttttatagaattctatttagaaatcccataataattaacagaataatctaaatcgcaactaaaatttatataacaactcacataaaaatcactggaaacaagttaaaaagtagtatatgaactaatttccttaaaaattatgtaaatatttttattttatataaagaaatttaaatttaaatttaaaatacttgagatattgtaaaaaaaattaaccatatttttaattttattggttaaatcttgaactaaaataagagacaattcagcttaattggacacacaacgattcaccattatatctcattttacttgagttttattatacatataaaatgtatgtatataaccacatttaaagggtataccaatatagttgtaacagctaaaataaattcttaaagatcaaaatcttaaaccctatctcaaaaaaaatatacattacctaattaaaaaaatcaaacatgtatattttacacttaaaatcacttaattaaatctaattaaaaagaaaattaagtatacctgtatggcgtaacctactatatatatatatgtaaaatgattccagtatttcaatcaatattcaatctacaattgttgcaattacaaaattgagtatgtgatttcttaaaggtatatttggaaataaagaaagaatctaatcaattcataagtgctttgcatgtttgatcaagtgatttgagattcattaatttaagaaaataaattaaatatatagcttgggactaattaattcaatgaataataacatcaaatttcctttcaaattcatattgagaacagttaatcatgatggaaagaatgttcttcttcattataaacaacgggcattgcaatcaaaacgaatgtacaataaatggtaatttttttattcaatgccaatcaaaatcattcaaaaaaaaaaatgttttctactttaaactttcagaaaa

SEQ ID NO: 50010 - DNA, 814 bp, Cannabis sativa
ttttattttgtattaagttcatctcaaacctttggatatgtatatttggttgtagttctgatatgttttgtaaaagtttgttaaaatagatatttctatgctattgcagggctgtgtggcctcgtgacctttgctatgtccgttattggcgtcgaaatgatgatgggagttatggtaggaaatttattgtcatcgactcattgtgtgttgaaccttttcttgttccttctctttgcataatttatcaagaaaaaaaattatcaatatttgttttgttatcatgcagttgtgttgtttcgctctagggagcatgaaaattgtggaccccaaccaggatatgtgcgggcacatgttgagagtaagtagatttcaacagacctgagttttaagtgatgataactaattgcacattttgttactttattattagaaactttcaaatatcacttttcttgcaagtagtctttgtaatatcacttctcttgcaatttgaagtttagaagaaatttaaatgatataataactgaagagtttattcatcattttgctttttttaaatgcttctctcctggataaaaagattttgatgtgacgtggtttttcttgtaaatcattttttcgtgtcttgaccaatggaaaatctcctaatttcaagcttcttactttcatttgaaaatcatctggtccaacaacaacaacaacaacaacaacaacaataataataaaaataagcatttgcctaaggttcaccttaccttcctttgtggtgtgatgtgtaaggagagtgaaacaaacaacagttaggctatgtttg

SEQ ID NO: 50011 - DNA, 2793 bp, Cannabis sativa
aaattcgctttccgtactcgatctagccacgacaggttgtttttttgcagaccaagacaccaggtttcctccaaagaaaattgcatatccacccgtggatcgtcggtcatctgggcaacttgcccaatcgacatcggagtatgcttgaagaaagaattgtggtgctggtctgatgaggagtccttcatgaattgtccctttaaggtatctgaataaccgtttacatgcttcccaatggactgttgttggagcgtgaataaattgacttaacttgttgataatgaatgcaacgtccggcctagttaaagtcaggtattgtaaggcccctaatgtgcttctgtagagtgtttggtccataaatggttctccctcggatagtgaaagcttgtgtgtagagcttgtgggatttggagaaggcttagcaccatccatgtgaagtttaaccagtaaatcagagatatatattgtcagggatagatacattccagtggcatttcgagcaatttcaacccccgaaaagtagtgtaatggcccaagattaattatagaaaacacttgattcaattcctttataagactgttgatgattgtgttgtttggccctgtgatgattatatcatcaacatacaccagaagcacaactaaatcctttgcagagcctcggataagcaaggatgtgtctgattgagaagcagaaaaaccttttcaaaataaggtttgtttcggtgtatcgttccaagcacgtggtgcttgctttagaccatataatgctttgtgaagcttgcatacatgagttggtttctcagcatcaacaaatccaggggcctggggcatgtacacggtttcttggagtgagccatttaagaatgcattcgaaacatccagctggtttattggccaattgtttgttacagcaatggtgaggagcaatcaaattgttgctggtttgacaaccggactgaatgtgtctgtgaaatcgatccttggagtttggaggtagccctttgctacaagccttgacttgagcttattgactgaaccatctgaattgagctttacccgatgcacccatttgttgtcaaccaaagtcattgatgaatcataaggaaccagggtccatgttccattattttagagctatgtattcaccgtgcatggctttaaaccatttaggattggctaaggcttgcttaagtgttttaggttcagtgagggttagagattcaggtaaagggtgattggtggcaaggtatgctttcggtttagtgactccatttttggatcttgttgtcataggatgagaatttgtgggtggtggaggggctagtaactgtgtaggggttggaatgatggtagtttggttgatgtgtgatgatggtactggtgcatgagatataggattggtggggggcatctggtgcattgggctcatttggctcattgatggttgcagctggtgcaggtgcagggtgcagggtgctgggattgcttgcaataacatcaccagcagtaggtgtaacaacaacaggagtacttgagttagataaaatattttccataggagtagtaaagaaggaagttgttggaaataatatggagggtgatggttgtacttgttggtgtgttgatgtagattttgctggaaattcttgctcattaaagattacatttcgagtaatatatgttctccctgtttgacttctgcagaagtatcctttgtgctgcatagaatagcccacaaatgtacatttttctgattgaatctcgagtttgtgagattgatatggtcgtaaatgaaggtagcaagagcatccaaaaggcttaaaaaagctgtagtcaggctccttgtgaaagagacattcatagggtgatagatcatcaataacaggtgtaggaagcctgttgatgacatatacagtatgttgaaaagctagccaccagtgtgttaagtcaaggccagatttagcaagcaaagtgagcccaatttctgtgatatgtcgatgctttctcttaaccctaccattttgctcatggtcatggggacaagggtgttgaaaagagatgccatgttgagtaagaaacttagcaaaaaccctgtactcacctccccagttcgattggacattttttatggggagttcaaactgtttctcaacaagctttttaaactctaggaatagagaaaagggttgcgatttgactgttaggggaaaaatccaggtaaacctactgaaatcatcaacaaagatgatgtaatacttgtatccttcaagagaagtaacatgggaggggccccaaagatcagtgtggagcaactcaagtggctgagaggctcgagaatttgactgagaataggataatttatggctttttcccattttgtatgcttcacagaatttaagagttttaaggttgtgtgaaatatttttaaggttgtgtgaaatatttattttagacaagattttggccaaagtttttggtgctgggtgacataatttggagtgccatatattaacatcagaattcaaattagatttggtgtataggcaaactggtgtatcagaattcaactcatttttattaataccagtaggattacaagattgtgcagctggtgaaacagttgaagtacaattggaaagacaactcttagactcgaaactagaaacataggactcagtattgtctaaggcagatgccatagtagtggccatgtgacattgaagctccagatcaggttctgaagtgggttgttggggaagcatgtagagaccatttttaactctccctttg

SEQ ID NO: 50012 - DNA, 1984 bp, Cannabis sativa
atgtcgacaagatatagtcgatcacggactctctagctattgctgaatcaccaattccagatcaagatgttgttcttcagctgctaaatagacttggaccttaattcgactctgttgtttcaggcatcactgcacaaagtgacactcttactcctgaggagatgcaggctctgcctctttcgcatgaaagccgcctagaacatcagaactcaatcactgatctcaacatgaaattacaagccaatgtggccttctttggttcaagaactcttgcataccaccacaaaagctccaagattggcaatcgtggaggctttcatggagttaatcaaaataacatgccccagtgccaattgtgtcttcgatttggccacactacccttgtatgccattacatgtttgataagaattgggctcctcccaaaccaggcacaactagtcaaccagctcacacatctaacccctctcctcgtgctcttgtcacagagcatgaatttgactatgatccacaggcctatgctacttcattcttgcctgactttggagatgattcaagctggttcgtggaaactggtgccaccaaccaaatcagttgtggtactgaaaatttggacactgcagtcacctacactggatcagaaggtgtagcagtaggaaacggtaagaaattgtcaatttctcatattggatctagcaatttatcctctattaattcaatacctcttagattgaattctgtgcttcatgttcctaaaatgacaaaaaatttagttagtgtgtatcaattatttcgtgataatgatgtgtttcttgaatttcacaaaacatgttgctttgtcaacgacaaacaaactgggaaggtgctgcttaagtgaatgcttaaagaagggttgtatatgcttgttgatcatgtccaagaaccagatgtaaccaaatcaacacagtctatggtttatgcttgtaatcccattgctctgataccatgtagtaaaacagagtacaaagaaactaaagaacacagagacaaaaaagaaagaattgaacatctcactttattgaatgaattgagatcagtatttatacaataactagaagaactaggcaagttaaaatgaaaaaactgacaacatcatagaaccgtttgacaatagtactcaactaacttaaccactaattactgaaaaactagttatctgttacaagtatgatgataatggtagtatggtgataactagataattggttgtctatgtatagtagagaatgacaggctcgatatgtaggagaagttagtaggttttattgatttttagttattcttggttacatttccactcaacccacgcatgcttagtatttattaggaagctaaagttggtgctacaagtttttagatttttcttctttattttacaattttaactttctaattcattcgagaattttctattttcttagtgctacaataacttttctaaatattctagacaattctaacttaattagtttaaaaatatgtagctagaatagtctaaaataaaatcttctagatgtttatgaatataagtttcttagaaaattctaaaaatatatatatcaacttctaacacaagtaaaatttttttagggtattttcttattacttgagatatatatagtgcaaaaatttagagtaagatcgtattatttttgttcttattggcaggaacatttttattttaaaacatatataaaaagattatagctaaaattttcttatataattttcttagttgcacaacttgcttttttttttctttctaatacacatgcagtttactatttagagctatattttcagtatcgtaataattattgtgaatatttcgaaaaaaatgtgtaatatttattataaccataatgtcgacgaaacatgtcataaaaaacataaaaacataaatgttcccaatattaggacgtgtgagtagggttgttcatccgatcc

SEQ ID NO: 50013 - DNA, 1594 bp, Cannabis sativa
atatatatataaatatataataacaaccctcttttctgtttttttaacaattttttttataaagcaaccacttttgtttttaaccagaaaaaataatttcatgtgtgcgttcatactaccatattatgtaatctctatttaactttaattttattggtaaaaaaactaccacataccataaggtataaactgagtcctacaatatgttatttttattatttttgtaaagaaaatgtgtatatatatattttgatagatataaaatccttgtaacttgcattataccattttctgttactagaccaaaaaaaataaaaataaataaataaataaaaaatagaaccacctaataggatgaaggtttaacctataattaaataaatactattctagtgtaattatatctagcaagtggaatagggctcccaaatttttttctttctacaaaaattctaggttaggtcccctcttaaaaataagtactattaaaacaaaaccaggttaggcagaaattaatgtgttagtacttgtcaaaccatataactactaatcaattcatttcactacaagaaatctaggatttttacctaccaattgttggcgacaaagtgttggtttttattacgataatatgtgaatacaatagatgtgtagacaagaatgaagaaccacaaaagtttcataaaaattagttttttcatattttcatgaataaaatttctttctatagaaactataactatagaataagatcactactacaaaatattcatttcgtaatactttttaagaacagtcatccaaatgcatgttcttaaaatagatcttggagtttcaggaagtggttattcttaaagaatctagaacaagcatatatcagttgaaaatatgagctcaaattttcgacacggcatgaaatagatatgaaaaaaatatgggattgaacatgataagatatgatgatgcaaattgtcacgacatgacataaaaaaataaacttaagcacgatacgacacactaaatctgaaggcgtaatacataagcacacaattaattagaataacttataataagcgtaacacggtcaaaattcttataataataataataataataataataataataagcaattcaaaatataaaaatgcatataatttagtaattaatttattaattgtaaaagcagtagtgaaaaagtgaaatctaaatacgagcccatataagaaaacaggctgacatatttatgaaaaaggcgctagctcaagtacaacatgatacaaattcaagcacgacataaaaatataggcttacagggcgtgttgggcctactctttaagatattggcatgatacgacatgatccatattttttatggaccaacacaacacgactcatattattgtgagcttttaaaaagggcaattttcatttatatacaagtaaatgtacaaaaaatgtgcaaaaaaatataataacataattctatacaattttacgaatatttacaaataaacatatgtgcttacaattttaacttgttgattacttttaattgatttaaaaaaaaaaatgcataaagctaaatatgtaa

SEQ ID NO: 50014 - DNA, 2920 bp, Cannabis sativa
tatatatatatagatatatgaaattattattaaccaaaaatatattccaaaatattaaaatattaacaaggctggaaaaagtcattacgcattatctatacatgtacggaacttataatatgaattatacatttgtatttttattaataatctctctacatatatatgattatgattaatatatataagaaaaagaaaaaagaaatttaactacagccgttggattatcatgattatgattatgcatgatcttataagctatgatcagagttaactatagtataagagctaattaaactacagccgttggatcaatcaatcaatctaagcacatgaaataccgattgaagttgcaggcgcgaaccgctccgaaccagttctcctcactaacgatccaatctccggcgaaaatccacctccgaaatcaatctcaggaacttcaggaatcgtcgtaagagtacttgatttgtcgtaaacaacgaggaatccatctttcgattgctccgtgttaactcggaagatcgaactcgagttcagtagtttcggtctaaaaaccgatcggagaaatttgttcagagaacgagagatcttcgacgatttcttcgccgccgccgccgacggtgtaggttcaggtaccgcctgtaacggtggattcaccgggtgaggacgaggaagacctcgtcgatctgataagtgaggcatcgagaagcttctggaagagttaataatggcggaatcgagctggcgtttgaaggaattgagctcgaatgaatcgtaaagtgagctcccgcaatcccaaacctgattattattactcttcgccgcgaccttagtctgataattttgctttgatttctccatagtataacaggaaattaaagaagtagtagagagataagtagtgtttggttcgcgagaaaacgatggaaaatttttagagagagagagagagaaaagagaaaattggagcgagttagttatgatgtttggaacctaaaaggagtttgtatagtcacgtccttgccttcttcaccatgattttattatttatatttaattttgaaggacttttcgtgtttttgtaataactttttatttatttatttatttataaaaggctgcgtttaatgaaaataaaagatgtgtagttggcttcattagattattagagatatgacaatttttttaatatacatattaaagttttaagaaaattctacaatgcaaagaatttcaaaaaaaaaaaataaataatctatgttttagttatttaaatattttttaaattttaacacattcaaataaatttaatatgttaaaaatagagtttgaatattattttttatattataaattattttaaattttttaatattttacagaagagaaatgctaaagggcactagtgtgtctagcaccctgttatgtgtcaatatcagtccaactaagtattgagtcccatataatttaatataatagctttagggagtatcgctagtcaatcgcaacgcgacatgtcgagaaagtattaggcagtatctaatagcaatgctctttacaaaatatcttaaataattataacgataataattttttttttatatataaaatgcattagtgcactttttttacgggttttagaactacacccaaagttgtgtataatattgttacaacatatatatatatatagtttttgacattatcttaactgatttatcataaagtattcgatcacattttcttcaagtgtactaaaataataaaggtattttatgtgatgcgacacacatgagctgtaacaaaacattattaattaattaacaaaatatatacatatatataagaaataaattataaaaaattgttgcttgatcgtcttttgcaagctcctgaaaagctaaagagcattaatatgatacaggtagataatttaatatgatacttaatatttaaaatagataaaaatattaaattaacattagtattaagagttttatcattaaaatctaaattttagattaaatataaccaaaataaatctattaagtgttttgctacaattcactctaatactttttatttctccctcaagctaacccatacgatacaaccacgtggcaaatatattattatttttcatgtgactttacacgtgtcctattgtgtaaatcttcacccttaattcttcccatcataataatgcatattaattaattaattaaaaagcagcatatataattcacaagataagaccaaattgttagttgaaaattagtggatatgatcgtgactagtagtggcaaatatgtggtattattattgtgcttaataattttttttttagtattatattatcagtgtaattaaatatcaaatatcatatttaaaataataaattttaaagaaatttgtaactaattataggacattactaataaatgtgtcaaaactaataatactctggtactcaatatgatctatgttatatgttggaatccaaagaggtaattgcaatgtgttctttcccaagaactttatattttaattgatccaactaatattaaaaaaatggtaaagtaaaaatacttgaaaaataatatatagtcatgttaatagaataacttggtaaataaatacataaagtagtaaagtcaaagtcaaacttgtacttgatgtaaatatggcttgtctaaaagattagttgtactggtcatataattaagatcacgaattggatattaatattattatacctgtaaatatatatatatatatataatatgtattagttttacttgcaaaccaagattgtaaaccaacattaattacattaattaaaaaaaaggttaaataagatctttaaaggtgatagtgatcggacaacgtgactataagatgaatatttataaataatata

SEQ ID NO: 50015 - DNA, 2715 bp, Cannabis sativa
  modified_base (2675)..(2676): a, c, t, g, unknown or other
gaaaccctcgagtcgctctccacaatgacaaacttggaacccagctccttcgcaaccgatagagccaagcagcaggccgccgccttaccacataacgcatcagagaagtccagcctagccgattgaacccaaaccactttactaaggtagtttctggcaacaattgcactgcacatgctaactaatcccacttttacatcgcaattcaacttaatccaatcctcaaggggaagggaccagatctccttctggcataagtcggggggaggggggaaataaagaagcataaaaatctgcaaaagaagtacaaatagagtctatacacttcttcacataaactgtaatattattgtgaactttttcatttcgggtctgccagatcgtgtcaactacaaacgaaacataaaggaaaaccgcatcagcatcaattcccttgtgtttcaggtcccagatgaatttcacccaatctcacatacggataccagtgtcacaaataggataaatgccccaaggcgaggacctccaagcatgtaatgccacatcacaagagagaaataagtgtttcaaagatttctcgcccgtcccgcacaaagggcagctcgcatcctgaataggaaatctcttcttgataacatcacgagccgagagagctttggaaaggataaaccaccaaaagactttatggcactccaaaatttactgttccatagcttgttccagagcgacgaagcaacctcacaggggagccctttccatgacctggaaaaggtaaggccgatttacatgaaaactgaccattgctttcaagagtccaaacccacttatctttgccttggccagaggggggcccactttttaaaattgcatacacgacccacttatcttatcctcgtaagttaattatataattatacacgctctaataattattcgtgatggtatggatattaatccgtaaattattgggaaaaaactatagttaatagtaactgtttttgaaaaaaaaaattacaataatttattttaattttaataaaatctaatcaaacaccattctcaatacttttcaaactcaatttcctcaaatccaattatatgtattgaataattaaaaatattaggtaagcatatcaaaacattattaacaaaaatcaaacaataaccgtaaattaataaaattctaaaaaagtaaattaaagatattaagtatcaattaaattggtttaatatattttgagaattttttttttcttctgagacaattattttctttctttttccagtcatttccttacaacttctttacttcttcgaccacaatgctttcacctttctcttcttcaactctagccttggttcagacggttccctcactgacttccattctttccggcatcaccacggctttgaccccaccatacaccgttccacctgcccagaactcccattcgttctttactggtaacaatccctttcttagaaatcaaggccatatgcttttaatgataactcttttttcttgcaaattaaggcctatctcgagcctttttcaatcgaccttctcaagatgatcgatatcgctttggaactggagatcaaccaaacatcatttctttgtttctcttaactggccaagataacttttagccttggaagcgagcgacattgattaatatcgctgccaaaaataaaacttcattcattgatggcactttactccgtccatgattgaatgatccctctctatctgtttgggatcgatgcaacaacactgtgatgtcatggatttttcaatctgtgtctcgtgaaattggtgctagcatcatgttcaaaactattgcccgtgaaatgtggacaaacctccatgatcatttcaatcagagtaacgaccctcatattctccaacttaacacctctgttaacaatgttaaacaaggtgataactcggtcactacttatttcacccagttataagccctctgggatgaactcaacgagtatcaaccaaacactccttgcacttgtggtgctatgcaaaaagtttaaaattactacaccagacaccaaatccttcaattcttaattggtctcaatgaatcttactggggcattcgggctcaaatcattctctttgtctcaatgaatatgttggtgcttgcgttcaacaacaacgttctgttgaggtctacctacacatgaattgtggtgtgtagtgcctttcaagttgtaaaagttagtgagtgttaattctttggcattatcacttctaatagctttgatattgcttttgtattagatattgagaaaagtaaagaaattttggataatggttggggcatcagattttgcctttagcaggtagatccatgtatatcgtgaatggtcatcgataatagttaggaagtacctgtatccttcaattaaaggtatgggatatggtccctaaatgtcaatgtgaataagatcaaaaacaacagtagaaaaagtttgattagatggaaaaggtaattttttttactttgccatatgacagattggacaatgaaatggaatagaagaatttgtggagaaatgtagctgtttattgattttattagtaatgagtacagaggggtgacctaggcaattatgccattgatgtttgtctaagagaactgttatagtgagatttctcnnacctagaaactcgagaccagactcttgtttagaggacac

SEQ ID NO: 50016 - DNA, 1785 bp, Cannabis sativa
tgacaattaaattaaaaataaagtgtcaagtgtaaaatgttttatttttaatttacggtacaaatactaaattttaattttcgattgtagataaatatttaaatttaaattttaattataataatagataagtatttctgaaattttagtaggtatttggacattaagtgtcaaatcattatgcggtgttctcttcgacagtggacatctagtgcccttctggtcctcgatccgtaaggccttcctcgtggtcgctctattgggggttcaatttaatctacgagtgcattgttagcgttctcgtgtgccacaacagcctcacactctaatttttcgttccttcagctagattcgactaacccctgtcgaagttggcgattttgtaattccaccaaaagaatatacttagtgggatcatatgcccccggctctctccttctttcttggaatggtctttacaatattagttctttcaaagtcccattcaggaagacctcttcttatatttggatcagcagattgagtcacctaagttccttgggactcttttccaaatgtcttgagggatattatccataaagaaaagttttagttttttctttgggtagggaggtgtttttagagtttaattatcacagactctcaatgaaagcactaacctattaactcagaatttcattaacataaatgagacttgataattaatgaatttgtaataaaaatttaagggcaatttattattatagaaagataaagaatttttttacgtaattttgtagttaaaatctacatactccatacgtcactcttatttctaaaattttatttacagaatacaatgtgacagaatttttttaagtcaaaaaattagttgtcccctatcattatgtgagtactgctatttataggattaagctagtagttactttaatcttatctaaattgtagttataaaatttagacattctccacgtttcatatatctacacataggtggaaacagtttatactttttaattgaaatgaataaccattaatctatgatttagatcgtcatcatatttttattgagctggctcaagatgacactttgcttccttagagaatatggtgatggacaaatgaatactgaacacagacttctttgtaaattattgggattcaaaagatattattaagattcaaaatatcaaatcttctccgtgatcgctcacagtgtggtttagatgaataattcttctctttataagtaagctttttcaagttgtatctcttgtacaaacaaaatagaaaacaattacttttgcaataagtttggtcttctccttgaaagtaatacctttcttgcgatatgcaagatgtttgttacaaaagacataagtgtctcgcgtataacatttgtcttgttgataattttcgagaagggctccatacaccttgtttcgaggaaaatatttaatgcttctcattcgtacacatgtcacgtatataaatttattcattgtttgaaataggagtataacagttattatataagctttagtatatgatagaacatttatagttatcaactcttattttaacatgtatcctcttgtatggttataacttacatacaacccttgtatgagctcatcaaacacaagtgtaacacttttacttcttcatttcttagttcattttctattatttgcttgctacatacttgtcatggtataggaacaccacaataaagtctcacagtcatgaaagataatgaagatgggtatttgtctactccccttc

SEQ ID NO: 50017 - DNA, 882 bp, Cannabis sativa
tactcagttttaattttttttcgttggtaatgaaattaattttaagtttcaagattcttaaagagtttagtttacaagtataacttttacatgagatttttattataaattagtttaattttttatttttttattttccagtcacataagtaattacatggatgaacatgttagtatattatcaaccaagtcataccttttgcggccactttataaaatgtataataaatcttaatttttactaattaataaagttaaggcgacatttttaacaatgtaatatatcagctttattcttttaacaaaaaatcttatttttactaagttaagtcagtgttattaacaacactgatattacagatgacacaattatataagttacaaagtttatgagtaaaatattttttttttatttttttacttaatatcttaattgtcattgatccagttgttacagtcagaatttacaaaaaatattcttgtaagtttgagcatatatctgttgaaagttcaaaaaagaaactaaacagataaattttatccaagttagcatatcaattttttatcggagtatatttgattcatttgattcgtactcgagtcggataatgagggtttcaaaacttaacgcctatttccaagtgtgtaatcttttattatataatgaaaataaaaaaaaaaattatgtgtacaatataaatctttacacatatttgtttccatcttttttttaatccttattatctttctagtaattatttatatcaatactaatgaatgaaaaatagttatttctattgattatttgtgaaatgtatgtagaattaaaaactgcagagcatagaaatcagtaacaaattgacttggttagaactatttttc

SEQ ID NO: 50018 - DNA, 1021 bp, Cannabis sativa
ttaatgaggaagaccaatttaatctttccttaattgaagtctttccgtacaactctgccacgaaaaagcctcctggtactaagaattattcgagataaaaggatgcactgaagcctacttaatcttaccccagcttctcagacgcagaaggcaaatggtttctcttggaaccggaggggtccaacggggaagcttactagatgatatccattcaggtattcgaaaggtttaaggcggatatcgaccatcatggtagtgcgcgtaccaccactactaaaggagtaagctttgagcgatacgtgacctctacttttaaaggttgaacctttgcatgccccgtgtccctatggtacaaaatagtccccattatccagctgatacatgcatgggcataatgttccccacgggatcattcgatcagctctaatattgcatgtaatttaccccaatagtgggatttgagcataacctttgggcaggccatgtgcctgtccatacccgccacttagcttataaatatcccttgattctcatacgaagggagaaacacaatttgcgtagctaaaactctatcaagattactctaggtcttcatcttctccaagagaaacttagagtaaagaattaggatttcctgctaaaattttataaacacatcaaactcaccctaataggctaatagacagactcgtggactaagatttgttaacatttgaaccacataaaaaaatcatcacctgttcatttctgcaatttataatttctttagttcttaaatatttagttttcaaaaatcttagcaaatattttggtgcttttattgagagctaaagaaagacataacccactgatgcttccatggtgttcacatgaaagacagctccttagaagactcttcaaggtggtcttaagacggtcgtggagcaagtaaaccccctctcgccagagcaagcccagtcgagcgatgcgaggggtggggatacgtccagcgtgaacaattgaggggacgatccaaaccagt

SEQ ID NO: 50019 - DNA, 945 bp, Cannabis sativa
taaacgtatcaatgttgtataaggagtatacatataaacagttcatggtgacagttaaacagatgacgccttaactttgctactggttcagtagtttagacggttttaccgccaaaatttgaactaggagagttaaatgcaagtgaaacaatagttgagagaatttagccgccaaaaacttttaaattaatattaattttagtttctacactattaaaataataattttttaagatatatacaatatacataaataaaatattacttatatattattaaaataagtttagagaatgcactattcattatctatatgtaaagtaagttgcattggtttgagtgcatctctattatacatatatgatttaagagtattgctatggagctccagtggtgcctagcacattctataggcaacatcccacggttggttagcgatatttcttaaaaactattttttttaaagttatataggactcaatatttaattacagtaatagcggtatgacaccgatgatggttctaagcactagtggtgtcttttagcaattcttatgattagcattactaagaccttctataagtggcgtcccacgattagttagtagtattctctaaaagttatttttttaagttatataagattcgatacttaattgcacccatagcaatatgacagcgaggaagatgttagatactagtggtactttttaacaattctcacgattgaaaggagttgatggaagtttttttttattacatttagttaaaaaatttagaaaacctctattataaagaattgttgtaagatactctcatctactctattctttaaaatacataacaaaaactccactttatctattttacctcaaacttttacattatatcatacatcaacttctctattttttttttctatatatatcatttaaatattatatt

SEQ ID NO: 50020 - DNA, 1003 bp, Cannabis sativa
tagttaaattattttgtttggcttataacacgataatatgataaattgggtatagaaagtaaatttaaaattgctaataagttatgtccattgtattatgaagggaatgtttgataccaatttttgaaaatatataagattagattattcttatacttttttttttatttattttttgagataatattattacctttttatgagataattttgtttttattcagtaataatttttcaatatttatcacaaacaattaccatgccaaatatgagaatgtgaaagaaccattcctattaaaacattacacaataccaaacaatccattattagtgtaatataataataattttcttatatataaaaagatctaaaccttttcatgattacataagactttgttaaaaatattacataagactttattatataaactataaagcattcatagctagtcatggtgtttttttcccttaaattcctagcctcatgtatctcactttttaacaatattaagttatggttttatgagtttattaagagttggggattttgaaaattacagaaggattaaatcttatagttagttttttattctttcgtttaatatattgattttttgtttaatttaatttatttttctaaaaaaaaattaaatccttactatcaattctctatttttcgtgtactttacaggttttttttttatttatttttttattttgttgcttaatgttgaaattggatggaagctttgaaggggttcttataatttgagcaaaatctgtagatgcatgtgatgctagcttggagttgctttgtgttcatttttattttgatgtctctaagcattctactaattttttattttcattttttaatttttttctcatttttctaaagtatttttattctatgtcatctcatgtatgaattagttgtgcattcagagtaggatgaatttgctcatcttttttctgtacattctatttatttattttagta

SEQ ID NO: 50021 - DNA, 3678 bp, Cannabis sativa
gggaaaaaggataaaagactaagaacatcactaattaaatctgagaattcggaatttgaattgaagggagctttcaaggcattgaccaccataagagcatcagtatcaatatctgtaataggtaattgatgttgtagagcccaactgagactgtgaaaaagagctttggcctccatttcatgagatttaaaattccccacaatcggcatagagagggcagcagtaacagatccaatttcatctcgaagaaccgcacctacaccaatggtatttgaggaattctgggctgctgcgtctgtgttgagtttatagcctgcagtagcaggtggacgccaaggggataaagcagcagcagcagtttgagtcgtgggaggctgctgtgaaggacttgggacagcagacgaggctgctgcatcaacagttttgtgttgagccgctcgaaaattctgcagaaaaactgatgcaaacacagccaagtcagtagcacgtcttgcaaccttaccatgaaccactttgttcctctcgccccaaattgcccacatcgtacaaaagagttgttccatttcagctttggtgtgtaaagatgaaagatgcagcaagtaatctccatttctcattgcaatagccgctgaccaattaaaactgaaattgaaagatcgccaaacagccttagcatatttgcaaccgaagagggcatgtcctgttgtttcccaagattgtttgcaaatggagcatgtggaataattgatgatttttcttcgaacaagcgatgtagcaacaggtaaagcatcatggataacacgccaagcaaagatttttaccttgtgaggaatttggagagaccagaaaagtttccaccactgtacagccgaagtggaactggagcaaaggtcttcgttatccaatgaagttgcaaggtgataagcactttgaaccgtaaagttgccggaagagtgatgatgccaaataagcttatctcttgtgggaaagaagctcaatggtaaggtgagcatcttttcaatgtcaagaggactaaaatattgttgtagcaaagggatattccattgcctttcatcagtgataagattagccaccacaccattaggtggtcctgagtatgtgatcggtatgaaggatgaatgaccagggagccaaggatcaaaaccacttcttattgttcggccttcccctattttccatcttaaaccatgaaccaataactcacgaccccaacgaatcccttgccatgtaagagaaggagaatgtcccatactagcctcaagaaacgagttgtgagggaaatatttgctcttgagaagtgtactaaggagtgaattggggtactcaatgatcctccaagcttgcttagcgagaagggcttggttaaattgaataaaagaccgaaaacccattccaccttcacccttagttttacaaagcaagttccatgagcgccaatggaatcttaggagccaatttttcattcaacccccaccaaaaatttgccatcatactttcaagttgattgcaaaagtatactggcaatcggaaacaactcatagcatatgtagggatagattgaacaactgctttaagtaggacctcccgacccccagcgagaatagtttttcactccaagattgcatgagtttccaaattcgctctttgatatggctaaaaagttccttcttatcccgaccggaataggatgcaaggccaaggtatctctcatgacattcactgatcggcattgagaggtgtcaatgaaaggaaatctgggcagccaatgttgtgtttggagagaaagacataacagacttgtcccgattgatgaattggccagaagctttatggtaagtatctaacaccctcttgattgctaggcatgaactttcatcagcttgacaaaacaggaggctatcatcagcaaagagtaagtgtgagatcatgggagcccttcgtgtaagtctgaaaccatgaagattgccttggtcttgctcatgttgcaataatctagataagccttcagcacatattaataacagataaggagataatgggcagccttgccttaacccccttgtagggaccaaagagccagtcacttcaccattgataaggaaagaaaacttgttagtggtaagacaattcatgataagtgtaatccaaccactagcaaaccccattttcttcataacttctttaatgaaaatccattcaactctatcaaatgccttactcatatcaagcttgagagaggcaataccatggcgcccagatgtcttattcttaatagcatggactaactcaaaagcaaccaagacgttgtctgtaatcaaacgatttgctagaaaagcactctgagtttcagagataaccaggggaagcacctccttgaatcttgcaactatcattttcgtaaccagttttgagatgacgttgcaaaggctaatcggccgaaagtccttaacatgatgcggcttctttattttcgggatgagagtgattaaagtgtggttgaagcttgaagggtcagcaccattgttaagaatattcaaaacggcacgagatacaagatcaccaacaatggaccaatgttgttgataaaacatggccgacattccgtcaattcccgggctcttgtccgcactcatatctttaagagcattttcaacatctagcgtagtgaatggagcaagcaaggagtcattgtgagtagcagttaccaaggtgggaatacagccgagagtgtgctcaagagcattatcatcaataggaccagcagtgaaaatgtcagcataatagctatggacaatggaagaaatctcagcattagaagtagccttaccgcccatatcattgtagagaaacttaatgcggttgttggtcttccttgcatttgcttttgcatgaaaaaacttagtatttttatcaccacaagcaagccaatcgacacgagaacgctgctgccaatacacttcctcttgctctaacaactcatccaaaatagattcagcatgctttagatcattaaagtgagtgccggtttgggaggaagagttattgagctgctcaactttggtttgacaagccttgatgtttctcttcattttcccatacttatgagtgtgccactgttggagcttttcagcacaaagatttagattagacataacagcagagatcgggtcatgggaatcaaaattagaccaagttgcagcaatgatatctttactttcggggtcggagagccacattttttcaaatctgaaacggcttttacgcttactgttgctgggctgagaagaaagcagttggaaggaggcactaatggcgcgatgatccgattgaaagtaatcaagatgacaaacatgaggactttcaaaaaaggaatcccagtggctgtttacgaagcaccaatcgagacgttcttttaaggtgttgggagcagttcgatttttagcccaagtgtaaggatcaccatcaaccaatgtttcacgaagacaacccttgtcaagagctttgcgaaaggcatccatttgagattcactacggagagcccctccggatttactattgttggaaagaatttcattgaagtcaccaataacaaaccaagggagttgaggagcaacatccgcaagtcgttccaataaagtccatgacgcttgtctatta

SEQ ID NO: 50022 - DNA, 1610 bp, Cannabis sativa
atatatagaaataaattatgtcattaattaattctaatcgtaatctctttaatattatataatatctttggaaatattcttgataatgctaagtttgaaagttgaaaataagaaatatatagttatcacataacattaaattaacatgatgataacataataatcgtgccttaatgatttgaaagagattattaatcaattaatttgaaatatttaatagacattaatacattttttattgataataatagatatatatattcaaattgtacatcatattcaaacataattaagattgttttgttacttatttaattcgtggatttttttgttgcatatggatctaattattaatttgccattagaaaaatctattagctaacttcaatatgtttttgagtcgtaggggctaatattgatgataatccatactcatttttgtgtagatttatacagatttttagataagttgagttgattttaatttatatatttctcaacataaaatattgtgtaactatttcataaatatatatatttttaaagaacatatcttaaataataatcttgaataaataaataatatggaatagtggtcactcatagcaaaaacccagaaaatctgcacaataagagtaaaaagttaagagaaatattttaagatataaatataaaaatttatattaaaatagaggtataaatgcaaaatttacacacaaaaaaaaaaaaatcattaaagtgtagtaaaacatacataatttttacatttaaaataaataaataaaaaaaaaaaaacacaagtggggttatgaagctatccctgttatttttcggtgatggtcataaacatagtctaacaggatagtattttcactcatttttctcataaatataatatctcaagaatgaccatcaccgaaattcaaattattattattaaatgagtatttttactcatttaataataaatattttaaatgagtattattattattattttaataataaatatattagtttttttaaaataataataatatatttattattaaaattattattattattattattattttttaaaaaaaaactaatggaatgaactaccacactagaaccctcacatatctctcctcttggggaaaattaatatttgaaagtaaaaaaaatagcctttaatatatatttactttactcaattctattccccaaatcaatatataagagttaaaataatgaaagagactaaacacatttttgaacaacataaaagacagcataaaactaatcttaattaatctattacttaatatatgtattaagtttaagagaaaataaatgaaaatttcctacaaaattgtttgatcattttcttcttgtcctttcttaggagaaaaaaaaaaaaggattgacaatctcaaggtttttcaagtaaaattttctcaaaagggctctcacaaattgtggtatttgcataaaagggtcactaatagtctctaccttattatttcatatcatttggttgtttctactttctagttattaactcttagcattagaagttaaaagaaattttttcataattgatcaaaatttaaaaaaaaaaatta

SEQ ID NO: 50023 - DNA, 1172 bp, Cannabis sativa
ggggggggggggttggggtcgttgtagaaggcccctcaccctaagaggcattccaacctctacttcttattatgaacttttttgacattagttcataagtctctccaaaaaacttttgctagtaattttatttaaaataaaataattaatttttaattttgtcttcgaccccataaaaactagagacaaccttgggagatggggtgctctcactttctgtggagttcggtcgattattctaagctaattaatgccaatattgataaatgcattgattcatcttactttggtggaattgtcaagacaagtctagatttttgtttttgaagatgagcattcatagatgagaaaaaaatagacctctcgttcgttattaggatactagatacttctagcaactcataataattataagtctatttagccacattatgaacaacaaaattataagttctacttacactagcgaaattacaacccaaaacagtacaggaaatcctaatgcaatggttacaaaaattattaattgctcaccgagaagtaactttattaaaagcattgatagtagcttcagaatcactttccaccatcgcacataggagttgtcgtgctacactactgtctccaaggccaaaagacaagcttctgcttccccttgaagatgattgaaaaattgaaattgcttggttacaacccgagagagctttctcaagtgatttccagcaacaacatatgcacacatgtcaccctgtctcactctcacatcacaattcaccttgatccagtccctaagaggtggggaccaaccctggtcaagaaccactgaaggatgggaagtatagaaacaccatagtctacataacagtaagaaatcatatcaatataatgctcaatgttaaacaagttattgttatataccttatcatttcaagcttgccaaatcgtatcaatcacacaatagaagcatataggacaacttcgtggacatctaagcctctcgagttcaaattccaaatgaactttacccagtcccatacatacaccagaacccgaaatagggaatatacctcactgagaggacctccaaaaatagtaagcactaagcaagattacagtgaataaacaaatgttccatcaatattcaattgtcaattgtaatgattttttatttt

SEQ ID NO: 50024 - DNA, 1422 bp, Cannabis sativa
tatatatatatatcaaccaacacatatatataattgagctgagtagtccaacaaagaaagcactaaaatgatctataatttggttttgccctgtcctactttctcctatacatacatatatttaaataatataaatagtgtactacttaattaattatttgaagtttttcaatgaaagattaaaaagaaaattaaaccactataaattatattatatatatatattatattgtagatatacataaatgatgaccagacaaattgaattgaaacaatagaccttcaccatctctgagttcattagtttgaagatatacgtgaaggaaggaagaaagtgcattgattatcaaacttttaattattatatatattttccatggcatttttgtcatttcaagataaatacacatttggtatgatatgtttttatcaaaatacacatttattaataagtatcttgattgccgatcttttgcgttgatttgcctttagctttttctttatttatattttatataattttttttaattaatattaatttttatttaataattatacatatactatttatttatatatatattttaaaataatttacattaataatttttagtacaatactttatcttatatgtaattgtttttattatatacgtacacttatagttatatttgagatattaattaatttaattttttattttaaaagtgtatctaatttttaatttatagtttttattatattaaagagtttaataatattttaaatactttttacttttttttgttctttaagtagaaatatttctatttataagtatggtgtatagtattttatttgttttgttctattttgtgatattatcctataagttttgtgataatgtactatacggagaatttctatatcacatcttaaatcatttgtagcagataaatttttcttttaaattttaaatattattattgtggatattactattttcatatcttaattcacttaattatatttattttataaggaaactcgcagttatttaatcttgttattatgatgatggtgttggattggtctttgaggcatggttttctttcactttttccaagattgacagcttatgtcaaaaaagattggcagtgtagtggatttagttatttgtattctctacgagattttttatttgtattgaattaattaagatctttataagagatttttaatagtttatttactaatttttctgagatgtctctaatttatatttgtattcataaatatacagtgtatacacttagagtggatattgagctagtttggatgaattttctatttttttttcatgatgtactgctcgctcttataatttttcaatgaaatttgtttattaatgttaaaaaaaatgttagacatttatatgtat

SEQ ID NO: 50025 - DNA, 2058 bp, Cannabis sativa
taataattaaaattttgaaaacatgaacgtgtcactttcacaaattttctaaatagttttttttttttcttaattaatattttgcactttgatttggatcttggcccagactccgaatctagacttgattcctgactcggattctgatcttgacctcaaccttggacttggctctgcacatgcactttgactttgcgtcgaacccagacttagagttgaccttggatcccgattcaagtttagactcggatttgaacttaatttaaataaaattaactaataaaaataaaattaaatttacttttgtttgataagttattattattatttatttattaattttgaagtttctagttaattttaacgaccttaaaagttcaggagcataattttagtacatgtcaaagttcaggggacaaaaattctaattagcctaaattataaaataagatttataatttaaagtttacatttaaaaacttaaaattaaaattaagaagatctacatttgaataaacttgcaatctttaagcatttacttgtctttcatttattttatcatgctaatatttgacattaaaataactatattctaatttgttttctatgactggtgtactgtagttattactagaaaataatataatttttgttcttactgtgatacttatagaatttttgttcctgaattattttcttttaaaaaattcattcttaactttaaaaatcgtaaatttgctctccttttggttgcatttcattcaattttgtaaacaattttctattataagattgatccatgattaatctactataattattctcaaactttaaaaataattgcaaatttgttctttcagttttatttcgttcatttctgtaacaattgcttcaagtaaaattgaaccaaagttagtctactataattcgagagtttaaacaaataataattgcatagacaatattttaacgataaaatcaaaaaaaaaatcttaattttaaagttaatgtataaatttttaaaactattaaaattgattccaactagcttaagatagttaaataagccctcatactttaatcatatgtggttggtttgtagtaggaatagcaacgagtagggtatgggtaggtagggtatgcttattccacgaccctactctatgaaaaagttctactcatatttaccatgttactctattatttttgagtaaatattattttgaatcctgtgttttgtaaaagttatcaattggaccttctattttttttaaatgacaaaatgaaccttgtattttctaaaattgtagaaataggaccctctaaaattgtagaaataggaccctaaacttagaaataggaccctaaactgatttttaataggaccctaaactgattttttatcaaaccctaaactgattttttatcaaaataaaacttaataataatttgatttagagatgttatgacaaaattatttaatattttgtatcagttcgtgttagaaattgtcttaaagttgattatattaaaaaaactaaaattattaaaaattaagtcagggtcttatttttaccattttggaaattatagagtctattttgtcatttaagaaaacagagggtccgattgttaacttttgcaaaacacagagtctaaaatattatttatccattattttttgtgggtaggatacaagtattttcttatcgggtatagggtacccacgaattgccctaccctaataaatttgaagaagaattaaaggaaaaattagaagttatagttaatgacataataatactaatatatatgtaattatttaaatagtaagttaattgtattatttgaaaattataaattaattaaaaagtataatgctaaccattaaagcaatataaagtattagaaatggtatacatttattttttgaattttatattttataatatttaatatagaagtatttttttttttttgtatttttcaaatatgaaataaatgtatagtattcaaatgtacatataaatatatatataagagtaatttgcggcaaaa

SEQ ID NO: 50026 - DNA, 522 bp, Cannabis sativa
ctactgacctagtgacatgtgagtaagtgaaataatatgattctactcaataatataagaggtgagaggatcatcattcaaatttcaaattgatcatcttcatcatcattatcacttttgtttttggggtttggaactgtgaagaagcaaatagaaacaataataataatattattataaaacacatgtttgttttccttatcttattcaatcacatatcttcttttttatgcccacaacttccaaagatctacttcactacttatatttataaataattctcatatttttccatatttcaaactgagatagattattcataacaatcctgaaaaaagtgaattttgtcctttatattatttcttctttttggaaaagatttgttgtagccaaaatcttctaaacacttcttctttcctacttgcttttgctttccctttcccattttgccactacaacctccttgcattcattattattttcagaaaaatattattttagtactcattattttaatatagg

SEQ ID NO: 50027 - DNA, 1082 bp, Cannabis sativa
aaaaaaaaaaaaaaaaacagtagagttgagcatagtcgaacctggatgcaagattggtaatgtaaacgacagaaggtgtgttctcctgaaaaagacgaactgtggcgagctcatcggactgcaacttcctcggcgtggtgaccacaaatgcggaggccgggtccacatcggcgatgcagagggaaaaagacaaagctagggaggtacagagaacgaggaaggaatcgagagaaattgaaaggggcttaatggaggagagtagtttggagagggaagaaggttcgaaggaattaagtggagtgatgtggtgtgtctgattttgatgggacttgtgtcggagaagagagacgatagagatgggagttctgcggaaggaggaagatggtggtgatgatgatgatgatgatgatgaagaagatgaagatttagacaagtagagagttggggtcctgtttgttgagcgagaaagtgaagagaaagttggagaagagtggaagaccgtagaaatgagtgaatatgcagccatctctggtctttcctttttttccggacagatgctcaaaagggattgaattatatgatttttcttatatttgcctcctttttcctcattttcttaaaattatttttattttcaatgtcaaaaaaaacactataataaaaaggatggatattcatataagagtaatttacaattcaaataaatatagcaaaataactttggaaaaataaataaataaagatagcaaaataaattggaataattatataaagtattatttttttaaaaaaaaatacatttttaagttgaaagatttatttttatatatttttaggatattttgttaaaacaacacgaaaataataaaaaaactatataaaagtaacagaaaaatagcatctaaacaatattaaaacaataacaaaaaataacatataaataacaaaaaatcaaccataaattaataaaagtataatataaaaatgttttaaaagaccctattttttgtaaataaaatcataaaaatcgtaaaaaaattaaaattacgtttaatcaaatttttgtaatttttgtatatttg

SEQ ID NO: 50028 - DNA, 1253 bp, Cannabis sativa
actgtagcgtgccttagcattagggcgttacagaagcagtgatgctcaagttcattttagatctccactccacatttgcgttaaaagacttgggacaacttaactattttcttgagattcggattatacatactgattttgaaatacatttgtcaccaaagaaatctcttcaagatcccttttgtagaaccaaaatgcagggtgttaagacaagatctactcctatgacaaatggtcttaaactatctcattttggaagtgatcatgtccttgatccctctctatacaagtttattgtggggcattgcaatatgctaaaatcaccaggcctgacatagcttattcagttaacaaagtctcatagtttatgcaatcttcccttgaaatgtcattggattgcaatcaagagaatactcaggtacttggcgactctcttgatcatgggattcatatcactaagtgctccagtttttctatacaagcgttatgtgatgctgaatgggcctctgatcctgataatagaagattcactgctggctactgtgttctacttggttccaacatagtagcatggaaatcaaagaagcagcagactatctccagatcctttattgaagctgaattttacagtgttgctgttgttgtaatagaggtaacatggcttcaatcattactttctgaattgtggatatcatcatcatcatcatcaattcccaaggtatggtatgaaaatctcagtacaataatgatggctggaaatccaatgctctcaccaaacacattgagatagaccttcattatgtgcaagacaatgttcctcaaggccacttacaagtcctacatgttccttctcaggatcaacttgctaagtgcttaaccaaggccattttaagttccagctttcctattctacaagacaaactcagtgtagtctcagcatccacacttagtttgagggggcagttagatgaacaaattatttagtttctttggttagttagtttctattaaagtgagctgtcacttcagctcactctcactcttgttgtaactaacttccccttgtaactaacttttcttctctcagctgtgtatataaaagctcatcttaacaattagtataacaatacaatcaatatcaatacaattcactggttttgtcctactggtttttctttctcttgtttctctcgttcaacaggtaaaacttatattcggtattagtttagcatcaagagcataattttaacact

SEQ ID NO: 50029 - DNA, 820 bp, Cannabis sativa
attaagagcatcaatttaaaaataaaattaagaccattcaaattttttatttggccttgcggctattctcttcagtaccccttctttctttttctcttttgccaagtgcaaattcattcaaacaaaattaagctaaagctaccacaaaggatagctccccaaacttaaaagcactaacggttttaaattatgtgaccatttggaaatagcatcagtaaaattattaaggatctggcaacaaacttaaatataagaaaagactgataaattagaagataggctccaatgagtcaagcctaatattctatcgattacctactaagagtcaattttatttttagttttttttttatgaaaaatcatatcagatatgtccacttaaaatatattgaaacatcacatatagtaacgtgataatttttttttaaccaattatatttatctaaatttagacccactactaaaaaatagtgtcacattattgagtataatgttggtacatatatatttttgttaagtttttacaaaaaaaaaaatattagattttacctaaaagtttataattttactgttacactcactttttttttataaaaatatcatctttttatagaacagccttaaaataaaaaacagaacaatcaaaaataatgttggagtaactaaaaaacaactgtcgaataacaaggaaaactcaacataatacacaatataaaaaatatacagtatttttaaaaaaatttcatcccacaattaaaaaaaataaaaattttagtatgtgatgtaacaaaaaaatactttttttttttatttaagcgtt

SEQ ID NO: 50030 - DNA, 1544 bp, Cannabis sativa
tttaaaaaaaaaaaaaggaaaattgcagtttgcatttctaaacatatcattttgtccttggttgcctacaaaatagtttaaaaattaaacagcattgctattaagtatcaatcatgtttaacaccttcacatgtcattttacaattaattaacagtatttcttaaaaattattacattaaattatatgcgacccgatacttaatcataccaatagcgatattgacatgtaagagggtattgggtatgactggtatcttttagcatttctccaaaatgagtattgttattgagctccagtggtgtctactactttctaaacatgtcaccttacaatttgttaggaatactccataaagttattacattaaaaggggtgttcttattaaaacaaagagaaatatgaaatgatatttctcgtggtgttaatattattttaaaaagtattatattattattggtgtaatgtaatattgagtttcacaatatttaaaactattactattataaaatatcattaaccacttataaaatgttatattataataatattgaatatctctaatgcttaatctctaaaataaatctgtgaatttcgtaaaagcaaacaaaactacaaaatagtctttggaatctaaagaactaataaatgataaaattatttaatcataaaaaaataactcaaaagaattaacaacagacatatttgtttgcatatctagaaggattatcaagaatattaatcttcaaattaatgtaatattaaaatttaaaacaactaattattaatgatattaatctttttagaatccactaataataattatatttttcttatttcttttaggttattattattattataaaaataaatgaagagaacaagcaagctcaaatccttatagaactttctgacatgcagccacgtaagtgatattattttttcattattttatctataaaataaataaataaaaataagtttatgatataattaattttgacatgtgaagtaaagaagacaatttggagtggaattttattttcagtcaaaagatggccaaactataaatgattatttataattattcattttggtcggccaactattgtgtggatataatgaaatttaatttcccaacaaagaaaaataagaagaaattattttttttttaataaaaatgtgatataaataatgaaagatgcttctacaatacatgtctacatattttgatattttaaagaatttttttgtctaattttttataacgtgttgtagttatttaagacattttataaaattttgagagattgaaaatttaacatgctaaaaatatgattcaaacgatttattgcactaatttttttttattttatacgtgtgtaaaataaattatttgaactttatttttatcattttaaatttttcaaaatttttaaaagatgtccaaattaaataactataatatagataattatataaaaaaatacatttcatttttttttaaatacttaaataaataaaaatgcattaatagatctcttt

SEQ ID NO: 50031 - DNA, 1212 bp, Cannabis sativa
tgggtagcgatgaggaggaaaagagagggagaagaggaaaataccagaaatctgagaaggggcggaggtatccaccactcttaccggcattgccttccttattcagctcggtcttttatcgaaggattctctcttctattgttcacgactctactctacattaatattccaaaatagcccgacccgacctctctccatggaatcattttcaatctatctattatttatagattatgaaattttataaaaaaactacaaaaacatgacatttataattttatcacttttcagtagttttttacatttaaatttttttatgatatttgatttgttatatttttagaaacatgatatctgttataaccgaaattcggtaagcatatcagagaacgacacgtgtcgagctgggaagaacgaagaactcaaacatgcaaacgaaagtacacttagcatggaataacttgttggaaacataattcgcagagtatatttataattcagttggctgaatagccctctgcgagacaaatacgtacgaactgttaatttatgtattgacgagaaactatatgggtgcacgtgtgcatgacgaggcatcaacctcactgcgtggaagagaaacgataacactaaaaacacttagcgtatattacacgatatactaaactaagtgtagatagtttgacgagtcaagataatagacagtgaggcgtttatctcgctagaagatggcgtgcgtgcgagaaaggctatctcgacaccagaaaatatagtatcaaagttaaaacaatattaatctcaggaagtcagatgacaagcaactgctcgccatcaaagttaacttggctccattctcagcgaagacaaacctatgggataaggtttaccgtatatctttaattacgcggtcatctcggcccgataaaagcaggatactcgaagttgtgtgaattataaaagcctcatttatttagcttgatttgtaatcaaatcccataagttgagggagtaattgttgtaacgattatcgtcaacttttgtaaattactgcccactatgtaattataaatagtggcaggcaagatcaagaaagggggacgaaaaaactcatatgaatgaggccctgaaaaatactcagaattctgagtaagattgactcgtggagtataaagaattttaactccaaaatcacgtaaaaaaccctgtgttcat

SEQ ID NO: 50032 - DNA, 893 bp, Cannabis sativa
ttgaaatttttaaagtagagatttttctcatggtctatattgttcaatacatttttttttcttttttttttttataagagaatatttcattaaaacgcaaaatcaaccgttataggagcacataaaaatttaagacatgcgtctgtctaaataaattctcctacagaataaacataacacgaactattaaatcactaataatagagctaaatagctacaacttggattattaacccatgatgccacaacttttgaatcacactctaccctacttagtgaaaagcccaaactcaaagcccattgaagacccatcttcaccttaagcaacttagcagcagccactgagaaacctccttcaactcccacaacccaagaagcccaaatcatgcctttcccatctcaaatgaaacctcccgacccaacaaaattacgacttgtaatcattgaggcatccatctttaaggagaaaaaacctattgtcggcggtagccacagttctccaccacctatttgactcacccttccttgcctaaaccctgttgctcgtcacaggaggacaagaacctctactcctgccctcctaaaattctgccagtgcattccacgttagagccaccacaatatccaaccgagattgagcattcccaaacaatatccaccacaccaccatcacaaacacatacttagcaaactcttcagatggaagatcatggaagagataaactaaaagatcacccagcattccttgtctctcacgccacaatagtccccacaaatctaactccttccaaatcacctccaatcatggatagaaaactagagcatggaaagaaatttcagcttcaacaacaccacatctggaacaccacgactccataggtaacttcctcttt

SEQ ID NO: 50033 - DNA, 1281 bp, Cannabis sativa
ataaatcacttcaaatttcttatattgataactaatcagatcgtaaagagttttatttagggcataaaacccaacagtgtagaagttaccactagccttgatgtcctccaattgacacgagtttacacactgtaagaactcattatcagggtaaaatttgactttgtgccccactctttcttccttcgagaggatgtcattgaaatcccccattaaacaccagttttcatcagtgttcaagtccatcaagtctttccagaatatccttctctcacccctgttatttgaagcataaacaacagttaaaagactgcaaaaaccttcaactgttgacaactttaaatgcataagttggctagtgcatttaaggatgtcaacagtgaacctccaagggttcgaagcaatagcaatctttccacctctatgccaagcaatattagaagaaaaacaccaattttgaaaaacattcaagtacaaggtactaagctttggagccttgactctagtctcaaggagcccaacaaaatcaaccttttgggaattaataagttgctttattaattgttgtttttgttgattgttggctcctctcacattccaacatagaagtctatccattggagagagagggagctcccccctccagtttcaaccaaatttgcataaatctcccctatttcagcagcctcctctagttcctccagaacctgaaaaccattttgcacggctttcattgatgaacctgctgatacaaaggcattgctaacattcttttttctagtgtcagcaacctttgtaaagccttcattatcaacttgcttctcttgtctcatgttgtctttttttattacccactgctgtacaccagcagatttcttcttgcagtcagcagcaaggtgtccaacaccttgacaatgtgagcatgaaaccggtgtccattcgtatctaacccaaactgaggtattccagccaaattcattctcaaattctatcatatcgggcaagggctggtccattagaacctcaattagaactctagcatagttcaatctctctctttcctttgtaacattatccaacataattggcttcccaatctgcccaactatcttaaacaatgatctttggccccaatacttcaactccaaatcttccaattgaatccaaataggcacactcttcacatcctctttcttgaagttcacatttggatcccatttcttcattataaccaccctcctattaaaaaatataaaacccccattcaaaatctgatctcta

SEQ ID NO: 50034 - DNA, 1295 bp, Cannabis sativa
ataaggtatcagatcaagtggtgcacggcttgtagatgaggagtgcgaggcttagccatgaattggctaagattgttgacagcataggtgatatccggtcgagataaagttaagtaaagaagtcggccaatcaattgccgataggaagatggattatcaagtggttctccttgttcatcatcaagtttgagtcttggatccataggggttttggtaggtttgctaccaatgtatccagtgtcttcaagtaactgaagtgtgtactttcgttgagataggaagagtccttcagttgatcgagcgatctcaaaaccaagaaagtactttaagggaccgagggcttttaagctgaatttgtggttgagtgactcttgtaattgatgtagaagaggtaggctaggtccagtgatgatgatatcgtccacataaacaaatagggcgatgaaattgtcattagagcctttggtaaacaaggtatagtcagctttggattggtgaaagccatcatcgagaagagcatcagaaagcttgtgataccattgccttgatgactgtttaaggccataaatggacttgtgcagcttgcaaacaagtgtagtattggaaggggcagcagtaggcattggaaggccttgtggtaatgtcatgtagacttcttcttggaggtcgccattgagaaaggcgttgttgatgtcaagttgaagaatgggccatcgtttgattgttgaaatggctagtagcaacttgaaagtaaccatcttagcaaccggagaaaaagtgtcaaagaagtcaagtccttcttgttgagtatatccttgggcaacaaggcgcgccttacatcgttccacggaaccatcactattatatttgattttgtaaacccaacggcaaccaatggcgcgtttgtttcgaggtaagggaacaacagtccatgttttgtttttgatgagggcaaagatctcggtttgcatagcttgattccaaattttgatgtggacagcttggttgtatgaagttggctcaaagagggctgtaactgcaagaataaaagctttatgagaatcggaaagtttatgataagacaaaaatttatcaagagagtgaggggtagaagatttgtcattgatgacagaatgacactcatagtcgcgaagatattcaggaggttttgagactctgctggagcgtcttaaattctgagattgagggcagtcaacatgtgtagtgtcacacgatacaacaacaggtggatcaggaggggctggtgtggctgtttgatcgcttgctggtgggga

SEQ ID NO: 50035 - DNA, 1800 bp, Cannabis sativa
tgaatattattacaaaaagaaaaaagaaaaccaatagtttatgaagatgccttgaaccaccattggatcccattgtgcctcgtcgaaaacctatgcaccaccaaattggaaatgccttgaacactgatccaccactgtaagattgcctcatcgtacatccactgccactgagcgtttcttgtcaaattgtactccatgctccacaaccacagggaaattacagcgaagatgggtgatgtcttcacagtagccgttatatatatatatatataaagaagtgagtgtataaaaattatatgaaatcaaagagagatgagttgaacccgaagaaaaagaaaaaaatgagaagaaggtatggtggaggcggctatgattttctttgagagttagaagagttagaagaaaagaaaatgatacatctatatttatatttgtaaatattataagaaataaaaaatatactaaaggtttcatgagaaataaaattgggagtcgcgcgtgcgtactggtcccaataaaaatttatataatatataattttattattttaataataataataaatataaaaagtaaagagagaaaaaatttaagagaattgagacttatatataagtgtgtagattattaggaaattcggcacgacccattgtggtgcccaattgtgtcgtgccaataagttattattcttgtagtgacatacacaacaacataatgttaataaaatagaaaaaagagggtgcataaggcaagtgattgtaggaaaaaagaagggcagaaaaaagagtgggctgtgaagaatgataataaacagaaagaggtggtagtggataaagatccagaggcttttcatccggttgtcaagggatggagagtcaaaccgacagctgaaggagcagggacatcaacttctaattctttttgtgcattggaagagccagagggtgtcatggaacaagttgcaagggctgaacaaatagaagacaagcagaatagtacaaaaggagggggagatcctcctcttcttaatggatagaattcttagttggaatgtccggggcatcaatagccttaataaacaaaatctggttaagcaatttattgctcatcagaaaattgggctagttggtctgctcgagacaagagttaaggcttcaaagttgggagccttatacttaaatatgtttcaaggatggtgttttacggcgaataatgcgtggcataagggaggtcgaattatagtagcttggaattctcataagttcacagtcaacattattagctgctctagtcagctagttcatttgtttgttacaatggtagataaaggagctagtttctttgtttcctttgtttacggttttaacaatgctaatgggaggtctgtactgtgggaagagttgcaaagatgtaatacagttgagccgtggttaatattaggggattttaatgaaattctgtcaaaagaggaaaggattggtgataaagctcggtttattgctttggattttcagagttgtataaatatttgtcagctggaagatgtaaaatttagaggaagttttttcacttggagtaataagcagcagggatcggactgtattttctcaaaaattgatcgggtcttagctaatcaggcttggctagacacattcaagaatgctgaggctgtttttctctgtgaaggaatttttgatcatacacctgctgtgttgagtatatatccggatacttcaggggggaaaaaccctttaagtattttcgaatgtggaagcaacacccgcaatatgatcaaagaat

SEQ ID NO: 50036 - DNA, 1142 bp, Cannabis sativa
atatatatatactcatttctaatgaaattaatatatactcactaattgtgttatgagcataattaattaattaaattataatttcaggagaggcatgtttatgtgctaataatcatatatagaataataataatgagatgatttattctgaaatgagatcatcatgatctggatttattagtaaataattatataagactaatatagttttttttatatatatatttattagttatatccacgttattaacatttttatttttattttttttaagaaaaattaacatattttaatttacgaagaagaaaaatgaataagtaagaaacaatatgagaaggtgaatctgttagagaaatgatgtgaagtggccccagttatataaaaagccaacaaccagcttttacaactgaagcaattgctaaagccaactaattactagatatatatatgagctatatatatatatcaaggcttgtatatatatgtttccaactaactatattagtctccaaattaatactgttttacagttacagtactttcttgatttgtggtaagcattgtggaatattaattgctttgagttaacatatagctctctcctaatcttactaactcttgtaagaattaatattgtattttcattaaataataatggaaaatctaaatgaataagacgcaaatttttttaaaaaaaatacataatacactaaaaataaaaaaataaaattagatgttaatatgagttttttgtttttatttttacgatattttattttttttgctaattaaatcaatagtaagttgtatttaatgaaactgtcccaagaaaaatggcctgaaatttttttctatacatgaatataccttttacaaagattttcaccacattatatccttcttttttattttttttaagcaaaatcatgaataattttgattcccacaacacaatatttcgacacctccaaaaatgataaacatatggcaagctaaagcaaaaaattattacttcctgaaaggtggaaatggagaactctcaaaccagatcatcaacattttcaaatcagtaccggtgcaatccaaacccaaccattcttcaattaccggcctgaaaacaaactttactataatgacattc

SEQ ID NO: 50037 - DNA, 3093 bp, Cannabis sativa
tgataaatccttatggattgttgagtctggagcaactaatcatatatgttcttctatgcagatacttgattcctcaagggcacgactgatggaaaggtgactatgtgtgttgggaatggaccaaaagtgtctgccaagggtgttggcagagtctgtttgaaatttaataacaaaatcttgttattaagtaattttttttattcctgaatgtaccaagaacataatttctttaagaaaattcaacaatagttttattaataataaaattattattccaagaatggtacgcctatttattttgcaaaatagagtaacagactttatttgctcaaagccaagtgagtaattaattttaaataatgaattgtttagagtagcattgcctcattataataagaggcaaaagatttctaatgatgatgaaacgtatctatgacatatacatttagaccatattgtcctacaaagaataaatatgttaacaaaggttggtccttcgagagaactaaaagttggaactctttcggtatgataatcttttttagaaggtaagatggctaaaagacttttttgcaaaaggcaatggagccaaagaacaacttgagcttattctaactgatgtatccaaacctattaatatttaagattgagattgttatgaatactttgccacttttattgactattattcaagatacgatcatactttacctaatgtctaggaactctaaaacttttggatagttcaaagacttcaaagctatggctgaaaagcaattagataaatcattaaagacacttggatcagattgtggtggggagtatttggattctgaattcaaagactattttttggaagaagggatcttgtcctaacttactgcacctggaatacaacagtagaatggtgttgcaaagagaagaaaccagaccttgttagacatggttagatcaatgatgtgttactcaatagtgccactaaacttctagggatatgcacttgtagcagctacttacatttttaatgtagtaccatcgaagagcacaagcaacactccaatgcaattattgaatggtacaaaacctgatttgaaacatttctgtatttggggtgtcttgctcatgttcttaaataaaagactaggaaactttctcctagaactaaagtgtgtatgtttgtaggctattcagatgaaacataatgtgcctatctctatagtcatcaagtctacaaacttttaaatcgaaaaattctacttttcttaaacatgactatatgaaaagtcataaactacgcagtcaagtggttatcgaggaaatcaaaaatgcacaaatttttcaaccaacaattttagcacaattagttgaacaatcgacaacgattaccatagttcttaaaaaggaaacaacgttacatcatcgtagtgggaggattgtgagacaaccaatatgttatgaacatgaagcccatgttcttatctctaacacagacaaggatgatccattactttacaatgaagtaatggaacaccctaactctgacaagtggaacaatgccatggatcaagaaatagattccatgcgcaccaataaagtctgggaatatgagactatacttgagggaaggtaaagagctttaaatctaggcttgtatccaaaggctacactgagcgagaagttgtcgactatgacaaaaccttctcttctgtggaaatgcttaaatccattcgcattcatctttctatagataccacttatgattatgtgataatgaaaatggatgtcaagacaacttttttaaatggggatcttgatgaaatcatttaaatggaacaaccagaagggtatgtgctacaagtggaagatcaaaatgtgtgcaagtttcttaaatcaatttaatgattgaagcaagcctctaaatcttggaatatcacctttaataagactattatagagtatgggttcgaacagaatgaagatgaagccttgtatataaatacaataaaggtaatctagtggttattcttagttctttatgttgatgatattctaatcattggaaacaatgtagagaacttatcagatgtaaagaagtggttagctgatagattccaaatgaaggatttgggagaatcaagctatgttctcaagaccaaaatctatagagatagaaagcaaagaatattaccactttttcaagcaacttatatcgataaggtgcttgaaagattcttattggagaattcaaagaaaggacagttactgtctagacatggaattactctatgtaaggatcaatgtccaaagactcatcaagaaatggaggacatgagaaagtacccttttacttcagcaattggaacttgatgtataaaatgttgtgtacaaggccaaacatatgctacattgtagggattattagttgttacaaataaaattcggcactactacaatttgggcttttagtgacactatttagtgacacgcacaaaaatgcgggtcactataaagttaggagtaatttttagtggcatgcacaatgagactctaaatatttggggttagtctcatgtattgtgggtcactaaaaatatagagtgtcactaaaaagtaaaacccaaaattatttaatttttgttaatttaaaaaatattggtctatagtgacacgccaggcgtgactgggtatacttgtcccgactcacttggcgcgtcactatatcataatcataattttttttaataaaaagtacaactattttttttttaaaaagtacaactattatagtaaataaaaaataatttaaaaataataaaaagagagtttatttcttaaaaaaaacagtaaaatgaaaaataaactaaaataaggtcctcctctctctctgtcttcagtaaaagagaaaccctaacattgtcgttctctcattctcgcctcacaccctctctctttctcaatcgaagcctctctctctttctctcagtcgatacctctttctttttctctcagattcgaagcctctctctctctctctcagattcgaagcctgcctctccctctctcagattcgaagcctgcctctccctttctttc

SEQ ID NO: 50038 - DNA, 886 bp, Cannabis sativa
aacaaaagccagctgcccaacacagccccccaaagagaaaactaccaactcttaatttcattttggatatacatatccccccttcaacttgttcatgcaaagactgagaaatctatatttgacaacatacttaatttccctgctaataaaaccagtagcattgcagtaacttttaaaacaacaacaattcctattttgccaaagaaaataatggcagcagctattacagcattcatcatcaaactatcttgcaaacaagtcattggtttctcacaccacaccttccactgctcagtaacactcggccagcaagcaaaactgatcccaggtgtttacttctaacatcacctttttggctaagcaacattcaaagaaaatgtgttggtttacaatatttactgttttttttttttttttttaatttggagaagagcacacgtgaataccattaccaataaaatatagaataatcaataattttgtcccttgaactttcgacaatattaattttggctccaaaaatatacggcttgttaagaatcccctaaacaattacatttataaaaattttgtccttctgtgaggttctgtcatattattctgtttaattgatgatgtgtctttttcaattagcaactttaattagcaactttgtcccctaaactttgataactatcaaatcgcatcccctcaaaataaaatgagaaagatttaacattttttttcaataaatcttaaaaaattaatttagatctaaagaaaaaattattttgaatgattaacaaaattaaaaatgaattaaaattttgaaactaattaagcgatataaaaaattatttattttttattaaaaaattcatttaaatattaaaaaaatatattaaaa

SEQ ID NO: 50039 - DNA, 1150 bp, Cannabis sativa
cttgatcttttctcggatgaaatggcagtcaaggtcgatgtgtttggtgcgtttgtgaagtgtggggctgttttttatatgtatggtagactggttatcacagtagatgaaggcagaggctgtttgagtgatttggaaatcgttcaagaggtattgaatccaagtgatttcactgctggtgctggcaagggctctatattcagcctcggtaaaacttttagaaactgtagtttgtttctttgtcttccaagaaattagacagtcacatatgaaaatgcaaaaaccagtcacggatcgcctggttgtggggcaagcagcctagttagagtccgaaaaacctctgaggtgcaaggatgaattggagttgtagagaaggccttgtccaggactgcctttcaaatatctgaggaggtggttcatggcttgcatatgtggggttcttggagatgacataaattggctcaaagtattgacagcgaacgtgatgttgggcctggaaagagtaagatgaagaagtcttcctatgatctgtctgtagaaagacgaatcatctaaaagatgtccttgttggtcatcaagctttgtttgtggatctattggggtcttgccaggtttgctgcccgtgtaactcgtgtcttcaaggagctgaagagtgtattttctttgagacagaaacacaccttctgttgatcttgcaatttcaaagcctaaaaagtatttgagtggtcctatggctttaagttgaaattgtgcattaagagactcttgcagctggtgaagaagttgaatgttggggcttgtgatgatgatatcgtcaacatagacgagtagggcaatgaaatggtcattaaatccccgtgtgaacaaagtgtagtcggcttgagattgagagaagccttctgcaagaagagcatcagagagcttcttataccattgtcttgatgattgttttaggccatagatagacttatgtagatgacacactagagtggaaccgtcttctgtgttgggaggtgtgaatctcgggggtaaagtcatgtaaacttcttcttggagatctccattgagaaaggcgttgtttatgtcgatttgcaaagtgggccattgcttgatggatgagatggctagcaataacttgaaagtaaccatt

SEQ ID NO: 50040 - DNA, 921 bp, Cannabis sativa
ccaagtagattaagctcgccgagcaagtgccattctccgaacacaagcacgcagtgagtgaaaattctcagatatatttttccaaaatacctccacaattatagtccatttataattcctatctttgtgggattgacttatacaattgagaaaatcactggatttgacatttaagtctttctaatttttctcctattaactcgtgataggtgtaatgtactttccatataaatggtgaggtcatatcattgtttaggaattccttttttatcattctaaaagaacagttattctaaaaaaaaaatacttataagctttttcgagattattaagaaactcacctggctagaccatctgatcttgagaattctctataagtaatacaactaaaaaatacgagtacggtattgccattgccagtatcagaggcgaacctctattaatattgtctgtttttattgatttattttattattttgattaatcatcattatccatttgaagacatagtgtcgctggctaaaaacgaggtcaacagttatgaaataagggttataatccaacccaacctaacccaactcatagaggagaaaacgggttggtttagaaaaattttagtatgtgaatgagttataaatctttaggccaatattaggttgggtcatttaaataccctcaatctacctaacctaaaccttgctcaatcttaaattaaatttttttaaaaaaaaaataattaagctatcttatcctcacataagcaattattttagattttgatatgtgttaacacagattttcgttaactaaatttgagcctcacagtagtgatttcacacagaaaaaataaaagctatagagataaaaatatgaacatggggttttttatgtggttttgcagttaaaattctacatagtcca

SEQ ID NO: 50041 - DNA, 1316 bp, Cannabis sativa
tgcatcagtacatcccttttaaagtacattgtagaatcaactaaatatatcccttttaagaagtggattgtagaatcaccaataatttattccattgtcaaaactctttttttttagcaatttatatataaagaataataatacaattttagtaataattttgttttctaaaatcgttttattaaatttaaaaaagaaaaagaaaatattcggaaaccgcgtgagagaagagataggctaggctgcttgctcgtaagtcgtaactcgttagagaaaagaaagtttgggtaagcgaatcgtgtgcaaaagtcaaagaacacagcatgtgaaaaagaccatcttaacctcaagagtaagtttcgagccgaaagccagctcagcataaaaatagatttaaatggtcaacaaacactctgaggctgagtctgactcggtcatctcaacgttgaaatcgccccagttgcccgtaacctgaccaacgtggacacattctctttaggttaaaacaaaaaacaacaataccattccatttccttccttcaaagggcacaatcgccatattaaattccatattcaattttcctattcagttgaaatttattttcttttcaaatcgatctactgaccttgctttcctggtctccattttctctggtgagttctctttctctctgatcttcattttttttcctccttgctaaccgagaaaacaacggaaaatcaactaagtataaaagttaactaatttggttgaaaatttacttggccatgtgaaatttaagtaaagttttacaggagtgttttaagggtttggaattttgagattttgagactcggaaattttgattttttttttcgtttctcggttaccaaccaagttgtagctagatttcctgatcggcgaactagtgagacaactatgagatctgccaacagataatttccatttttatttgtcgaatatatttggggtttctcatgatcatccatttccgcctgtgatttgtagttgactttatattgattcactatgttatggccgagtatttaggtttaggaagtaccgtctttattttcttacagaggtcagagtagtgagctttgatatggcattttgcacaggttacgtacttgttttttttctttttttattttctaaagagaggcatatgttctttatatgctgagctcttatttctttccatttatacatatttaagagatttagttattagtgttttgctttcttgctctgaaatctgaatgaaagagatacgggtattaattttttccatttttttctctctttttttttt

SEQ ID NO: 50042 - DNA, 2657 bp, Cannabis sativa
agtaaggggaggctcaagtgtctcatttgaaaagaccacattctttcaagaggaaagaaccttatagattaggttaggaaaaataagcttatggttgcattttttaccttgacgtacggaaggaaacaatttgctacatgatgaaagaagtcaggttaatggttgctcctgtagtgattctataaagaagaaaggccaaatcttgagacatcatcatcttgttggagtatggaaatcaattgctaagagcaaaccacatcagagaagcatggtcataagtgagataagtgatgcagacacgatgaccagcaagccattaaacttgttcatcagtgatttttaagagaatcttatcatgattcaaacaaataatagcactcttaacaccttttggcaagtgcaaagcttcatcaatatcatcttcagagaaagaaaaccaatgcccgcgatcataaactttaccaaagaactcagatttttcatcaagaaattcatcaatcagattagcataaaattctttaacaatgccatcaatataaccttcaaaactagttaaggtgccctcccaatttctatattgaacacatgtgacaatgccataaactcgatgagcacttagatcaaaattcctcttattttcaaacttatggataccatataatttcaaacctcgttgattctcattataataaaatctagaattgatagcatgagaggaagagagaaagagaggttataccagaggagatcccttcataggttgttttccctttcttgtggctgaagccttggctgcagtggaggaggttcagcaagagatgtctaaacaattatccatcctggtcaagctttatgaagtgtaaattttgtgttctaattccttttcttttacttgtttggcgatattttgttggacctgttctaatttctttttgtctttggcccttatagataaacaaaaagagggagtaatggttttaattttttgaattgtatactcaactctcgaccctttttccatggggtgttgaggttggtttttgtgttaaactttagttaaagttagcattttattttagtagaggagagttacaaacttgtacacacttgtcagacattagtatgttcagtatcgttgtccttggaaagattttcattttcgcctttttcaatttgatcccacagctgaatgctgtcataccatactgaaggtcgtccttttctatagtactgcatccttttcataatacttaattacaaagttttagcttactcaaaagatggcttccagacttcagtataggtagctctattctagcaaggggtctgacaagaaacaaaaatcactcaactctgtattattactttactttatcccaatcacacatatgtaagtaacttgaatcttttaactcaacctcaaaagtatgaagagaattattacccaaaagcaagtaagttttctctaccaaggatgaaagaaaataagatgcaagatatcataagaactactcataaatttgtacaaaatagagaaccaaaagaaaataattatgcaatgcaaacccccaaagattttctgagggagtcaaagcgacttgaatctagggccttagtgaaaatatcagccaattgttttccaatatcaacatattctaactataatgtttggttgtcaacaagttccataataacatgatgccttatactagtgtgttttgtacgagaatgttgaacatgatttttagaaatattttataccacttgtattgtcacaaaaaattgttaaaatacccaattcaaaaccataatcaaccaatatttatttcaaccataacaatttagtacaacagctactggtagctatgtactcggccttagcagtagacaaggaaatagaattttatttcttactatgccaagaaaccaagttgtttccaaggaagaaacaacaaacactagtactcttgcgatcatctgcattacttgcccaatcagcatcactaaaacaagacaggctaaaataatgtctttagaataccatattccaaaatcaagagtactattgacatatctaataatctttttaacagtagaaacatgagattccataggtttacatttaaagcgggtacaaacacctacactgtaacatatataaggtgactagtagttaagtaaagtaaactaccaatcatactacgataaagtgtagagtctacctttactccatgttcatcttttttcaatttcaaagttaagctcatcgaagtacttacttgtttagccgattaaagaccaaacttcttaacaagattcttggaatacttgctttgataaataaaggttgctccttccgtttgtctaacttgaagacccaaaaataatgagagctcaccaaccattctcttttcaaactcatttttcatttgattaacaaaaaactgctcttcatggttagatgtagaaccaaacactgtatcatcaacatatatttgagcaatgattaaataaattattatgcgcttgatgaaaagagttttatctacactacctctttaataaccatgagagattagaaattgagttactcactcataccaggcacaaggatcctgtttcaaaccatacaaagctttttctaatttgtacacatg

SEQ ID NO: 50043 - DNA, 769 bp, Cannabis sativa
cttcgaggatagagtttttatatgttggaaattgaacaagtttaaacctcgcctccatttcgtgcctgatcccaaggctacggtgactcgcttctgggagaagaacaagaagctggagtaggccttggctgagcagatgagtcagtccctgactaccttcaagaattgattaattaaaccccctctttttcatttccttttactattaccccctttaagataatattttaattttttagtttatattatctttcttttttgttaggggagacatttttatagcctttctccggacttgtctttttttgacaacttttattctaagaaagtacttgtatttattgtctcgtttttgactttttcctgcctttgcgcatatttattccttggtaccccctaagtggcttaaaaaaaatttaggtcacttagcttaaatttactcgggataatgcatatatcattgttagttgcaagttaacttaagaaatgcatatatgaaattaaatactgaactcctaactattgatagtattttcagagatgatcagcattccaagctctagggataatggatccgtccatttgcttcaattcataagttctagagcctaattcatcttcaatttcatacgggccttcccaatttggtccaagtacccccactccgagttcttgggaggctgggaagacccttcttaggaccagatcaccaatggcaaatttcttgttcttgactttggaaatgacatgcctaggcatggaaatcaca

SEQ ID NO: 50044 - DNA, 1299 bp, Cannabis sativa
gaaggaattgactacactaaaatctctcacctgtggtaaagtacaagacaataagattaatgttgtctttggcagctcaaacagactttgaagttgaataacttgatgttaggactacttttttgaatcgactctttgatgaagagatctacatgaagcaaccacctaggtttttggtggaagagaaaggagttgagctagtttacaaccttaacaggtccttatatagtttgaaacagtccccaagataatagaataaaatatttaatacttataagcaacaaatcaggttcaaatgatgcacatatgatcactatttgtatttcaagaatctggaacaatctacaaatgtgttcttattactctatgtggatgacatgctcattatgagaaaagacaaatttgtgatcaaaagtatcaaagccaagctcaagagagaatttgagatgaaggagcttggactagttcaaaagatccttggttgaagtttcaaggaacaggaaggaagggacaatcaacttaaagtagttcagatacatcaagaaagtcattcaaaagtttaacatggaacatgcaaagagtacatctgtttcgttaagcgtacattttattttgttgaaggaacagtgtccgaatagtgcgaaagagaaagagaaaatgaaagatgtaccctatgcagtggttttaggatgcttaatgtatgtgatggtgagaactaagctagacatagctcattctctaagcatcctaagctggttcatgtccaatctgggaattgaacattggaaagcccttaaatagttattaagatacttaaaggacatttgggattatggtctgacctatgaacaagcaaaaggagaactgaagttaaaaaggtttgtggatgttgaatatgcctcaaatagagatacaagaaaattaaccactttgtacgtttcatgacaaaccagaactataaatgttggaaggccctattatagtctgtggttacccttttcaccaggaaagcaaaatttatggctactacagaagtatttgaggaagcgttatggctttgggaaattctgtttgaattgaaacaaataaaatgtggatgattgtgtactcgaatagtcaatcatctatccatctttgcaagaatctagtttatcatgaaaagagtaaacatatagacataagactttactagattagagagaagatagatgaggatttatgtgtatataataggaaaaaaaagaaaaaaaaataggtcttttctttaaaaaaaaatggaccttaaaaaaatgggggcct

SEQ ID NO: 50045 - DNA, 563 bp, Cannabis sativa
  modified_base (507)..(510): a, c, t, g, unknown or other
attatttaactaaactatgatcgagaccttcaacatgtgtaaacaatagaatgaatacaaattatcctatctaattaagttaactcttgcgtggcaaaggaatctaagggttttcctttttttttttgttgaaaaaagaaggaacctaaagttttaattgtctttttgacatatttgacatatatgcagcttggttatttgtgctgatgcaagcataacagatgatgactcgtagatgaatgatatggtgaatggatggtcagattcgaggaaaggcttctttactttaaccaacattgttattaaatatcatgtttgtgttttaagtattaattagtgatactcattaaaaaaaatattacattaaattattactacaatttttttttttaatcacaataaaatttatgactaaaagtgaataaattgtgattaattataaattatttttcatatgttatgactaaaagattcgtggttataggtattagtcacaaaaattataannnnttgtgactaaatgtatttttaattacaatacttgttgtgactaaaaataaatt

SEQ ID NO: 50046 - DNA, 1156 bp, Cannabis sativa
tagttagatagatatttacataagaccaaaatgcccttagattctagatacttctcagcctgtgtgttgggcttttagggcccaattcgtagctcatgccttggttcacgtgtagagttgtacatggagtcttgccaggttaatcttggtcttccatatgcctacaaggaagtctagtcggccatgctcctgccaagtaaatcctggccggccatggtcctgctagatactggcaagacaaggcctatagggtctggcatgacactatagctccatcaagaggagggcaacctttgagtgtggaggtcatccttttgcaagttaaggatactttgtacatcgtttccatgaaaaggtcaggttcccttagccaaacgaatcctccttgggtttgtagtcacttcttggctggtaagcttgtgtacagatcctggccgacctataggctcaccctggctgacttataggctcctcttgtccgtccaaggatgttggtatagatccttgagggcttgtttcactcttttcagttgttgcttgacatttttgctatatcttgtatggaggctctgttctgctattggtagggctgtactccacctgtactctatctttggcctacgtggacatgccacgttaggtaaacaaaatttgggttaataatttccccccaagtccttgttcaaacatttggtcggatagggactttctagccattgtcttgtctgtagtagtctctgttgagcagccttgtctagccaagtgttggatttttgcctggcatgcttttggatctttgatcttttcactctatatgcgtctcatcttctcttcttgagaatctcttcttcgtacctgccattaacaagtttcaagctttttaagcttttggaaacattttagttcacatgttagtttgtaatctctttggtatatagatccccgtgatagttttagaatgtgcaatgtgtgactttttgattgaaaatattcagtttcggccttcactatgattcttgactctttgagtcataagaaatacttggcacataatcaagttttgaaagaaaaacacacattaggattcaaaacttaacttggccagcctaggaggtcttgcttgagacatggccggccctaaggcttgatcatggga

SEQ ID NO: 50047 - DNA, 1295 bp, Cannabis sativa
tttctgcctgacataacaaggttgaaaaaaattttgcacaaaaaaaaaggtatggtgaaagtggatcctcttcacgtgatatcctcccgttcgaataacctttctttaacttcactatttaagttaaaagaataatggactgtatgaacacattttatgagtaagctcacccactaataagagaaccatagcttaaataatacttattctaaataatctcattcaactctgtcatagactttgctcatatccaacttcattacaacaaaacatcttttccctttattaacagcccttaagttgtgtaataactcataggcaaccattgcattgtctgtaatatacctctaataaaagctctttgagagaaatatgtgatatcatctaaccaagactttaatcattgaaccaacattgttgatataatcttataaataatattacataatttattggcctaaaatcactaactttttttgcaaattttttttagggattagagtcaccacagtaaaattaatagtggagaaatttggtattttgtttaaacattctagaacaacttggatgactgattcttctacctcactccagtagtttgataaaataaagcattcatacaatcctctcccaaagagatttatctgccatcatcgaaaagacagtctttcgaacttcatagaaaagaagtagtaacaatctatttatctccttggtaactcgaattggtatagcttgaggcttttcttctttgaatcacctttttactattaaattttgttcctttttactattaaattaagtgaaatgctaaaaggtaccatgatgtctaacactcttataagatgaaatatcgctatttatataatttaatattgagttccacttattttaatttgataaagattatagacaactgttaatcaattataagacttcatgtcatagaggtgctataagcaccttagtgccgcatagcaatgctcttaaattaacgctcctctataatttatgtaaaatttaatattcaggaaataaataataacaataaattttctcaagaaaaaaatctatccaataaataagggtattgttatttggcactagtggtgcctagcaccttctacaggtgacacctaactatttttttttatgttatatgaaactcaatacataatacatcaatagcagtataacactgaagaatgtgttaatcaccaataatacctttaacaattctcaataaataattatcatgttctgaatctattactctccctaactaacatttatca

SEQ ID NO: 50048 - DNA, 1082 bp, Cannabis sativa
attgtgcacaagtacctaacttcatgaagattggatattgtcaagagtagaggtaaattatttttacaattatattgcttctcgctaattgtatattatattcactaataaaatttattttatatgacaatatcttcgatattgatcgcgaaagatatggattagatcaccctttgctatattttaacatccattgataaatcttttgtcaaaaaatattgcaaattcaagcatgaattgaaagatcacttggaaaagaatagttccagaactcaatatattggaggcactataaactagtggtcaaggtcattgtattttttgaacaacctgaagtgaagttactttaattttattcaatgccaattgaattttttactaaactattttaattttccatattaatatctccatatttatttttggtagaaacattcaaagatcaacacattaaataggaaaaaaattgaaaaagtagagccatatatgatctcaatctatacatgatttgtgttataaaagagtatattaggttaatttataatataattatcatatttattttattgttgttattatactctgaataaaaaaacttctatgttgcaatgcgatctagagcctaagcgattggcactcatcctagatgcttagcaaatcactcaccataaacaggacaagggacgagtgactgacactgcaaaagaaacatatgtttattttaaataaatattatcttctttatattctttttataaataaattttatatataattaattcatttattgtgtaataggagaaattgactgtcatacatgagacacaataaatatggtctacccaaaatactgaaaagcccgacaatgtgatcaatctagaagatgaagatttatcagttgtccaaactatttttggaagacatcatggacaccaaaaagggtatgggtgcctaattagcacaagagagatggaagcgccacctacgtttaccgaatctcatgcatcttaggttggtgtatatgttggagctgatgccataacttatatgcagggacatattagacagttggaggaactagc

SEQ ID NO: 50049 - DNA, 1045 bp, Cannabis sativa
ccgactttaaaaacccaaaaaaatgcccatcgaacgggcatcggacccgaccccttaaaagcccaaaaaaaattcaaaaaaaagtgtttttgagaggggtatttttggggttttggaaagtggtcatatatttttaatgtagaaaagtattagtttagggaaaaaatattaagtatatgtaagtataaaaaatcaaattttccattatatattcagattttttttttttgaatggttagttagagttttttcaatataaatgcttggctagatttatacagtttatttagttagaatattttgaaattgagctattttttttcataacaaaataatatttgatatttttttaggttccacgtgtatatagtttattttttttaaaaatgtttaacaatagtttctttttatttatctttctctttggaatgcttagatcttattagatattcattatttagttaatataaattaaaaattagaaaattagaaaagttaaaaaaaaatagaaagaaaaaattgaaaagttagagaaaaaaaaaaggaaaaatgagaaaaaatagataaaaaataggaaagttaaaatttagaaagaaaaatagataaattagttttgagtaaatttagactttatattagtttaacttgcataaatgatttgggagtgtgagcaaaatctatatttatatttattcaacctgtatgaatgatttggtagtgtactgtgtgtgagcagacactataaaaaaaaatattatttttggtgacaacttttttgtagtgagaatcagttaaatacttttcaacataaatttattataataattatgcatatatttaactaatttaataaatattaattattgcattaagaattataatagataggttacttataagaactaatagaaacgtcaaactaatatttcgaaacggaaaaataataaataacatgataataaataattaaaaaggcatgttagacttgaaaaaagtgaaagtttaaaagtatatattttaccacaaataaaataataagagaatt

SEQ ID NO: 50050 - DNA, 1035 bp, Cannabis sativa
attaggaaagtataccttttcagatagacgatgagtttccaacatgccatttttacccttatctattaattttgctttatgctactaaaacttgtcgtgtctttctcatattagttgtaactttatattgttgttcatggattcgttgtaatattgcggttcataaattagctaaacatgtccttctaataaacgttaagttttcttggacgaaagagatccctctgtttgaaattttaatcgaacgcaaatttcaatccatgtttcgtttttttggtcttcaagattttgagaactaatttcacatgtttctaatcgtaggcaactgacattcccgtggctccaccatcgccccaaactatccccgtggtggtttcaccttccttcatttgcgggatttgcatggaccaactaaccgaagaaacttcaacaaaatgtggccacattttctgcaagatatgcatcgagacagcaattgctactcaaaagaaatgtccaacatgtcgccaaaaactcaagaagcgagacaccattcgggtttaccttccaacttcgagttagattaagaaaagaagaaaacaaattatgtcttctaagaaataagttagactaaataggttaagtgaagatgatttttgttacaaaatttcagcattttgtattgttggactacaaaagtatttctattttggtatttggttcaaatgagcaactaccaaaatgctctaattcaactgtcaagatggcttttgagccttttatcattgatttttagttcttcatgttttgttgtcttttgttactttaatttggaattaattggtaacttgttacaacaagatggctttgttgcaaatgtaagtgttgtgacaattggtaacatggtaatatttttaaaaaattgaaaattatggtaatataaattaattacaaaaaaaaaaaaaaatagaattgtaacaaatatttacaaattcgtaaatgtttacaatataagtactactagagtagacgatgcgtacaattaattgatttttt

SEQ ID NO: 50051 - DNA, 1239 bp, Cannabis sativa
aattaaattatagacgagaagatgaagtagagttgtttaatggcaatggttcaaatccccacaaaaagtattgtttacttttctaattttgataaggaatgagaataaaatatatgggtcacacattaatttgagattgaacaatgggatttctaatcccatgagtcctatgaggttggtgggattgtcaatctcatttattttaaaataaatgtcatttttatccttttttaattattttttctactgttccattcaaaaaaaaaaaaaaaaaaaattctactaatgaaaactttaaaaagtccaaataaaaactttagtaacgggtatttttataatttaaaataatttattccgattttaaactaatgtaaacattttaatgagagtactggtttattttgatttgaattcctacaagtcattcttattttgatttatcaatctgattgagggtaaattcgaatcctagttactataatttttagtcattctgattacgtgtaagtaaatacaccatcaatatatttttttaaaaaaataaattgctcatatttaagaagaaaaatgatattgtaaggacttgaacctcattgagaccaaagatttaattcttagtagcttgtttttatttaaaaataaattaaaattaactaaatacttattcatactacatgaccttgaattatatattttgacaagttggttctcaattattttttttttttgtaaattaatctccaaatatataaattttaataagttgatccttaatcattttttttcgcatattggtttctaaatttttagtttcttggcaatattaagtctaaattgttaaattggggtagtttgttaacttttaacttttatattctttactctagtttttatgttaatttcaaatattttttttttattttcattttaataatttatttaaaaaataataatgtatatttctatttctccaattacacacatatataattattttaagtaaatatttaaaagatatttgatttatatatatttatatatattttcaaatatgaaaaaaagaacataagttgaaaacaaaccctaaaatataattgacttaggtaaataggtaaaaataaaagctattttatttttatgtattttttaaaaataaaaaatatgttcttttttctttttattttcggcatattttgaaaatcaaatatacaaataaaaaaaaaaaaaaagaggttaagt

SEQ ID NO: 50052 - DNA, 1916 bp, Cannabis sativa
  modified_base (1869)..(1869): a, c, t, g, unknown or other
tagccttaggacaacaccctggccggccaccctggccatcacaagggtctggccagccaaggagtgcactgtaggctttgctggacagctctacacattgacaacaaatatgggctgtgaatttggccctaaaagcccaacatattggatgaataatatccaaattcaagggagctttagtcttttgtatttatctaacaacctatgtaaatatctaggtgttaaacttgtaatctagggtttaggcctcctatataaaggtcttaaccctagcctagaaaccttagttgcgtctaagtcactaagcctccaaatcaccctaagtttgaaaccctattctctctctctctctggtacacgcccaatagggctctccttctctcttctcacttcatctctcacacgcctacctaaggctgtccaacaccttaggctgtccaacactctaggctatccaacacttgagatctacctactgattcatatactttggaattctaagggtgctatagcagatcccacctatagtgatctaaatagtatttccctcggtataaatacaacaccttattgcttttcattctttatttgtgtaacacttgccaagcatcaaatccatatgactccgtcgtcggttaatcactttttaaggtcaacagtttggtgctttcattgagagtgtgggtatcgtatcggatcaaacaccatggttaacacgagaagaacttctgtcgcaccatctgcatcttttggtctccctcaagacccacagattgtaggtcaagatactcatgttccagtcataactggaatcctgatgaacattgtagatgtggtcaatcctgtcaccacaataggtgccacaagtctggcctcctcttggcagagccataatgacctgccaggtcttgcaggccttgtcctgccaggtcctgcaggccttgtcctaccagatcctacaggcattgtcctgtcagatcctgtagcccttatcctgtcagatcctgcagcccttgtcctgggagatcttgtagcccttgtcttgctaggtcctacaggccttattctgccacaccttgggtggccaaatctcccttgtaggtctatgggcagccatgattatctagcaggatcctatagtgacaagactgatacaaacattccagtggatccaagtggtaggcccatgcctccatgagtagatccaccattggcgcctccagctgaaggaagaatccttggggggcacccccaaaaacaacaatcaggtttcacccccagtaccatgcaagagagacgagactaggaattgacaggcctcacctgggcttgggagaagaccttgagttggccagactcagggaaactgtagaccgtgcaagcctaatagaagaaccacacactgctgactgcgatattcgctcagcagagatgcaaattccttgaagaaccatgcgttgctgactgcggtatattttctcagttgagccgtgaatcccttgaagaaccacaagctgttgattgcgatgtactcgcccaacagagatgtgaattcttgagatggatggatgatcaagagtacatcctttgatctcactaggcaaagttagatcgctgcaacagagaggccgacgatctaataaggcagttcaaccagagaactgataaaagaagcgaggatctcattagatatccacttcaagaaaaacttgttgatagatcagggagggtctattgatatgctgatcaacccagttccacaagaactaggaaagatcttcccttgccagaggaaggacaaacctttcctcaaaggtcaaaaggcaaaaactgctagatctcagcaacaacctgttgggttttatgccntaaataaaacttcatttcaatgtaatccattttattcaatatcaata

SEQ ID NO: 50053 - DNA, 1025 bp, Cannabis sativa
gtttttttagggtttaagtttttggtttaataataattttttttaattttcttaagtatataaaatcaaatttcccttctattttactgctctactattgtttcagtaatatttttgctacttgttaaagaatttggcagcagggtcttatcaaattgacttgagaataagctatactctgtattattttgagaaatgctaaaatgcactctattttagtatcgtttaattaaatgaatgacatgtttaatgagttataatataatattttcaaaatataatatgattgaataatgtctacatgtcatgcattttgaggaatgagagtataaaagagtgtaatagagaatttctttagcaatcctcgttcatttttgttaatggtctaaattcacaaagagtgagatgtaatcaaaagataaataataataaaaaaatataccttgcagagctaaatattttcacttcattgccataagaagtaatgattttagagaactcaactaattacaaagagccctggctgttgcttgcttcaattaatcacggttcaatcaagcaacattcagcaggccgatcaacccctaggctagaggcaagggcctgtgttttcttagaaattatttcatttagaaaaattttattgagtttagattagtcaatatgagaggataatcatctaagtttgttttacatttctgtaaaaactaataagcttaaaacttaatattttgctctcattattagtatgtctaatcaatgttgtaactttaataatattaaaatatcaaagattttctacattacattaaattgagattttttatttcacatgagcattcttatataaaaaaagcaaaaaaaatataatagacttctattttccatgtggtacactatatccggtttttgtcacaaaataaacattgtaatttgtaacatcaatcgaaagatgtcgataagtttgataataataataataataataatcacttttaaaataagtgcatttaaagctattgcat

SEQ ID NO: 50054 - DNA, 1063 bp, Cannabis sativa
tttctctctcttacctagatttgtacacttcctctttctagctagaccgtctttaatttctatagtcctctataaagagcttcagttagggtaacaaaagggataagataatagtaatcttaacctgtgaaggaaaacgggaagccccccttaaaaaagcttttgtgtgtattataaatttggtactctatatataatataattatgtattgtgtgcggtatatttattagtctctaaaggtagctatgttgatcagattttttctgtaacagtacatgtttagccctatcccttccactcatcaacatcaactatatttatatataaatatatatatatggacaacatcgatacatttttttgttctcctttctatgtaatattaataaagtagtacaaatatttgtaatattaattaaattgaaggcacttttgctttctatagtatatatttattgtacttcaccattacatgtttcaatataattcccaatgtcaaatgattccgatatataaactacaagacgtagtcgtatatatatagtgttatatacaaaacctatagccaaagaaattttgagaaatctagctaccatattaaattaatttccacataatacaaatatcactcctatattatcaactagataatataactgctactcgcataattattttaagttttttcagtataataaaaaaatatttattaatgtaataatatcaaattacattatctaattacttattatcaataataattgtatttattataaaataaaactcttctattattttataataataattacattatcaataaagagttttaaaacactatgttaataaatattattaatataaaaataaataaataggatattattattatttaagtaaatattcttgattcttctttgtaattcattatctttttatctcaatcatttttttttaatctagaagaagaaacttcattaatcaaacaaacaaattacactgtcaagcacttctcaaaaaatcaacagaagcctcatgttgggctttgtgtcctaaataaaa

SEQ ID NO: 50055 - DNA, 1790 bp, Cannabis sativa
tcaacagaaactgtataaaattgctgatcggaggtgtcgactccacccttcccatgaaaggactacgattcccagtcagtttcaaaagctccgaaactcacgggatactttttgatataaagtgataacaattgtgtgtatttaccccctttcttaatttgattagggcttaattagttttttttattcatttggaaaataattttacaaactaggaaatattaaacaaacgggacccactaaaaccaattggcagttgtctgtttagaccaataattttcatttccaaaaataagtaccaaattagaaacgtaatattttttttttcttatttttattttggaaacaactaataatttttttcgatcatatcataactatttttttaaataaaagaaaaattattattaagccataatcaaaataagtctaaagacttaaataaattcatgtaagctcggccactaaattgttatctctcataaaaaaaaaaattgaatttaataagattatgaactataaaattggcagaataattataaaacaaaaacttaaaattattaaacttgtcacgaattaaataaatattaattgtgccataatcaaccaaaacatgcctttcttttatttaggaattttttaacaatttcacaattcatctacatcttaatattaattgtgccataattaattaagcatttttatttttataatatttttttaaaaagcatagttaaacatttttatttaagttttcagttttatattaattaaaaatttaaataaataaacaaaaagtcaaggtagagattagagaagcggaacaagacaaacccaaacacattccacgttttacaatgatgaatggggactaacgtcactcgcagaaaacgcgcgtggcactaactttgaagtgaataaagtcaaattgggctctgcccagtggcattttcgtaattacactccaagactccaacaaatatacacataataaaggaaaccatttcttaatttccgaaaaagaaaaaaaaaaggaaactatgtcattctcatcttactataatgttttttttttttttaataataataataataataaagactaaagtaagtaataaccataacgagaagagaagaagaatcataaatctagttgcagaacaacaacgtccacgttacactactctccaaccaaagctcaccacccaaggtaccaatcaatctcaattttctttctttttctttttctttttcttctctacccgaatttactgtttggtttcccagaaaggaagtttgtataataattaagcttattattgctaaaaccagtacttttaatgaaaagatcgcttctttaaaggtactgtcttttttaaagattttggaaaatcttagtattaagagttgaaatgagttttctcaagtaaaaattgaagctttttggaagagatttgaagattctgaacttgagtaatagttcaagttttggttgaaattactgccatttttggtcaacaacttactcaaatcatgcattgatttcatttcactctgttttttttttcttagtttgaatgttgtttgattaaaataccgatgtttgacccaccttttaaattagtattctttaaaagaattatagttcttcaatttctccataatctgaatctaaaccccatataagtgccttaggtattgtcactgaaattttctcttttttcaggtatgttaaggtgattgagagtgaaaatgggtcagaaacttttcactaaatgtcaagctgaaac

SEQ ID NO: 50056 - DNA, 2071 bp, Cannabis sativa
aaatatttaaatatcgagtacgtaatagtaatacattcgatacagtaaaattattgatatgcgcataaaatctgctcataaatacatctattaagttttgtaacgttatgtttagttgaacggttatcttaaccgtatattcaactaataactgtcgatttgcttgcataattaattacaacaatatgtacaagaataaatacatgtaacattcacttagattaataaatagttctcgacaaatcacgtgtatttaaatatttaaatatcgagtacgtagtagtaacacatcccgatgcagtaaaattattgataatgcgcataaaatcttctcataataaatacatgatctattaatatcaagtaatttgtaacgttatgtttagttaaacagttattttaacattatattcaactgataactatcggtttgcctacataattaattactacaacaagtacaaggatgtaaatacatgtgtcactcacttacattagcggatactcccgacaaactacatttagttaaagagtatataatattgagtatgtaatcgataacatccaatatttctttcttaattattccatttaggtttacatatgtaaggaaataaataagtgtgcatactaaatattcatcaattatgttgtatttgaatgctaattattgtataattattttgtcttttgatatatatatacatttaaaatctattcataaatacatttattaatatcaagttttgtaaagtaaaatttagttggacaatcatcttggtcgtatattcaactaataattgtcgcttttgcataacaaactagaatataaaaggaagcaatatgtgagtattcacttaaataatcaatactcgaatctcgagaaactggatatatgttctttaaataaataacatctagagagtatgtaataaatcggctatgtagtaaaaaatgattactaatttctttctttaattatttcgtttaggtttatatctgcgtacaaagatatattatacattatatgatgcggttacgttgtatttcagtgctaattactgcaactattttgactattgatgtacgcataaaatctattcataaatacatctcttaagataataatgttaagttttatatgcgttacacgaagtctagttataaactgctatatatcctaacggtttactcgatcaatattattttcttgcttctttcgtttcacaatcatgtttaactaaattgttaaaacgttaacgttggtatatatttactttttctactatgtaatatatttgtatgttaatctcctatttgttagaagttaaattcattataatttatccattaaaaaactaagtcaataccaaattacgatgtatgcatgtatacaagtcaatataatatgagaatttaaaaacaaataaattaatggttaagttttctatagctatctattattaatcactatattatttttataatgcaatttaattaaatattaaattaacaccatattagtgagaacttccaatccaaacttcaaatcacacacaaaagaattagatgagagttcgttgtgatagtcatttttcacctaagtcaataattataatttttttcattattataaataccataaaatatgtcacacattttaactttttatcataataaatttatttttaaaaatttctattataataatataataaatagatttttccgtttcaaaaaataaattatattttgtaaaaaaaaaatctaaaattagaaaagtcaatactaaacttaacggtgattttatacgttgagacaattcaaaataaatatagccaatttttccgaactaacccggaaatgaaataacacccaaaaaaaccgccatttttcttgtttgtaactatttattttcccattttgcccctgactttctaaataattacaaaaatagtattgcttctttgtttagctaagcatccattccagtctcaaaccgcgtggcgttttttttttttttgtttcccgctttagtaaatttataattttcggccacgcgtcacgagga

SEQ ID NO: 50057 - DNA, 1160 bp, Cannabis sativa
tcacttgtgatacatgtagttgaaatcacttgttgttgttacaaccttgtgagcatatagctcatcattagatactaggttgagcatatgaggcttgataaatccccttaagaacatttctagaatttctctaagtgtccatgtaagagagaaaataacttttaggacaaagttaggtctttgacctggtttaagcttttgagatatatatcttctcttctttgtactcatatgcattattattattgcaaagagttgtaatctcttcttcttcccatgtaatcttaatgtaatactttttatgtattttatgtatttggttgtaattttttattctctcaaaatgtaatgagaaaatcttcaacaatatgtgtactaggggtacgtataaatcgatcaaatctaattacaactgacaatcaaatattggatatctaattatgaccagatcgaatcaaatcaaatgctatttttcaatatcttgttgaatttatgttgttatacttaaaatatatgtgcatatatgaaaaactatgattacaatttttttttctaatccaataaatactggatctacacaaaaagatggatctaattcaaaaaaatattaggtctaaaatattagataaatttaaactaatacaataaatttacatgaaatatatccaatagatataactaattctatccaacatctattgaatgtaggattgtttggatgttaaattaattggatcgaatcagataataaaatttaacatctaatatataaataaaattattaaatgtgatcaaatcaacattctagaggcttatatgacacaattaattaatatctgcacaaaaatcacacacttataaatgtgtattaaatttgtgtataatttaagttggcaaaaatcataaatttaaattaataacacatggtacttggcagacacatacacctatatacctttatatataaatgtaatataaatatttgaaaaagtaagtactttccaactctgtttcaatatcaaaagacagtactatatagctaaattatcaattaatataataattgatatcatatatatataaagaaaaaaaaagtaggttttattgtttggtttggtagggcttaagagttatattctgtcaaaagaaatagagaagct

SEQ ID NO: 50058 - DNA, 1142 bp, Cannabis sativa
tagatttgcagaagaggtagagttctgatttcgttcatatcaacgggcacagttaaaattttgactgttgccttcgataaatcatgaagatttaatcttttcagctgccattttaactgttttgcttggttatactgattacagccagctgaggttttctaccacagtaattgtagtcaattgagtatgtgctcttttttaacagtgtatattgttcatttgatctattattttttgttaattaaatgcgaggtaataccactttggtggaacactttttggctatacaatgaccatttggtttcatgtcacattttacaagatatatgtttcttgttgtatcattatttaacaaaatgagattgcttttaggtaccaatgaagatttcagttataaaaatgatcagtggtgataagtatttgtctaacaaatatgtctctagtttttttaaacgtaaaggtagagaaagggtggttagatgaaaaggaaaatggtgtgttaataatagtgcagaaaaaggaagaagaaaaagaagaacatggtgttgaaatttgaggaggcagagagttggaagggaaagaagtgactaaagggagagatattattatataaacaccattattattatgattattattgttattattattattattattatataaagaagctaatgaagaaaacaacataatgtaaaaaaatataatctaaaaatgtttaaaaactaattaaaagaaactaaatattttattaaaagagacaaaaataattaattttattaacaatataataaaaaataaatgatgtttaataactaaactttagaaacgatactaactttaaaattcaatttcgaacatataaattttatattaatacttaataattaaatttctaacttcattctctattttgatttattttttataatcagagagaaaaaaaaaaaaaaattaaagagacaaaaatgtaaaaaaaccataaaaaaataacgaaaaaataaaaacatgagagagagagagagagagaaatcatatgtaaaaagcaataaaaatagaggtgtgttaatattataatatacactaataatcaaataatatcctaagcaaacacaaaactcactaaaaatattagagtagaa

SEQ ID NO: 50059 - DNA, 1061 bp, Cannabis sativa
attttttaagcatagaaaatcaaattttccttgtcaaaatattttttttttttatatatatttttacaatttatttttttaaatttacggattttttttttttgtttttaattttacactcctatgaaaataatatttaaaaatacaattgtgaaacaataagctgtaattgttaaaaaaagaaaagtcttataatccgtagaaatatttcaatattcaaatttgaaataatcctaaatttgagtggatttgtaatcttttctctcccataatctcttttccaagagaattttgacttctcttctcctcaccatccacccacttcatcttcttaccaaacatagcattaaaaatgatgttctttgtaatggctgaaaagttaaaagtattactttcaaaaaaggaaaatgaaaaatgaaaagtattggtcatggggccatgccctcatgtaaggaaggggcccaattctaaaaaatgattttatataaaatagtaattttcaaattcaaaaaaccttttcatacagaaaatgttggcatttttcgaaaaattgaaaggcttagacacagacctgatttgcttgcccaaaaccgactcatgtataatctaactatgaagaagtacaccaccataggaaaccttatttttaaattaaagaaaaaattgattggaccagttgtgtgatggagagcagttgtgtgtaaaatattccatgaattaattaatatattatgggtgtgggtgctgcgggggcgggcccaccattagtccgtatgcacgttttagcatgagcattgctagtgctattggatactagtttgttcaatactttctctaattatcgttttatgattagttagtgatacattttaatttcttttttaatctatatgtgacttgatactaatagtagtagtatgataacaaggagcatgttagacaccaatagtgtcttttagcatcgagtattattattagacactaggtggcgtttggttggaggtaatgaaatagaatggaatggaaaggaaataattttcatttcattcctttgtttagtt

SEQ ID NO: 50060 - DNA, 1504 bp, Cannabis sativa
atatacgaatataaaagaaaattaaataaaaatttgtttgaaatacccaaaataaataaaagatttattagtgcatcactttgaaaggattcattgtagaagctggttaaaattgacagatggtaagtattgaatgagaggcgatctggcagggtaggcatcaagtattttaggtgaaactagtttgaaaaaatggcaaacagttcctatcttaattagcttcaactatacaatgacatccacatactcccctccatgaactatcaatgtcgtttcacattcacaataactcaattaatcttatttcatacaattttttattgtctttttcctataattacatacaaatttggtttgcacaagtcaacattaatcacgatcaaatttttgtacctccatacatttcaatttcctttttttttttttttaattaatcgtttattattattattatatgttttttatttctttttggagaagtttttactattattaaaacttataattggtttacaaaaatagagaaaatagaattgagaatttcaattatccaataaatatcttcattaactttagagtatattttgtgaagtcatgcactagcatttctcttaatatgaaaaacaataaatttaaaaaaaaaacgaataaaagataacgaacatctaaaattaaatagaaaaacttgataagttcataaatgtagagtttaaagctgttgaaacttgcagaatattagtgtcgacttgagtaactggcagttgtaattgcagttcccaatataagactatatagaaatgtgctttagcttctatttcatcagatctgaaacactcttgtactagtttagagagaatagctaccacatatctttaatgatctcttataattgccccaatccctaagacttttaactccgattacagccgcatttatgttcatctttaatcccaaactacctagtagcctccataaaatgccctcacatggctactgggaatggttccttagcgttgattctgtgtttttagttagggatgggttattcataatagtgtgagttacgtcctttagcttgataatattttagattaatgatttattgaaatgacattttatgttaaatatatttaaaagatgctaggtaatgttatgtgtaatgtacgtatacttagttatattcttagtttttatttttgattatgtgtatttttagcgtttttttttttctaatagaaagaatcatgaacattttttttttattttatagttttttaaacaaaacactaatagaaaaatatttttttaaatatgtggagtgagtataaaaaaaaataatagaatttttttttaaatatgtgaacaaatgtatttttttatatgtgcctagagttttaaaaaaatgataataatgaaaaagatattttttgaaatatgtgtagtgaatttaaatttaaattataatatttaaaatgatttttttttttattttttcacttcaaaa

SEQ ID NO: 50061 - DNA, 979 bp, Cannabis sativa
ttgcacagcttacccgatatttttctttacggatcacgggactacttactgtcacagtttcattgtccgaaattgaaatgcaacatttagcagctcgagcatttgccactatcagactcgaccctgatcataagcagattaagtctatgtttagaacacacttagcttaagagtccaatttttattttcttttaaaatgacatattttttttactaattttaaaaaatattatatatatatttttttatagcaatatgatattatctcctaatattactagacaccactaaaatcattcctttacttgtcaaatcaaaccgtccaatgcaattaactaccaaaccaaagttattatgataactaaacttacttaacaaattatgcaaaaacaaaaaaaaataaaagcttttcattttagattatctttgagattataagagccactacccttgtagtttttgatttattacttattttggataccacatgtcactaatttatacatcatttttttacaaagaatttatatatatatcttaaaactatctctttcatagccaccaatactccattgatagagactttttgatgacctaaaaccaaactttagtaacagaatatatttaaaggtttaatatataaaaaagcaaaaaaaaaaaaaaaaaaacatcagcaacaagagcactatatatgacttaagccctcttaaattaattaaacaccttctctcatgtacgtggtgtactaaattatattctaatatatattttttctaagtggatctttgttgagtatgaatcctctttaatatgtttccatggataagaagataatagagattagcttaaattaattcatattgatatatatatatatatataatataggataaataacgggtataagtatttaatatttattaaaagaatatttaaaagtaactgatactatatgttttgggaattttacaaaaatact

SEQ ID NO: 50062 - DNA, 1557 bp, Cannabis sativa
gaaagcaatcctacccgctctatcttatcagaccacttccttctcacaaatccctcaagaacagcaaggggcggattcgcaccaagaacatagcatacaatagatggtttccaaaaatcaacttcatcttggatatcatcattagtaatcttaaccctgcctttcgattcttttgcaaacaaactcctaatcactgtaccagatctcaaaacagggggggttgagtttttaccttgagaaatattggctgagcactgctcgttagctgtcaaaaaatgcccaaagtctttccttatgtcctcctgctgcaaatcgaacgcagagatgaatccagagagagcggttctggttccagcaatctcgcaccatccgtcaggtcttcctcttcttcctgatctgagaaatccatgggtgcaattcccagaatagcgtccatagatttcctcttctgcacatcagatgccgagttcggtcccttacgtttcgctgccatcgtcaaattcgccttccctcgcccccttcccctcgttttcgccatggctccagcaagttgctgcttcgagacgagagagagagagagtaaactcagaaccttcctatttgttattatattttattgttattaatgttgattaggtttgaatataaaaattcaattttaaaattgacactagtacattaatatttctatttttattatttaaagatgaatgttgtttaatattttgatattaattcaattaatcttctcacttttaagttatatataccaaaaatttaagaaattatctacattcagcgtccagttttataaacatcttaaattatattataaaaagtattatttattattttaaatttaaataaaaaatattttatatcatttttatttgtataatcataaaaattcttcttattgtttaatttttaaatttaactaatatttataatttttctttgtataatatgaaaattattatataaaactttcattgtcgattaataatgacagataatataatataaatatatatatatatataaaaagactattactttacgattttttttattataattttaaagagatttgtttataaaaaaatcgatacatcatatagtttatttataaatttttccaaaattttacaatttattaaaattattttgtacatatcacgaatacacattaatagagattttttaaaattaaaaatatatatataccgttgatatttttatttttgttaaataattaaggatttataaaatttgagaaaccatttttgttgaccaatatttttttttagaaatagagaatttgaaaattttagaaatatatatcattgatatttctagtttagttttttattttattttatttaataataataaatttataaaagtaaacaaacaataacataataaaaagatttataataaaagaaaatatattttttaatgataattaatgctacaataacaatcttgctaagagcatctccaatgagtacaccaaatttgatgttacactatcaccaaatttagtgttaaaaa

SEQ ID NO: 50063 - DNA, 859 bp, Cannabis sativa
ggatgagatttttggtaacaatgaaaatgtgaatgctttctattcacttcaagttaaaaaaaaaggtattgaaacattttaaaatttgtttgaatggtttctaacttttgaaactgagaagcttatagagaagagttccaagccatgtgaaagcattgaatattaatatgatcataaacacgaggctttcacaagggagtaacttataattagttaatgatttttcagatgcaatattatttaaactctattgacacttaatcatataaattgattttttagtagtaaaatttctccccactaaaaatttgtcatgttacacttatgtataccgtagtatgttcgccgtagtacttaatagagttttttgaacgaaaggggtactaagagaagtgagatttggaggttttactactaaaaaatcaatctatgtgattaagtgtcactaattatagagtttaaataattttgtcgccaatattcttatattaaatcatgtaggattcgaatctgatacttaattgtttcaataacaatatgccaccagtaacttttaacattaatattttagttataaaacagatctgagaaataatgtaaacaattcccaaggaccactagattgatgtcaataataatagtaatcaaatagccgcacagcgtacggcgatgaaggttacaccattttttgatactttctaggtttctatgatgatgatgatgttattattaatgaatgaattagattcttgggcaaatctatacatacacacataccaagttatgtctgcaactacaaggcactagattcggtcttgcttaaacatcaaaggagaaggttataataataataataata

SEQ ID NO: 50064 - DNA, 1303 bp, Cannabis sativa
aacctccgctgaacaggatgataaaccttcaacagaatccgaatgcatatcagaaacatactgagaagaatgatcatcaacactttactcgtccttcttgttattacgtcacctctttaacacacttctaaggttatcaggatcgacttgcctcttgtaagtcttactgaagatagcagcttcttcaaccaaatcatcaataatcacagcttttccttttaacttagcagtagtcgatggatcagtgggtggtggacttggatgagatttagcttcagagggagtaagagaaatgggagaaatgtatggtggcagtgaagtagttatcggagaattattggcaatagggaaactgctagggacataggatgggaatggtaaaggtaactcagggcacttaaccttggtgctactttcaggttgatttttgtgggctaactcagcagaggttaaagatcttggttggggcaagttgcccaaagtcaaatttttgtggttggatgcagtggggatagaggaagtaatagtctttctggccaatctggtaaggaaagggtaggcattggctttagagaaatcagtacgatatcggtcatatcttgaaattggaagtttatctccaatcatttggggggcatataacaagtcaggatcaactcccatatcaacaagttccatgaaagcaatacacttatcaaaaggatgaccaatcttgccacaataaaaacaaaaaactggaagattttcatatctgaattcaagccagtgttcattcatcacccgaggcagagacaccatttttccacgcatcagaggttgagtaacatcaagacgaactctagtccgcagaaaagaaccccatccttcatgaagcgagtcttcgtaaacctcgataaactcccccacccattcaccaactttcttggctaaagcacgggacttgctgagaaaagggagacgatgagtttgtacccaaaattgagcaaatcggaagtcctccttggaaacattctgtaaggaagttggggaatgcaatagaataagttgattaaagaagtgccatggttcacctgaggaaattatttgcttatcacctacacaagccaaagttaaaagaaaaatatcagaatgcatctctgacactacaacttcaaaacgacatttattgctccagaactctcccattttttttgataaaagtcttcgggttaacagtatttgagaggcatcgagcaacaataaaaaatttgggaggctgatttggatcttgaagatcggtttcagaaagggaatgaacattcct

SEQ ID NO: 50065 - DNA, 1309 bp, Cannabis sativa
  modified_base (887)..(896): a, c, t, g, unknown or other
ttttgtctgtcgctaataattctgtgactaatgaccaccattcttatagtgaaaagttcaaaaacataagcataattaaaaaaatggaattgccttctctatctcttcttactttgttaatgtttctttataattaataaagttataattataaactataattttatatttttggccttacatttgatttgtctacactcatagaatcttacaaaataccaagcttggacatgtcataactgtcataatgacagttatgacatcaactctcattgtccaagtcctatgaaagggatcctctccaattgagctcattgtcggccaggaactgagtatgtgttactgagagagaatcagagaaaccaaaattgagagtgaaagagatgtgtgcctctttgtaattgaagcatagcttcactcgagatactatgaactgttcttgacagttcttgttgtaatcttctagtgtttcattctctatcaataatgattaatgcccaaatggttgattctgaccatggagtaggcaaagtaacaaactattattgttctcgaaccacgtaaaatctatctccattttattgtttttgtgtttattcaattcatttaattgctatagcatttgctcctcattcttgtgctcaattctatactctgttttgtgtttatcattgtgttcttggtagatttttcttcaacaattagtattagagctttaggttcgaggttaccgagaacgactcaagatcttgacaagatcaagattactggacaacaatggctttagcacgttttgaggtagacaagttttcaggcactaatgattatgggctatagaggattaaaatgaaagcactactagttcatcaaggaattcatcaggccannnnnnnnnnagaattgaaagaattgggtgaagacaaaaagaagatcaatgagatcaagattaaatcacacagtgccatacttctgtgcttgggagatgaagtactgctcagagaagtttcagatgaagagacaacaatagggttatgggagaaacttgtttcaatctatttgaagaagtctttggaaaataaactctacttgaagaagaagatgtataccttgaaaatggatgatataaagaacctcagaaaccatcttgatgaatttaacaaaatcattcttgatctcaccaacttaggtgtcaagattgaggatgaggattaagggattctgttattgagctcgctacaaaaatgttatgaacattttgtggataccatagtatatgggaaagaaaccttgacaatgtcagaggttaaag

SEQ ID NO: 50066 - DNA, 993 bp, Cannabis sativa
ggtggaataatcgaaaaggaagagagagagaagtatataccgggatcttgtgaagagggacctgagacttgaagtagatgtaatcaccgggcgccgagaagacgcctttcattgctaattgctaagttcacaacacctccatcgttgaattattcgactatattcaatcgatcaatctctctgattttgattttgattttgattttcttttttcttttttacaaattgattgagaattaaattaaactaaattcgagggattggggagaagcgtagcgaaatgccaggtggctgggcccatttatttgggtcaaatgacgtcgttgccctccatctgtccgtcatcgttaacttgggtgcgcacgactgtctgatgcaccataacgacgcacttttatttttttaaaaaaataaagttcataataaaagaaaaattagacatcgcaatcattatatatcataagctcactaaatcatgggcaacaaaaaaaaaaactactaatgttaaaagagttacaacttaaaatttatgagaaattctattacaatgagtacaaaagttatcaatttttcataacaacgctatttagctacataaggaccctcccagtttaagttaaatactcttgtaaatgcattttttcgtatttgtaaatactcggcttagcactaaatcaccaacattaaaaagtattttcttcacttttttattgaaatatctcgtaatttagtgctggtatgctacattagtaatttacgactcagtacgtttttcttcaagtagatccaaagacaatttcaagagttcttgattttcttcttgattatagaaatcttgtctgtgggtcacaatattaacttctgccgacagcattgcctctgagccaaatgccagcgagaatggagtatgccttattgctattttctcagtcgtttggtgagcccaaagtacttgtggtagttcatctacccatctgttggaattattttacc

SEQ ID NO: 50067 - DNA, 1602 bp, Cannabis sativa
  modified_base (61)..(63): a, c, t, g, unknown or other
  modified_base (1294)..(1297): a, c, t, g, unknown or other
cagtacatcctttttaaagaggtgcattgtagaatcaccctataataataataataataannntaataataataataataaatacagttattacaatgctactaggtatatacaatacactgtatatatggtgttaaaatagtgctacattcagagaatttcctacgagaatataccccatcacaaagtgcgtcatatagccaaaaagtataataattaataatttcattaaaataattttgttattatgttataaaaactagttcataaatactaaaaaataattaaaaatttatatttttgcaaatttgtagtttttttttttatatattttaatgaattttaattttttttaacaaaattataaaatgttgttttgctgttacgagacaataacgtaaaaataatattttctaaaataaaaataagagaaaaacttataaaaaaacagaattcttaaaattgtaaaaaaaaaaataaaaatacccataaaaaatgtaaaaaaaaaaatctgattttaactactaaatttctctttacaaaattcaaaaaaaaaaaaaaaaattatacttttttggcaaaatgtttagttttaccattatttttatttttctctaatgttttagtttataggtaatgttttgctaaattatgtttagagaatagtggtgcaaaatagaaaaattaaaaatagtaattattcttagtaaatcacatcttcttcctcgacttcttttttctttttaattattatttgaaaaaaataaagatcttaatatcaactttactctgtccccatttggcaaataccaatttaatgcttagttaataatattaccaaaaaataaaaaaattgtcaaaaaaagaaaagaaaagaaaaatactacaaaaatggacgttccaaaaaccaaaatgattatgtgatttattctatacatattttcagtaaacttttgtttatttataattttaagctaaaaacaaaaaccttataccactgtatataatgatctataatataatatattcatcaaaagaaaaagatctataatataatataaggtgacattaaattattagtgccccacatgaatcacaacatgtttttcaatataggattcttttttaaaataaattatttcaaagtaattatatttttaagagtaatttgcggtataaatatttaagtttaattctgagttgtaaataaatttttaagtttaatctttgacagtattaatacttagaaacctgactgttaacgtcaaattattattcacgtgtcatttttttnnnngtatatttaaattatttttttaaaaaaataaaaattcatgacttagaccaatcagaaattatcacgcgacaatttatttaacatttaaaagttaagtatttatagaagttttagaattataatttaagtattattactgtaaaaaattaaacttaaatatttatttacaattaaaagttaaatttaagtatttatgtgtaaattaaaaaatagatttttttttaaattaatttaaacataagtttttttaattaatttttatttagatttctctatatatatttttttattatatgatcctaaat

SEQ ID NO: 50068 - DNA, 847 bp, Cannabis sativa
aaagttaaaacttatgcaacctaccggacagacatacatatcctattatttgaatttgagaacttgtgcaaatcatgcttccatccaacaatattaatctttttacctttctttatgaggctataaataccccaactataatctaaagaaggggtcaaaaaaaatatcctctgtaaaaagaactattataccaaatagcagtaacttgtggactaagactcattaatgctccaaccacgtaaaaatactcacattgaatctcttctaatcatttaaatgaccctaattaattagttactgaaaatctcagacaacacccctcaaatttaaggagtaaaattgataatttacaaagacacatcaatatttaattagaataatgagacaaaacctaatacaaggaccatgcaaatttctgtaaatgtaaaaatttaagaaagtttttaataaagccgtatattttaaggagtagaattaatattgtcaaaaatttaaggaataaaattattaattatattcagagaaaaggaaataatacaatggaaatattgtgtctatatttgtagcgaatggagagctgtggggcacaagaaatttaggaggtgtttaacaagaacgcagaatattcatgatttttatagtttgagatatataagcaaattaatgcgtttagtattgggtcggtgagaatagatgcatacaaatattaatactcataaatataaataaagattcaacaatttaataagattaaagttgatatgattatattatttgcttcaatattaattcctgctggaagacgcaaaattcagaatatataaatggtgttattctctatattaat

SEQ ID NO: 50069 - DNA, 1077 bp, Cannabis sativa
  modified_base (26)..(27): a, c, t, g, unknown or other
  modified_base (65)..(66): a, c, t, g, unknown or other
tttgttaatatgagacttagaaaatnngacttagaaaatatttaactaattacaatttagaggtnnttcttatttataactgacccaaatcgggatttaattattttataacaaattaaaaaaaaattatttttgaatagaatattcttaagtagaggttttattgtattagaatttctcagtcattcttttaaatattcttattcttcttattatttattttttttttaatgaaatctgaatattattatttactcccgcgtaaaaaaataaaactattgcaagttttttttttttattaactaaaattattgcaagttgtaaagtaataaaatgcacttttttttattatctaattttgtttttctttctagtcccccagttcaaagagcaaggccaacaacaatagtccagcccccaaaataaaagaaataaataaaaaataggcattagtttagcgaattacagctcaccaaaaaattagatttaaaaaatagtaaaaataatttaaaaaaacaaaaacgataataaaaatcacactttcccaccctccttactcaactctcactcatcttcttcatccttttccttctcatcctcttctctctctcctccttctcctccggcgatttttctgccggtacggacgtccctaactagtcgccgagaagaaaaatgcgactcttacttctcttggttcttcttctccatatctactcccacgattccattgctgcccgcgtaccggagtacaaggctcttctctcttttcgagcctccatctccgacgactcacaatctcctctagccacttggaacgcctccacaagtcactgcacttggtatggcgtcacgtgcgactctcgtcgtcatgtgactgccctggacttatcggggcttaacctctccggtacactttcgccagacctcgctcacctccggtttctctctaatctctctgttgctgccaaccagttctttggttcgattcctcccgagatctcagtggttactgggttaaggcttcttaacttgtctaacaatgacttcaacgggacttttcctactgagctcgcg

SEQ ID NO: 50070 - DNA, 1684 bp, Cannabis sativa
aactagttcattaatagtgaaaaggcactataatgataagaaaagcgtaacaattaatggtaactgtaatagtaatggtaatagtaatagtaatggtaaatatagaaagttcgggggtaagttcgtccccgaaacattgattacttgtttgaacgatctagaagcagaattccagtccgctttacacgatcctcagtttcaggtacgtaatttatattattaattaatttcttttaataataaaataattacataatctcaattattatattaattaattaataatagggtgaacttgagagggccctaagagattatgttgggcgagagacgcctttgtactttgctgagaggctaacagagcactacaagaggagtaatggagaaggcccagagatatatctaaagagggaagatctttgtcatggcggtgcacacaagatgaacaacgccattgcgcaggcgatgatcgcccgccgcatgggcagaacaagtgtggtagcggccaccggggccggtcaacacggtgttgccacagccgctgcctgtgccaaactgtctttggagtgtactatctttatggggtccaaagatatggagaaacagtcttctaatgttatattgatgaagctactaggcgctcaggtatatataatacttaattatgtaattaaagtttgattgaaaaatatacttattttttaaaataatacaatattaattactctctaaaataatttataatacatagtttgtatatatatgtacgtgtgatacttaatatatgtccctatccggccagtatccacaccaagttgcaataaattacacaacatatgcatgtgatcaaattatataaggttttgtttgggtattaataatataacgtcactttgtttgtacaacaaaaatacctttccatattccacgggtatagtttaccatggaaatggatcgtggacctacgtgagtggtctacaaaattaactgaagtctcactatttatttggaatattagactattagtactataataaccagtcgaataccgtaccaatcatgtagagctaattagttgtcaacagtttcctatattatttatttaatggtatattatctcttgtggtgttacaccttaaattgttccttttcgtttattagtttggactgtctctttctattgtgaccaattttaacggtactctacaaaacaaaataaaaaataggctgttagagggttttttttgaatattattaactaagatattaaaacattaagggtgtgtttggtaatatttttttaatcagttttttgtttttaaaagtagaaaagtgaaaatattttttaaaatcatgttctatgtataaaactgtttttacttttcaattttttaattaagaatttaaattttaaaaacaaaaaaatcacttttagaatttttttaaacaacatttttcttaatcaatattttggactccgaccccaacctagaccctgggacccggactctggcgtcgtccccaatcctggactcggactacggcctcggccccagactcggacctgtacctgacttaaataaaattaaaaataaaaataaaattgaaagttatagaacacacttttgttttttatttttaaaattgaaaaacaaaagtcgttatagaacacatttttattttt

SEQ ID NO: 50071 - DNA, 1104 bp, Cannabis sativa
atatactgtgagatccacatcatgagacatattaaggggtagaataataggactccttgtatatactttttttcttaatattgtatttatttataatatattttattttatatttgtagtattgtagaatgtgagaaggaagaaaaaaaaaaaagaaaaaagaaatagctagtgaatataaattaaaatatatactaatattatgtaaaataaaataataaaatgtagtggatttatacaatttaagatcataggcatatcccacttatccttagaaagaagtggtcacaagtttaaatatctctaaaaagaaagccttcccttatgtatacttaatgtggctaaactttttgacatgatatgaaattggtatgagcacgatttgacacgaaaaatatgtgtttaggcactatacgatatgaaaaagtatagacttaggcacgaaatgacacgatgttacaaattggcacgatacaacatgtaaaacatgggcttagacatgacacgacacgacacaacaaagcaaaaagcacaacacgtaagcaagattagattagctcgaaagtacatcacattaaaaaaattcaataaattaatatttatttatcaattaaaataataataatattcaaattaaataattataattattttttatatgattgtgtgtaacaattattaaaaaaagaataaaagtaattaaaaatataaaatacacatacattttagtaattagcttattaattatgatacaaatataaaaatatggagaacgaatttgagcccgtataagaaaatgagttgatctatttataaaaacaagtccattcgaataaagaacgacacaaaactaccaggcttgtaggccgcgctggacatatcctgtaaaattgttatacaacacggtgtagtccattttttttggcactgcataacacaatttattttttttatagcccggcaaagcatgacttgcattttgaaaagcccaacaattataggtcgggctagtacgacacacacgtatttatatctctatttatacacatctttttatgataatatttcccaacctgtattcttattgaattataactttcattc

SEQ ID NO: 50072 - DNA, 1252 bp, Cannabis sativa
gagggacttccaaaatagaagaattgggtgttgagagaatgcctttccctgattgagacttgagataaatttcattcgctaacaattcacggacgattgaattaattgaaggaagtggagagcgatgcaatatagaaccacgaagtccctcaaaattactaccaagagccattaaaaattaatccaatcgttgttcctctctacgagaaatatacggtgtaaaaacacgtagctcttttgatttagtgagtgccaattgattccaaagatccgtcattgtagaatagaactcttgaatgctcatatatttatgatcaatagctctaatatcagtttctaattgaaattgctttgcaaaattagactgtgtatacagtcttgcaagatggtcccatacttttttttttgttgtatcctactttgctagttgggtaccaatggattgttccacagagttatttatccaggtgaggattttcgaattatctacttcccaattttctaacagatctacattaccatctatatgtttcttatttgttctagaagtataatcccacatcttttttccttttagaatatttttttataacataaccaatacgaataattctttccatctgatctgacactgatcgcttaaagagaatcatctttattggtagccattgcaaaaaaagaacaaattgccaaaatttccaaatacaaaactgatgaaaattcaaaattgtactgcaaaatcaatactcaaaacaaatatgaatatcatggaaaaactcgaagaaatcaataccaaaatctggaatgtcgaactgtacggatgttgtatggataataattgtacgaagtttgatctgcaaaagctgtgattacgcttaagaaattcactctcataaatcttgctctaatgccatgataattatttgtaaaaagaagaataacaaatacaaaataaaagagatgcaaaagaaattagggtttcatgaaatcgcaaagtcaaaagtgaaagaatacaactaataagaaagttttatataggcaaccaacatacaagaccaaaataaaagaaaagactaaaataaccctaaataactatttaacattttgtacatcaattagatgtcaacaatgcattccttaatgggaacttgcaagaagagatttatatgcaacaacctcttgttttgaagacccaaaccaacctcaagctattttcaaactgcacaaagctttatatggactacaacgggct

SEQ ID NO: 50073 - DNA, 1646 bp, Cannabis sativa
cataatttgtgtgtctgaaattgtttaaacacaacatttgacatagtaaattagttaaaattttatgaaaatttgaagaaacaacaataatattaatatgtcagggtgcacgacattttctgtaaaagatagtataaacttgtcgcatatatttatttagagagtataatttactagtaacatcctaatattttattaagacatcttatttattttattattttgacttaatatatattttttttagcttatgttaataattatttattttttcccttaattttcacagtttaaaaatactttttactttttaagataaaataattaaagtgaaaaaaatatttgaaaactatttttttttttgataattttttttttttttggaaattttttaaagtaaaagttacaaaaattgtaaattattgtttagaaaattatgggaaaaaaaagataacaaaaaaatggtggaaattaacacaatatatatatttaaaaataaaaataagtgttacaataaattttaaaaataacttaatttgatcttccttttagtttcattcttgggtgcttttttatttttttggaatttattcttggggtgctaatactgaataccgtcatctttcatgtgtggaccaatcctgctggattttgtgatcatatattaaccaacttgttcacacagttaaaaagaaacttgttaactaactagtaactagtaactaggctatcccaaagtcaattaatgtacattacatttattacctctgcaaccacaagggcaaacctacctattattgaaatttaaaatgtttagggttttttttaaattgatatatgtatgacatatgaaacacgaaagaataaccaatgaagaaaataactcacatttttttgtttttggttttaaataaagatagaaagaagaagaagaagacaaaagaggcttcacattattatataattatttcctttattttaataatttcttcttttttataaagagaagaccttgagtaatcattgcttaaataagtccctgcagacccatttgtggtcggctgtccataaaccatagcttctctctttctttcttgctctatcttttcatttcatttccatttttaacactacaaaattttcaattttaagaaaaagaaatagactttttattttccaaagttgggaaaaataatggggtgcaaatcacaagacaagccaaagccaaagcatcggaaaggtctttggtcacctgaagaagaccttaggcttcgaaactttgtactcaaacatggtcatggttgctggagctctgttcccattaaagcaggttagttttccagaccccatagttttgcataatctcatacttattattatatttgtctataaagagttataattatttatataaaaaattatatatgcattgtaattttaacttgtttgatcatttggacttgaatttgtaacaagctaggcattgtttattatgagccaaaatggtgtctgaatttggcaaaaaagaaaaaagctctgttttttcacttctttgaaatagtattttggattttgttacctctaatgtatagatgatcaatacttgaaattcaatacttattagtgaggtaattgaagaaacttag

SEQ ID NO: 50074 - DNA, 1906 bp, Cannabis sativa
catactaacaattcaaaaccacaaaccgcactgtgcagtttatgaaaaattcaaattgtgaccgcaccgtaaagaatttcaaattgcatttttttttgcggtgcaagcgtgagcaatttgatgaacaaccttaataagaagccacctccaatgtacaaaggagggagacacaagagggatcaaaacaagaaatgtgaatatcatggtgatattgggcatactacaaatgaatgtaattacttgaatgatgaaatggaaggcctaatctggaatggccatctttcccaatgggtttagattctgattatctatttgggatagggagtagcacatggacagttggtcattcccagacaacaggaaaacataaatcctcctcaaggagtaagttaccctcaagctctaggaatataggcccctcagggagtataaaatgcccaggttccaaacactactctagcactcagaccaagcaatccatatccaccaggactcgctctgtctctggtggatgaccatgttgtaaccatttttggacgccacacatttccggaagcataagaaatgcctaaaaaaggtacatcaacgaactagaccatgaaggggaaacatgtgcagttgtagaaacacttgcccatatttccagcaaaagagtgtccagagtgttagtggataacaaaagtttgattaacataatgttcaaaactgccttccctgcaattggattaatcgaatcaaatctcatgccatgccctattcacctttcaaggttttaatagagattccctactacccatgtggaagattcaacttccaattgcattgaatggaggtgtaaccgaaagtaatataactattgcgatcaaatactgcatgtttgtagtgatggaattccccactgcatacaatgttattttaggacgactgatcctagtcaattttagagtagtaacttccacccgacatttatgtatgaagttttcaagtgataatggaagcatcaaagcagtaaaagatgatcagagaagtgccaggaaatgttacaatgtcttagccaagtcaatcttcatagtgagagaagaaatttaagaagaaggtcccagaatctgttcaaccagcacaagagataatatgggaagaagacgagttagatcctcgagtggggggtagaaagaatgattgaaccattggaggaagttgaaaaaaatatgcattaatgaagcaaatcctaccaaagtcatcaaagtaggagaaaactcacttctagcaatcaaagagcaaattgtgtccacggtgaaaacgaatcaagatgtattggtgtggagtcattctaacatgactaggattaatccaaaagaaatcctccataacaaaatattgaggcataaatatgaaaagaactggttccataccaaaataaataaacacaaataataacacataataactcaaatataatataaaaaatcaattatatttatcaactaattaaaaatttgagacaaaaaactagttccgtaaaataactaagttaaaaactaatacacaaaaaccagttaaataaaataactcaaacaaaaacatccattcaacatgctccaacctaccaaataattacactcataccatatctattttttatataaagtatgcatatataactgaaattcttggtttaggagaaatttatgggtaacttttttttttatttaataaaataataaaatattatttatataataaatattcgcttataccatcaaaatttgcacggccgatgcaaaactttcgttattctacgccagtgacgcagggaataggtactgctattctgggtctctcattgcctctaaagtcgccggaaagattgtcgtttgcgaccgtcatcttataccagcgaccatgg

SEQ ID NO: 50075 - DNA, 1293 bp, Cannabis sativa
taaaaataaaaaaaaaattagtgttaaaattatatttatttggtgttgatttaacattaaatttaaatttgtctaataaattttggctaagcaatacgagacttttcataaaaagtgacaatatgagtcacatcattcaatatttttaaaaataaattcaaaaattcaaaaatcaagaaaaaagatgtaagtaaaagaagctcatagacagccacctcaactctatatatttcagaattatataactagatagaaacgcatttgcaatttgtttctatatttttttgcgagtttatgtttttaggtaggttaaatataattttagattttgtatttttgtaaacgttattaattgaatattttattttattaaataataaaatagaccctgtattttttaaaattgtaaaaataggattctgaaataatttttgtcaaaataaaatttaataataatccgatctaagtatgttataacaaaactatttgtattttctggatctatttatgttagaaattatcttcaagttgtttatattaaaaaaaaagttgtcaaaaattaagttgagagttctatttttattattttgaaaaatataagatctaatttattatttaacaaaatagagagttcaatctataatttttataaaatacagagtccaaaatcatatttactttactactccaatatcaatgtatataatcctagttatctcttttcctaggaaagcctattaatatttcaaatatgctcgttgaggactttgacgtatttgttatttcattttttttttaagaaaaaaataataataaaataataaaaataaatctatagtcctaaaaaattagaagcaaaagaaaaataaacttctttcttgcttatagattgatgttgagaacactatccacacaaagtctattatggctgcgagtaaagcgctacatctaactcggagtaacccaaattgaatacatatggcttactacaccaaacaaaacaccatttaataaaacctcggacctatatatataatttgagaaactaaagcacatacatcatctacttagatctcctttatctaaatttttacatttcttattgaaatttgaatggcttctcaagataaacagcttcactttctcatgtttccccttatggcacaaggccatatgattccaatggtggatatagccagaatgttagctgatcgtggtgccaagatcaccattgtcaccacaccagacaacgcagctcattctaatagagttcttgctcgagcagttgaagcc

SEQ ID NO: 50076 - DNA, 1259 bp, Cannabis sativa
gtaattgtcactctcctctttctcttaccatcttcagtccaagataactgcatgtattaatcacataaaaaaaaattatgttgtggtattggtagtgagtgtcatttttaataacatataatagaaatttataaatgttatcaaagaaaaaaaatatgtaaatatatatatatcgacttaccgaccaatcatcattagtgtggcttgagggttggtccctggagacacagtaaaagttgaaccatcaacaactcgaagtgaattagctccaataaccctaaattcaccatcaacaacttttcccacaagacatccgccatgataatgccaaaaggttgtaaccgaacttcgacaatagtcttccattaacgaatcatctgattgatttgtcggcaaaagttgccctagaaacatgaaatccctaacaccatccatatccttgtacttaaatcgatccatagacttagtcttcaacaactcgccaaatttcttcattgcgctaacgcaacgcgctaggtcaattggattagagaagtagttgaaccgaacatgtggtgtgactttgacatcagtggcagaagccaacgtaagagtacccgtggacaaaggcccaacaattttttctacgaatactgttagggttaattgtggtggtaataatggggtggggtaaaagccaaaaggtaattttgttggtgaaaatggcaagctatatgagttggtctctatgtaataatctttggtaattcctacaacttgtcctgttgatgcttccaatgggaatgggattatgagattaagattgttacgaggattatcagccatgaattttccaacattgggttgggataggactatgggaatatgttgtgatgagaggtatgattttggaccaattccactaagtaacaaaagttgagggcttccaagtgcacctgcacttagtattacttctcctttatcacgaattagtgccttgtgagacttcccttctatatcgctataaataactccaatagcagtcacatctatttatttcacaataataatatatataattatgtgtattagcatatagaagatatgtaattctatttgatcaagacattattttattttgttgccaattttcttacaatactcaatcagaagaaaatatatattggaaccaagaaaaaaaaagttatgtacttaatatatagagaaatgttcaaatactttttttttttttttttttgagaaaaagactattatattaa

SEQ ID NO: 50077 - DNA, 1364 bp, Cannabis sativa
aattacgtcttcacttttaaaggagaaaatcacgaatttgagtgagggagaccttttaaaatttagaaaaatatgaaaaaagagattggagatcaagttttggtgcgattgtggcaagcaaccttaaatctagtttcttctctttttttatttattttttattttttggttttattatgttttctatggatttttttttgacgcgttgattaaaattacacatgttttctatggatttgattatgaatgtttaaatggagattgttagctaaacttcaatttaggaattttattggagattgcttgaaacttcttagggattaatgctattttgatttctttcttctattgatgtaatttatttatatttgtgcttattattatatgagtttgattgaccactttatgtttgatttatgatttcaatacaaaatttaaaaagcgagtattgagaatattgttattaaataaacatatgtttcgacacaaaacgagagtatttgtgtggcttgtgtagcttttgaattaatgcttaatgctgattatatgcgtgttatgcctcaaaaatgtaaaatagtgtcgtgtaatttagattctacatgtcttaattagaatatagattaaatataatctgctatcatagttgatagaacaagaatatattagtttgtattattgaaataggaagtagaagtaattgaaattaattttttttatatttcagattaaatcttgtttattgctttgttattaaattttttacttagattatgtagttttaaaatttatttttcaattgtcaaataaagataagaattcagttaattggtatttaactacagttctcgtgagaataatctcaaaaataaaatatttttgaaaatttttttgcccatttaatataaaaattccaagaaaaaaatacccttacaagtatgcatgaacaaaaataattttcctacctacaagcttccaatgtttatatatgctataatattaacatttagtcacaataatatttatgattgaaaattttttttcagtgttttcaaataaaaaaaaaaacattatgattaaaattaaaaatattataattaagtttatattattactaaaacattcttagcaaaaagtattaataaaaactataatttgttgtgactagggtttattataatcaaaatcaaattagcaatcactctataactaaataccattttctagcggaaaaaaatattacattttaatagaaagtatttttctttttcttgctgcatttaatatttgttttttttttttttgagaggaatttttttatttgttataactagcattgctgcatttatttttcagtgatacctgtg

SEQ ID NO: 50078 - DNA, 1783 bp, Cannabis sativa
agaatattacgtaattgattctgtccagattcaatgaatataaaatattcatttatcagaatcaataatattattttatttccttaattagaaatattctaatagaattttcacaaaaacaaaaaagaaagacttgtttttgtctatttataattttttttttcattttatgattttattttactaaatttgttttacaattttttttttcacaattattttgtataattttttggttttacaattttttacaacttatatgagtttttttatcttttgttaccttttgtggtacttaacaccaataatgatatgcaactatttatggtatttagcacctattttagtatttttgacaatttttttacaacagcttttgtgaaggttttttttatttttttttatttttaatgatcttaattctttttttcttatgaaattttttttatatatatgtaatattttgtacaatattttttttttagtgaatcatgtatatattattattattaatataatattattattgaacactttaagatgtctaacattatacaaatatgataatgacacttaataattggttagtattttctcatattattcattaaattaaaatatgtgagacccaataataaaatacaccaataacagtatgccaccatttatggtatttagcacattctttaatatttttcttattatttctaataaatagtgtataatttaagctaaaaaatgagtcaatttatttttggccttaattttataacagtgcttcaatgcatttaggataaaatttactctcttttgatagaaatgtataaaaaattcaacaaagtattaaatttttactaaattatataaaaattctattaaatatataagtaaactgtaaaagttgattaattacattaataagtggccaagagtaaataaaaaaagtaatatttattatgatataaaatttgacacatggtatattatgtattaaatttgacacaacttttagcatgtgttaaatttggacaactttatgtaccactattagagttcacttttatgaagaggactttttttttaaagaattataaagaggacttgaaatatgcctatacgcgatatttttagctctccattaaatttgctcttaatatgtacacattttaatcactttaattataattgtaactttttttattatacataattttttttttgtcatgtttggagttgtgcgtcatgttttgtctgtaccaaatatttatgtttttgtcatttttttaaaacctcaattttttatttttatttttttctcaaaaaaattttattgtttaaaatattttttaagccttttttatatttttttatcatcttttttctcctttttttttatcttatttatttattagtaatatataatattgtaaaagactatacgagcatgtatatatatatgtgatattaattattttttgtgttgttattctttctttttttcatagattttttgttatttattattttatttttcttctaaattttacttattaatagattatattagaacaaattacatggacttacatttaaacaagatgatgactaatgattttatttttcttcataactttttttaacaattatttaaacataattaataaaagtaagatatataattataagagataagttgagaaataccacttttttttttatatattaatcaaaaatacccttatattatttttttattaaaatatacccacttttttgagtggat

SEQ ID NO: 50079 - DNA, 950 bp, Cannabis sativa
ggcctgcgtttaatgcttatgagccaaaatcaggagcatctgacttgggatagtgtgacttcatagctttaaccatgaaggaattggaaataacactaattttcgaagtttttagagcaaaattaagcatttttaatttttaatgacaactcaacaaaacttaatctgctattatcaccaacctcaaatcgctgctgggtcctgggctctggcttccccatcagcctgtgtagtgtctaatttgagaagctgcatcatcagcatttctgtcaaagttttgtaccactgtgcatcattgtctccagagtcataaccttattaatcttctgaatgtcacagacaaaggcatataaatattaatggtggtaataaaaccttttgggtgagcttgtcaacctctgctatctcataagcttttaaaaggccttcatttttcttcaactcttgaaactttttctctttgctatctgggtctttcagtagtataatcttggacatgttttttcaaatcacctttcattattcaaagccaatttaagaaaaggttttagaaaaccatataattctaataaaaaaagcttcattatttgattttttttttcctgttaaagatgttcaatgtggcataaaaaaaaactgtatacctatttagaaagtatggcttatttttatttatttatttttttcaaaaaagatagttgatatagttccaaagtacatttgggctaaacattttataccgagacatgcatggtctgatcctctttatgtttacaaaaaactccatgtaaaaattacactacatcctgtatacgtatatttatttatatggaaccgatttggtcacgctcggtgtaacgtgcgtgttaagatggcatgttacaagctaggtgatgtccacaagttagtcaagtggtggcgcatgttggtgtgcatgctgatgcttagtt

SEQ ID NO: 50080 - DNA, 2971 bp, Cannabis sativa
  modified_base (26)..(28): a, c, t, g, unknown or other
  modified_base (164)..(168): a, c, t, g, unknown or other
aacatataaacatgattatattccannntgctgacaacactataatcatgatcaaatacatatgttttggacttaatagaatttacagatcaaacaatcatgaaataaatcatgtgaaccatgcatcataaaatgttaattctgatctttattaactagtaaannnnnttatattgaaatgggttttctttagggcacaaaacccaacagaaatatgtaatttttatgatgtttcctaagtgacgatgggaaatgcgctggatgaccgttagagtcacatgggtaagtttagaacttaatacttaatgagacaaatatttgagatatttagaatgctaggtttaagcgagcttatagttttggaccatattacccctaggcttataattgcgtaagttgcaaggggggcatttttggtatttttcattagaaaattaggttgctttgtccattttggcagctggccatttcattttaattcagcttaatttcccaacgattatttgaattaatcaattaaagaaaaacacaaagagaaaagagaaaaaattgaaatgttatctctctctctctctccttcaaccctagctagagccagaggaaatcatcctcaattgtgactgctttctgagttttctttaagattttgaggtagcacaaagatcttatgagttattagttgagtttgagcatacaaagtttttaatttagtactatctgattatggggtagttagggtttattttttagatttattttaggttgattagagctagtttgaagttgtattgaggcataatgtttgtgttgagcaagtttgagtttaaagaactcaaacttgactcgacaatggtgttttgaatttttgtggtttcttattgttgtttccagttggattttactcatggatgttattataggtggtccggaaggttttgtgaagtttgggaacaatttaggcatgttttggaatttttggggttctctagtgtaaaccagttaaccgatttaccaattcgtgtcatttttagagtcctaattttagtgtttccttgataattaaggtattgtcaagttagttatcgatagcaaaacttgtagttgtgagtttcagtctttggattaggttttaacgtgttatttatccattaacgtaaatgtgacatagggcatccatctagcgtgtaattttccgttcaggtcaaccagtacaattgaatttagaaatgaggtaagaatagcattgaacacatttatatatgaaatatgtgtatgtgtattatatgcatgctatttgtgattcgtatactaccaacactagtatgatagcagtactgagtgtactggtacaatgtatgatgttcaatgagtatagtacggtattgccaacactagtacggataggtacagagtgtatgtggtacaacacttagtggtactcgaggtacggtgcaaaccctaccaacactcgtacagtagtggtacatagtgcatgtggtacagtggtcatccttagtaaagaatgttcttacttatctgataagccttgtggatatgtgtatgggcacctagatgcaagtcggtattatgttatatgttatatgcttttctcactgagtcagttgactcacagaaattacttttgtgtgtaggtaaagcaaaggacaaagctaaatagcagtgagtttcgagctcaagggatgattgtacatgtcaagacggtacgacctggagtgttcggtctcgagacgactttggctgtattttgtagtcgttgtgcgacatatttgtaataagttattttaaatatgtttgtaaagtttaaatatgtaaatgtttgcaaagtttaaaagtttaaatcaaaattttaatttagtacaattttcaagaaaacctttttgattatcaaaggcgagtattataattagaaaatcacgatagcatgcctaagttttagggcgttatacaacgatttggccaaaatgtcacagtagtttggattagtattctagtattttgggatagtgggtcatgaccattttatcctaaaattagtggctatttagtagctaagtaagagttactagcgatttgtcatttaagctttatagctttatgtatttgagtttagtgattatatgaatttttggggattataagttgagtgtatagaaaatgctaaaagtaagtttactcataaatcaaacaactttatctctcttcaatctctctctctctttctatattctctcttatctttcaaccctaacccaaaccaaagagaaacaaggaaccaaagaaagttttcagaccaattcttttccttttgagcaagaattaatcaaggaatttcttagaataatcaaaggtaatcgtagttcccttccctcctttttaaggttaaagcttatttttaattatgtggttttgagaactttgacagtttagttctatctgagtttgaattgtgtagaaactattttaatgtttaattttatttgtttatggcttgttttaagagttgtagcagttgtggcaggttttgaggaaatttgagttttatgaactcaagctttgctcatccatggtgaattttgttgcatgttattataggtggttttaggttttgggttatccttagaataccccaaatttttgttctagaaatttttgtaggttaaggtaggagcaagttttgatggtctgaaaatggaaatttttgagcccttgttgcccagaatttgcttccctgaaggttagcttccacgaaggttagcttccccgaaggtcagcttccccataggtaagcttccctaaaggttagcttccatgaaagttagcttccatgaggttagcttccctaaagaatagcttccatgaaggttagcttccccgaaggttagcttctttgaagtttagcttcctcaaaggttaccttccctaaagtttagcttccccaaaggttagcttc

SEQ ID NO: 50081 - DNA, 1036 bp, Cannabis sativa
aatgcattgctcgtctagccagtagcaccttgatagctaaggccaacttgatgcccattcagtccttaaaagaactgagaatcactattttaaaagaaatagagatgctgaatgacacccatagcggtataccttcaaacatgaatcttgcctaaaagcaagaacaaagtaaaaaaaattgggacgaaagctgctaggtatctaatcctggatgaggttatctatagaatggtttctcaatgccacttccaagatgtgtcaccaaggtagaagctgaacgactattaataaaagtgcatgaaggcttttgcgacaatcacgttgggggcaaaacctatctcaaaagatactcaggaaagggtatttttaacaaattatgaccaagaagtaaagcacaccttgctggcgaaatccctttgacaaaatagaagaaaaaaagagacgaagccaacttaaagatgcatgccattagcaaaaagttgctaggtactttaataaataggtcaaggaagttgaattcttcgtaggagacttagtgcttcgaaaagtattcctgaataccaaaggtcccgcagcaggagtgtttgggaaaaattgggaagttctgtaccaagttaccaagataacaagcgaaggtgcgtacaagcttggcatgtaccatgagaacatggaattagttcttctaccatgaaactggaatggagaacaggtcagaaagtactacgagtgaccatattatcaaaacattactctttagtaggagttcctgtacgtctcaccgtataggaattagctatgtttccatcactcttcagtggtggcccccacccggtatgtcgcgcaggggtagctaaaatgatgattgaaagcagactttataattgtaagcttttattatcaaaaaaatatctgttgcacaacaacaacatatatgtaagacttataaatggataaaatactttctctttccaaattgtgtcaaataacttgctaaaactataacttttaaaagttaatcttgatttttagttcaata

SEQ ID NO: 50082 - DNA, 981 bp, Cannabis sativa
cataaatatacagactcgtggactaaggctcattaacgccccaaccacgtaaaactctctctctctctctctctctctcttaatttcttaatattatgattgtaatttgtctgtggattgaattttagtttagaattattagttataaagagcctctttataatatatggttcatacatgtattgatcctctttagttcttttgtttgtgtttccttagagaagattatttcttctttgtccttgttttctcatgttctgcggttttctatataaccaattagtaatgtctggtaatccccaaaattaataatttctttttttgagaaaagactattacccaaaattaataatttaaatgaaaagacaactgtaaactactttgatactggtaagcatagttgatagatcaaaataatacaatacttatgggcaaaaagattgagcccattaggtgggatggttattctactgggcttcccacccattttccaaattgtgtagtcttgttacatgattaatgatggtcgacttcgagtatttggtattggctccttcaaatttcaaagttaagaatatattgctgcaaataataataataatttattttttttattacaaaaagatattaagtagcactataacagagccaaaatgggtcgaccataacaaccaattaaaaaaaattaatataaaaatattctgacatggtgccaactcttggaatgacaccacacctgatgggataagcacttattattattatgacatccttattttttaaacatcggagatcctattatagggaacattgttttccatttttttttaacaagattacaacatctttcacattagtaggaagtatttatcttttagaaattcaatgtacttctttaaaatggatatattaatgtacccttatctattttagcacccgaaataattttttagttatttaagacatcttgtaaaattttaa

SEQ ID NO: 50083 - DNA, 941 bp, Cannabis sativa
aaaagaacttatatatgatcaacatatgtatgaagctaggttgatttttttttttttttttgaattattctttttcttcttaattgatttttttaaaaaagaaatatatctttattaatcaaacgtccttcaaaatcaaagacaataaattagcaggaatggaattcttactaatagtataaccaattttagaataagagttccttgcaaggaaatatacaattttattcgcggatcgtttaacaaaaataataaacacattattaagaacgggcaacaaaaattttgactcgttaataatggtgccatatggagagatcatatgaactttgctttgtagagaatggacaatgttaatgcagtctgtttcaactagaatattttgccaactttttcttttgatccagctaaggacttctttaactcctattgcttcagcaatctcagctacaacaactctaggtttgcaagcttaaaaggcttcaatgagggagtcatcatgatctcttgctacaaatccatagccaaagtgattctgattcacgaaggataccccgtctacattaatcttgatctgagagtaaactggtttagaccattgctcaagtccttcaccatctattggaaaagacggagaatggataagtgacaaagattgagcagatttccattaatcaagagtgagtttagcagaagagataacttgcagaaggttgaatgttgttccaaatgagatcatttcgactttgccataaagcccaacataacatagagatatgttcggtgtcctcatttaaccagtgagagatgatgtaatcaaaccagacagtaaatgcaccttcaatggtgtctctaacggatccaaatgctttcctccagtaactttgtgtgaagctatatccagtgaaaatgtggatgagtagagttgcataatgggcaag

SEQ ID NO: 50084 - DNA, 1329 bp, Cannabis sativa
atatttaattatagtgattataatgctcttgcttgaatattcctttaacagtcgagactcatgtattacaagtatatgcttgatctgaatatgacccttttatgagagctaatggtaggacttgaacaaactttagcaccttctaaatgaaccttgactaataaaactgcgatgtattttctttgaggtaaggacaaaagaaactatcatttcaagttcaaaaaaaactatcatttcaattgagtgggagtgttaatcataaatatcaacatctatagtttctgaattagacttgaattaggccatgcaattaagatgctctctacatagactagtaggatgactagattattacttgaaccatacacaaacaatgtagcatccaccttagaattgttgtaaatccctaggtaagtaatgtagttttgagcttctcattcaggcacaaggtgcatgttttaagccatagatggctttgtgaagttgacatatataagtagcatgatttggttcttcaaaaccatgtgattgtgtcatgtaagcaccagatgcatcatccaatcatttcacttcccacttagatgagacaaccaaggtaagcaccaacctaccataggactgaaagtgtcctcatagtccatttctagatgttgaagataccctttagaacccaattgagacttgaatttatctaatgatccatttgcctttaacttgatcctaaaaacccacttgttgccaataagacccatatgagattcataaggaactaaagttcaagttcctttaacaattaagacattaaactctttttgcatagatgcattcaaagctagatttcgaagaggtgctttagttgatttatggtcactaggaagtaggcatttaggaaattaatgcttggtagccatatttgtctttggcttatagaaacctctttgagatctggtcaccatattatgagttctctgtagcttaggaactgtaacagcaacagaagaagtaggctgatcaataggtgccatagctgcagtaggaggagagtgagatgctgacatcttaggaattgccaatggcagtggagatccttgtgtagatgatggagatgcactaggagcatttatgagaatagctgaagatgcatctggtgtggaagtagactcatctctagaatgagtttgaacctcaggagacacaatagagacactaggtgaagaaactaaattagcatgagtatggacaacgtttgtaaagagttgaatagtaggacaagtatcaagactagaatgtacctaaacataggagtaggtctggatgctggaaatgaga

SEQ ID NO: 50085 - DNA, 1651 bp, Cannabis sativa
tatcattttttctaactacaatattatttttaagtgtcatcattttaaagtgtgtaaaacatatattcaaaatcaataataattttttagtttttttttcctaataaacatttttgtttttctttttcaatgttgtaaataaaaagaatggaattatctcatataattttttttttacgatttaagttatttcagtggttgctatgtaaatttaagtattgttccattagttgctatggaggttgctatatggatttccgtaaaaatgtaaaaaaaaaaaaaaaaaactactttgaagtgtaaaaataaaaaaatcccctaaaaaaatatatttaaaatttactataacacgttattaaaaaaataagacacgaaaaatactaattgatttgtaaaataatattatctttatagatatatatatatatatatttgttacttattagttaacttttaaaatcataattttattttagttatatatattgttcatgaaaatatatttatgttatttttttgtttgcttatttttatatagtgacgtttacgttatttttaaatatatttaaatctaataaggtacaataaaatgcacaaaattattaagtagcttatattagcaaaataagtataactttcttttcaaaataaatttatatagagtatataactatataataacttttatataaaattacaaacattttttaataatatgaatcagttgacatattatattatttaagttattacttattactttttttttattgagaaatataaaagaaactataaggttacttttaattctaaaaattttattcggtgaaaaaacctataattcttttcttgtaagttatttttaaaaacaatcgaaaatattctacaaaagaaatttgtgagaagacaatttagtaactaaaaatgttacctatttaatactaatcgaaacaaaaaatatatgtaatttttaagagtagatcgtaatagtgtaatttttcaacacaaataattaattttgttgtgacttgaaaaaatataataggaaattgatcaatattgtttcataatataaatttatgtagcatacaatttagtaacttttaactattaaataataaaatatatttttaataaccaataaaattagttggtatattttattttgtttaaatttatattttgattttgttttttggttaaactaaaaaattacttttaattttaattatattttccagtaatagtaaagaaatatatgcttctcaaatattaaaatgatcgcattgaaaagtagattataataatagaacttttaagactaaacaaatatcaatgtaattgaaaaagaattttaaaactattttttttaagaaaaaaaaaagagaaagtataatattgaaaagaatcatattgttattattaaaaatgtactttcaaatcagtcagataaaaaaagaattgcagggagataaatagatgtttgggagaaagaagaaagaaaaaaaattaaagaaaaaataaagtaacgtgtacatacaaagagcgagaaaaagaaataaaaaaaaaacaaagtaataagtacaaatctacgtatataattgtgcaagaaaatttataaaactagctatatatttcacaattaattgat

SEQ ID NO: 50086 - DNA, 1273 bp, Cannabis sativa
  modified_base (50)..(51): a, c, t, g, unknown or other
tctgtgccctagaaatggccttttgatttttctattttatttttctgatnnactttaattaggttttgaattgcaatgggcttactccagatttgagttctaaatagaagacaagttgacaaacaaggttagttcagtttgagcaatactttttgatacattttcttatggattttttgggtttcaattgtgttgtgtgagataattgagattttcttacattagttgcctatattctatttattcagtttgtataagaaaaaatttgattaagttcattatgttttgttgcttgagtatgagtattgtgatttggggttgttagtatgaatattgtgatgtggattcttctgtgatgtttaatttcagtgataaggtatgttttccttaataaattttaagctatttctcagtatattgtgggttctattctaatagttaagtttgttgatgctgattgattttgtggtagcactctaggagatgactgattctgagaaaaatgctttaagttacttctattctatagaaacccttttggatcttttggttgtttgtgatacagagattgtattatcatcatttaaaaataattgctagatagctttttggtttctttagggcgaaaatattaattctaggtaatgtaaaaagaattgatcctacttaatagagtagtactatccttaattctaagaatctatcttaagaaagaactaccccataagaatatctatagataaaagaaaaactaaataaacctctgcttgctgtgaaggtcagattcaaccctattgatgatgacttcaccttgtaaagccatacttttattattttggaaaagttatagtgaagaattacccattagaagagaagcgtatcatgagatagaataattataaagttaaaatcaaatatttcaaagccccctttaatgccttttttacctcctcaatgaggccgagagacacactagtaattatttactgtagttagacattcacaatatacgcaggcaactgcatttaggtttaattatgaacaaatattagtgggccatagctaattatatattgactttgagagaagactattctaattttcacagaagattgttccattcggttttgtatcttttttcaaatgaaactctcacattttctcaaacctgttgttttgttttctttttaaaacaaatataaatacaataacaactataacaaacttctcatggttacgaaaattattaattactacgcaagtgcacgcaatc

SEQ ID NO: 50087 - DNA, 1296 bp, Cannabis sativa
ttaataataaataaattattttttaaagcaatatgctaatggagcgtggcactctcatttttcctttgtattttatttggccaatttgaattattactcttgaattttgatatatactaaattattttttgaatattttaagtcattagaaattctccaaaactatttaaattcttgaatataaggacttttgtctaattttattaaagaaagtctaacgtggatgaaaatttaaggagataatttggtacatgttaaaattcagacaacataatttagtagatagtaaaattcaggatgcataatttaatacatggacaaatgctatattagtgaaattgaataaaaatagacagaagtccttaaatctaacaatttcaatagtccagaaagaatttttaacggtttgaaaagttcactagacatgatttagtacatgtcaaagttcagagagcagaaaaatcctaattaactattttattttgcaaagaatttcatcgaaatttaaatgtaagcctaacttcatcaaaattaaatgttagcttattgagaattttattaaacaaagactaccctctctataacatcaactagccaattatgaattcagatttacgaacattaaaattttgaaccaagtctaaaactagctgacacagaaattattcattttgtttctcaaaaaaaaaaagttatattatatgaatatagtttttggtgttatttattcattaaattgtttttccttcttcatcaaaaaaaaattgtttttcctttaattttaaattgagtatcagcttaaaagctgtacacaaatatcctcctctacaatcactgaaaaattaccaattcggatctttcccttttctttttcttctatcttcttcatgtttcattaataaaaatacaacaattgttataaaaactattataaataatataaaataggaaacaacaaaacaagaaaaaaataaagagataaatcgaaagtaaatgagaattttctaaccttgaacttctaattatataaaaaaatatggctagaaaaataaaaagttaaatcgatgaaataaataaaaatataatagtatttatagtaataattaatttgtgtgatttagacatttatatgtataatattttataataacaatttatatagtgacacgtggacattaacctgtcacataacggttagatacttacggaagttccacactagtgacggaagatatttttatcgcgaaaaatacatcttaggtatttatctgctactcggcataaaacttaggtatt

SEQ ID NO: 50088 - DNA, 868 bp, Cannabis sativa
cataatcttacttgtgaaataatctatgaatatctagatcattctctcgaagctttggcccagtactataccaacctacaacgtgctccttcgctgaacattatcagaaatccacacaaaatatatgatttagttagtccaataaatttagcacagtaatcaatatctaaattaaggggagacaggggtaccattaattctcttgaacatcgaatacattgattcgtggtagttgtggtcaagaaaccaaatactgggatctttatcatcttcttcaaatggcactgaaattcagaacattgtggtaaatttttttgcccaattgtcaggttaaacgcattttgcgcatacatagaaaagcggaaagttacacctaagagtgttaaactaatagtatttattgcagtgcaattacaaatgacaatctttttataaactattaactgaaaattgtagatatcctcccaagtctcaaaaacatacaataataccatagctttaggttggacaggtttgtataagaaccaattccggatacaaatttctcaagtcacatacaaatttacttaaaatctttctacaaatgattatcgtatgaacaaaaaatgaccattcagacacacaataaatcatattagttataactttcaaactagaaaacatttagttacaaatacaagacaagccataatttgacatccaagatgcatctatccacaggtacttcttgatcttgtggcttccaatccttatatcaattttaatcttaactacaagattgttctcactggagcctcagaaaataccttcacttaaataaaatctatcatatgtataaaaaaacactcagttgagttgagctgtaacc

SEQ ID NO: 50089 - DNA, 5600 bp, Cannabis sativa
ttgtcatttaacaaaacacagggtccaatctgtagcttttgcaaaatacagggtccaaaatggtatttaccctactttttatcattttgcataataaaattaataatctttttaatgaaattctttttaatgaaaataataaattttacatcaagttttacaattataccttagatcactattaaaaattgatacaaatacatcacaaaattattcttggccaaattcaacacaatttttaaaaccttccattcaagatggtctagcaattcgttataacccaatgcaaatttcatttcatatgttggtgtgcttgacaaactagttttttgccactattttttagatatatttcttaaagtacaaatttttggaggcaaaatagtatataattcagcaaaaaaaaaaaaaaaaaaaaattggggtatttactataactactccaattatttttattcaaataaattactttgacaaagcagtcatttgaggaactgcagctatatattcatggtattagtcatagttaaagacttggactgatataaagttcaaaaagaggaaaataatagtagtaatataatagtagtagtatgttgacctacaattgtactaatgtggtggccaggaccacaggtgtccctaacattttttcagaaaagaaagcagagacaggtttcattcggttgacaatccaatttgttctctgagagtttggtaaatggtctcaacaagattgagtaggaacccatctgagccatgctttgccaataaggaaactgacacaggaaggctatcatacttcccaagtggtatgctcacctatattaggtacagaaatgaattcccatgaaattccatgattgggattgggaaaaagttgttaagtgtttaacatgttagacatttgattacttgaagagaaagtaacaagaaaaagtgagaaagaaaacctggcataacccggatactccagctatggatagcaagctaaacgctcttgcacgaaacacttcaagagtgcttgcaggtgtctgtagttttggtggtggtccgggaagtgtaggaatggcaaggacaccaaaatcctggtggtaatccaaatcagataaattagattcatggccaatggccttggtagaaaggtctgtttattccatattattggtcaaaataaattacaagatcaatgctacttaattttctaagcataagattgtcaaaaataagttcaggagtgagattgttgttctttttttttttttgctgaattcaggagtgagattgttagtgttccaaagtgtacacgcagagctctggcttattttaaagctgagagagaaagagagtaccccaagaagttcagtaagagctgcacgtatttcggtcttcacagaaagacaggcatcgatgttttcatctgttgcctcaagagcttcacatacacgttctgatatcccaggacctaaatcaggcttgacagctttgacccattcaccatggttgctcttgaattcatacctaaatagacaagattttgcttagaaaagtactgaagttaaaagtaatcactaaagtcaatggaatccagtataacaatctacacctttgaagcaaacgcattgcgcttgataaggccgccaaagatggaatgttgtactcttgttcttctacatttactttactaacaaaacttttcaagctcggaacattttccatgacatagttcccaaggttagcatattttaagagatggcctgcgttggtaaatgtaaatgacatctcactctaagaaagtttttagataaagaatatccatacctatatcacctttctaatgacccaaccttaataccttatcatagcatataatttccattttacatataaacaaacctattgtttctctaactatgttagccactctaaacagctgagttgtataagcagaaagtagagggattaaatagacttgtcaatatcgacgacaaacaaaactgaaattgcatctgataacttacccccaaataacttttctactgatttagctagaccttctacgattagattgcctggagtagttgaaagctggaaacagtcttctgcaatgatcaactgagagggtctgataggatctacttgtggcaattgcagtagtacacgtccaactctattcaaaagctcatgatccctagcaaaccatcctaaaccagaagttgtgtcataaatagctcaaagaattgttcattttcattgcatatgaaaaataaagaaatcatccagactgggttgtacattgcaggtaaaattagagcatagtttagttccttaccaactgtatcaaaactttgtgccatagggataaccccagaagtagaaatgatatcatgagaaggtctaaacccaaaaattccacaataagatgcagggactcttacacttcctccggtatcagttcctgtgatttagataaattttgatccaaatatatactattaaaaaatcctatattaatcaagaaaaatagttagtaggaaagaataatccacctaaggagaagtctacaaggcctgcaccaactgcaacagcagatccactagaagatcctccaggcactctatccggtgcacttggatttcttggagttccataatgcttgttttctccatttatactgccaaaatatatgagcatgacattgtgtgaaacaatataccacagcaatgttctacacttcaacataacaatatactaacctcacaaaacaaaataataaataaataaacaatatactaacctgtatgccatttcatccatgacagttttaccaacacatttggctccagctcgtaagatagccaaaactgctggagctgttgaagtggcaggtgagtgagtccttgcccaatcaggatttccaaatccagttacaaatccatcaatatcaaatctgctttcaagctccaagttgaagaatcaaacaataagaattacgcagccaaaagcccatttgaaaatagatacatactacacatataaatcccttcagagtcaaaagaatgcagatgaaactgaaacccagtacagcagtacttgaattttatgtacacaaccgtacacatcatcagattagacaaaaacgtaagaactactagtagtgagggactcacatgtctttgacagcaaaagtgagggcatggaggggaagttgaatatctgaagaggctggttgcagaataattttttccatgaaagctccattatcggagtctgtagccatgtctatcactgccaccggagtaaaagcttatcaacacgtgaacctgaaagctatacggactttgctttgactaaccgagagcttcataaagctgatgaataacatcagccattatatataatctattttagtcatggagtgacaacattatccctttactttacattagtgaccggtctgcttttattggattaaaccagagttataagggcaaagcaggaatatggattgttggcctgttcttaaattattcagaaaaatttgtggtcattatttaagcctgcatatcttcaacttcaatggtaaaatacaacagttcccatccacaagagaaaagtcaccaaaaatttaaccttgttgcaattgcacaattccgagggttgagacacagtccagtgtgacttagtctaaatcaaacacaaagatcttataaaatgcttcaagtcattgaacattttattcttgtatgcaaatgatggtttaaaatcatgttgatatgataagtcagatcaaaatatgaaattaagaagacaataaacaaagacattgttacattggtagtaatgtggggaaataaatatcgaatatatgatattggaaaaacttgaattgcaacatatgcagatgaaactttcaatctgttccatcagagtcctcatcaaaggtaaacaaataaggaattacagttctcagttcactggtttctccttgagtactctcactagtttcccccggggaactccaacctagccgctgcttgtaaacagcatcataggcttcaatattcaaacccgaagcaagaaacaattccacttcactaacaaagagatcggttcgtgctgctagaaaaggcctagctgcatcagatattaatgatcgaaactcttcacttttggcttctggcttgtttctttttggttgttgtttgctcctacagaaaccaaggatttaaaaaggtaaaggcatcgtatcaacatcatccaattctcattcatgagaagcacatatttttaacaatttaagacacaaatataaagcaaatagtactttgtctgaaatgaatcgatcactccacatatgtggtgtacaacgatgccaacatcttcctcctacagctaaaaaaacgagcaattcagccatgctggctcatgaaatccacacgaactcaagaaaaaaaagttatacatattatcatcattttgctcactaactcagagacctgcataagggtttgaatttcccttctcaaccaagtatggagccaacggtttggatgtagatacttgtgtgatttccaatagcttgacacactaaaaatatcactcaaaagccctaattgaacacaacaaagttaggcactagctagctggagaataaataaagggaaacatagcaaagaaatcagtgtaatcaacaggatgagttgagtcgaatacctggttcggtgtaataacactgtaatctgtacttgtgagcttttgataagacaaagctgaatataaaaatacatgaataagaaaatgaatctcacaacagagatgcaagactcaagaaaaggaaaacatagaaacacacccatatccaaaatcctgattaatgtaagactgttgaaatgaacttccgacaaatccatgtattatagaaaaattttccacctacaaattacagaatccattaaaccgatcacagaaaaatgtctttagtctgtaatcaatgcaaaaatcaaggaaaattttagtagttgaaatttattgtcaacttctctacgtttttttttcgcaaagttctgaaagttatgtagacaaaggtgaaccttgcagagaggacactttacagaagcaagtttgagagagtgcttgccagaaaccactttagtccattgcataatgcagttgtaacagaacttatctgcagaataagaattgaaactatcaattattcattctatacatataaatgtaaatagttgaatacatacatacggaaacatttatcaaggaatgattcttgaataatgggtccgaggcagatggcgcaaggattcgattcctccgaagtccgagattccctgatgtttgttctcctcatatccttctccacctctacctccgttaccggtcctggccccggctccggctccgtctccatctccacctccacctccacctccacctccggcggctctggtttcaagggaagaacgacgaaaagcaaatcgcggtatacactttctttgaaaaaaaaaaactgcgtagatatattaaacaaagaaaattaaacttaaggtcatcgtataaaatgttaggaaattttacaatct

SEQ ID NO: 50090 - DNA, 2220 bp, Cannabis sativa
  modified_base (2087)..(2096): a, c, t, g, unknown or other
  modified_base (2159)..(2195): a, c, t, g, unknown or other
caaataaaaaagtgatagacaacagtcttagcttcctccatgtataatttcacgattgtttgagatgtgtatgctgagattttaagagaacactaacgagtgtaagaacaagaaaaatacatattaaattttatgaaaagaagaacatttttaattttttttattaaggggtcattttaacaaaatttaacgtgaaacctatctacatattgatgtcttagtagtataaattcattgtgcctaacagagaaaaatattaggtccggacaacatttcacaatttcgataaaaataattattagtacttgaaaactatactcacatgtccaattgaaaagtgataaacaactgtcttggcttcctccttgtggaatttcacaatttttcgtgatgtgtacggtgagattttaggataacactaacgagtgtaagagtaaggatttctttttaaaaaatttaccctaaaaagaagaatatttttaattttttaattagagggctattttaacaaaatttaacgcaaaacttgtctacttattcacgtcttagcagtacaaatttattgtacccagcgagaaaaaatattatgagatgcaatctggctacatttcacaaaggggggggtaccactatcagaaaactgagattttcactattttgataaaaagaattatttgtgcttgaaaactatattttctctccacgtgtccgatagaaaagtgatagataacgatcttggcttccttgtgaaattttacaattttttgagatgtgtaaggtaagattgtaagagaacactagtaataagaaaaaaattgttaaaatttacccttaaaagaagaacattttctatttttgaattagggagctattttaactaaatttaacacgaaatctatccacttatctacgtcttagtagtacgaattcattgtgcttagcagagaaaaatattacgatcagatgggtccaggccacacttcacaaaggagtaattgtatcaaaaaagtaagattgtaactatttcagtaaaaaattattactagcgttagaaaaatctacgtttcctctccacatttataatagaaaagtgattggataacgatcttgacttcttccctatgtaatttaaagatttttcaagatatgtacgatgagattttaagagaaatcttatgaatgtaggagtaaggagataacttgttaaaatttacctctaaaaggagaacattttccattttgatttaggggggtattttaaaataatttaactcgaaacctatctacatattcacctcttaacagtacgaattcattttgtccaacgaagaaaaatattatgaggtgagtccgagtcacatttcaaggggtaccactaattaggaaagtgatattttcactatttcgataaaaataaacgttttctctccacgtgtgtctgatagaaaaagttattgacagcagtcctgacttcctccctgtgaaattttataatttttcgagatgtgttgggtgagattttaagagaatactaacgagcgttagaataaagaaaaaaccttttaatatttaccttaaaataaagaataacatttttttattttttaattaggaggacattttgagcaaatttaacacgaaacctatttacatatttcaatcttagtagttcaaattcattctgcatagcaaggaaaaatattttaagattaatttgtagcacatttcacaacagggtacatacagtgtagtactattttgcatagaacatagtataatttaatgcaatctattattacatattaatactaaatataatattattttaaaataacataatataatacaagtcaacacatagtgtaccaaacactccatacacgtatatatgagggaaagaaaatgtgaagaacataaataaacatttttctttgtaaataaattaaaatgaaagaaaataaataaaaaagattcccatttatttttgaaaaaagatctttttttttttattattatatttttatttcgtttatatctttatatattaaaagtgcctatctaacggtttaacagaatatacttaaaannnnnnnnnnattctgttaaatttaacgattagtttgatctctcgttaaaaaaaataaacccaataattaaannnnnnnnnnnnnnnnnnnnnnnnnnnnnnnnnnnnntctttttaaattaaaaaaatcatct

SEQ ID NO: 50091 - DNA, 838 bp, Cannabis sativa
agggaggcccaagatgggccctttcgaggtaaaaatacaggggatgtctgggatttaaatttggatcccttgataggttggtttaaatgctttgtggggcctaacctggctccgttttcctcagagatggtgagtcattttgctgctaatttaacccaacttctcaccaagaggtatgcgacatgtgcttcttccaaccccgtttaccagatccaggacatgagcgttgccttgactgcagtaagtgtcaattttccacgcctcttttatgcttttatttttaaagttctaatcttatcctttatgattgtttagaattctacgaaggtcggttgactttccaagactttgattgattaagggttcaccgtgtcagagtttagcagcatggacagggtcttgaggaagctcagggagtcagtggactagatagaggctcttcgtgatgaagcccgagaggagaaggccctcatgaagaggaatcatcaggcgatattgaaaccaaaggacgatatcatcatttcaggtaggaaggacctccagaattctagagaggagaactaggaactcgttgtgaagcttaaatctttagaggagctacaacaggctaacttggagacaacgtccaatatctgttaaactcaaggagctttgcgagttctgggaccaaacccgaaaggaggctgccaaggctgcgagggatattttattggctctaattacttgtaaggactgtgagaaatgcttcgaagatggagtgtttatgtgctggaaggccaacaagttcgaacctcgccttcctttcttccccaaacctaaggctgttatagctcaattt

SEQ ID NO: 50092 - DNA, 1130 bp, Cannabis sativa
cgctcttccgatctgagttttatttagggcataaaacccaacaacactgtcgctggtacactactacaaattacattattcacgttggtcaacgctattgttcatagtattgaccggcgtgaatagtgtccaaattattagacctgtgtatttaaaaacgccacaaataatatatattttgcgtcttttaattaagtgacaataaaagccaaaccagcgaaataaaggaaaaaaaatataaaataattgcttccatttcgcgtcagtttgtaacactcgctcaaggtgtttgcgaggtgtaaaaaatgacgcaaaatacaaaatatgagaaagagaaactgacacaacacatgtaaataaaatccaaattagccttaacaaatagccctcctcttcacgctactgttcacacttcacaaccctcctcttcgtgcttgctctggtgaaactaacaaccaactccaccgtcctcttcgaaaccatccaactccaccattctcttcgaagaccggcctccaccgtcacttccatagccccccaaactccatcgaccacctaagctccaaactccatcgaccaccgaagaaccaaactctattgaccatcaaatcttgggctttctctctctatgccaccacacaaagctatttgttggcctccaccgtcacctccatggcttacgacgagcaaggtaagattttaaatttgattttaggtgttaagttcaattgttgtgttattgagaatgaaatttcagattactttttttgtattattttgtgtgattttagatgtgcaatgtgatagttttattttgtcaaattttttatggttttttagatttttttatgatatatgtatttttttttttattgtttttcaaatttttatatattgtgaaaataatgtgtataacccatattaatttcaaagtaaatttgctggatttttttttttttttggaattaggattttgaatttgcaaggttaagatggttttgattataaattgtagtgaatgagcttagctaagcgacacaacctccttcttcttcctcctctgtaaatgggttgttttcattataaggctgtacatcggtcggtttatcctatatattttctaatccaat

SEQ ID NO: 50093 - DNA, 878 bp, Cannabis sativa
acaattaatttatattacatatgctaaacataccataactacaatgatgttaaacaatccttaacaatatattataattaaattattctaaaataaatataatatttatacatatattataatttataattaattaagaataaaattattaattctatgtacataaattcataagttacatatattgtttattaagatataattatactaatgtaaaggtataatttcttaatacaaaacttagaaaatatatagcagattaaaatttagaagttaatttttataatagctaattaatatttttgccccttcactttaacatgtatcaaattatattccctgaattttttaggtcattaaaaattcctcctaaactattgagattgttgaatttttgaacttttacctaattttattttattttgctaatatgtaaattgtccatatattaaatcgtattctcaaactttgatatttataaaatcatttaccgtgaacttcaacatgtaccgtattgcgccacctaaattttaatccacgacatactttctttagtaaaatttgataaaagtctttaaatctaacaatctcattagtttgaggaaaatttttaacggcgagaaaaattcatggcacatgatttggtatatgtcaatgttcaaggaacaaaaatataaattagcttaaaattggctcaaatttatttatttatatttaaataagttagatgttatttttaaatatagtattctagataaaggattaaaggttctactcttgaagcatatatatatatatggaagaggtttcaatggttacattttttaaagtcattgaattactattaaatagtagtgattaatttagaaataaaataa

SEQ ID NO: 50094 - DNA, 3097 bp, Cannabis sativa
cagccttcctcttttgccacttcccaagccaagcaacaagcaaccgcctcgccacatagagcatcagagaagtccaatctattagtctgaattatacccaccactcccagatggttccttgccacgacagctacacacatgctattcagactgactttaacatcacaattaagcttaatccaaccaagagagggaggattccagacagccacatcagacggggaaaaagctggtaatagtgaagctctgtaatctgcataagagttgtaaatatagtcaacacactgagacatattggacaatcgtttattatgtaccttgtcgttcctcgtcctccagatggtgtcaaccacaattgaagcatagagaaaaacttcatctgtattaatacccattttgtcaagcccccagatgaattttacccagtcccagaggcgatatccagagtcagaagtaggaattaatccccacggggaagctctccaaaggtgagaagcccaattgcatgaaagaaataagtgttctagtgtttcctcactactcccacataaagggcatgttacatcctcaatgtgaaactgcttggccagaatagctcgaattgggatagcctttgaaagaatgctccaccacatcattttgtggcgctccaaaattttactattccacatcttgttccagagagcaggagccacgtcaatatgcagcattctttcacacacttggattaaataagcagatttataagagaatcgaccattactctccttcgtccaaatccacctatccgctccctaagtcgatggtttatagagagatgttatgactttatgggcattctttttttgaaataaaagtgcatgtatgaaattaaacttcatagtcattacatgtagttcggaatggaggaaataaacaagcaaccataccgattgtaagtaaatgcccacattgctacattatagacaacaaaattacaaattttactaacaaaagaaaatttacagctaacaaagtaccgagagatctattacaaaaagtaaagtagttccagtcttccaatgggaatccattccattgaactaatcgataattacccttgaatcactctctataataataaagtctcaacctttctctttagctacttctaaagccaaatagtacgctattgcttctccgcacagagcatcagaaaactccatccttgcctctgaactttaacatacacataacaaaaataaaaactaaaaatataactaagtatacgtacaatgcaagtaacaataactaaaatatataaggctaattaaaatttttgccataaactttaacatgtaccaaattatgctccctgaacttttctagctgttgaaaattccttatgaactattgagattcttgaatttaaagacttttgtccaatttcatttaatattactagttctgtaattgtccatatactaaatcatgctccccagattttgatatctccaaatcatgttcctcgaactttgacatgtactaaatcatgttttttgaactttcatctttgctagacttttcatactaaaattgaataaaaattcttaaatcaatctcaatagtgaaatttttaatgacctaaaaaaaactgatttggtacacgtcaaagtttatggaaaaaaaatcacaattagcctatatataaagatgcttataactcatatgcctagtaacaatgtttttaatcttcttagagcatctccaatagtaacattttttaaaggtactaaaaatctctatatcatctaaaagtataatattttattttatctcttttctacattatctttaacacacttaattctaaaaacactctaatgatataacatatttcaaaaatgctataattataatttcacatattattatttaatatataatttattttaatcataaatattatcgcactaattatttacttttattttttttaaaaaaagatagcattaatgtcatgtagtgaaacgaatacaattttctacgataacacctatttagagtatttccaatagtaatattctctaagaatactaaaaatttacacatcatgcacatttttttttgacgcggtgatccaaatcacacatgattaataaagcagcaatccacaatcggcggcgacatctcctcgaacgagaatagctcattgtctaaccgaagagcatgttttgccaaaccatgtgctacagaattcgcatcccgagccacatgggacaaaactactcccgggagtttagacaataaagctatgacatcctcaagtagcacacccaactcgttgaaaaaggcccttcctttgtttatagctatgccatcatgcacatttttgacacccttacttctataaacactccaatcatatctcactcttcaaaaatattataattatcatctaatacattattatttaatatataccttattataacattcatctaaatttttaaaattgtatcatttctctctaataatataacatctcaatattttacaacttataactctatctcatcctttcaatttttaccattaaaaatgctctttatcaccaataatataacattcttttatgttttgctaatacatgctcttatccaaaactgaaatcaacaataaaactttatcacttctttagcaaaagagaaaaaaaaaacactaactttatcacactactctggtcagtggtcaccttctatacattatgcatatgcacacccacacaaagctaacatcatcatcatcatcttcatcaccatctctgtttttccatctcaaacctcgaattttccaaccaaagaacctcttttcactgcgaccaacatcaccaccttacaccccaacaacaacaacaacactaatgtcctctctttcacttccattaccaccaaaagcggtatcttcttctgcctctgaaaatggggtttctactctgattgagtatgtgggcaagggaggaatcgatgctggagatgatctggttctactaattcaccatatccaatacgcttgtaagagaattgcagctcttgtcgcttctcctttcaattctagt

SEQ ID NO: 50095 - DNA, 1407 bp, Cannabis sativa
gttctttcataaatttgtccaaaaaaataaataataattaagtggtaatactaaaataataaagttaattaaatatttttttgtattgaactggtctaattacaaatataaatggtaaccatgtcaaaccaaattttttattttatatttggtgtggtcttaaatcaaagagtaattaatatcttaattagaattaaagaatccacaaataacgttttcataataataataaaaaaattaattacctttcataatttgtttccccctaatgcaaatctccccagattggttacgtggaagagacgcgccagtatcaggatcaacaatcttcatctcagcgtttctaacgactgtaccacacgcgccggatttaataggaaatggttcctttgcaaaggccaagcacatcgatagtacgggtcccgcctctgtcataccatagccctgtaatgtttaaatcacagaccaatgaacaccgtctgttattctcaaattcgtcaacgtcaggtcacaataacatttagtagttaatgatgtcttatatagttacaaaaaagaagttggtgattcttggtacaacggctaaagaagaaaaaaaataaaataaaaaagtaagatccaacacaattcgtgcaaaccttttttatttatttaatttgtcacctgaatttttattttattaatataattaaaagatttttgtattacttataagtataatattttattttattttctaatatattatttttaacactttttttttttataataattgagtaataaccacttttaaaaattattaaataatatatatttttttaaaaaaaactaaagttcttcatgaaaacaattatttatatatattaaataattaaatttttttattttataataaaaaaataaaaagaatgaatatataaaaaatatcatttaataatattttttttgacattctttttcactctaattataaacacccatcaaaagatgtggaaaattctttaaaatatttctattgaaaatgctcttttagtgtgtcgggtcgggtgtccaacatggagatatgatataattaagtatcattataatttataataataataccaataattttatcacattttatggcagtactagctaaatattactgctagtttcctttaaaatttcttaataatttaagttaatattacaaaaaaaatacttattattcacaaaatataatctaataatgctcaatcaattagtaggtgtgtctgtgtcaatcttaccacaatttttttaatatataaaaataataatcattgcaaattcttgatgacttggccaaacaatagtcatttttggtcaaaatcgtatcttttctaagttattttggactttacttagtggcactaaataatg

SEQ ID NO: 50096 - DNA, 1359 bp, Cannabis sativa
atattccataataagcttcttactactattttctccactaatataaatcaatgcacaaccaagaatcataaaggtctttataggcttgtaatgttaggcttaggtatgggaagttggaatggtcatttaggcttgcctataccataagcttctcccaaatattaatattcaattatttttggggaccaaacgaaacttccaagaggcctgaagttggacccaatgcttaggttgacacctggccctagggcctttccaattatcaaaaaattattctgtgcattttttccatcattaaaaataacaaagatacaagaaaactcgagaagaaaactacaaccacaagggcctgtaaacagagtccaacgcccaggttgacctagtactgggcccagcgcctaggttgataatcaacctggtgcgctggtttcaatcatccaaatgctaattctgctctaagcaatctatctagaatggtcaaaaacaaagtaagagaccttgtcttcaagttctagaaccttggaagtatcaagatgatatcccggaagcttcgaaataagcaccttgtcttcattttaattttgttgtatttttaatgggagtgttgttgaaattttcacaacatgtgtatttttattgtgttggtgaaactttaatatagtgtttgtttattaattttatgatagtataaaacacccacactgcactgcatttttggaattttgagatcttgcagtgcggtcgcgtttgagaaattgtaagaactgcatgtgcgatttggttcgaaaaaatagttaaaacccacaccgctcgcagcgtgaacacactaaaaaaataaacttaaatttgttcccgtaaaataattttgacaaaaatttactttttaatacttttttatatcgaaataaatattttttaataaaaataattattttttaaattgcttagttagttttaaaattttaatttcattttaattttcttaatcatttaaaatgattttttttaagatttactaataaacatgttcaatctttcacatttttattttgagggatacaatttgatagttatcaaagtttatatagtaaaattgctaatttataaagatacgtcaactttaaataaaataatgggaccaaatttaacaaaaaatactaaattattgtaaatataaagctcaagagaaatttttagtaagtattatattttaaaagataaaatcaatagtgcggagagtttgggacaaattactaattattcttgggcattttacaaaaatactggatttggggtaatacttttcaattttactgccacacggcagaattaacatttatactgtcctccctttttttt

SEQ ID NO: 50097 - DNA, 2560 bp, Cannabis sativa
attccttttctctgtatacccatttacaaccaatcaggttgtaatctttggaccaagttactaaggttcaggttttgcttgctttgagagatattactttatcatccatagctctattcaaccctttgtgtttcggtgcctctataacactacttggttaagtacaaactggcacccatctagcttgactaagataggtttttagtttgaaaattccagcccttgctttggtaatcatgggatgcaagtaaacaaggtgactagtctgtgacacttggaactgtgtcattattgcagtgatcgacaatgtcctagcttaaggattcctgggatacattttgctcaatagtataggatgtctcatatttagattcaggaaaacaataccatgatcaagggtattaaaactggaacaaggtgagtttgagtcaataacttgatgtgatgtgggcactactggtggagtaggagttgatgcagcttgagatggtacatgaatggcattattttgtgaggttgtattgtacagtttaaaatgaacatttggcaactaggaccacgattcattttgaataacaagatgcttcttaggtgtacgagtatttaaaaaactagcttgtaaaggaagttctccttcatcgaacactacatttcaagagatataaattttacctgtggtgtttaaacatttatagcctttgtaggagtcgttgtatcccaaattcacacactttagtgagtgaaacttaaacttgtggtttttgtaaggccttatgcaggggtagcaagtagctccaaaagttttaatttgtttgtaatctggttttctacaaaaaatgtttcaaaaggagttttgttatgaagaatgggagttgaaagcctagtaatgaggtacacataggtttgaaaggcatcaaaacaatatttgaaaggcaagttaacctgtgcaagcaaggttagacctatctcaacaatgtatctctgtttcctttcagcttttccattttaagctgaagtgtgaggagatgagtgttggaagtgaataccattagttttcactaagttttcaaatgcttagtactctccaccctaatcatatttaatgcttttaattctagtttcaaagtggctttcaacaaaaactttaaattctatgaatgtattaagtgcatcatatcatgtatatatactaaagtcatcaataaagtgtatatagaatttgaagtttgcgttagatgaaattggggcaagtcttcataagtctgtatgaattaactcaagcaccaatgctaaaaacaatgtaacaaactcattataaccacaaacagaaaattacaatgctaaaaacaatgtaacaaactcattataaccacaaattaaatgattaacaccaattactaattagcaagagctgattccttagcagagtcgttctctttttggtcaaaccaaacatcaccatcaacatgggaatagaatcatatatactattatataattgcgaagccagccaccagagctattcccgctgcttcgtagttattaataataatttcactggcaattaataaggtcaacttaattgtccaataatatttgagaagcttcatctcaacttgtaattaagatcgatcacattttgaatcatgttattaagtggaagcatggatggtagtgataattaaaaaaatataatcgttctgtcattattatttggatcaatttagtcaactcatgtaattatgtcttaactagcatttagtaagttgatcttaatacggctgttgctctattaggaacacaattacaagcattgttgttcgatagaactagctagtgataatatggcttgttgtggctgcgaagaaattgtctcaactatattgaaacaatgcctaaaactagttttgaagatttgtatagaagagattaaccaaaatctgattaagcccacttgcagattcagtgcagtaaccattaatctggaggctagtcttttggaggttgaaagaaagatcattgccgcagagaaagttcagctccaatacatttttaaatacttggtgaattcttcagaaaatgaatctgcagagcacgtgttgaagaattggtttccagagctgaaacgtttctactacgacatgtatgatttggtggataagttgagaacagccaagctcatgtcacagatggagagtgaagccgcttccaacaacaacgtctgctgccttaaatttcaccgtctcagtctgcatcgacaaatcattttagccatgaaaggcctaggtgtgaattcagatcaatttatggtggatgcagataaatgggcgtacgatccgaactcagttaaagaatccatttggcttttgaaggaaattccatactcatcggaagctacggatgtgattggtcgagattcagacaagcgtattttgataagtaagctggaaaataatgttgacaatacaacaatttctatttggggaatgggtggagtggggaagaccgctcttgcccgtgatgtatataaagacggctatgtgacaagcaagtttgataa

SEQ ID NO: 50098 - DNA, 1381 bp, Cannabis sativa
aggcttagactaagtgtgacagttaagttagttagactaactaacttaactgtcactacagtaaaaaccagaaaaacagtacaaatgtaaaaaactaatacaatgtgaaagtcaacacctatatatctacaatatgcctaacgtaaatgaaaattcaaagaacacgatttagtatttatcaaacttcagtgggtacgatttaatatttatcaaaattttgatgacaacataattaattgctactttagtaaaattgaacataaattaacaaaaatttttaaattcatcaattttaataattcaaataattttttaatgatctaaaatgtacagagctaccattagtatattttaaagtctggagaataatcttagcttatttttttctcttttttttttctaggcaaaaagtctaaatagtaaatatttggaaaattaaaattatcatgagtgtgatttttgaaggaatatcttaaaactaatcttctttctagggagaaagagagaataatcaaagggaatttctattgatcacactttataaattaataattatcaattaaaagtaaacattttttatgagatcatattcttcttataattagtacgtcatcaataattatttcttcataattataacaaaaacgttttttttaataattgagccttacccatatttatatatagaccaattcctatgtatatttatatatataggtatataggctatatatataggctatttcatccaatgatacattttatcataatggtgagtggcaactaccaccttttcaaactatgtatcatttgcttacttaagttgttgaataatgaagaattttttttttccaattttgaaaattttctttttcttctttttattatagttattttattttttcagttttgggaagttcatcaaaagtggagattatctttttcatcataatgaaatccactacatgatcaatttatattcctctaagtaagtcacatagtacatagtacaattataagcacttaccatgttacatataattatttttatttattttttttttttaggaaaaatggtgacattttattagcaaattgaatcaaccattacaatgtttaaaagatcaaccattacaatgttacatataattattacttatcaccaatttgaaaatattaatgaatcaatttttatatgcaatgactattttggtatattatttatttgttataaaaatttagtaaaattttaatctaattatttttacgatcgtatacattataattatttaaaaaaataataatttacagtaccgaaaataatattcttaattacttttcatacttataataaaaaaaacagttactaagtgtcattaaa

SEQ ID NO: 50099 - DNA, 723 bp, Cannabis sativa
  modified_base (218)..(218): a, c, t, g, unknown or other
aagtaaaatttaaaaataaacaaatagattcacagtgacatgataattagctgtgcctttgttcaaggtaattagcataaataagtgtaatagaaatcaagaggtaacatatataatagatgagcattctattaggcatcaatagtgattagcactttcttgacatgtcacgttgcgattggttaacaatactccttaaaaactattatattaaattntatgagactcgatacttaattaaactaataacaacattaacatataaaaagatgttaggtaccagcctccttttaacatttctcataatagatattataaatgagaggcttgtgtgtaagcaatcttctttctaatatgtgtcggtgtatttttatacgtttttaacataaaataaaatataatatcctacatttttagtagaatataaggatcattattaatttatagtttagttagtccatgttgacggctccaaagtactcttctacatacttttccattaattactctagtattttttttttttatttattggtgtagaaaaagaatcttaaaaagaaccaatggatatctagcactaactaaaaatgtctacagttctcgtttggttgggaggaataaaaatataggaataggaatgagaatgggaataggaataagaatagaatggaataaaatttaaaatgcataaaaaaaatcgataaaaaaatcattaaatttttt

SEQ ID NO: 50100 - DNA, 1880 bp, Cannabis sativa
  modified_base (43)..(46): a, c, t, g, unknown or other
tctttattaataagtaaaactgattatattgaaatgggttttnnnnagggcacaaaacccaacagttttgtctgacattcctagcatcatttctcttgaccggtatattgactacccaaccaggcccttttcacaacttatatttctcgtgggattaattttgagacattcttgcaaggtgtcaatcttccttctctagccagcatgttgatggccctgtcagatacttcttggaaggaaatcttcaagcctcatatggataacaacctcatatgggatctaccaagtacatttctgcccagaagtcacttttcatattaagggcttgctaaactatgccatgtgtaagtgccacgtcacatgtgcaaactttgggataacattttcccccaagtccctttgtaaccatctctctgaatggggacttttgacacctgtatggatgctgataggcatgtgcgtgatcgatattttggcaactgttctatatagaagtgaacgatcaacttttattctcttcgactgtctcttaggtgtcaactgccaaaatggcagttttaaattacactttatggggggatcgtgatgacagctgaactctcccataaatactattgatctcaaaaagtgatcaactgacagcgggatcgtataaatcttatacttgccacatgtttccacaaacaagaatgaaaagtaatagagacaagatttgttatagaggttcggtccccttatgatagaagggtaatgacctactccccttttagttgtattaataccgagggttaatactatccagataactactataggtggtatctgctctatagtagcacccttaggaatacaaagtatgagtcaagaatggataaatccaagtgtaggggtgatgcttgtattggcatgtgagagaggaagagaagatgagagaatttgtagacttagacttagagcttggaggccggttttaggcttggattcaacttagatttctaggctagagttaaggccttagattacagtttaaaaccctagatatttgcatagtttgttagataattacaagacgaaaatgcccttgaatgtacatattagtcaaccattctgttgggcttttagggcccaattcgtagcccatgagttgttgtccacgtgtagaagtgcataggaaaccctggagagcacctccagacaagctaggcccttgtggagggcaagctagctggccatggtatagtcccaagggtggtcggccatagtgtcggccacccagctcctgtgagggagctggtctatcacttgatgcttgtttgagtgtcgtggtctctttccttaggtgtcatgacttggccttcttattggagagttgtactgccatgtagcactaattttgtccatgtaagcatgccatgttaggaggacaaaaattaggataactatgttggtgtggctgggactattgtagccttagctaaataaaagttgatgcatttttttatccttttgaagcactttgtgttgactgattgttctcattgtagtagagaaatagctgctttagttgcctttatgatgtgtaggtgaggtaagtgaaaaaaggggcccacatgcattacataagtgacttttgggggaaaaaccttttttcacttctcacttttttacttttcactttctctcacttgaaacttgctttagagaaagctattccttctttgtaaaggtccaaaacccacaagcttcatcttcccaggatttttgcaccattttgacaatccgagcttcccacctttttctttaacaacatcttttagtgggtaagctttctattcccgccatcttcacttgatttggttgattttgttgggttttatgcc

SEQ ID NO: 50101 - DNA, 1861 bp, Cannabis sativa
cagatagaaattctctaagatgataatgaagtgtatattcactgtgacaaagagtaagtaaaaagatgactgaaaaaaaacagtctaattaagtaattacaagttacctaaccacaaaaatgagcaaacaaaatgaagaataaaagtggcaccaagtaataactaagaagccgtagacacccagaaaagatttatacatccatttggccaagcttctacttttgcttataactagaaaaataagataagaataagctttgacttatttttaccgtttggataactattatatgaagatctttttttgaatgaaaagtacctaactataaacaaaagtagaagcttaaccaaacatggccaaatcctaacttcttccaaaaaacttttcattttttatccaaacactcctagaaggacttcagagcttatagaaacagtttaaatggttaaattaaatctatggggcaattcggattagcagataagcatacaagtgtatatagttgcgaactgtgcaagatcattttactttcttagcaaaggtataacatgatgaaattgtaggatttatggactgacctgtcttgacttcaccaggtactttggccatggcaaggagctcatctttgctctttcccataacatgggataaatcctaagtggataaatcatggaaaacaccggtaaaggaaactatacacaaacaaaaaaattacaaacgaaattacattaacagcattagtcttacaggaaggggaaaacacggggacttcaagtatatagcatcataatggtcaatacattgtgctttgctttttgttccaacatgttctgcaacttcgttccagttcccaaatccatacatcccaataccctaaagaatgcaggaggttcagccccaaaactcgaattctttgagatactgtttcattgcaaatcactaaaaaaattccgataaatttttttaaaaaagccaaacaaacaagattaatgaataaagaaccaattgaagtttttatctttacctccagcagtaatgtctcttcatctgcattccaatctggacaaatcagtggaaaatacaagttgtcctgttgtaaaccaaaatcatattcttatacatttaaatacgaaatgatcactaacttgattatttatagaaatttatatatttgacaaagtagacaccggtaaaaattataaattctttaaaaaaaaaaaaagaatatataaacagaatgactaaccataaccctataagggtgattggatttgtgaggagtaacctcagctccaactgagaagcactcaatacaaagatcaaaatcagagcagacaacacatttgatccgaatttttcccgagatatctttgttgcaataattgcaatgatataaaggagctttcctatcgccatttacttgccccaaaaccacattgtaagctgcgttctcggctgaatcggaattcaaagcaattctctttcttttggaagatttactgaacatatgaaatagaaaaaaaaaaatgaatttcacgtagtatcatagtacaaaaagctgaaagataattaggttagagtttagaaaaagcttgaattttaatcaaactgagaacctctggttgagatcactatcagcaattttcgatacagctcgagatcgacccatatctggtcgaattagccaaatgaataaaaacctaattcgtcgtcggtgcttagaaattggggaaaatggagatgtagaaatttggcttcacgattttcgatttcgaacccgttcgtgaaatattaacccagaaaaaatttgaagtttgacctttataataggtgaaaagaccaaaagccccaaactataag

SEQ ID NO: 50102 - DNA, 1493 bp, Cannabis sativa
  modified_base (105)..(105): a, c, t, g, unknown or other
ttgctttagagagagatctaagaggattgctaagagatttcattgtaagagctttgagagagaaaaacactttgttctttgtctcaagttaatacaatctaaggngagtaggctattaccacacttacagggccgaacctctttaaatctggtgttctttattacttattggtttttgctctatttttattatattgttaatcgcttattaattgactcattgtcgttggctaaaagtgaggtcaacaatttctttagaaatatgacccaatcttttgtgccataatgataaggatgttaccttaatataaaatctcttacccgcatcattcacaacattgaaagatgaagctaaggaactctatgacaatttgaaaagaccatcagagcgaaaattgtttgcaataatctttgtttttgccccagatatgcaaaatgatgtgaaatttttcttcatccctgacttcttgaagcttcgtttcgacccatttttttacttgattccacaaatccaacccgcctggaaaatgcagctccaatggtcgtttcttacgtggattttagggttttcactccatttttcatgctctattgatttccaaaacccattttggccaagaaactccccaaacccaaagcaggcttacccattttcgatcattcatgagtttatcaaaaccgaaaaaaatcacgtctttgaataacatacccaaacacttgtactaaaaccatttcaatagcccaagaacatccaaattttaaatttcatataaaaatagaaagttcaaaattttttttaatatagttttgcataaaaccaaccgccaatattgaacaatatatgggtgaaaaatataaaagttaaacaaataatttgagcgttaaaatcaaataaccaagttctgatatcaattgttaaaattaataaggattaacaacactaatcaaaaattataaatgacaattatactcaataatcatcaaaaatgccatcttatataaggcatcaaaacattagtcaataaaatatattgccttgtaaataatagttgtcgtcagacattatcttttttaatcctttaatcatgaaatctacactcaaaagagaaagagatgcaagggcttttataaatacaacttttttctatcttagccacatacatttcacattaattaccaataaaagagcacattctttttatgagaaattatgggtcaatggacccacatgccctgtgagagtattaattgttatggcccattgtgctgaccaaatatattttaaagcgtgttcataagctccaaacgtattagtatataataggccgatgataatactatatattaccgattatataattatcattatatactaataaagactccgcagcgagcaacatttatttatgttattctacatacaactcatctatatatatatattaatataaatatatgttcaaatattcaaaaacatgtcattatatataggg

SEQ ID NO: 50103 - DNA, 743 bp, Cannabis sativa
ttaggttttacagaggtgaaaaaattattataatgttttaaaaaattgaaatagttcttttttttcctttttttcattttttgaaacaaaagttccttgtataaatataatcaaagaatacaacaggcatagaaagatccaccagtatcacacattcaagacgaaaaacatgaaaaacaaaacatgacaaacaaacaaagattacatgataaaagtccactcttaataaaaaaaaaaattatatattaaatgtcatcacgcaagtgatgaaaaagattcatggcttaaggaataggcatacacggaaaagaaaaagaaatagaataaagacattataacaagaatactctaacttatcttcttctttttttttagttatcttaagtatcttgagtgaatatcaataatactactttcgattcatatcatatataaaaatatatttatatttatgtagcgtcaataatctttttcaatccattctcaaacaatattcataaaaaaatattaaaaaagaataattactagataatggatcttctaaatgtgcatggaacaatccagataggaaagacttttttccagccctattttttgggtggcgtgtgcagtgaagtaaaatagataagagatctacagatcattaatctcaaaacagcaagtttattaaaaattatggaccaaatgtactaagagaccctttggtatgagaagttcagaaaaaaatctgatcaatgagaaag

SEQ ID NO: 50104 - DNA, 841 bp, Cannabis sativa
gtgaccttgatttttataatccaagtttttattttttgtttagaattatttgatgttatttgttttgttcttttatcggaatttttcaattggtttggcttttgtgtggaatctgtattgttgtctaccgcaatttggttataattatatataagatttggcatgttctgataatgtttatgagaaaaaaaaaaaaccattcatttattactactgaaaattctattgccaaaagttaatagaaaaatgattcaagaagggataaagctgaaagaatgtttttcttgctgaatgaattgtatctgtacaagccgtagctatatatagctttgtgttacaaacaagaaacattaaccacttgcagctgactcactaagctaaccaaccacttaacagatttctaactagctcaactaattatacaaaaaaaagaaatagctcaattaactaatctaataatgttgaagagttattctaaaataaaatttactgtttactttttcgaactgctcttaaaatttagtacgctagttttcattttctgttgtacattaaatttcaaagctgtaggctgggatattcactggttaagtactgtggcacattattaggtgctctttgggcggaatactggatgtgatgtccggttggtggtggcagaaagtacggatggaggccgtgctgttcaagttgtgcttgagaaaaatggaaagaggtatgctctttgaatgcatttttagtctgaattagtcagtgtcgtcaaaattgagagtaaagaatactggaatatatgtccattctgctcaatttatttagaaaatatcgtttataacttgtctgt

SEQ ID NO: 50105 - DNA, 2370 bp, Cannabis sativa
  modified_base (667)..(677): a, c, t, g, unknown or other
gtgtagcggtatttaaaacaataatttcataaataatatacaattcacattgatatatataattatttctttctaaaactactaattagattaaaaaataaaaaagaatgtaaaataaaaaaggaatagaatgtaaaaaaaaatatatttgatcaacctaatctactgttattttgaaaaaataagattcttattaaaaaaaaaaagctactgtgtctggaaaaaaaataaaaaagctagcatgtaggcagagtttaggagagagaagcaataaatatacattggtatatctatcaaaaagaaatacctgaattgtgagtattaaaataggtaatggtaaattcttaaatactttaataataatagttgttggtgcaaatatttctagaatttatggagaatataactttgaagaactattcttaagcattgagactaacaaaatacaagtagactagcctattataattgaaagagagtaaactactttaaaacctagtgttcatcattgtcaaatctttttttttttttataaattatttgtgaccaaagataaaaaagttgtagctaattataaattattattattatgttgcgactaaaatgtccatggttaaaagaattagtcacaaaaattataatttattgtgattaaatgtatttttannnnnnnnnnntgttgtgactaaaattaaattaatcacaacttgtagttaaatactatgttttagtcacaaataactttttattgtgattaaaagtaacatttagtcataaaatatttatgttgtgactaaaaggttatcactaaaaataacagttttttgtaaaatttgttcatttatgattttcttagattcattaataaaaaactgtgttacttgaaaattttccccatataaataaattattttaattaaaaataattaaatgaagatatttgcattaataacatagctgagagaaatctttttaaccaaaagaattcacctagccaaattgcacaagggtgataatttagagaatacaaaaatcctatttatttgaaatttaatatggcacgcttaccaataatggatggttatcttcaacacaagaaagtcaactattactaataaataagagcatgtggctcttccaagaaaactaaatcgccctttatagctcttctaaccaaaatactattcagagcatctccaatctcgattagtgatacaaataatggagatgcaaataaaattataataagtgtggtaaattttgctcacttagcaatatgttgtaatagtgtgtcaacaagtagggttatttattcaattcaattcgtattattttgtttatagtgtatttgattcgtactaagtacgagttcatattttgaatccaatacaatccaatctgcaaaataattttttaaaaaaattatatataaataccatttattataattaattactaatatatcatgtatagtttaatatacccacattttcatattaaatatcttaaataagcagtatttaaaatttattaactattttattgtacccaatatatataatatatatttatatatatattttttttttgaaagataatatatatttttttttgaaataacattttatacattaaatttaattctttatttacaattttttcctccaacgaacctaatagcatctaaaccaatgattttatattaggattcttatgtattaggtggtagctaagtactacatattttgcttttgaatttcaaattataaaacttagtggtagataaatgtactttaaaatttggatgctcttattacataaaattatacccattggtatcctacttacaaatatagcataaattatctaatttaaagtaaaactactacttttggtatccaactaaaataaaaatgatacctattattagtatctaatcgtttgtattaagtatccaaataaaacaaagaaaaaaaactataaattaaattggtatccaaacattcggggttaactaaggtatccatttagtatccaaacagtatttataattatatacttggtgatacattagataatccttgctttcaaaattacattaatattgttaataaaactaatctttcattaaagttaataatatacgtaacaataataagaaaaaactactttatagtatacaacattatatatttatatataattatataactataatcatataacatgagtactttcttattagtacataataaacatcacttctttccaacgtatattttgcattaattcataaatattaattttgtaatcaaagttatataaggtaatatagatttatgttgagtaataattttttaatctttttat

SEQ ID NO: 50106 - DNA, 1453 bp, Cannabis sativa
  modified_base (89)..(109): a, c, t, g, unknown or other
  modified_base (239)..(251): a, c, t, g, unknown or other
aaggtgtaagtatacctatcgctgattatcatgccagccttaatctagtgaagtgacaaatcaggggattaaacttttgaacatataannnnnnnnnnnnnnnnnnnnnctaacaacactataatcatgaacaaatacatatgttctgaacttaatagattttatacattaaacaatcatgaaataaatcatgtgaaccatgcaaaataaaataatatttctgatctttattaattagnnnnnnnnnnnnnattgaaataagttttatttaaggcataaaatcccaacatatacaacctaggagaaactaaaataggaaagtatgagaaaatagaaaaagaaataattacaattgaccctattttctagctaatttacaactaatattataacagtccacgagatagttttataagcttttagcaatgaagtttttacaactcttgtatttcttggtgatttccataggttgtgaaccttttgcatggatgagataatgccttatttataggctgtcatgctaaatgggttggacagatctggcctaattaaggtgtttgtgtagaaaatagtccactaatagagtaaaatacaacattagagcattatctgacctattgggctgagtagggaaggcccaattcctaaaacaatctatcgtacaaagtacagtattgttgatagtgacaaacagagtcgtgtcccgtcgttagaaaaaggaatgtcagagatgaggtgcaatcctcaaaacgatgatctttgtgttgttgtatgtctttccaaaggttggtggagggacatgtccttagattcttagcatcatatcatagatgtgacacgtaagcaactcctaggactatggattgtcccaagcacccttctaacttccattcctgaatgatttctgggggcactcctatctagtttaggattctggtaagtctcgttgatctttcggagtgtacaattatattgtcgtattctcatgatccctgagggcactcctatccaatttaggattcttatgggatcatgagaattaagttgacctaaactaatgtttattctgtatgttcgattattaagtttcaaattatattttttatatttatttttcttttcaatgaaatcaacttaaatggtaactaaaatggattggatggatccaatccaattcaatagaatagcagtaaatgcatccaatggtgatctaatccaatacatccattggatcggagatccgatgactcaattcgattggattggatcgaatagaaaaattcaatatccaataaataattggattggatagattgggtccaaatctattagatgtgatccaataaacacccctaaaaatatttagtaaaaattcttattgttatcttcttagacctgttgatggagctgatgtctattgggccttagtgagaggccacgtgttatttatccg

SEQ ID NO: 50107 - DNA, 1497 bp, Cannabis sativa
ctacacctagtgttaaatgacctcacaataatgagataatcaacaggactcctccactgagtccttctcaacattctcatgaaaccaggcctcgagagcctggcaggggaaaatgacctgctactcaaactgaaggaggtagtaggagaaactactttgaaaatggaggctacgagatttgatgagtaaagaccaatgaaccacttttttactcaaaagccctttcgagatgaaaggggtgaattgtgccattactttgcctatggccccaatggccaatattatgagtacttccctcacatacatggggaggaattgaacatgatcaactaattcaattatcttcacacttgtaatccggttggagactactttgagggaagtagccactccaatgctctgaatggaaactcccacagctggtcgtcttgagacgatctagagttcattctagaagcctcactagtgttgccttcttaactccgtggtcaagagacaagtacaaggcctaggttgactgtagtacaagattgacctggatgaccaagagacgtaggtgacctcttaatcaagaagagaatagtagaagcaggaactattagagaagatcctactctggcaacaaaagctctgactgggaagtagaccactacccatggggtcaactaggtcgaatttgacaacttggcaactttagtgaagggaatcacaactcctaatttgtttgaatttaaactagatacaaaacagcactcaccgttctctaaataaatcaaagctcttcccattattccgaggttcaagaacccttcctggcatcaatacaccaagaaaaaagatctactgtcttacatccactacttcaaagtgcaaattgatctgcaaggtatgacagatgacttcaggtgcaaaatattccctgccacactgacaggcctagctcaacagtggtaccttaagctctctcctagataaatcgactcacggaaagatctagtggatgcttttcgtaactagttcactccttcctgacaatgctagatcgattcaaatgattcggtgtatatcaaacaacaggaagacgagtccattaaggactacattcaacgggtcttaaaagcagccactaagaccaaaagttttagcgaggatgtgagggttatggcacttgaagctggactcaaggagatgattcctctatggtctaactttcatctcaaggcggtatacatcatgaatgacttcttagatagagcaaatggatttatcaaatttgaagaagccatcacgtgagccaagggctcaaagggtggcaagaagaagttatcaaacactgaagtccttgctactgaggtgcatggcaatgcgaagaagggaggctcaaacaggggaaagaaagccaacaatagtggtaagaaaggcaactcctctagtggtaagaagcctaagactaggggcaagaccttacgagaatatgagcctcacttcaccacctac

SEQ ID NO: 50108 - DNA, 5201 bp, Cannabis sativa
aaaaaaagaaaatagaataagattttttttaattttaatattttagaaattaatattacgtggaccactaacaacgtgccacgtgtacaagtgtgtacaagtggacagtccaccgtggcacttaactgtgatttttagaccgaagggtacagagcaaaacagaatgggggttcagtaggtgttacaaaacgtaaagttcaggtggtttagctgccaatatcgcaaaataaaaatgtgttctataactacttttgtttttcatttttaaaacagaaaacaaaagtgtgttctgtaaattttttttttatttttttattttttgattttatttaagtcgagtctgaagtccgatcgggtttggagtctgaggccttagccggggtcaggtctagagccgatgttcggggccaaggtctgggtttgagatcgaggatccgggtctggggccgtggtcgaggtccgtgtccagggtaggagataaggttcgggaccagggtcggggtccaagtcaaggtctggggtccaggccaggatttggatccagggtctatgtctggggcatgatcagggttcaagtccgagtgtcaaggtccaaattggggtcaaaatccaaaaattgttaaaaaaaattttaaaagtaacttttttttttgttttcaaaatttttaaaatttaaaattttgtttcttaaataaaaattaaaaagtaaaaatagttttataaaaaatatttttatttttctaattaaaaaattgaaactgattaaaaaaatattactaaatacacttttaataaaatatatttaaagtaataaataatattttaaaaacgtaaaacataagtattaattttataaaaaaaatttaaataaaaagtttgactattgaatgtacctatgtattatgtctttggttcttcaaatattttaaaaattctacgagtcctctaagaaaagcaatgaaaaatgtaaaaatgcattatagagagatttgacatttgttcctatcctatacagaaaacaaatgtacatgtctatgtgagcatactcatcatactttgggctcaagagacactagggtgcgaagatcattgatcccaatttctcttctatcctttgatccctgtcttccaaaagcttcttttgcaagtctcctcttacgttcttgtaattccagaattctttcttcgatgctgtttcgagaaattaacctcacaatcttcacatcctctgtttgtccaattctatggactcggtccatggcctgatcttcaactgctgggttccaccatggctccaagaagtaaactctagaagcagctgtaaggtttataccagttcctgaagcctttagacttgcaagcaagattgttggtccatcttttgagcttccaaattcttcaataactttagcccttctctttgcattcatagaaccgtctaatcgcaaagtcttgaaaccagcttcttctagtggcttttcaagtaagatcaacatcttcctgaattgtgaaaatactactgactttgttgctgagttttgatctcttgatgccacaagaagtttcagaagagcagacacttttgaagacatgaatggccttgaggaggatgaatcattatcagcatccgaagaagttggtggagcagaaaacaggtcagaagtagttgtaggacgtcgacaaagagggcaagaagacttggtgtgctttagagttttcaaaatacaagcatggcaaaagatatggccacaacgagtaatcaccatatcagttgggggtgtaatgcaaatcggacagtcaaaatcttcgccgtcttgcagtacctcaacaatcttttgaagcagctctgggttgttggatgcatctgctcagaaacaactgctgttagtttgtaatagtaggagcatgtgaacaatcacagcaaagaaacttgcatgaaatcatttgataattgaaatttcattcggttagagttaacattcacatttagttttgtaggcagagccctaaacttaagttgctaggtacctagacctcatgagagaaaaccgttagtcaaaccatctctcatggtagaactatgaacaaatgtagaccattcctactttttctagacaatgatagtacaatcaagtgactttcaatgttttcaaaagtatacagaaagcagtatagactaacagcagagattaattttgctgtggatgcatctacaccaaaattagtatctggtcatcaatacaaaaaagcttctgtttcttgtttccattcaactattttgtaagagttgaggttccaaagcagtgcaaagataagtgaaaatgttccataggacatcttaattgcctctagggaaagacaaataatgacacatcccaaacaaacaatggcagtcatacattgcccaatctggcaatacaacactgactgaaatgtggaaactgattttatgcatcaattcacagacatgataaattggctaaatgtaggacatagcatgtgatttagtttttttttctctagcatgacagacatgataatagtcatcatgtaaggcagtaagaactcttttctttttgtacagattattattatgtaaagtagataaaagaaatgcattaaaaatagttaggaattaaaacaatccacaagctgcgaaattctttaacaccacacaatgaatgtagcataaaaacccttaacaagcaaacatgaaaacagaaatgatacaggcacaccaaataaaatatataaatatataatacattaatacaatacagtacagtacagaagttagtggaatctggtgaagatgtaaagctgcataactaacaaaaagaaaattaagaaatgggcatacaataccttcaatattattagaaggagtcaaggatttaatatttgaagggcacaaggctagatcagtacagatttggcgaagtcgtagaatattactcagtacagtagtatagttgcacatgggaccaccagcatcaatataaccttgtaaaacattctttgctactttttccatctgatcatacacttcacgttcttctgtagaaagttcaagataacaaatctctaccgtttttgttggcaatcctattagtccattgtcttttgttcttctcaaggaaatggttgccattaaaacctgaaaccatttaaagttatttagaaacaacttgaattcaaaaacatttataaaggctaatgttttgttttattccatttctcaagtctcacaaaataaatactagggatcaattatgtttctctatttagtacttcaaccagtcaacaatgcaaccttcccaaagtcataaccaaaaataaaagtccttacacaggcacgtgctaaaagggttaacattcaacctggtcctaaaaagacaatacagcttaaaaatcaaccaaacagacttaactttaagtatgcatcttattgtctccaattcataatttcatgaaacatcacgaaaaattatggtgatattcacttgtgatatgtgtgagaagagcagtccagccctagaaaaagtatctttcatgtatgtgtacattaaacatgttgaactctgggtgagataatatgaagatggattatatacctgcagacgtgagagccccttttcgtttccctgagcaagtggtcgctggactaagctttgccagtaactcttgacagaaaatggctcaaaccgtaaaaatgccatcaaagaaaataaatcaaacgagtcattctgaataggagttccggtgacaacccacctccggttagccttcaagtcacaaacagccttactctgtaaagcattagagttcttaatcaagtgagcctcgtccaaaataaccctccaccagttaacttgcttagcagcagacttaggccaagaatgctcagtagccaatgtactatatgttgtcaaaacaatatcgtacttcttcagttcttcagcatcattagtcctatctccataatacatatataccttaaaacttccggtcatggtgtggtctcccaactgtgtgatccatgttgaaaaaacagaaggagggcatacaatcaacgttggtttacaacctgaagacttgtcaaatatcaaactggtggtgtccccaactttttgtttcttcttcgaccctgtagtttttttgctgggtcttcccctcttgcctttattaccgcccaaaacagaaacttcctgaccctcctcgccaacttcatcgagcttatcttcatttccaattgacaaaggaagactactactaacactgccactactggaatatttatcaaaagctatcaaagagagcaaagttagagtcttacccaatcccatatcgtctgcaaaaatcccacctcgcaaaggctccggtcgagaattggtttcgtaattcgttaacacattcacataacaaccatttttgtcttcccaaaaaggaggcaattcacgggaattttctctttgggccagccaccataacccttccttctggtgcaagaaaagctctgatttaatggcttcttttgggggctccaatacttgcaattgccccttcttgctcaaattcttatccaccaacttgaaaatcttatccaaactcttcatccccttcttaccctttttctcctcaaccaccatagcctcagagagtgtaaaagacacgtcgttatccgaaatcaactgcaaccccgatcgcaatattgcatctttcaaagcgggaaaggcttcaactttagcgaaaatatgaatttgacaaggaatcttgtacctgttagcggcagcttttcctttggggacaatgccttcgacagcgatagagttggaatcaatcaaaggcgccagtacggctgccacagctcgctcaatgtggccgacctgagccattctcgtgttgataactctaatggcgttggaatcgtaagggttgaggggttcccgaatgagaccaaccatttctcggccattaatagtgcccgagtagtacttcatcccaacaatgttggcgatgacaaaaccgagcatgtaggtttcggaggaagaagagagggactgagagagagtatcttgggaagaagaagaagaaaagacaaaatcatcttggtcggttgggaactctcgccactgatggagaagattgatgaacctcattgggccgtcgtcctccatggctcgtatttgggtgtcgaagaa

SEQ ID NO: 50109 - DNA, 2541 bp, Cannabis sativa
ttttttttttttgcaaaaaaaaaaaaaaaactattttaactagggtttaaatcttatgtcatgtatcgagaaagaaatagtattctcatagataatatagggttaagtaaaaaattatcctaaatagatagattaattaggtaattatttattttttaaatttttttagcaaaataaataaaatataataaattagataataaaaattataatattacatttatttcatatcaattttttatttttgaataataataataatatgttatataaatttgctaatattgcatattattgcctgaaatttcttccaaaatacgtggcagttcaggagtaagctatgtggcgatgggactcgcactacggaacgtgccatattaaaccacttatggagtctggtaatttgcaagaattgcaaaagattagtgacctctggaagggtccaccaagaggatatatatatgtctttccttctccgtgagtgaactcgacacgaagaagagatatagggacatcttgagcatggtgcactgctcgatgttaaattattgtacacacatttaatgcagtatggaaaagaacatcctacacattactttgaaaaaacatgctcaagggtttaaatccataatttcccattttcaaaataccccatacatcatttgatgacaatattatgagttatcgaatttgtaaatatcttgaaaaaatttatggtatttaattgggcatgttttattaaatatgtaaattattctggtaatgaagtaagattatgatcttacttaggttaattagtgtgaatttattaaatgattaaataagacgtaatttattaattattgagattttattggaatatgtgggtatcgtggataccatttttgaaataaaatatttttgggcccgacgactgtgagaacttaacggtgtggtcagaaaatgtcacgacaataaaggatggattatgttggaggtattttggaatagtttagaattttagaatgtcacattggcgggattagttagaattaccaaactacccctaggtgtgttttatgcttaaggttaacttaagggtaaattggtcatttaatgatattagatgattgttttgtcttatttgaagttagtgctgatttttattagtattattaagcataaagaaagaaagaaaagaaagtaaggaaataaaaagagaaaattagaaatttggagttatcacctagcctcctccttccctccttcaagtagccaagaaccagcctagaaccagaggatttctcatcaaattctctttgatttctagcagaatttattccctaggtcaacctaaaagtctcgaggtaagttttttctacgtgtatttagatttcttctagtttttaggctagtttaggggttagggtttggaaattcggggttgtattactagatcaagtttggatactattttcaggtttgattaaaagtttgttagcatttaatttaattgaattagatggttgtggtgttggaattggaaaattgggttttaaaacttaatatcttggttttagcttggcgatttatttaaattgatgaattgttgtgaattagtgcttgggatacattgtatttatggtattgtattgctctgggaggtttgaacaggtttggaggagttttgtgtggttttttgggcaaaaaccagatttaccgtttctgccagttgagaaaccggttaattggttttacaagtgttgtaaaattggtcaaccgattctgctagtaggggaaaattctggttttagcctcgaaacatgttttttctcagggtgttttttagagcttagattagggtaatctagcgatatttgaattgttcaaatccagtgggagttagatgtctagattagggcttgattttgaaatttgaataaattgtttattggattttgttgttgtggcataggacccaggatcgtcgagcgtaattccacttaggtcggcccacacacttgatttttggattaaagtaagaaaagggttatgcatcgcttaaggttaagtggttaacaattgtgtggttatagtctcgattatgatcgagaacttgaatatatatttgctaagctttggttatgaccgaggattggaaacagtcattaccgttacgagtaattactcctgaaactgcaaataggtttcttacttatccttcattgtatcgggcaacgatagtgacatatatagctcgtaggtaacgagtggtaagggtactttatgaagtaccgacattgtgtgattacaatgatgtgtatttgttaaaacataattaatgcatgatgtgactaaatgaatgttgtattgtttataattttattcacttttcttgctgagtctgtgattcacgtgtgctaaatggtgtaagtaaagggaaggccaaagttgagtagccacgagtttgaggtcgtagcatcaatgtacatatcagtcgcggtgccatggtccagtggacaggaagttccattttgattgtatcttgaaatataaacctat

SEQ ID NO: 50110 - DNA, 1315 bp, Cannabis sativa
tagtcctataaataggatcaaaaatatccgtggagagatgttctttgagaaattggccattttcaaccctgattggaccattctcggcgaaaaaattcaaccaaacaaccaagtagtaagtaagttacttttcttttaaagtattacaatttccttcttgttctctgtgaagcatgttgacactaaaaagtggccaacactagctcgctagattggtgagatggataatgagtttaagtaaataatttagagagacaaacaagatttatagtagttcactccccatgtcacgatggtaatagagctacgtcgacttcaagtttttatttctcacgagaattacaagaaaattggctaagtttgaaaactttaatttctagagagagattctttgacatttaggaaatttttctgaatgtaaaaaatgagctagaggtattctccatttataggaaaggaggttctattaaaataataataaaatattccaaaaaatatgaaaaatatatttaggctacattttactgttgatgatgatctaacagtgaaattgactctagaggtcggtcataaatttttgaaaattaagtcgtgtctatgggacccacttcgagtaaattgtagctttcttgaggacacaatttgtagttgataactttataattgcgattggagtgtaagatacaaattaatagagcattgaaatggctttcaaaatataagttgaatcacgtcaatcaaatcaataatgagtgagttatggtcgttttactaaacgttgttctactcccaacgcccaagttgacataagacgtcaacctggacgatgggtgagttgggaaacgtgttagggatgtactttttgatgcgtaagtgatattttgatatcacttagctagtttttgttttctgatgaatttggccaccaattcttggagatgttgttgttttgcgaaaaacgggagactcgaaagtacttgattttcgaataagtcactttcccaaaaaagttaaaatatgaagttgtgaattttactcttctgacttcatagctcttagtcactataaacaagtagaaaaatagtcaagatggaatcaaaatcggataagtagagcccagtgcaccaggtcatatgtcaactttggcgttaggtgctctttttggagcttctaggttgggttttgatacttctaaagttcttaaaatcaaggacgaggtctcctaccctattttggaccattttagagagaattctcaaagcagaatctgtaattgagtgatcaaaaccaccgcactatgtcattttttaacttg

SEQ ID NO: 50111 - DNA, 1461 bp, Cannabis sativa
  modified_base (339)..(346): a, c, t, g, unknown or other
gtatggaatcataaatttgctagaaatatgaaatgtgttattatttattaaagggtaaatagtagcataagtacccaaagttttaagtttgtaagaggcatactcaatttttatttttagcggcataagtacccaatgtatgtaaaactgtaattttcctctagttttgtcagtataaactccgttttggatttattaaatgaacatttgaaagtaactgatactacatgtttctgtctagactgaatgatgaagaatctggaccttatatatggtctgtttaaaaaaaataacagagtttgtattaacgaaattagagaaaaattacagttttacaannnnnnnntactaatgccgctaaaaataaacattaaaattatatcacttacaaacttgaaaccttaagtatttatggcgttatttaccctatactaaaatgtcaattgatttaataaagtctcatataaaagatagtgaaaacgtagtgttgcagtcgtactcttttgataataaagttgggattataagatctgtattgtggaatttaatccagtccacagtgttcttatttaatagaaaagtaatatgtggttgtcttgagtatatgttgttttataagaccaatttctaaaacttaatccaaagcagacacagtgtttgttgtcctgagaataattaatgaaaaagaaaatgcggtgagcgtggatcgaacacgcgaccttcagatcttcagtctgacgctctcccaactgagctatccccgcttcacgagcaatttctcactacacaagttcttcacagttgcaatctttcttccctgtttggttttccagaaaattcggtaatatccagagagacaaggggagaacttggggatcatctatagggcacctacaagtattttgtttgtttgttgttttttttaattgtttctttaggtttttattaatttgttttaaaagtgtactttttgaagcttgtgatctgctttgttactgcgtatttttggattctgcattgttatatgattttgcagacattggattttctccatatgagagtattcaaggtagcttcggacaatatgcaagcaagggtccaatcttttagaaaagaagagatgtgtaagatagattataaatcttatagcatagacaatgaagaattcctaccaatctcggtggagcagaagacgatttagcatagacaatgaagaattcctaccaatctcggtggagcagaagacgatttggtagatgtctcctaattgtaattatccctttattatgcatcctaatttctatcaatttgtttaattagccttcattccattgacaagtgtttataagaaattattgagttacttttttttaaataaaaaaataataataaattattagagtataaatctactaattgatatttttcttttctctcttcaattctcttaatttttaatat

SEQ ID NO: 50112 - DNA, 802 bp, Cannabis sativa
atttcatttaaaaatagatagaaacaacaacttttgtataacaacttgctgcttcgaactatattcttaaaactaaaatattgcagcacatgtaagaaacatttatatgtatgtatgtgtttgtctgtatgtacatgtgtaaggaatttttatacaccaactttcttcaatttggtttcaaactatttaactgttgaatttatttgacttgtcattagtagtgactacggaaggttcctacctacctcgtttctggtaactttattgatttcataagaacaaaaaacatgctagattatatcatagaaaactttgtattttgtaaaattttgactgaaaaactgcatatttgaaaaatgttagcaaaacctgattatgttttctgtcatataattcttttgactattatcaaatcgtccgttttcgcccttagttaaaagtcacaagtactatgtatttcaataataccaaacaacatgaccaaaataaaaaaaaaatgcttatcttaattatcaaaattgtaagatttcaggtgagaacaaaaaaatgaagcaaatactaataaatttacaatttacttttgaatttatatttgagtaatgctagagacactaaaactacacacaataatgtatatttaatttagttatagatagtttaaatggtaactccatcacttctaattgtaagataagaatttttttttggaacaattgtaatgttaatttaagattatgtaaaaattgaattctttatatttttcttgagactagaaaactgtgacttaaacttcaaacctttt

SEQ ID NO: 50113 - DNA, 753 bp, Cannabis sativa
tgagctaaaaaggaggctaataaatgatcccaactaactgccaagtcatgaaccatacatatattttaattattttgtattatagatcgatcgatcgatagatagggttatatataataatagatttggctaattgtttgacttccttcatgtacactcatttaaaaattaagaatatataattttccttttcttatttttcctgcttagtttttaaaactgatgtttcttagtttcaaataatttttgttgaacaataataattaattattgtacacaatgttgctagctagtcaatcaagctatatattgtaattataaattgttcgttcaactacgtacgtacgtactactacgttattatatatatctaatttaattattattagagagttgtattttctgcacaagtctatatgtcgatcgataaatgacgatctataataacaataataattaattggattacaagtcatgtgttaggttcatattgagaattgagatatagagtatggtgatttattatttcaaaattaattgataatgaatggatggaatagtttttaaatataatttattgaaactttgattaatattttaacaaaatatggaagtgtcgtcctaatgtgtatgaagtggaaaaagtcacacatgggatatgagcagttgtttataagggtatatacagggccggcccaagcattttgggggccttgtgcgaaattttaaaattgggccctttagaaaaaaaaa

SEQ ID NO: 50114 - DNA, 1849 bp, Cannabis sativa
aactgagtttcctcaattgatgagcttaaataaaattgtatattgtatggcccaatacagttaaaccccataacaattaacaattttgattttttacgcaatcaaaatactattttaaaattagaatttaaaagtaaaaaagaatgggtttatgattaacaagccctaaaatcaaatgacctatgataccaaattttaattttaaacacgctaagaattataaagtcataaaatagattcaaacaataataattataataatcttgaaataacccaaagttatattattttatttagggtacttagacatacctccaagcttgatattaattctccaattaccaagttcatcacattacatccactatacgtcaaagaaagataagggtgtaatgtttgatgattactactctatttcactctctacactcacatacccacactcatctcatccataacaggagtatcactaataaaagggctcgcttaatacaataatatagtctatactgatgaaataaaaaaatatatataattttacaaatattatataaacaacatttaattattaattattatttaatctatcatgattgtagtttaaaaaaaagataaacgttaaggggtacttcaaaggatcacgagaggtaacatattgttatcattacaaattaatatcgggtctcacatacattgatttattaaataagatagaaaattactaactacttacaacacactacattagtatggtgttgggcactttaaaatacctaataacaatgctatttaaaaaattgacaaacattaacttggaattcgtttaaatattttagcgtttttggtggctaagcccaactatcgttttacttacaattaacctttcagtataagtaaagtgatagtggagatagtttagccgtaaaaaaattaataatgtaaaaaatagattacatcttaaatttacaaacatttaagtagtttagtagattttaccaccaaattttaaatttaaaaagttaagtataaataaaatgacagttaaaacttaaaagtgtttagttagaaaaaattccatattttatagaaatctaaaaattaactgattaaattatattttattttgccaccaaaaagaaagtacaagaagaatataagaagaataaataatataattttggttttttgctagaaaaaaaaaaagtaataataatgtaattttaattttgagttgaataccaaatccaaatattttcccaaaaacatgaaagaccacccgccaaaataccaaatcttactcaaattttcaaaatccaaacaacccttctcacaatccgatctccaccgtccattccctctatccacggataaagtcatccacgtcatcaatccgcatctcaaactttcaaccaatcaaaatccctttcgttcccatataaatataaaacaaacccaataacgcaattcactcaactcattctctttcattcgctttctctctcaaatttttctctttcgaaaaacttctgagttcataacaatggcgccaaaggccgagaagaagccagctgagaagaaaccggtggagaaggccgagaaggctccggcagagaagaagccacgtgccgagaagaaattgcccaaggacgcttctggagccgacaagaagaagaagagaacaaagaagagcgtggagacttacaagatctacatcttcaaagttctgaaacaagttcatccagatattggaatctccagcaaagctatgggaatcatgaacagtttcatcaacgatatctttgagaaacttgctcaggaagcctcaaagctcgctcgctacaacaagaag

SEQ ID NO: 50115 - DNA, 914 bp, Cannabis sativa
gcaagtcttctctgttttattttttcctgctacaaatcagccaaaaaaacaaatcttcattaagtactcaaacttcaagatcactgaaaaagttggtaactaaaagggtagtattaccttcaaaaatgaatatcttagaaccaagagtaaagtgactagctaagaacatgagcaggggaagcactggcgagtttagaggacattctcttgacatttccatttacaagaatatcgtaagtgttgttatcgggtttgagacctctatcgagcatctcatcatgcaacctaaaggcttcttgcaaatttccctccttgaagtgcccggcaatcaagcaattataaataagaacgttcggggcgagattcttttgatccatctcgtccaagaccttacgagcattcactagctgtcccttgttacataggccgtttactaaaaccgtgtacatgatgatatcggggacaatacccttcgaaagcatttctgagtaaagatctaacgcattgtttaactctccctctttaagcattccatcgattaatgtagtgtaagtgagtaaatcgcaaggaatcccttccttcaccatgcgcttgtgcaaaccgatagcttgttccatgttacctatattccgaaagccacaaatcatactattgtatacagctgcatttggagatagaccagtctcaagaagttcagagaaaagttcagaagcagttaccatgtcttgtcctttgctaaatccatcaattagagcaccatatgcagcaatatctaactcaatgcccttactaatcatctcattcctacttttcagagcaagatcaatattgttgctcttgaaataaccattcatcaagctagtgtaagtgactacattcggagaaaccccgttttcagacatttcttcataaac

SEQ ID NO: 50116 - DNA, 669 bp, Cannabis sativa
gcaagtttttttactaattcttgttctaatgctggttctgctgtgttttctcccattgttcctgaggatatggcaccagcaactacaaacactataccagcaactacattaccagcaactacattacccagtataccagaaaattcccaaccttttatccctataccagcaactacattatccagtataccagaaaattccccaacacctctgcccgatataccacaaaattcagcaacaaatctgcccagtataccagaaccaaacatctctattgctgaaccaaacacacttcctgctgtcatgccagaaatcattactgccatagcacaccaacccttccaatctaccattgcttcagcacctagtgatactacaaacactcatcccatggttacaaggtccaagagtggtattgttaaacccaaagcctacttagccaccaaacatccactacctgaatccttgctgccatctgaaccgaaatccttacaggctgctctcaaagatcccagatggttacaatccatgcaaactgagtttcatgcactcaaaaaggctggtacatggaccttagttcccagaacatccgatatgcatatcattgataacaagtgggtacatagaattaaattgaatgctgatggttcattggatagattcaaatcc

SEQ ID NO: 50117 - DNA, 2400 bp, Cannabis sativa
  modified_base (2368)..(2375): a, c, t, g, unknown or other
aggtatttttaccgccaaaaataagacttaagtatttatctactactcggcataaaacttaagtatttatgccgcaaattactctaatttaataaaagaagcccaaaatattgtgtcgtttatttagattatagataaaaagagaaggacagcaattaatgttaaaaagtaaagagaaaaagtagttttgaggtgtgaaagctaaaatattgtcagaagcgtaaatatataaaaaacaaaagttgcttcagtgtaatataataaaatagcaaagggggtgtagctcatatggtagagcgctcgcttcgcatgcgagaggcacggggttcgattccccgcacctccaacttttaaaactcaatttcaattacattttttatttattttaaaaaattaaaataaacctaaattaattatctaccaaaacatcagtgtactacaaattttttaataaacatttaacatggagtattattcatggataatattaagaaagtttgagtttttatacttaatttttctgtttaattagaaaaatcttttatttttacattatttaaattaatttcatacaattaaaaaataaattaacaatattcttaaatatatttattctaattaaatatattacacaaataatttaaaattagtccaagtgttgacaagttaatatatctaattaaacatagaaaaataatagatatgaaattacaagttaacataagaaaaaaaataagtgaagaaaaattcttatccatttcagcatcaatccaagctttcatgaatcaccgccaataattgttctatccgctgtcgctataacggtaacaattcaatttttgcttcgtatatcttctttttcccaaactgtaaaaagaagtaaatatttatattagtatatatatctatattagattgtttgttaatataataaataagataattagcaattaaaatttacaacttattgatcgattaaataacagttaggatttgcacatgtgatgatgtcactcgtgtattttaatacataaaaatcatatttttagtttttaggttgttttggacaacttgctagtgatattctaagatacgccccaataaacgaatttgatttccctaaattctcgtatgcactattttaaaaattatattaatatttcaattgattaacatatatatatacatatatataacttagttaattaaaaaatttgttacaatcattaccttttcaacattgcatgaatttgttgggaaactttgtggtcatctataggatctaaatggataatttttccctgacgcaatgacctctagcatccaatgagcactaaaaaaatatttatacatgtatataagatagtgtaaaaataatttcaaagaaaacaattttaaattatctcttaagtattgtttacttgatattttagggaataaagaacatttggtgttggctatttatcaatgataaaaaatgagccaatctttgtgacgcaaccttaaaggattcttccttctctatatcattgttaccgtgcactacaagaagctttgggtctaaaacttgaaaatctatctcaaatcatgtaaccactttcaaatgtgcatgattttacaagtataaggttaattaagttaaataagagtatacatcattccaaaaagtatttcttggttcttgatgaagtcacacaacgccagttgttgtaaatcttctcaaatcttggtacgaggcgctatgaattcacgtggtactaaaattgggattacaacattttctcttttattttgaaaaattcttcaaccatccatccggttttccttgagattagagccatgatctctagagtgaataatagatcagcttgatcaccaccgccttttcgacatagctcgtcttgatggtggttgagcaagtggatcctatacaaaataccatataatatatcaaaatttgtaaataagatttgtaatgataattctaggaaagaaattttacctcagatgttaaaattaagtatttaggccaaggaatgaacatgttagctattttcctaacatatctgcacccatcaattgatactgggatttcaatatcttcttgcagtatttctgaaattagaacgtgagcatgtgaatcatcatagggcgtggtgtgaattatgattggaccctcatgtttgtacaaataagctgtgaccactctgcgaccaccagtagactcgaaatagtttggcctgaatatgtgagagtggtcaaagagtttctagatgtgtttcttgaaaaattacttggtttaccactccaacgtgaaacaatctttgttattgatatgatgccgggagtgttgggttttatgccctannnnnnnntccatttcaatgtaatccattttat

SEQ ID NO: 50118 - DNA, 1976 bp, Cannabis sativa
tatattctaatgtatgttttcaaatttgtgtaagattcattatggaatcagcaccaaacgatgattgggatggtttcgtttatgaagaggaagaagcacccgaagaacaatccatgccagaagaatccagtattgaactcgaagaaccaaagaagaaaaacacacgcggtagaagcaaaccgaatgatataacaaaaattaaaaatgaggggaagattctggaagttgagtacaatacacctattataggcatgatcctattagaatagaaagaacttcatatgttgcttgataatactaaaattctttttagtgtgacacaccatacaatacccctcattaataggttgaatatggcttgatattactgtgttgattggccaataaaatgactatttgtatttatatatataagcatatctaatctaactagtatttctaaaacaatttgtaatttcttttaggcccttaatgatgctctaaacaacaactataaccataattctaagggcttcttcctgccctgcccatacatcccaaaataaattcaaacttcatcaaatttttgaaatgtactaataacagtatgtcattttttaaagtgtgatatcttaaggtacccgttatcattacaaaacgagtattgtgaagagttatttccttaattttatataatcaggcaaattaataagttaactaattgtttaatcaaacttttattagcaagagattttacataatttgtcattgcatgcatttttctcaaacccaataaatcgacaaacccttttcaaattaagtcttgcagagtaaactttgttcaaaatatataaaacaaaatgtgaaacatcacaagccaataaagaaaatactaatgggaagaaattttgcttagttcaaaaacaaaagaaaaaaagaaagaacaacataattagtagcataattatttacgagttgatctaatctaagtatgaccatgatgatgatgatgagtttggtggaataacaaaatcttgaacttgatgttgaacttaatattgatcaccacaataaacggttgtgatgatgccacgtcgacgaagatcaacacagaaaacaacaacatctcctcctttaaggccacgaaccaattgagaccaattttgaccaaacaaaatttgaccatcagctcttaacttaagcttagtctcaattttattttgaggaaagctctgctcccaaacaacaaccccaaaatcatcttcattcaagatttgaatcaaatcctctgctttttccattatcacttctccaatctctttgggcatttctatttgatgaaaatgattacttttcaaatcatcctcactcactatcttcacacataaaaatggtttattttgaaaacccacataatcaagatcatcatcatgatcatgatgggattgattagtattaggcagaggaggaataatcagagttgggttattgatgtttttggtgtctaatctgattagtgtgagatttattaagtaaggataactatgagtaattctcatgagaagaacatctccaactcgaatcccgcgatcactgacaaatgtattccattcttttccttcgaatttgacacggccgtcaagcatgaacaccggcctaaccccgcgaaacccttggagtcctgaaaacactttgtcgctaatgtaaagagttgctcctcgagacattggaattgctttgatggaagttgctagtggagttgggaggaagaaggtgtttttgttcttcactacgttaccaaacaaggaaattttgttctccattgttcttggagagaaaattgagtgtaattttcttgagaaattgagagaaaataaagtgaaagagagaaaagggcgggaaaatgaagagttgtgtgtttagttttatattaccgtcatgttagttattgtttggattttggcgccagattatgtaatcatattaccgttgtatat

SEQ ID NO: 50119 - DNA, 1152 bp, Cannabis sativa
acattatcccagttataactcaacttattagaagcttattcgaagggacaaagtggataagcttctaaaagactcccatggtggtccctgcctagccacacacacacacaccccataccaaatctccccatatcagcaaaaatccctcattaactttgatcaaactaatggctggtgcagtccaatgctcataattactcgcaccagtactgactgatgccaaggaatctcgagtccttgcttgagcaaattcatattcatcaagaaaagttcttagccgacataacaagtggatgtatgtaactttactttattcctttttctaagtttttaaataattaaaaatggtctaactgtacagtcattaagattattcactttatttgtgtaccacagaacacaacaacactgttgttccttcttcttcatatcttattttaataatttatcctctttatttcatcatttgagcaaataagttctcttcaaatttcacgtaagtttgttgctttgaattttcttatctttatttaacagatattatgtttgctaaaaggtctcactatcaatcaaacttgtcttgggttaaattctttttgttttttttgggttttcatttttcattttttttttcgagtttctattcctgtttggttgttggggaaaataataggatttgcttttcttttttcttttttgtaaattttgttgttttgggtttgttctgtgtacagctctagtccatcaagtacccaagatcaagagggaatcactcactaaatactgagtaagaatgattgaactttatgtgtcaaaatgctattaaatttgattgaattgctaatctttgcttgctgtggattgtagctgttgagattttgcattggtctcaattgtactttgttgctttgtctcaattgtttaagtggctaaccattagagaatagtttcttccatttttgtgtttagtgtattcttagctattagtctctgaactatttatgtttctcagtaaatgtaacttatttaagacctcaaattcataatttcatacaactcagtactctcttttcaatctgatcagaaccataagtttgaaaagccatggcagagttcattctctctccaattgctgacaaaatcattggtggt

SEQ ID NO: 50120 - DNA, 1215 bp, Cannabis sativa
tattccccgaatttacgctgcactgcagtaagtctcatctcaactacattggtttctctggtgaaattgtctgtcatattcacttatcttttctccggttttgtagttggaagcatgtattcaccccttcttcgacgagttaagggaccctactactcgccttcctaatggacgccctcttccacccttgttcaattttaaatccccgggtaagtttgttatcatcagttttactcgaacgagtccatgctaattacttaccgcggttatctattgttcttcttgacagagctttcgggtatcccaccagacattgtgaatcggcttattccagagcacgctcgtaagcagaatttgttcatggctttacatacttgatgagatttttctctctttgtttcgccgaatagatgtagacatgttatatcttctgtaagagaaagaaagagtgtttgaatgatgaaaaaaaatctgagattttgtgtatgaatgcggatgaagaaggcgatagacggacgaaggtgagatgatgatgatgatctttgtatgaaaattctggcatatgtgtatgtttttttttatatagtttggccattactttgataggaagaccaagaacaacacaccccagtaccaaatatgatgatatatcctacaattcgtattcatttctgcttttatatacatacatatatacgtatacaacacattagtagtatatctttatatatatacacgtgtggctgtgtgtctttttcttcatctataataagtaagtttgtatataagtagagaccatgtgaataagggagatatcaaataaacaacattgtttgagtagagaaatgttagaatatatcagtggtcttaagtgtcgtatcgagttttatataatttaatgtaataatttttaaagaatattgctaaccaatagcataatggtacttttagatggtgttaggtaccactgatattcgataataatactcgtttgaacatgtatagtcgtagagagctttttgaaaagctaaagaaatgcctaattttcatttgatgtgtcataaataatagtaggaattgaaggttaaatgggctttgagctacttaaatggtttagtaattggaactctttaatggttttgatgggaaaaaatgaagaaggaaggatgaggttaaaatggctttaattgttttaatatgttatggtttatttat

SEQ ID NO: 50121 - DNA, 2621 bp, Cannabis sativa
gtccaaaccgcaaaaactgtaccattttttgtggtgcagtttctgcggtttttagtttcgcggtgcgggtgcggtttgaattgaaagaactacataggcgagttggtttgaaaaaatgttcaataactgcaccacccgcaccgcgacactcctgctatatagagtatgatattgagtcttgtcttttgatatggttatgatgttctctttatagtgtgttgtgtgttgtgttattttccctattgagtgtttgtcttgttatttctctgtttgtctcatatggcttcaacaagttcattgctaaaagcgattgaagatcagtatactaatatagaaattgaagctgaagatgatagtaattttgcttttgacttcatagatgatggaaaccaatctgttgatgaccgatggtgtattgtggagaaattcctaacaaaacgggcaattgattttgatattatgcgtcacatgatggcttcccttttttaactaggtagagggatgtatgtcaaagaacttgagctgaatcggtacttgtttcaattttatcatgagcttgatcttgaaaaggtgattgaaggtagtccttagacgtttaattgtatccagtttgtctttgaatgtctacaacatggctaagatcctcggtccctagttattaacaaacatgatatgtgggttcaagtttatggcttacagttggggtttaaatctgaacatgtcctacgtgagttagggggtatattggaacatttgtgaaaatggatcaaaagaattttcagggcatttggcatgactatttacgggttcgtgtgactcaagacattactgttctattaaaaagaagaaagaagcttcgacgtactgctaccgaggaaggtttctgggctatttttatatatgaatacgttcctacattctgttttatatgtgagataattgcccattcggataaattttgtacgcaactttttgtgctacccacggataaaattattaaaccttatgtgactggtatgcgtgctcaaccaaggagaaggaatcatttgatcgaagctaagtggcttagaaccagagctgatgaaaacatagctttctggtggcatgtctggctctgtttctctcccctctgtataggttcacagtcaaccatcttcaattggagggattatgggtgacaatcgtggagaatcaagaggaagatcctctgtcatctttatgaaccaatctgaaagagataatcgtgggaaagccagcaatccaaatattcctttggcagctgtccctactgacgtgggagttaatatagaagtaagtgaggattctcaacttaagatttttgatattaaacgtaggagaatagaggagctacagtcatgtgggccatgtgtgttggactttctaaaaatgggtcggccatagagacagttaaagacaatatagaagtacatgaaagtgagattattgtaaatgttcaaaaaaatgggttgttggtgggtgatggttcccaagcccaccgctcgttatgagtatactaagctggaattgtcgggggctatagaacccatggatttttcaatttatttcagatcttattatccaaaagcatcccaattttttttcctttgtgaaacgttatgtcgtaaaaatgtggttgaatgtttgagagtggttgtgggttatgagggtacgatttcagttgatgctagaggtcatagtggtggcattgctcttttgtggagaaataatgatgaagtggaacttctggacctctcgattacttttattgatttaaagattacaattgctagtgaagagccttggagacttacgggtctccatgacaagcctaatagaactcttcaagccgaaacatgggatcaaattcaatctcgaagtttggattaacctctgccgtggtgtatcattggtgatttaaacaatgtattatctcatggtgataaaaagggtggtaaccaatatctccagtggcttttacatggtttccaaaaggttttggaggattgtcatcttcatgatttagttctttttgggtatccatttacttgggagaggggtcggggaaccaatgtttggattgaggttctccttgatcgtgctatggccaattaggactggattcaaagattcatgtctgcccaactattcaatcttgaagttattgtgtctgaccattgtcctatcttgcatcaactttcacctcaaaatttttctcagtcgttcgtccattttaagttcaaaaatgcttggctccgtgaaccattatgtcgccaagtaattcaaaattgctaggagttgtgcgagggaaggccggttatggagaagattagatttgtggcgagaaattggtgatttggggccgtgattatactggtaatttcaaggagcgaattgctaaatgtaagaaagaaattcagcagctgaaaagatgtaggaatcaagactcaattactcggtataaaattgctcaggctactcttggggaaatccataattagcaggaagtgttttggcaccaacgccctaaacaactttagctccgagagggcaataaaaacagtaagttttttcacgcgcaaggctactgctcgcaagaaaaa

SEQ ID NO: 50122 - DNA, 772 bp, Cannabis sativa
tatattttttatttgttttggtatatagaagaacgttttagtccattttattttataggattcgctctaaatttagacgagttagacttgtgcttaggattcatactttttgggagcccaaaataaaaaatgaaaaacaatatcaagtttttatttaaataaaattaagtaaattgtaaacaacaattgttcatggtttggttggtttggagtatatgatgcatattatacaatggtatacgttcgagtctcgtgactctcttagattcatatattctcagagtcggctctattttttcataatcgtgtatattgtcgttatttataaccatatatatgtaaatttttttaaaaaattaaataatttacaagattaaaattaaggttcaaacactttgttatatactcgtcatcatgtttttcttatacacatggcttggaactctttgaactaatttattttcgagaatgtaaattattttgatttttttttaaatttacgtgataataatataaaagatattagattaaaaaattcttataaatactgaaatagataaagaagtattcatatagtcttttaaaaagtgtactatagattttttatataataataaacaaaatttattaaaaggtaccaatatcataatattattattgatataatcacgtaatttaaaaaaccatactaagaatattaaacgaaaccggtacctaataattagaagaatgctctacaatagaataaatagatataaaacaacaaaatact

SEQ ID NO: 50123 - DNA, 909 bp, Cannabis sativa
taagattgtcacttattgtagtcaaggtaacactcatctcttgtatttagtatacgagattcgaagaagcacacgccgcatacctcttggtgggaagttgggttaaatcagcagcaaagtgactcaccatttctgaggcaaaatgagcaaggttgggccccacgaagcttttaaaccagtctgtcaagggatccaagtttaaattctagacgtccctagcatattcgcctcgaaaggacccatcttaggcctccctcagccacttctttagagccttcgcttcggcatcccccttggataattcccccacgacataattatgcttggcaatgcggagttgaaccctttcttcattaggatgagcaggagtcaaaatgatgcccagaggagcaagatactcatcaacttcagaaggaatcccctaattagcacttgggtcagtgtgtcaaccctcttcatttttctttgaagactctggctcagtcatagtgctattgcgatttcggtcgagaggagggacaaattcttcttcctcttcatcaatcagggccacttcatggttcccaagagcttcgatggcaggtcctccaggattcacacttaccctgggctgcttaggcatgtttaactcaggactgtaagttttggtgagtgcatccaaaagatcttccatgggtttcgctgttcaaaatgagtaaaaaatcagaataacatcagaaatcatagtcctacctttgtgatttaattctgtcttagcaaattcacaaatttaaaggctggtgtcatcatcccctaaaaagctatctgagggaaggaaccaacttgaagtctaggaggagtgatccaaaggaattggtacgagaggacctgagcccatccgggtttgacccaaatagtgacttaattttg

SEQ ID NO: 50124 - DNA, 1079 bp, Cannabis sativa
  modified_base (1040)..(1053): a, c, t, g, unknown or other
tgagtaattctaattttttattaaccgaaaaaaatacattctcaaattttgtagaagattactatctttgatatttttggagttgatctataaacctttgctcttgatatcatttattcagaaaaataataaacttctaacgcaacaaaataataaagaaacgaagtaagaaaaaattacttggtttggtaaagtcattaaacctgcaaagaaaaatatattcacttataattttaaaattacatacactcactatctcgaatctcaaaacaccttttgtttcttactcattttctcacattcacttttattttcacaatttactctttttctcacacacacctcaccccgacacaaaaaacatatttataaaaataataaatttgggtaccaaaacattccaaaactttctctaaaaaagacttcaaaacttgactaccaaaatatttcttttcacacaattaataattaactaaaaaaattataattttacaaatactaataaataaattaataaatgatttgagtcacatttcacaacaaaattatatactcagtcaatcctattgattataagtcaaaaggtttttttagtataattataattaaaaagtttgaataaaatagttcaacaatatttatattactaattatttgttttgcaaaaaaggaaaaaaaagaaaaatttattcacaaccgtaatcataaggcttcgcataaaaaataaaaacttgtagtcataggcttatacaactttgtctttgttaatctctaacaccataacaactttgttattcatttaagtgtaaataggggcataagtacctaaagttttataagcggtataaacctaatgtttatatttagcggcataagtacccaatatttgtaaaaactgtaatttttctttaatttcgttattacaaattctgttattttcttgaacagaccacatatataaggtccagattcttgatcattgggtctagacagaaatatgtagtatcatctactaggagtgttcatccgatccaatccgnnnnnnnnnnnnnnaacaacatccaatccgcactaagtgc

SEQ ID NO: 50125 - DNA, 1086 bp, Cannabis sativa
gtggaagggtgcaatggacaccgaatactttgccattaaacggaacaactcctggactcttgttcctcggactcccgacatgagtgtcatcgataatcggtggctctttcgcattaaattgaatgcggatggcacggttcagtgcttgaaagcgcgtctcgtggctaagggattccaacaacaacccaggatcgactttttcgagacgtttagtcccgttgtcaaaagctccactatccatgttatcctcactcttaccgcaaccaacaagtgggacatccaacaagtcgacatcgacaatgcttttcttaatggcaacctatctgaaactgtctatgtgtcacaaccaattggctacattgactctgcccatcataactatgtctgcaagttaaacaaggccctttacggcctccgtcaagctccgcgtgcctagtttgaccgtctaacacaggtactactcacctttgggtttcaacactcaatctctgatccttctctcttttactactgcaagtcaagggttgaactatacctattggtctatgtcgacgacatccttctcactggtagtcatgctggtaatgttcatgcaatcatacatcagcttcagcagttcttttcactcaaaactctcagttcgattaactattttctaggttttaaaatcactcgggggcctatggaatccatctctctcaagcaaagtacacgactgatttactcaaaagaaccaacatgctgcactccaagccaagcccaacaccaatctctcaaggtgtcaagttaagcattgatgatagcaaaccatttgatcaatcattgtttatcgaagtgttattggtggcctataatatctcactcttagccgacccgatattgcgttcacagtcaacaaattaagtcagtttatgcacaaatcaactcaacgtcactggaacatttggaaaaggctattacgatacctaaagggcacaatcagccgaggcctcatctttaaaccatctcaccagtggtccattgaatgttttagtgacgctgattaggttggctccatcgacaataggaaatccactaccagttact

SEQ ID NO: 50126 - DNA, 888 bp, Cannabis sativa
acttccaagctacgccatgagcgttttttttaggaaatgatgtcgaagttttggtaaaagtcccaatctaattgaataagtaattacttttgctggatgagttggatgagttggaggagactttgtcatcacaaggatgttggaggaattggtctctgtgaccttcgtgattataatctctcctttattggaaaataaggttggcgattaatgactaagagaagtactttggcggtcaaaatttataatgttaggtactatcctaatggtagtttttttatctgcaatagttcaggtagggccaagagatctattggctgtggtagggatgttaatgtacttcttgatccatggttccctgatgtgctaaattcgtatgttacttcccttcatcctggtcttataggccaaaattttgcaagcttaatgtgtgttgatgctaataattgggatgtggaggttgtttcaaatatgttcaatgtaagagacaagcaacttattctctccattcggcttgatagatatggatgcttggtattcagataaggaggtatctgggctctattcaataaagagtgcttataaatgtttgcaataccaaaagggtgaatgtcattcctgaagaaggaaatagctggaaaaaattatggcaaattgcagtacctacgaaggttcttcattttctatggagagctatttcaggttgtcttccaactaaggtaaaattttccacaaaacatgttaatgtcaatcttatgtgtccattttgccacacggctatggagacaatttttcatgtcttagttgaatgtggttttgctggctcttgttggaatctttctgtgttgtcgtctgggacaaatgtgactgagtttagtacctggtttt

SEQ ID NO: 50127 - DNA, 861 bp, Cannabis sativa
gatattatgggatggaagcaagtgagtttgagactttgagttgatcagcaaagctattggggagctataaagctttttttggtatatttcatatacacgtggcaattaggcatggatggttactattaccgaacatgtcaggcatctttattattttgtttcaccaatgctatcatataatttagatatgaagatcttattctcaatcaatgaaacagtacaatgtttttacattttcatgtttacaaggcttactttttctaattatgtggatttatatataatcataaatttaatcatttttagtattttaatatagaaaactttgaattaaattttttttaatagaacttttacttaattaaaaaaaattaatatgataacgagatgagtggatacactaatttaaaatttttgttggagattgcaaacaaggtcataatctttcaaggatacaatatttcttgaaaatattttctctgatgaataaggagagaatacaacaatactacttatttataatatcattataagtttgaagtatttataatttggtcactcaataaattataaattaatatatagtatctacacattattctataataattaaatacccttataatacttataatataattagttatttaattttatatctacttatataataacatatatataccataatagaattttaatccaacaaaactcaaaaataatattataccagcagtgccctaaagatatgaaactctttctgatttgttaaaacaaattcacctttatgacttgtttgcatataagaaaattatttacatgaaattccattttacatgattggtacaattaaccaaacca

SEQ ID NO: 50128 - DNA, 941 bp, Cannabis sativa
  modified_base (26)..(44): a, c, t, g, unknown or other
  modified_base (915)..(916): a, c, t, g, unknown or other
aattaaatataatacaatacaatacnnnnnnnnnnnnnnnnnnnttccaaacgagccctaaaagatttgtatagtattaatgatcttgtaagttttttgtaatttctaacttgatatatatttgattcaagtaaatgatatgcacagtagtaaagtatatagaagatgtgagactagtggagtagtcaagtaaagtgtttgtatacagtgttaaatgactaatatatatgttcttattatttttcttaacatattttatattatacttaatattataagttttgaattgaattaattaggaaggaataattttacaaagtgaacggaaaattgcttggtggttcattattagaggcatgtacaattagtcatttctttgttaagtgatataataatgctaattttagaagaattaatttttttttttaaatattaatccataatgaagaaagttttaagattaattttgtgttgtagtgataatagaaggtgaaaacttatgtgttttagtgaagtaagttctgagaaatttatgtgctgcggagatataaggaagaaacttatgatttgttgttgttatgtgtaatataataggtacttattaaattgggaaatattataaaaatacaagaaactttactcaattttcaattatatttattgtgtttgttattgattgatataagtacttatgaaatcaaaaaatgttataaaaacagaagaatacgacatatatatgtcgaaagatccaagagattatcttgaaaaaaaggtaagtactattgtatttttataatataatttaaatttttaatcataaagaaattagtatagtttttgagattgactttttatgttgtaatggttgttgggttttgtgcctaaataaaaccctttacaatctgattagttatnnatataagaaatttgaagtgatttat

SEQ ID NO: 50129 - DNA, 1364 bp, Cannabis sativa
ggtttccatgctatgtcttcaacaagtcctttaatgccggttgttgtagcaggtgtagaactggtctgctgatgcactaatttagtcgcaggtgactgctaatggattgattcctgccgagtacaacatggttgtgttccaccaactgttggtattggtggttgaccgtgtctcaagaccaggggttgagcaatttgattaagcccattaacagtttgattactacatattgacacaacaggccgtgatttatgctgctgctgtaattttttgcagcacagtcctttggcatttcggtagttctcaatataagttaaagcatatgttgcaagagaggagggatctctgtttgaaccaccatgtaagacgttatttcgatcattctaaatactccacaaaacaaaaattaatgattcaacattagctttgtccattgtagttgccaagtgaattagataatccccatttagcataccatgagcttggtgaaaattaattgtaaactttgtgcttttccaaactgccttggcattcttgcatgtgaacatggcatgaccaattgattcccaagcatttttacaccttgaacataaggttgaatctatgacttttcgtttatgtaatgcagaggcaaccggtaaggcatgttgaatgacttttcaggcaaaaattttgattttgggaggtaattgtaaggcccaaaaggacttccaccaacatttgtaattgatcgatgaggattcttgatctttctccaagatagaggatgcaaggtgaaagtctgtgtttaaccgtgtagacccttgatgtgttatgatgccatatgagtcgatccggtcattggtaaaagcttaaggggatggtgagaattttctcaatgtcaatttgtgcaaagttttcctgaagagaagccctattccattccatagtatcaagtatgtaagcagagaccggagttgaaggatcaccagtatagcaaattaggcttaaattcttcatgtcctggaatccaaggatccaacccacttctaacttggaacccattaccaattttgtatctcagacctttaaggagtaggtcctttccccattggattccttgccaagttagagaaggtgagtgtccatggtgagcttccaaaaaagagtttcttggaaagtatctatgtttcaaaagtcttcctaacagtgagttcgggttctcaaacaacctccatgcttgttttgcaagcatagcttgattgaaatcaactaaagaacggaagcccattcctccttcaaactttgatttacaaagcaatttccatcttttccaatgaatttttgaactgtctttgtttttccccaccaaaaattggccatca

SEQ ID NO: 50130 - DNA, 769 bp, Cannabis sativa
ccgcagataatggccgagcctcggagttcatccgcaagagggtttacagggataagagtcggtgctacgagtgtggtgccgaaggtcacctatcttacgagtgtccgaagaaccagctcggcccgagagagcgacctccaccgaagaaattgaggaggggtggcgagaatttgaagagggaagacgaggaggataacgaagcggggtggtctgatggagctggggaagtgtttgaggatgataattgggcgtcggtggtagatagtggcgcggacgagaggttgttgagagaagcaagcggcggtgatggtggttgtggtgaggaagagaagaagaagaagttgaagaagactagttacttcagtgatgagagtggtgatgaggatgactgatgtcaacaggtggagttgctcttgatatggggttaatcaaattactgggctttggcttatgaaggtattaacttttttcacctgattaaactcttttagcatcgagtttgagttgagtaatgctggaagatgatactgtgggtttccttcttaggcttggttagaagtttaggagctagaagaaatcattttaagtgtggaacagagtatgaattaatggatggagagaatatagaattcatttgcagtcaatgcagcattggttaaatctcggcattattgggtataaaaaaatcatttatatgctaacattttagtcaaaagctcatctttcatttgtttgagttcattggatctctcaaattgtttctcaaaga

SEQ ID NO: 50131 - DNA, 2632 bp, Cannabis sativa
acatatatttaatcaatttcttagtttagtccttgtattattttacaatagagttgtaataaatcttgattttcttccattgttataaaatctctaacataaaatactttactaagatctaattacttttttctattatatttcacacatttatattacattatacatcaattttttttatataattttctctatatcacttaaatactatattttttttacattttattattttaaacaaaaaaaaaaaaaaagaaagagaaaagaataaaaatttaattaaaagaataagagagataaaataagtataaaataaatttagttcaacactatttattgagctgcatttagctaagaaatatggtgaggtaaaagtttgaggtattttaaacatttttagctaaaagtgtgaggtattacacacatatccttgatttagctccattgatgtgatgctccaatataagagtgaggtattatacatatattcttgatttagcactaatagaagaggtaaaataactcctagcttaaattttaaagaatagggtaaaattacactaccaagttaccaacaagtgagataaataataagtagagaactcaccaaatctttactctatcctttaaaatacatcattaaaactttactttttttattttacctcaaatttttctattacatcatacaacaacttctttatttttcttctctattttatttaaataatatatttatgaataaaatattatatatatgaaaataaaatattatatatatgggtaatgtgtgtatgatgtgattagaaaagtcaaaataatattaaattttttttaaagaaccactataaatgtaatttaatgtggagaaagatttagctcaaaatcttgtgagctaaaataaagatgagtttacctcatctaatagagttaatatttagcattattttttaaaaaatttacattttagctattataaagtacgagttaggagtgctcaaaaagcttataattatttgttcagctacatgtagcagtacaaatattatatattaatgacaaataagtaataaattgtatcaaattttaatctaatttttcatataattttgtatgaaaaattaggtgtgtacaaacaaaccgattcaactcgtatttaccaaattttgttattataatggaagccagacaagacctatataaaatgatgttaggcttgacctctcgaattgttataaaaattgataaatttatagaaaacttatcatatgattttaaaatcgttctcatcaccgtgtctcacttgtagttaatattacattcaagcagggtcagccctgagttgaaatgggttataggcaaaaaaagaattttgggtccttactataaagataaatggtatttttaaaaattattaaaacaatatgtatattttttaaaatgaattttttttatttgggcccctaaaataagtgggccttaggcgtgggcctagcccgcctatgtttagggccggccctgtattcaagggtattattattgtcatatctcacctatataacatgatgttaggcttgaccccactatgtttgttgtttatataaatgaattaactactcacttttatcaataagtgaatcttcacaatttttttttataaaagaaatatgtcaaataaaatctattaattaataataaaaaaatagagaaaattatatctaattctcacacaaaataaaaatctatataaaaaagtaattgataaatctaaaaaatatatgattcaaaactactactactactaataataataataataatatcgtgtgatagtatatgtaaggtgttttttttttaaaaaaaaaatattaaaataatataaaataaaactttaatgaagtattttgaaggataaaattaaggaaacaaaaataattttagagagattttaccatcttatatctctcctttatatataagggtgtgctcttaatgggtattacccatgaatgggtatttaattatggaccgttagatttaatcaaatggatgatatttaaagttattaatattttttttgacctgttacctgatgacatggcggtcatcttatttatcaaaccctcccttttttttccttctcattctaaagtgaatatattataattaaaaaaatattaatttataataattgttttaattaatttgaacactttaatttatcaaccaccatttttctcacttggtatcctcgtctcctacctctccacactccgcagccatggaagagcacacagagaatcaatcttctactaagcttccaataacataaaatgaaaatttaaataattacagaaatctcgattattttgtaacagacgaataaatatgagaaattcatttcttggaataaaatgaatattggaaagaagagtgaaaatagaagaccctctgcatcaatcaatttattatgctcatttaattataattcataaattttaaaagcagccaaacttatcgtacgatgtagtgtgaactatgaatggtagccctaaacacaaatcatgatggtgtcagcaccatcaatatcaaataaacttatcattataaatcaatatagttaattctatac

SEQ ID NO: 50132 - DNA, 2175 bp, Cannabis sativa
ttagaaatagttgtggggatatttaacaagcggaaatttgaaagtagtaaatagttcatgggagaaaattctatttgtagtccacttcaggtaaaaaaaaaaaaaaagaatgcataaaatgtggttaaccttatatttttgacaaattggggtcattatgaaaattttaaaagatttaagcaattattctaataaattaattttcgttcttattctttttatttattcttttaaaaaatcttaaaagtaagttaacaattaggggtgttcgctgtgaaaatagtgtgaattttgataatttttttcaaaccaaactacacaagcagttttctgttgtaatatttcaaatcgtggccacaccatgtaagggtaaaatttacagttagatcttggcccaactcaatgagcccataaactatgggtgataaatactaggttatctgtacaagcaattctctttgtaagagaaccaaatgtccaaattctaaaataggccttgttaaattgtaatattcgtggtaaccatacaaacccacttaattatgggttgtacaacccacaacaattctttagacatttagatttacgatacggtacaaggggtggtaagcccaaatggatgaagactcatttaaatctatatcgacccacgtggttagcccacgaaagtaagctgggaagcccactacgactaagtctaacctcacaacggtcttgtctgcgacccatgggctataccacttcaaactactcccacttcttattagagtttgccttagcttaggttctgttatttcttttatgttagttaatcattaagtcggttaattagttgcaactaacttcttgtacctaacacactatataagctcttgtaccattatactattgaatcaattcaatacaatttcttttcccctgtctttactctattttcttgttcactaatatggtatcagttgctataatccaagaaccataatctccaccaagcttccactgcctacaacaatggtgcgcacgagagccaatttctctgctacctccactgatctcaacaccaatcaagtggactatgctcatccgaattctgctcctccagcatctcaaaactcggcagacattccacctcaagttcctgttccagttgttgctactcaccatgtccatggtgatcaaccggcttatgaggatgtacgaagtccctacgacctcagcactgcagatcaaccaaaactagccctcgtcactccgatcttaatagatcgaaactttcaaccttggactcgagacttcaagccttccataggtgcacgtaacaaaacgcccttccttgatggtacgcttccaaaaccacctcccaatgatccattatacagttcttggatttgttgtaatcaaatggtccaatcttggatccttcactcagtttctcccgaaatcaagagcaatatcatgtatcttgatactgctgtagaaatgtggactgaacttaacaataagttcaatcaaggtaatggtccacgtatctttgagcttaatgaaagccttactttccatcatcaaggagatgactccgtcagtacttacttcacagaactgattgccatttgggatgaaattcatcaactttgcccaaagataccttgcacttgtgttgctgctgcaagaactcaagaatatcacaatcacaatcaagtgctgcaattcctcaagggtctcaatgaatcttatcatgttgttcgagatcaggtattacttcttgatcattgtccaccattgaataaagttttctctatgattgttcattaagaatgccaaagaagcgttggcaatcgaaatattaccccttactgcagctgcatcatcgtctataccttctacacccaaccctgatcctaatcttgcagccaatttcactacaaaaaataaaaagatgcacccaacctattcaaatttccaaaaaccaagccatcttcgagataatgctattttctcatttgttttcccctggatatggcaatcaaagaaccatagacactgctgccaaaggcaaaagtaggtctaattctaccaacactacttagtaatgttaagtcattatatctatgtgtcattttcttaatggtatatttaaactaacttttttaaaatactaaaaatttaatgacttgg

SEQ ID NO: 50133 - DNA, 1098 bp, Cannabis sativa
ataactaatgtagtgatatctactcatttaagaagtcttgagtgtgtgatagggctaagtggagtgtataaagatgttagattatcttggaattgcttggaagtttgaggggaggccacaaggtcgaggggctgattttttatttatttttttgatagagaagaaaacttcatcaacggagaatatacataaaaaacaaagttcgtggtgggaacaaagggttccacctccccaaactccaatgatccaaaccgaattatgagatctgcccaggtagcaaggtcataagccacacagttcaaagtcctagaaatccagcataattccacattagtgatacaacttaaaacaccagacaacgaaaaaaaagaggcttaatctttccaaattaactcatctttcgaattcaacaacaaccttcaataacaatctaacagtaagatcaattttccccaccaatctaggaagaaaccttctccccaaatgactaaagttccatccccattcttatctcgaagatagtttgcaaaataacatttactaagttccactcttggattgaaggtttcccatagagagcccactccaaccacaatatccaaagcaagtgccaaagatccatcgattttccattaccaagtaacatgttcattccatatgagatctctagaggataaaatatccttagcaccaaaggaggctaaaataccaagggattgaccgaaaggagctatcccttttgaaacactttcctcaaaataattgacaccacaaaagtctgatccccacttgcaagtttccaacccaacttggacattaaggcaagattaatatcttcaagtcgtttgaaataagaccccctagtctttgggaacatagagaatcccaacgagcaattacaagatatctattcttattcgacactcccaaccacctgaatttatgcaccaccttgtccatctcaaggaaaatactttttgggatcaaatgagtaggcattgagtacgctgggataagagtttggatcgccacccctaagcgagtctctagattttccttaatgaacatgaaatccttcttactttcaaagaagagaat

SEQ ID NO: 50134 - DNA, 1133 bp, Cannabis sativa
atagtggcttggttagagtatctacaacatgatcaaatgcaggaacatatcgtacaaagagttgcttggataagatgagatccctcacaaaatgtaaatcgatctcaatgtgtttggattgagcataaaacacaagatttgctgtaatggcagcaacactttggttatcaacccacataattggacattgagaaggggttatatgaagttcagagagaagagataccaaccacttaacctctgtagcagcattggcaagggcacaaaattcactctcaaacctggaccttgccacaacctgctatttcttggctgactaggagaccaaattacccccaaaatacatgacatatccccttgtgcttcttttttcatcaacacacgaagcccagtcaacatcagagtatctttccaaagttaaactggcaattggtgtaatgtgaagaccatgaataattgtgcctttcaagtatctcattagtcttttacatgcctcccaatgagtagtagttggggcatggatgaactggcttagtttattgatgatgaaggcaacatcaggtcttgtaagggtgagatattgtaatgcccccaaggtgcttctatacaatgtcttatcttcaaaaggttcactttctgtgagagacaatttaatgcgcttaaacttgttggatttagggaagggtttgcaccttccatgttgagcttgacaagaagatctgtgatatattttgtccgtgagagatacatgctagatttatctctaaagattttcactccaaggaagtaatgcacctgtcctaagtctttgagggagaaagacttgttaagatcagaagttagtttgtctatgaggtgaatgtttggacctataactaagaaatccccattgtaagagtgtgccttttagtgtctggttccaagcacgagggacctgtttttattaaaatgtacctacttttgtgagtgaattgtttaatataccttcactgatctctatttaagtttagcacataatttacattaacttaagaggtataccgatgttaaaaaatatgaaaataaaagtaaaatttaaaaaaagaaattattacatagaaaatataattgacattttatttacaaaaatacct

SEQ ID NO: 50135 - DNA, 2542 bp, Cannabis sativa
  modified_base (370)..(372): a, c, t, g, unknown or other
  modified_base (2302)..(2324): a, c, t, g, unknown or other
ttgtattctctaaattatcaccctcgtgcaatttggctatgtgaattcttttggttaaaaagatttctctcagctatattattaatgcaaatatcttcatttaattattttttattaaaataatttatttatatggggaaaaatttcaagtaacacagtttttattgatgaatctaagaaaatcataaatgaacgaactctacaaaaatctgttatatttagtgataattttttagtcacaacataagtattttatcactaaatgttacttttagtcacaataaaaagttacttgtgactaaaacatagtatttaactacaagttgtgattaatttaattttagtcgcaacaaatattgtgactaaaaannnatttagtcacaataaattgtaattgttgtgaataattcttttagccacggaccttttaatcgcaacatattaatgataatttataattggctacaacttttttatctttagtcacaaatgatttataaaaaagtgaattgacaataatgaacactaggtcttaaagtagtttactctctttcagtggtaatacgctagtctacttgtattttattagtctcaatgcttaagaacagttctccaaagttatattctccataaattctattagtgagtctttcagaatgagaaagcgtgagtcttattgatggtaaaaaattattaatgaaatcaaaatcagaaaatcaaagtgaaagtgtaagaactaagagaaatgaagaagcttagaatgctttaagaaaaatctttagtacaaatggagaaagtataattgtattcctcgatagtattgtgttacaatgttatcctacctcctcttcaatggaaaagaagggtatttatagggggatctattgatcctaatttacaagctgatacttgtgtggtccatatggggactatgtactgctctgatggtatcaagcggtaagtgtagctggtagtggagcaaagatagtggtggtcgagtgtagtgcagtaattaagtataatatattagattctattgataaatacataaagaatgagtctttgttagaagacccgacatgaagatcacacgggcacaacatacagtagagctaacgacgttaaacaaatcaaacttacgggagtttttcttatccttttcttttattttgcattgattttatttgattgagccttgatgacaatgcttatattaagtgtggggggagattaactatcgtgtttatctagttttttttctttagttgtttagttattttttttacttatttttatcgtttttttagtttatattaatttttcttgctttaatgtgagtgtgagttgaataaaattatgttggcaatgattgctcgcgtttgatatgtgtgtttactttaatgtcttatgcatggtcttttgaaaaataattttgttgatgatgaaattattgattgtgtgatagttataattctaggaaaatgagagattctcttgatttgtgtgcttaactcatgattagctactgctcaaacttgatttttaaaaaaaaacttttacacataagttgaattatcatatttgctaatgtttggaaagataagtgcatgcttgattttttaatttaaagtctcaaccactctagaacttgtttgataatcgtttgaggcgaaatcgattaattacacatgattttgagatgtgatataggtaattttttattggattgattgaaattttcaagcctaccctatttattattccctagttttacccaagttgagcctaaatgtttatttttttctttttaaccctatacaataacctttgagcctaaaaaaaatttattcatcttttttcacaccatagtatattgatgttttatgtattttttaaggtatgagagatttgttgagggaaaaaatattcatggttatatgatgatgaagaaaataaatactattccgttaaaataaatatttgtaagttgtaagtattttattaataaaaactaaaaacatgatgagaaatacgtcaaaaaataaataaatacttgcaacaatttgagtgtgggtgaatagtaaatttatgaagaaaaaaataagatacaagattgaactgttgaggagagtgattggagaatacaaatggacattatttgagagaatattgtagatgtatgtattaacgcagattttcgttaactatatttgagcctcacagtactgatttcacaaagaaaaaataaaagctataaaaataaagatatgaacacatagtttttttacgtggttttgcagtnnnnnnnnnnnnnnnnnnnnnnntcaatcttattcagatttctaattattttttttaggaactctcacgcatgagttttttcgtcccctttttcgctcttgtttgtcactatttataattacatagtggacaattaattacaaagttgatcagaatatgtttacgcaattatccctaaaattgtaggatttgattacatatcacataatgtaaatgcagtttatgatttgaaaatcgtata

SEQ ID NO: 50136 - DNA, 924 bp, Cannabis sativa
acaaaaaaaaaaaaatatatatattacgtgtaattttagaatatgctacaagggctgtttttgttagttttattattattttgatttatgaaggggcaaagtagtttattttttattattatttttgaggtaaacaagtagtttacttttagatttacttttatttattttattttttttttgaactacttttatttattattttcatttctattactcaaccttatttatttgttatttttatataagatgacgtagaacttcaaaatatatgaaatcgctttgctctctctctctctctctctctatgtattggaaaaattaattgaaaaaatatactttcccaatgtagaaaaaaatgagtaatttatggtatttataattaattacacgaatattgaaaaaaatttataacaattctgtagttgtttgtaataattttttatttagtttataaatattatttttaaaattaaaccccttaaaatattatttttaaaattactttccatggatccctcacttcaaaggtttcgtcccgaaaccaaaccaaagtgttgctatggataatagttgtgttgctgatcttttgttgccttcgggagggtgggacgtccctaagcttaaacatctgtttgaccaagagacggtgatagctattctgaaaaatggttcccccccaggttcgggtcaggatagttggttgtggaccttggaaagtaatgggcgattctctagtaaatcggcttatctgtcccaggctttggagagagctccccagtgtaatgttgcccccgcgctctggaataaactttggaatagtaaaatcatggagcgacataaggttctttggtggtgcattctttcccaagctctccctgttagagctgtgattaaacgaagacttcagattgatgattccag

SEQ ID NO: 50137 - DNA, 955 bp, Cannabis sativa
  modified_base (843)..(862): a, c, t, g, unknown or other
atttatttattagagtaattttaaaaaaattgtactaaattgtataaaaaatgaaccctaattatctctataaatttaaactaatcactaattatatacataattatttattaaaatataatgtatttatatgtaaaactttgaattttgaaaaaaaaaaacaaaaatgactgaggaggatcaaacctttcacccataattaatatataccttctaactaaccactcgtcctacaaaatttttatgcaatatattaagctaaaatttatatattatattttatttatatataatatataaattttaatttttaggggcctctaaaattatagagcctcgtgcttaggctctagctgtccattctgtggacggcgcccgtgcacacattaaaaaagtgttctataaaaatattggtgtgtaaatatatatatatatatataagagtgctaattacagtctcctatcacaattttttagtccacttccgcgtccgaaatcatatgctaaaatattttttttttcataacggtattcgttatagttacagtatcatacctgtaaaattttgaaaaattccgaatagtttatagtaccgaaaacagagtttctaatattccagtttaccacgagcattcaaaaaacttcaaacgtatttcggcactgtaaactattcaaattttttcaaaaatttatagggatgatgttgcaagcataacaaataccgctgtgaaaaaaatagaaaaaatattctaacatatgtttccgaacataaagattaactaaaaaattgtaataagaagtcaacaataacactcctcagtgtatatatatatactagtaaannnnnnnnnnnnnnnnnnnnatactaaattttatgctaggtattttttattatattaaaaggtaatacacttaaaaatgtttatctcatcttggttcaacccaattttatgtt

SEQ ID NO: 50138 - DNA, 2056 bp, Cannabis sativa
ttgggtttttagtggtttggaactccgaggcacatcattagcattaaatgctctgactgttctcttttgcaatgtttccatccattagattagatttcttttgatctaatgctgatctataacagggtataaaaattaaaagtatcagttcattttgccatttttgcactttagatcttcaaatttcttctgcaaattgcgattatctcccatttcaacttgcatgccctcaatgtcattgacttatttcttgcgtatttcatcagattacattttcaacctcaaaaacttttagaacccatcatttcaatcatcaacatctcaattgcgaagtccttcattgcctagaaatcttcatcaagacagtaagtggctcaatccctccttcccattatttcgcttttatgtatttgtagttttatcttcatgattgattgtttcctttatctgctttgtttgattattttttaggtaatttttattttatttgtctggacaattttagggttaaggaaaattcttaggttattagattcatagatttttgggttaggttgtatttaatattccgaaaattgggattacacttgttcaaaagtatgacccaatttattcgagaaattaaaaccccatacttcttagaaattgattgtcctaaaaattttgcccttccactcgaatccaaacttatgtacttaaaaccattcttgagataaacgatgccaaaattagggatcatctaataaaaaccaatcaggatgagtcttcaagtcgctaaaggaaatttttgtagaaaataactgagggtaaacgtcattttctacgagatgcagcttggcctgaaccccaaaattaatcttctattcctttagcgagacctttgcttttacctcgagtcactattaatttttcaccaggtgacttagatttcgaaatcatgacttcacaagttcgaaaaatcaaagacccctcaaaatcccacagtcacctttgaggcagaacttattgaatccaaagttaggtcaataggagcttacgtgggggaggtattaaaatcttgtgtcatcaaatatgaatgaggatgccgagttaggtccgttgctaaaggggaatttagttgttttccccctgaaaggataattcgagaagaagggtgtagcaccagcgaaccatctagtataggcacttagagcgtagagcatataaaggctggagcattacttcctctcaaagattactataaggaattctacaattaccttgaaattgcccctgtccaattaattccaacctcctatagaattttggcatgtctgaaggtcttataccacattttgcggtgggagtgcccaactccacttgaaattttatacttctactcaataaaggcccaccccgcaaggaagcgaggggcatgtggattttattatctcgagacccacacgaatgatcataggatcatagtgaggcagcccaacaaaactgagttcaaagatgatttcttctagacgtctggcctcgccccaattaatataaccgcattttgcatcatatgtaagtatttctgtctcaacacttggttttgagttttcaatttagtaactgttgacatttgcttatttttcttattgtattgacatcaatttcgaaaagacctatcccaactcctgagatggaagaacgacacagaactctcttaggtcttctgttcggactacgatcaagtaattttttactaaacgaggccaacctgaagacatgcaatctccttggcagctagcaatctacttgtgacattaaaatccaaaatactccaagtggcaataggtttcagtccttgttgacgaggaagacagggattatgtggcacagatccactacttgaagaaagtatcccctcgagaagctaaagaagaagcatctcgaggtaataattgcggatggtctcctgctatgtttagagccaatcttaccaagttagttaggtttaaggatagccagtataacttttatatctggaattgcatagatcacatagctcataggtttgacagtt

SEQ ID NO: 50139 - DNA, 2700 bp, Cannabis sativa
tcaattttactatttcaatgattgtttatgtactaaatcatgttccccagactttgataaaaaccaaatcatgcccttcgaactttgacatgcactaaattataccccctgaactttcatatatgttaaacataaatagcagtttaacgatgaattatgagagtatgcatgtgttttattgaaagctattatttatatgtttaatgccaataattaaattttaaggattaaagttattaaatagtgcaccagtaacttatagcaacataagaaaataattttaagagatgagaaaaatgcaactagagagggatatttgtaaggatttacatagttggggagaatttttgcaacagataaaaattgaggtacctttgatggacaacaatgaaagaagaatagcctcctttggtgatggtggcatcagcatcaacatgattgaaagtgtaaactgatcccttttggcaattattttcaaggccttgattacagaagtggcaatctctacaagagtttacgtatgttccaacaccaacatggtctcctactttgaaacgactaacaccagacccaacagatttcacaaccccaacaatctcatgtctacccaaacccaaaacctcagaatcagatagattcagtaaaaaaactaaaatagtcaaatgaatggaatcaaaatcagatctttattttatttcttacccgggcaccacaggatatttggaatctccatgtttgtttctggtccagactacatccgcataacaaattccacagtgagtaatggttatggagacatcgtcactcccaacagccctgttgtcttgtcagttttaatatattaaaaaaagaaaaaaaaaatggatattgagagagagtgatagaaaacaattgatacctgcgattgaatttgtaaggagaaacaataccagatggatctgtagctgcccaacctaggcattcatgatcatgattggcacaactcatgatgatgactattgtgtttttgattgcagcaagtgggaaaggagcacaatctgatcaatccaagtgtgttgtgccttccttaaatattatgatatttgtccctttcttgttctggtaccttacaatatcatcctatattggtttttattgactctgtcgtctttacttgcttacctcacaatctctctcattcatattttcaaggctccatccaatgcttattcttgtgttttgtcaaaatgcctttaattttttagatgaatagctagtatttagttttgattgattgacttaattatagtacaatcaaagaatcacaatttcagctctattttattcagtattttcaaaattgacattattagatttagagctttatccatggcattcacattccatttagacatttttctctcaaggaaaaaagggaactaattggcataaattttgtgaaaaactacaaaattgacaaacaaaaacttgaatctttagtcatatgttaatctaaaacaacaaattattttgatgatccaaagtctttggctcatcatatgatataatactgaacttaacatcacaatcaacaaataatcttcaacactccatgtaatatgtatcaactaaaattgattacttcatccatgtcatctggttttctttttccctttactcgaagaaggcttcttgtgttggattttaacttccatatcgctccttatttgcgtaactttcggatcttcaggcaaagtagagagcaagaatttcttgcttgagccaactccagtgctccacagcttcagcattttccttcccctcatccatttcaggagcagcttcatatgtgttttgctattgattacaccaacaccagaatcctgaaataataaacagacgcatatagttacataactaaaagggatgagaacttttttcttttttcttcatctttttatcttcaatttgcatctttaaactttataatgtgtaactctgaactaaaagggatgaatcccactgaaactaattacatcaactaaatctacaccccacttctgaagctgacataaacttcaaatggatacacatacaaacaagtgccctgcatagactagaaaccaaagcaccacataattgataagagcatatcaatacaataacatttacagtaaacagtacaaactacccacccttaatattcaacaagtctaaacaacaaattgggtttgtggtagacaaaaaaacataagagacacaaatgggcaacggcaagtcatgatttttattcataagagacacaaatgatcatacttggtcaactcaagtgaagcaaacaaagaacacatatttccaaatccaccagtctgctaaaatagacaatattgaaattgaaccatgttcgaatttgaaaacattattagaaatggaaaaagttatatgtatctatcattacaatgttttaagcattctcatcagagatcagatagcaacaaatacaaggaagaagaagaagaagaagaagggaggaccttggcgtgaacccaagcattggggatggtgagtggaccatgttccttgatgacatcgtatagattgcgagcaatggaagaagcctcttgaggactcaccttcggattgatttttctcacattctcggcgcgttttctcgagaaatatctgacgaaagaactgacagcaccaccggcactgccattg

SEQ ID NO: 50140 - DNA, 1058 bp, Cannabis sativa
  modified_base (95)..(98): a, c, t, g, unknown or other
agtatttagttacaagttgtcactaatttaattttagtcacaacaaatcttctgactaaaaacacatttaatcacaataaattgtaatttttgtnnnnaatacttttagccacggacttttttagtcacaacacaaataataataatgtataattagccacaattttttgtatctttaatacaaaaagtaaattttgttgtagtgaatatttatcttcattcatttataaccctacaaaaaattataatgaaaaaagaaaaaaaaagaagaagacgtttgcgctaaagtcaccatatatagtaatcacgtggccaaatatatatactatatataatatatatttacatgaaagtattgtatgtggcacccaattaaagacactgttttttttttttctttttttcttaattaaatagctagctagtgtattttaatttagaaaaatcgtgtaattatcagttgaaaatagtactgtaccttcatttgatagagcatagtacatatgggcctatggcatatatatattatatagagattagagagagagagcatattgttatattcttgtaaatatatataattattaaattaaatagcaaaaatttaatacttcattacactaataataataataataataataatatataacaggttaaataatattatagttactgtatattttaacatttttgatgtaaataatgaaataggaaggaagctagggctgaagaatattattatgcatgcatggtcatggagtagtgttggatttttcaaagcaaactaaagggcatgcaattaaaccgtgtcggtgtcggtgtgtcagcagtactgagtaccatagaaatatatatcagaagagataataatacagtacagataacaaaatctcagctgaaattggttagcctctctacataataatatatatatataataccctatcacaacacaaccccccatgtcccacacacacttgttatggttctatatataatatatctacatatgtctattgtgtatatatattggtccgcatcaaatcctctgtaca

SEQ ID NO: 50141 - DNA, 951 bp, Cannabis sativa
aagatgtatcaggatttgaaaccctattattggtggtgtgggttaatgaaagatttagtgggttacatgattaaacgtttaacatgttagcaaaatcaaagctaaacaccaaaagctgacagggttactacaaccattaacacatcctgagtggaagtgggatgatattgcaatggacttcgtggtgggtttgccttaaaccacgggaatgtatgactcactatgggctgtaatggaacgtttcacaaagtctatacattttctaccggtaaagactacctatacagtggatcagtatgcagagctatatgtgaaagggatagttcgtctccatggagcttttaaatccattattttagacagagatcctataagtcttcggaaagctatgggtacgaagttgaaattttgcatagcttttcacccctagactgctggacaatcaaagagaaccattcagatattaaaaggtttactacaagcctatatcatggactttgtgagttcatggagtaaatacttacctttaatagaatcctcctacaacaatagctaccagagtacgataggaatggctccctatgagatgttgtatggcaggaagttttgtttcccaatccattgggacgaaaatggagaaaggaagtatttggggtcctaaattagtccaaaggaccaataaacaagatcaaggctcgaacgcttgtttcacagagcagacagaaaggttatgctgctccaaagcgcagaaacattacattttaggcaagagaacatgttttcatgagagttttgtcaatgaagagaattaaacgctttggaaggaagggcaagttaagccctaaattcattgagctatttgaaatactcgaaaaggtcaggtaggtaggctatcagctacccttaccaccatcgttataagttgttcataatgtatttcaaatttcaatg

SEQ ID NO: 50142 - DNA, 1071 bp, Cannabis sativa
gccgtgatcagatgatgatgatcttctcttttttctaatcaagagaataataatatcgatcactacttctgtgggtttcgtttttttttttctttctattctttcaatgtttttcatacaccacaccccaaccctcttgcttctgactctttcatgattctcaatttcttgcatgatgacataaacattctgaaacataatcacaagaataatgatataagtaaaacaacttcaaataataataaattaattaattaagaaggtaataaattaagagtataacttactcccaaggtacatctccaactagcatccaatcaccatctttgtcctcataagttggtacaaaatcagagcctttatagccttctctctcagaatattgacccacagtgaacttgaacatgtcttctaaggcctttaagagttgtgggtaagctttataaaccgaaagatcaatctttctcagataaggagctccatccatgctaacttttacaaatatcccaccaatcgtcatcatattctgatgatccgatgatgaaccttgatcattaccattagtattactacttttcttgttcttcttagtattatctttattctgttgttgattaataataagactgtttttcctgtaagctcggattggaggccaccccacaatctgtgttctgtcataattaagtaatacatttaattagacgttgttcatgatcataataagaaaatcatcattatatatatttatatatatatatatattatatatacatactttgcaggaggaggagcagattgatcatcttcttgatcagcagtagcagcatgatcaatatcagaactatgtcgtttcttgccaataccagatgatgaggatgacaaagctttaccatgatgatgagtaatctcagtttcacgatctgtaccaggcaaacccaatctcagctcggttgccttaaggttgatcagatcattctcataaaccattccactttccattttcattcttctcttgagattttttcttctttgttttgttaaatatttcttagagtttgaagatttata

SEQ ID NO: 50143 - DNA, 1274 bp, Cannabis sativa
  modified_base (50)..(55): a, c, t, g, unknown or other
tattgaatcgctatataaatatatgtttttatataattatattattattnnnnnnattattattattattaattttttgttttattatatttaaaaaatcgcgtcaaacatgtcacattcgtgttacgcggctcgtgtcgtgtttggcccattttatttcgtgtcaagtcgtgtcaacccgttttcaagccgcgtctacccgtaaaattcgtgtcgtgttcgtgtgctgtgtcgaaacccgttttgccacccctagtttcgtgtgggttttctggctgttattgttgaagaaggtggtgaaatgtgctcgtatatatatataatacatacgacatccgttattaggaaataattgacgccataggtgcacgatttattgacatgtgcccttctatggcatcgattatttccataataattgacgtcgtatgtattatatgtacaacagggtgattttcaacccccaaccaatggcattggctttattactttctatacctacggtttttattaaaaaactactatttaaatgtcaatttcgaactaggcaagtattttcacattctttagcttcccttcttatcaattgagttgaaaaaacaaccttgaaagacccatattgtagtagtaaaaaaaaaatatgtatttttcttttataagaatcctattttattatctaaaataaatgagttactatatgcatttaagcccataagtaaatatataatctcacataacatgttggtttggatgaacctatcaagttactaagtctatatcaaagacgaaaaaaaaaatagaaaaaaatatacatttattataaattatttaattgatttatcatcaattattaattatggttaattttgatatattagatctatcatcaagttaatcataatcattcaaaacaattaataataaatttttctaaaaaataataataataattaattttgtgatttaataataaattttctataaattctttaatgaggtctccttgattaaacatttttaatatggataattacataaaatactaatttttgaatttttttttatattttatgttcaaagttaaatttttacattcttacgatattttataaaaatacaagaaaacaataaaaaaatcacatgaaagtagcaagaaaataacatcaaaaaaatataaaaaaataatatacaaataataaaaatcaacgaaataacaagagtacaacataaaaatatataaaaacatagtattttatgtaataaaatctaaaaaa

SEQ ID NO: 50144 - DNA, 1484 bp, Cannabis sativa
tacattgtataataaaatagttatgcgtgcaacacaatatttgaatcttattttccacgtaataaattttttcgaatttttttaaaattttgcagaatatcttaaataattataacgtatatgactatgagaacaaatttaattaaaaacttattttagatatcaaaatagatagaaatatatcgatacatcccttttaagaatatgcatcatacaatataatgtacatttaacttaagattattaaatttacatatatctaaacatatactcttgtttgttctctttagtttttacattgcatcttaactcacaatcattatagtagttaatttattaggtactattaaaatgtaatgagagtggataagctaagtagtatttctaatttgttaagggattaacttataaatattgaaaactaatcacctattacccaagaaacaaaagatccccatcaagataagataaaacactagtcttatatattcttgaaatatcattatcccaaagactatctctaacaaaatgaattaattaagctataattctattatttcttctcattgaatcatatatagtctcattagaataagatttcatgccattttttcaaacaaataaagaaagaaatgaattggtgaaatgagattcttccataaaatttgctttattatatagtaaagtaattggtaactaaaaatagagtttgtaaaaacaaaatggactcataacagagaattgagtaaaacaaacacaacacaacacaactaaaatatatttacagggtagtaatttattgatctaattatttgatttatcagaatactcaatctcttacatattaaaaatcatgttcatcaaaatatgcaacctgattaattaatctttttttttcacaaccaaaacagggcacttggcatggttcacacagtaactgctcacacttcctagtaaagctctgatccaaacaaaaacacaattattagttaagatcactttaatcaaaatgcaaagacatttgaaatagaaaaagtaatattactacaaaatttcagacataataacagtcttaaggtatataaagcttaagataaaattaaattttggagtctttatataaatagtttaataattattaaaaacaataattctaatactttaatgcaatagtaaaactttttataagatttttatagttcacacatttagtatttctgaaaagcaaaattaaaagataaaagctgggaattgattcttgacctttactttaaaacgacactctttactactatgtcagatattattttgatatattgctctattatttaatattttatctatactaatttttttttttacaattccaagacttgagtattcggggactcaaagcgcatgccttgtttgcctcacctcaggtccgcctactgataagcttagtactgaccaagttcaattccaaattaacaagcatattttat

SEQ ID NO: 50145 - DNA, 1154 bp, Cannabis sativa
taatcatatgcggtctttacaagtggattccaggtttccgtcaaaatcagagccgggcatgacaccagagcagcatgtaattctgcaaaagaagtatgaataaggtcaatacattttaatacatccggatgattgttattgtgtattttttcatttcgctccctccagatagttatcaactacaaatcgaaacataaaaaaaaatctcctccactcggatacccctgttttctcaacataaattagttagaaactaactatttttattggtatgcatcaaacatcctagactcaattaagtgataaagcattttggataataattctttttttttggataaatgataataaatgaattttaattctcaaaagtgttaatcatacatcgcctactcactcttatataggcttgactcattttgagtacacatctccacattattactattttaactttttgacccttttctttacttctttcttttctaccatttattttttacctaatgaaaagataaattctagcatcatgaaatcaaagtttgaataatatatactttttttaaagaccaaaaaaaaaaaaaagttgaaaaagtgaaaaagataataagtggttattgaagtctcctattataatgactttgactatcctatacccttcattatggccaagttgtacattaaatttcagtaaatggcaaagcaaaaaggaaagaataaataataattccaaaaccatataattaatttgttttgtttttattcaacttctaattcaaatttgccaaaaagttttggtctgctcagtcaaatttctaaaaacgtggctaaaaatcattatcagaaaaacaagatgactagttttgaatcaataagaacaaagaaaacccctttttttaaaaaattaaaataaataaataataataattgtcattgcttctattttgagtaataattaatacaacaaagaaactggtcaaacaagatttctgccaccaaaccattttctgttttctaaccaatgtgaatgtcacaaagaaaaataaataaatagacaattggttaatttttatgttcaaaaatacatgttgaaatattatttttattttttttttcatgatcacggtgtttgttatagttacaacatcatctct

SEQ ID NO: 50146 - DNA, 922 bp, Cannabis sativa
aagaaaaaaaaaaaaaagggaaatattgatcatcacaataatgggattatttcccttcttttcattttctcttttcacaatatgcattattttttcatctcttcaaaattcaattcttggttgttctgacttaatcaaacaatcatgcaagaatgctacaaatgatgatccaaattccacctatgatttttgcatcaaaatcttaggggaaaatcctaaatccaacaaggctaaaaccattgaagagctagccttagccactattgacctaacaatatgtaatgctaccaaagttgtttccactatttccaaggttatgaggtcaaaagtattgaaaacttcttatggcaacgcctgtcttaaagactgcttgagtatctactctgacgctatttcagctttacgagaggcgaaacgcgctattcgaatcaaagacttcaagagagctagtatcgaaattagctctacagtggatgctccttccacttgtgaagatggcttcaatgaggcacaaggtgaagtttgccctataagtaaagagaataatttattctttcaacacactgtggtttctcttgcttttaacaatatggatggtcatattggtttataattataataataagctttgaattttaatttcattttgattttccataatactataaattgtatttgtatatctattttaatattgctaaatatattgtccctatatatgcgtatagtaccttgatcatgtatcatgagtattgagtagaaaccaattagagaaatatgagaacttatgacaaaattaatgtaaatcaaataatcagtgagaatatgtatatgcttcatagcataacaaatgagagtatatatagttttatttttttgttcatctaattataatttttccaaatgttagaaaaaacaaaag

SEQ ID NO: 50147 - DNA, 1389 bp, Cannabis sativa
tttcatttgtagttaataatccaatattatagttagaatttgagattaaggagtatggagtcttatctcataattaattgacaataaaaagagtaactattaactaatagattttatatattatattttctttttacacattaattatactctctaacaaaaacatcaattactaatcaaattgaatcactgaaattactgttataataactaatttatttttgggtgtaacattatattaaatttatcatatttttgtttacaatatatatatatatataacttatttaaattttctacaattttatttaattttgattagatcttacgaaaattttttaccagtatttttgagtgatgataactagattattttacttgtaattaaacccttttttcatatatatgtaatgcatttgtttctctttttttttttggcaatatgtctatttctaaattatctattatatccattttaatatattaaaaaattgttataatcatctgtttatttttttcttttaatattccaatatgactacattaattagtagggggttgatataaacatttgtgtcctcattattattgatcaattatagctataaatatatatagctggccacaaaaaaatatctccaagttcaagcgaagatatatatatatatctatttgaaagcagcagggataataagtgtgaccacgggtcacataaagctttttcaaaagacaaataggtgaaggaatcctagagcaattaaccgaccataccagaaaaaactgccaaaaaacttctgtgcgcccacccaactaacatgcacagtgaataacctttataacctaattggtttaacatgtcaatcaataattttatttatccactttttctttcttccttactaaaaggatcaatcgtttcagggaaaagagggttatatgaaacacactttcctttttttaatatatatatgtgtgtatgtgaatttcacgtttaatttttacactaaaaataataataattttatgtcacttgaatcttaaggtgcatgtcccatatcatttttcatgatatgcatctgttttaaaacaatagtctttactttaaagataattaaaaaaaaaaaaatagtcttccattaattaatcatgtgcatgcatttaagacgcaaaattaagatataataatcatttcaaaaaaataaaaataaataagataaaatagttgattatattccgaaacttcactagccaatgagggtgttttacatgtcatatagcatataaaagacattaaacgatcgaaatgtgtgtacagtctattatttaaattattcataagtatctaattgtaatatccagtttatatacatatattggtatttggtatat

SEQ ID NO: 50148 - DNA, 854 bp, Cannabis sativa
cgataattatacaaaaagaaacaaagatatcatgataggcttcaagaggtataatctttctttcaataatttagatttaatatatatattatgttgagatcctttagatttaataagtatgaggtgcaacatgaggatcatgttgtcttaacctctgaatctccttatcttgactttgaatcctggcttgcaactttgcaaacctctgctcccaatcttgcagagcctgtggtgaatttgcataaccaccaccatgagcctttctacagcctatgtctcttctacgaggatgagggggattccgattcatcgaaggccaccaacctcaactatattatcccaacccctcatattttgctaggtgtccatatctataggacaagcttgcgaacccataaatcaggtcggtcagataacaatgaaaacttttaatctaactaccgcatacatggaaacttaatcatggtcatattttgatataaaactgctaacatgctttctatcattttttcaaatcatgcttgactaactaaagtgctaaaacacataaagatttactgaaccgtgagtcgagcttatctctgatgatgattgtacatatcttgacgattttcggagaacaacctgacgactctaatatcaaaattgtaacgtcctactagcttaagcgcactacaatatttttttaattactgtacaagcctttgctaattaaaggatttattaaaaaaacgtgattaacaaaaaaatttataataaatataactttgcttataatcaaaatacaagatttacaaacatgggaatcttaaatttattttacaaatgttttacaaaacaaaaccaaataaaaa

SEQ ID NO: 50149 - DNA, 965 bp, Cannabis sativa
  modified_base (177)..(184): a, c, t, g, unknown or other
tctctctctctctcgtccgaagacagatgcgccaccacgagcaccggtaaggcttctctctctcacgtccattatttctcgtaacttctttattattatttttattttgggatttatgtatttttgagatttttgtatttcacagatcatcggagatctcgactattcagggatctnnnnnnnnaacaaaactcccatcttggtttcgtggaggatgaatgcgatattttttttttgagaaatccattatagcaacggtttaaaatcattggctatactataggccacggtttaaaactatcgcctatagtataggcgacgattttaaaccatagcttatagtctcgactataaaactgtcaggaattcttttatactgatatttttccaccgtcacctattctaccaagtattcatgatgctcgtatatgcgatggtttcatagaccgtcaagaattctttacctaacggtataaaactatcggaaattttggggtttttagttgtgctctaatctaaccacactatcaaaagagacaatatgaaagttagttgaaattgtaaacagaaacaactatatataaacacgagccaaacaagacttaacagaataataaaaacaacgaccgttgttaacattaaaagacttaaaaacaagtgacatgaacattaatagaacaattatttccaatcacaatagactaacatgctagatataactagacataattggacataatctaacatacaaaaacttggaccttaaaaatacaaaagtgccactaccaaagtagctcgccaccctaatgaggtacttggtgcaaatttggctgatgatcaagtcccaaaacatgtttttgctacaaaatagccccttgtgggtgtgccttatttggatagtgctagacaacagtgtttaatagtaatgctttatagctaattaggttttatttatttatttattt

SEQ ID NO: 50150 - DNA, 1484 bp, Cannabis sativa
atttaccagcgaatgagcctaataaaatggactcgtggactaaggatagttaacagttgaacaacgtaaaaatctcatatttttttatttattctattattcctttcttaagctctaaatattcagttgtcgaaaatctcagtaaacagtaaaggcataatcatttaaaaagcctaagcatggcgtgctgacttatatttaagatagattactaaactaacaaagggattgacctataacttctgaaattataacgtaaacaaaattactgatgaattgtggcactttgctacattcattaattaaatggcaagactaataccatacgacaagaagttgtgcttatacctgcaaatcgtagtacaactttgtgaataatagttagcgatgcttctcatcaaatagttattgttggacttaacaacataaggtgataaagaatataataaagacacttaaatcatacctctatttttgcattgtagaaagatgttttagtactacatcgcaaccaactcttattaagcatagaaaaaagagcactacatatacttaatcaaacaataataataataagaaaaatcttatcaatgaattaaactatacacattatcgttaatgtattattacaaacagatgctagcatcaatagttcccacacaaaataaatctaaaacatacttaatctaaataaaaatcagaagaagttcgataattttagatcccaaaaaaataatcacacctgaactgctctaaatgatagagagaaattatgaacactcgtcatgcttacaaattacaatgagtaagaatcaaatcagatttaaaatgtaaataagaatttaatttatagctgattacaatgtgcaagttctatcttccgatcgaagagagtcgaggagagaaagctcgagataataagagatccatatagaaatacacaaatagagaaagagagggaggcagagagaacttctcagcacaattatattagccgacgtagttaaaaattgtccactatataatatgagttattaggggctattttttgtggctcctaatactgtcgtccctaaaacacaattttctagttgtgatactattattggtgtcaaacaccacaaagtaaaaaaaatctaaaaattgcagtacaaaaattgtaaagaaaacaagctaaaagaaattgtagatctttctcacaaaaataagtccatttcatctgttttttgtgatatactttcttttatattatatgattttatatatattgaaatagttaatacaattttttgaaattattaaaaaaaataataaaaataaacaatgatagagaaagaagtatttttgttttatatattttcttctattatgttatgatttatacttgtttacccaaattttaacgacgatgatgtgtcaagagtagcaacacgtggcacaaaaatactgagactaaattcatgaagaatatgtaaagtcatcat

SEQ ID NO: 50151 - DNA, 525 bp, Cannabis sativa
ataatatgcatgaaatttaattatgtatagttccatacttttaatcatttaattaagttcaatatgacctttaataagtttgttctagatatcatggaacttctcactttttatataagttttttcatctcatctggtgatgatattgagcactattggtatttaacaacattactattattattaagcacttttcactttttataaacttgttcacctcatattgagcaccactagtatttaataacaacactattattatttaaacattagtggtgttcaatactactttacgagtagttaacaattttttttacgactattaaattaaaatatacgaaattaaatattaaattacacagatatcaacatgacatttaggtagtggtaaacactattagttcaataatattgcttatccagctcaaacatttacttttctagctaaaaaatatcgtcgtaaggctaatgtgggaaccgctcatggacctaaatttagaatcctttcacaattatcttatttat

SEQ ID NO: 50152 - DNA, 1246 bp, Cannabis sativa
acaaaaatccttaaattcgataatctcaatagttcaggaggaatttttaacggtcagaaaagtttagaaggcatgatttgacacatgtcaaagtttagggggtaaaaatcctaattagcctttaaatttttaaaaatttaaagaaaataaatataaagtttacaaatattaaaattgaacatacttctaatattaaaaataacaataaaaaataataatgttacacactatatattaatatttatatatattataaattaatctaaaattagtataagttcaattaacttaaataaataaattagggaggcacaagcgaatacgaaaaaataatttggtcatcacatgttacggtaatataaaattggtacgatacgataaacttaaaaatcataacacaaatacaaataaactaacttaaaaatacgatacgttaaaaacattataattttgataataataataataataataaatgtgtatttatcagttaaaattaaattaaatgataataaacttaaacataatattaaatattataattctacaattaaatttatttaaaaatataaaattaaaactacacaatagtttatttatagagcgtgattaaaatttgagtacttattagcgtatgtcctatcatgctttccacggccgcccaagcattgggcagcttgggccattgcacaagacccccattttttaaggcccaattttatttttattttttaagaaaatgcctattttttttccttttttttcttattatatacacataaataataaatttataattaaaaatttatgaataaatcttaaaataaaaaaagaaggtagtaataaaattgtagttttaatgtacacggttttttttttttttttttaaagcgcaatttaaaattttgcacgaggcccccaaaatgcttgggtcggccctgatgctttttaaacacattctttagtgaaaataggaagtaagacttgaaaaaaatgagttcaaactaggggtgttcatcaaaccgcttaaaccgcccacactgcaaaaaaaatgcagtttgaaattttttgcaatacggtcgcggtttgaatatttcctaaaccgcgtggtgcgatttgcgattttaaattattaatatgttgttcaaaccacaccacaccgcaccgcacattataaaaatactaattttttatatttatttaggtccaatatgtgaatgtccaagggaaatttacaaaaatattg

SEQ ID NO: 50153 - DNA, 1257 bp, Cannabis sativa
ccaacaaaaatataatccacctagggtccctcaatgttttggaaggtctaaaaagtctcaatttaattattttattcaaaaggtgagctccagaatgaatagttggaatagtcgattattttctaaagcaaggaagaggttctcctgaaagcggttatccaaattattctctcttatgctatgtcgtgttttagacttcatgtttccacttgtaagagaattgagagtcttatggctcacttctggtggggatttatgggaaacaatgggaaaatacattggaaaacttgggataatctttgtcaatctaagttttcgggtgccctggggtttggttctttcatccatcataatcaagctttgcttgctaagcaggctgattctcttattgtaaggctggttaaagctaaatatttttgtcagaattcttttcttacaacctctaaaggtcattgtgcttcctttacttgacaaagtttgctttgaagacgagatcttctcaagagaggtcttttatggaaagtaggaaatggcaagtctatctccactcttcactcttactggattcctggttggatatttatttcttttaaagataatgttcagcccccggatcccactatttcttatttcattaatagtaatgggtgttagaataaggatcgtttactgaatttctttgatgacgatgttatttctgctattcttgttgttcctattggtgattcttctcttaaggacagtcatatgggagcatcactcctctggctcttttactctaagttcggcttatcatttagttagctactcattttttgcctcacttgatagtcattccatgatttgctggtgaaaagtcctctagaattttaaaatacaaaataaataaatctattgtagagtttttattaaagaaaaaaaaattgggttgtgcacaagacctaagatttaagttgaagggacgatatttttttatataaatgaggggggcgtctttttttttttttttctacattgtataacatgttaaaaattaatgcataataaaaatattaagttcaataattaagatactaaatataaatcttactggtagagattcaaaaaagtaaaatgcaactactaaagtaaacatgcttaaaattagaactcatgaccttttttatatgcttgaaatagctttaccattatactaaagcttgttttatgttcataaatatcactttgatttataaatatatgttgtaactagctaaa

SEQ ID NO: 50154 - DNA, 3636 bp, Cannabis sativa
tgtaagtatgtgatatgcctttttttttttctcggataagaaatgcaatgaatttatataaaaatgaaatttcttctttcatgttccataatatgttgttaatagcaatatatggcaatttctaacacaactaaaagaatgaaaccatatttaatgttattcaaattacttgtatattaagaacttgtctcaactttcaattgggctattcaaagttggaagatagaaaatttacctgacaagctttcccttaacgttccatttggcatatactcatagaccaacatttgctctccttgctcaaaacagaagccaagaagaccgacaagatttttgtgatgaactcgagagagcagctcaatttcagtcttgaattcaagtccaccctgcattgatccctgctgtgctcgtttgatagccactacttgtccatcaggaagctgtcccctgtaaacctgttgagagaaacaacaaaaaaaaaaaatgaaaggcagcaacttgaggaaaatcaaacgtgttgatcaaagccacgaagcttgaacttttaccttgccatagccgccagatccaagctcattacttgaggtaaaattactggtgcacttcttaagttcatcatacgaaaaccatcgcgctcccttgagttgtggtgcacctccactatcttgcccacttggtgcccaagaagctggaacaaagtgaagaattagttatgtatgctaagtagtttcaagccatgtctatgtaaactaaagtgaagttttagatgataaagatgaacaatggctatatacaatttatttatttatttattttattaccaaaaggtctacttaatccaatggcctttttggcgcgttttttctgttgaacagcatatactcctagggctacaaggcctagaaccaaaactgcacaggcagatgctatcccagcaattgctccggtgcttattgaatttcctttatcttctgaaatacataatgtgtttctttgttgttagttcaactaatataacaacaaaataattattcctacttaatatttaacctcaattaccttcaaagggataaggatcagcaatgaaaaaatatggtccaaattcttctggtggcttgtaagtttggttactcaattgaaacccaaatctctgaatctcagatatattaaaacgctcccctgtagatggaaagagtcccagccgaatctgaagataatcatcaacatcgaaaaaggggtttcgaagggacactgcaccaggattaaggccaagttttgtccaaaggctcctctctaggtcatggaacttattgtcatcagacaattgcctgaaggaaggtcctctaaaaactaattttccttcataaggatattgacattgacaactctgaggattgagatctttattcatagggcaggatttagttccacaagtaactaagcttgtagaatagctctctgttgtttgctgctgaaacttgcagtaatctgcactactagaagtctgacacactggattcccttggagtctataaaaaaacatatatttagaaattatgattgtaagagctgattagtttcatttgaaaagaaaaatgaatgacaataaattatcttacaataatgtttgattgtataatccaactgtcactaattgaatatcattgttttccaagtcaacaagattcacttgtgcgctgatgctgtagcccatgttcaatgtgccattgaatctattatttttcagtttcctgccaaaagttgagcataagtgtgagttaaactatttcaacaaatatctctaaatgtcatcaagctttaagtcctcatatctgtacttacacttgctgcaactgtggagagctgaaaagctcctctggaatttgcccttgtagcggtccgttttcaatgatgctgcagttcaagataaagtacatgaatttacaattaaaggacttttgaataaaggatggatgaacaatctgagtaacctatacaaataacttacatagttgtgatggctgataatgatgagaaccaacctggggattctgttgcatcaaatgtgttgttactcaggtccctgcagaaaacaagtaaaagatctttaatagattgaaattacaatgtaatagattgtacgaacataaaactggatatgactattggcttacaaatagtttagtttaaccattttggttaagtctggaaaagagccgttcaatttgttaaacgccaaatgcctgtcgaaaaacatacaaggtaccaaataattaagcactagtcaaatatttgtatctgttcataaccaacacatcctatactctttgataattttgttgcactcacaattcattgatatttataaggttggatatatttgatggcacttcccctgatagatcatttctatcaagccggctgtagacaaattagagaagatacttttatcaatttggctgtgtcaataagttagaaacaagtaaaagtatgaaatataaatggtgagaaaagaaggtaagtcaagagagatgttacttacagaacctcaagagtggtaacctgtcctattgttgagggtataggtccagtaaattggtttccatcaaacaatctgtcgacgaacaatcagatgaagttagataagtaaaaacaaacattaactaacgatgaccaagatatgaacggtaacaaacttacacatgtatcagttccatctcagagctaaaaagtccttctggaatggtaccggaaagcttgttcttgttaaaatggctgccgtttagataaagtttatgcaatattaaatcacatcatcaaaactgaaatgtaatcccttaagaaaaatagaaatttaatagcatatgatatctttaatgccttaaatacataagggaactatattattactcacaagtgttgagccttaagaagtttgtccaatcctggggtagtagaggttgaaatagggagagttccagtcaactcattgtctgccaagtccagccaatgaacgtttgtaagcttacccaaagaggcaggtatgttaccaacgaatttatttgaatttagagctctgtcaagaacaatttttcaatgaagatgtcaagagatcaaaccaagaacaataatgcacaaattatttaggtatatttattatggtgtttcttacaagaaggatagctccttaaggtttcctaattcatctggaatttgaccattgaagccgcagccttgtaggattctaaaatatttacagaagaaataccattaaacaacgtaaacaaattttcaaatggtgggaatttaaatgaaaattacttggttattagttcttacagaatattcaagcttttcaaatcgcctaaccggggagagagaggacctgtaagctctgggttagaggataagtccctgcaattacattgaaatctcaatgagcacaatctttaattaaacttggtctttagtaagaatcaacactgaaagatataagaataagataatctgaatgagaataagaatgaactcacaaggttcttaattcagtaaggctcccaatatcagcttcaaatctccctttgagtcccatggatgacaacatcctgcaaattttagcagatcattataaagaag

SEQ ID NO: 50155 - DNA, 805 bp, Cannabis sativa
gtcaactaacttgccaaaaaaagactttacactatgaatgtcagtttattcgttttgagcgaagaaattcagttattaaatagtagagaagggataataccattaatactttggtatgtttacttggggacaatggaaaatgaataagattttatttttagggagtgtttggtataaagcggagaatataattatttgtattgtgactggttatgtatgggaatatctagttagattactattaattgaattacattgttcgactgaatcaggaacttgatatattatatttttggaaaattatgtagaacggatttaagatattctaatagaaaataatcttatttttactgtaataattttttcttaaaatgtaaaaaccctataacaaagagagtattggaatatctttacttctactattgagtagaagtggaatggttatacaaaagatcgttgtttaaatatttattgttgtaaaaaaaaaaactcttcggtcgataagaaactgataataacaaattaaatattcctaaacctaatcctactcaaactgagtcttgtcaaatgacatggttggcctgttttgattgatccgtttgtttctgattttgtttgtctgagattaaaaattctttatttctggtgttttggttgcgttttgtcctctctgtctggtggttttttggcttatttgatcaacatggaagagcaatatgaggcatttacaatacatgatgatgatgaagaggggcttatcttcgaagcaggggcggacggtttggctgagattgatgataggtgg

SEQ ID NO: 50156 - DNA, 1440 bp, Cannabis sativa
ataatagtgggcaaagactaaagactaataacagagaaagcagagaaaaataagagtagtctttattgagaatcaaattcattgaatgaatacagtaaagaaatagctatatatagctaagtttgttacaataggaccgtcttacatagtaacggtattaaccgaatgactaaccaactaaattaatatctaatacacggcggtatttgttatacttacaacatcatcttcataaatttttgaaaaattttaaatagtttacagtgtcgaaaatacgtttgaagttttttgaacacatgtggtaaattaaaatatcggaaactctatttttggtacggtaaattatttgaaattttaaaataatatttggacatgtgatttgaacataaaagttaactaaaagattattatgtaaggttgtaattaacactcctcaaatttatatatttattgtatttaaagttcacgagattagttgttatttatttaatttttttttaaaggaaagattagttagttaatttttaaccaaactaacacttaataatttcaatcatttattaaacattataatgagtttaattagttaaatgtcaattttattttatttatttatttaaagggtgtcaaataccattcgaatatttcaattatttatttattaaaaaaaaaaagagtcaaataattcggggttgaataattttgggtacgtgttaagttgttaatgatacagttattaaggaacatatattaaggttctccgtttcatggaaacctaagatgccacatggggagtcagctgaattattaggccaaccacgttaccaaatgccgattaataaggctgtaaatttttttttaaatataatcaattaataaggctggtttgaggggtgccgccgccaattgtaaattgctgttttgttaatcatgtgtgattttgatcaccgcgtaaaaaaaaaataaaaaattaataaagctgtaattataaagagatttataaaatagacttatggtcattaaattatatattttggtaaattagtccttaattttttttttataatctcaaactatataaattttagcaagttagtccttaaattttattttctaacaaattggtccccaaattttattttcttagaaacataaagtcattactcttaaataatagtattttatttatttatttatttttgtattaatttaaatagtttgattttaatatattattaaattaaataaatatatttttttatttatatgtatttatttatcgagatttttaaattaaatgaaagctttagaaattaaataattaagacgaaggattttacgtgatttaggtattaattatccctagtctacgagtcagtatattgattttataggtttttgaaatgtattacaaatagtgtttgtaatattaaatcctct

SEQ ID NO: 50157 - DNA, 1622 bp, Cannabis sativa
gtgtcccttagcatttcttgtaaattttctcttaagtgaatactcataaattatttatgaatacaaataaaatatgaaatgaatcaatattaatggtgcatagtgaaatttacgttgatagctatatataatccgaacaaaataagcaataaatgtaatcgttgacaattttcatgcatattcataatttagtgtgtggataatttaaatatatatagaggaataatttttaatgactattattaattgatggatactaaataaatttaactataaatattaattttaaaaatattgagtcattagattttgatccgaataataaaagagaaattcaaatttctatacttaaattaactacttaattacagaaaacatcaaaaaatatcttttttttacactatatcgaaaataagtttatatgaaaaatatttaagtcaaactcaatattttttttatcattttttgctgaatttttgtttattattttttttttcatccgatggaacaatctcagcccatataatataaaaatgaaaggtttttctaattaaatagaaaaattaagcataaaaactcaaattttattaatattatctatttatgaaaaatactcattaaaagtgcatctatatatatgtttatataaaataaaaatatacatctcaacattgtcaatttattactttttatgaatgatattgaaaataattattattgttaaaaaaattatattttacactaagtaattagattctttaaaaaaaaatgcttgaataccattaaaaaagacaaaaggaaaaagaaaagaaagtagagagctttatttttccaaacatgacttagtggataattaatataaaaaattaaaattatatggatttttatattttttgtccaaaaatatagccctttttatcaaaaagattattttatgagaaaattagaaagaaagttaaaatatatagaaaaataagataaaggtaaccaagtacctttaagaaaccatagggtaaccaattaacataaaagagtaacaaagtacctatgttatttatttattttttattttttaaatttcccataaaataacatttttttttttgaaattttttttatttttgtaaacttattctttaaaaactataaaaataaaaatttcccattatttttctacaaaaccgacttttagggttatgatttagatcgatttttattggttgggcttttaaaagctatttttggactttagaagctctatattaaacttaaaaaaaaagttacatacagaacttattcaaacacatgaattttacatcattacaaataaatattaatttacattaatagataaaaaaaacaaaaatttcaatcaaactaaaatatatacatgtgcttttgcaaaagatttgcaagaatacatatacaatattagttattattattccattacaagtaaccaacaaaataaaaaatgaaaatgaaaaggcaaaacataaaaaattcaacttggaaataatttcaaaatcacatattcaaacaataacaataattaatgtttctagttagcaattggaggagttggctcagcatctccatcattttcaccagtcaactcttca

SEQ ID NO: 50158 - DNA, 2672 bp, Cannabis sativa
gccttcggcacatataatgaagaaagaggtaagtggaaagtggatcaccttgacgtattcctctagacggggagataaaatcaagtacatgaccattatgaacaactttgtagcgaaccgtagagacacagcccataatgagatcaatccatttgctagcaaagcccatacgattcataaccactctaagaaagctccattcaacccgatcgtaggctttgctcatgtcaagtttaagatccatgaagccttttttacctcttcttttccgtttcaaatagtgcatgacttcaaaggtaaccataacattgtctgagataagacggccaggaatgaaagcactttgggtttcagagataatatagtcaatcaaatctctcatgcggtttgccaaaactttcgagatgatcttatagagaacattacacagtgatattggcctgagatcacccataacagcaaagtttttcttttttgggatcaaaacgagactggtgtcattaagtccatcaagcataacttcagtgtcaaaaaaatccttcacaaagttgataactgaaaagtttagcagtgttgaattctttacgtatgttttaacatttttatactgatcttaacatgcatgaaactaaacagaaaacactcaaatttacaagcttcatcggaccctgaaaactcatttcaggcgactaatgcttgggttcccttgaaccggggtaataacttccactatgaatcaaaagatacactttccagtttcaattacaatcacaccaaaagtaatctgaaactaattcatacagaaattacccaactgatttgaacacactcaattcagaaaatcatctaagaaccttagacttcagaaggcaagactcccttacttctattcagctgaactcccttcagcaatgcaatctgaactcccttcagcaatgcaatctgaactcccttcagaaacgcacgatctctgatgcaccttcaatctaaagatcacctcaacagatctgcaagaaacacctgaaaaataccaagaacaacgttttcccctagcagagcaaaatctaattaaccaagaagaagagttagttaaaaaaccggtaatccctgatttatattaacaactcttaagctaacaaactttaacagctcagccaacaaagaatgacagttgtccttagttttagctcacttagctgacctgtcaaagatataataagaccaagagattagatgaaactaacaaccagtcagatgacaaaaacagcataattttccacacataccacagggacttacataaatgataaggtaaataacaactttcatgtttgcattgaccttaacgttgttaagcaagtataatatgcattctccatagaatatatttgggtaaacgttcgctactgcttttttatacttttgtgccagtctgagatgatggtcatgcttgcatgtcaatatttatcaaatattagtttctgtatgttttaaccagtttctttatatatatatatatttgaaatcggttatttttgttatgttagtataataataattagaaaattcaaacactaaaatagatgtattagttgtaaattattgtttaaatcgtacattctctttctctaaatatttcttttagtttaataaaaaattactcccatgatgaatcattctctgagtctcttgttgcaaatgtcaatatgaatatattgttatttgcatccattgttgaggctgtaaataatgtccttcgtatattattttcaagaatgtgacatttacaacaattactggtctgcaatatgtctccatctttttattgaatttgacaatgctaggaacatgtacttgaaccggttcttcttgtccgtaatcaattcagttactgtccctggatttgctatttttagcatatgaaaatattggtagttgctggtatgagtcttctgggtttcctcttgccaaatctagagtcatttctcctgttctccaagccttttgatatcccatcgaaactccaaactcgtgtaacaagtcttttatattatgtcattcagtgcatgtttcttgttgattgagttgtatttttttctttactatttgaacaatagtattataacttgcttgtctatgacatccaataagcaagtgtgattgttgacatattttctaaccttgaaagtttgtgtttgttttaattttgaagcatgcaaaaattaattccaattttcatccacacaagtaaccatgtattccattggttcatatctatctcttagctctgagaaaaacaatataaggtaaatatttactcccttatggtaatttgttactcatcaagttactcttaatttttttcatttttctttttttttcttaagataattttttcaaaaaaatcatattttttgtacaaatagtaaaaagcttgtaatttcctcttaggttaatgggcaaatgttgaaaatcaatgattcaaactgatatttataaaaattaaaagttttggaaaaagtactagctattttatacaagtgataagtgaaagtagttaattaaatatatattgatataaaagtgaaaggaagggtggggcatatacaataattttatgggcattttacataaatgtatacatttttttaaataattacaaaaaatgtgca

SEQ ID NO: 50159 - DNA, 2366 bp, Cannabis sativa
gatttaaagttatttgttatatgtgttgctatattattgcaatacattgttactggccatttgtgtttgccataactctgtattctgcttcaacaaataattttaaagttgtttgatgctttttactttttcatgacactataaaatcaccaagaaacatacaaaatcatgttgttgatcttcttatatcaacacaaattacgtacccaatttgaatcaatataagccttgagttgagccttgatgttgcagagaagaataaacccttccttatgaagatttgatgtattgcaagattctttgtgcaacaaacaagtgtgttgtcctaggaatagagtagaattggctcaatttattaatagagaatgcaacatctggtcttgtaatagtcaagtactacaactttccaattattttctataaagatttgagtctacaagactatctttttcatctagcctcagtttcatattggcctccatggttgtacctgctagtttacatcctaagtacctacgatcttctaataattaaattgcataacccctttgagatacaaaaatacctttttttgatctagcaatttcaagtctaaggtaatactttaagtctttccaaattcttaagtttaaatctagtttttaatgattaagactcaaccagattattgcttgccatgttggataaatctccatactaactgtctcataaggaaataccttaaacaagttacaaggaatataaagcaagatttttttacaagcctcaacaggccattataactcttggagcagttggttttgtttcacaggctaaaatcttatagttctttcatagcccaacacaacaaatcacatacaacaacaacattataaaaaggaaagcaacctgtccatttaaagagagagcttcagtccagcccttggggagttacagtagctcattattgtggagaaataaacccaggaataagagagtaaaaccagagagaagagagagagttagagatatatgttgtaatatcaaaccagaaaaattgagagaagtatagagaaaaagctttaagattacatgctggtttatggcaaggaatctccaaaaccttgtaacctgagtttgacattgatagtggagaatcaagttgcttagagggtcgcctgacggagacgtacctctatttttagagggaactccaaaatcaatcgttgtggttatttactcttatttttttgttgtttttctttcttttttgttctctaacagacaaagatcggtctagatatttgtgaatttttgtgtatatctcggcttggttttgctggaggtttgaaggttcggtttgggagctcaagattagagcttggagaagaagagtagaagaaggatagtggcttggctgttagggtttcaaagaagaagagagagttgttggctgctagggttttgcagcaaaagattggtttatatactgccttgaacgacagagttttgagggaaaaagtactcttgatccgcacaagagggaaaggtcatttctgaccttgttttctgcctttgggagttgttggggcaggagcgatctgggtagtgcatgatttcctatagtggtatcagagctcggtgaagtaagaagattcaataacacctggaaacaaagtcaagaaactagaaagatcatcaaaacattaaagaaaccagatttgtgattatcaagaaattaataaacatgaaaactctaacctaaaatctatcttgctacattcttacttttattatcttgttcaatttgattaacatgagtaatattagagtggatgttgacaagcttgatggatcaggggattacatgatttggaggaagaagattagagttcttcttgctcaaaacaaattacttagggttcttagtgaacctatagaatggccagaaaatacttctaaatctacacaagaagaattacttgaaactgctactagattaatcatttttaacttgtctgattctattatcatgttagttgacaaagaagatactccagcaaaaatatggaaaaagcttgaagatcagtttcaaaagaaatctttgattaacaagatctttcttaaagaaatttggttacaagatgagcaccaacaagactcttgatgaaaacctagatgaatttctagggttacatattgaattggcaaattctggtaaaaataaggcattaagtgatgagaatcaagctatcaccattttaaactcattaccagaatcctacaaagaagtgaagaatgccattaaatatggtaggacaaaaattactctagaagaagtgatctcaactttgaagtcaaaggacttggagatcaagaatgagaag

SEQ ID NO: 50160 - DNA, 1894 bp, Cannabis sativa
ataccgaaggggaaagatcgggatctgtataatcatacatcatctgaggaaggtcaagtgtgatgattctaagactgtgtaggtatgagattacacagttaaagatgacttaaatagattgattgatactacttatattaataaggtgcgtcttgtttttcggtagttcatcacgaaagaactctaaatgtacttgacttgggataattttaagatgggtgattttttgggaagttttttcaggaagtgtgtgagtgaggacaaaacacgctcaaaatgttagtttgtaaggttgtactcgtgtataaaatcattccatttatttctctagaattcgttttttcaaggttttaaatatatctctctcctatttgtctacaaagtaaaaagaaaagttaatagttttggtaatgtatactcatttaattgaagaattttcaattttatagttttttttgtttttttggcaaagtttatgaaagtatggctttttttaaaataaattattttgtggaaaaaattaaaaagaaaagtaacaaaaatgggaaaatcaataactaagttacctttagggtaattagaggagtagccattacctctatagagtaaccagttaccctatattatttttcttgtatttttttaatttttttctgctcaatttatatttttaagaatagtataaaaattcatactattactacgtgtactgtaaacaaaaatgacattttcgacttgaatttagtcactaaatatttcataataattcatattttttagaagtcagtgctagtttgacacatgaaaaaaaaaataaaactgacagtaataggcataatttaataattttatatatcgcttcacaaacacgagattctaaactcgaaaccccttctcccaatatcaaaaaataaaaaatatcacaacacttattaattagatagttatttatatcacaaacacaaacaaaatccatagctaatttaggattttttgtatttaatatcttcattcagtttcccaaacacccttttgcacccaagtagaattatcccaactaagataaaatccattaggtttaatcaaccaaaacactgattggtgaccaatatctctgtttggctcaaacacattaactgaagccattacatttccccacaaagcttccaaataatatgtactagtgctttcactaaccacaaaattgtagttacctccccatttcaatgttgtttcaagcttagaaaggctttgtttggagttacttatttggatcttaaactcatctgggtttgtgttatttttgggtaaattatttgtggtgatgatgtaaactgtattgggtttttgggcaccaaatgttaatgttgactttagagaaattgaaagtaaaaagaagaagagaatttttgttgaaaaagacatttttcttttttgaatggtgatgatgtgaaaatagagagggttagtgggtttatttataatttataaaatgaaagatgattatattaaggtgtaaatgttggagatttttttttttttggaagtttaggagaagtaaatgaaggatttaattccttaaaaaagggtttacttaacaaaaatgtaaggattcacattagatagattatcctagagattaaaaaaaaaaggattttttttacataatagaagacaaaaatataactggatttttaaatatttttatggattatatataaatatagtaagatgtaaatgttaggagacttttttaagataaaaatatcaatggtaatgctaaaatctgattaatatccactgaaaataaattctaaatcttgtcacatataaattgaagatgctagatttgctactcctcgcaagatccaaatatttctcatgacaagaaata

SEQ ID NO: 50161 - DNA, 3606 bp, Cannabis sativa
taaaagtaaaactttttgtagagatatgttagctagttcctaatcctacgtattcagtcatacttgtgattgtataattattatcttcctatagtgcattgaaagaaaacgaaagtttaagcaaattttattagtgtggggtgaaacaaattaataatattagaaaaatgttaaaaagtattatgggtgcttagtatttcttaagtcatatcgctattaatgcaatgaaatattgagttatatataatttaatgtaatatcttttaggagatattgctaactaatcgtacgatgacacttctacaaagtacaagacacctctgatgctaatcatcgtgaaattagcataatatatgttctatttataataaatataaaaattattggctatttatatattttttaagaagaatcaaaatattcactaataggtgaatcagacaacaataataggctaatcaagttgtttacaataaaaagaaaatatatcctaataacatcttcaacaaaagggcaactaaacagccagctttgaagtatccaaaaaatactactattaagggagagagacttgaggttggtacatggttgggtgcggctgggaaagatatccgagaaagaaaaagagaaagaagaaagggagagagggagtgcgactaattgctaataagtgtgtgtatgtgtgtgtaatgttagtatttatacgagggctttttagtgggcttgggcttttttttttaaaaaaaaaattgtaatgtcatttgcgtgggttataaacagatgctactttgcatctatttataattgatgctaaaactaaaaaatgtcggtttagaaccaacggaaagtagtgtcggtctcaaatcgatgcaaaattttaaagtagttttttagattcagttttgagtgaaggccgacgtgttgattgacacaaaaactcatttttgtagtagtgaagtgtgaagaatactaagcctgcaacttaaatgaactaatgacaaatcaaacctatcaatggctatcagccaaagaactcacaaaaaatgttgagcaatgacaaccatattatacaaacaagaataaaagaaaataactttaccaaccacgtaaaggattatcctaatgaataagatcatcccaagacataaagccaataataatttgaggtcccccaaatatgactacaaaagtaaggagccacaatcgtcaagcgacatgatcagccaattaagttaccaccatcgattcaccataacaaaaggctaaagtctcataccataaaacatactatactacaaatacaataataatagcaaagtggtgttataacaccattattgaaaataaaaataactaaaatccatgtgataaatccacaaccatcccaagaaaaccacagtcctaaaatgacatcgaccaccgaaaacccatcactaatcgctccacctccatttctagagaataaccaaaccccaaatctgaccagaacgtataaaaacatctccgatcagaaacaaatggatggaaaagaactaggatcgccatggctgactgtaatagggatatagactaccgaacagatggacacctgaactagaacgacaaaaagcttagaaacccaatcgacaacccaatggcaagaacctagatccctggatggcaagaaacgaagaaaatagaaccattggatgattggaacgaagatgcgagagatgagaattcgagatattcaaacccacgcacagatcaatagcaagccctcctgattaggactcaaactgtagtgcgctactggtgtaagcgcactatactgatttcataattactgtcctaacatttgctaatcaaagaatttagtaaaaatgtgattaatgaaaacttttataataataacaaactttactattaatataacatattaagttcataactccgggatcccataaatattttctgacacttaaaaattgcaacagctcaaaagatgttgcttagcgactaatgaaactgagcttatgatattttgaagatctaaacactcaaggtctaacttaccaaatatgaacaatcttcatggagctccagactcatcgctattcaatttttgccttgcttttacctacacatgaatcatttaactgtgagtcaacagactcactaagaaaagcataaaaacatatcatattaaatgtgtttgtagcttaggcgtccatacacccaattacaaagtaattatcacgcacccaatgtatacgagtctcaaacattcttgacaagagtacaaatagtttgtaccccctgaagccctactaacatctttaccatatgcactcagtacctctaatgtactagtgttggtagggttagttcaaacctcctaacatctttaccatatgcacgcagtactctaacgtactagtgttggtagggttagctcgaatatcctaacctctttaccatatgcacttagtacctttaacgtactagtgtcggtagggttagtttgaacctcctaacttgtttaccatatgcactcaatacctttaacgtactagtatcggtatgttagcttataacatgtgtatacaacatttatatatatgtgcattcttagactaatgttaattcactttcataatcaggtgtgtcaaccaaccctagtggaaatgctgctcaatgattttgaggtcctaagtcacaataaggcaaaacgaatgagtgtttctcccaaaaacactctcagggcttaactaacaatcagaagctctttggactaaaaacaaaatcaaactagcctaatcaaactcatctagacgtaccgcatttggatgtcaaatcatccatccagacataccttatccggatgaaagcaatcgaacgctgagatacctagccaacaataaaagtcccccgtatgaaagtcctaacactggaagttcccatctggaaatcctcatctagaggtccctccatcaaaaattttctgtctagaagttcctcgtccgaacaaccagatcgcatctggacattccaactgagaccttccacttaggactttctatttggaacctcccttttggaaccgttcttggcagcgaggctccttctagaactgttttggggcaacaagtgagcattcagaacttgctatctagaattgttcctcgtggcaaggttccatccgtaacttgccatctggaactgttccaagtggcaaggccccttctgggacttaccatccggaactgttccaggtagcaaggttccatccggaacacgttgtccagaatgcaccaaagaacaaagcttcaagttctcaactccaatctaccccaaatctgttcaaactcaaccaaactttccgaaacaactcaagcaagtattctaaacataaatcacaactcaaaagcctcaaaaaaaatcttacacaaaaatctaccatggatgagaaaagcttgagttcataaactcaaactttgcccaaacctgctactgctgcaataatactccaaaaactagtcacaacaacaacaacaacaataattcatcttaaaaataaattctaagcttaatcaaacacacgaggcaaccaaaacacaaattccc

SEQ ID NO: 50162 - DNA, 1909 bp, Cannabis sativa
tggtagttagtgagtttagtgactaaatagattgaagaaagataaacaagcccatgagaagaagattttttatttatttattatttttaaacttgttaatgttttttattttatataattttaatattattacaaaattggtttaacaaagtgacatggcttaactttgatgatatggattgatttgaatgagttgggctaataagatgtggacaattggcaatctatgtggcagttaatggcaaggtacctactgctacaacgaaagtgtaacagaaggtatttttactgccaaaaaaataacttaggtatttaagtgctactttatataaaacttagatattttcaccgtaaattactctttttattttttttaaaaagttacacatctaatagatgagctaaaataactcaaaaatttacattatgaatagtatttagctaaatgtagctaagagttatcttggttttaatgcttaattatagttttttattatttttataatttattttatttaactgtaagtgtaaaaataaataaatattatgtaatatataatatttattatttgtgtgtattataaatatatgtatttaaatagtttggaaaaaattataaagaaactgatgtatagtataatgtaaatttatgatgtaaaatagataaattaaaattttaatgatatattttaaagaatagaatatagaagctgttgagagtgctcatagctatatattttttgcttttaggtattttaaagtaagtgatggtgatgctaggatctttaatggaatactataaatatagtgtatatacattttttagcatatgtcgtttaaatttaacacaaaatataatataagttaaattttacaccataataaatataacttttaaatttactcgtttgcttctcattaatgaatttactaatttttttacattttatttatacatttaataagatttatacacgtttaatcagaatttaatacttttattaaagtttttacatttttctattaaaaataaagttaatttacacctaatttattagagcacaattataaaattgaggtgaaatacaacattaactttttttagccaaatttaatataaattttacccaattcattagagattgtgctgtgccgtcatttcagattcccgacctatttcggcactagttaaatggggttaatcaatcgggggccgccagcttacgggctaggcgtctctctgacctgataactagtatcgttgctgagaataatggaggaagggtaagaaggaaaaaaagaagttgacctctctttcaagaatttgaaagaacctttgcttcgcagaaagcacattctttctagcatgcgatgtcttcggtattggcatctttcccgggagaactaaagcaacccctatcgagtcaggcgggtctggttttttttcctaagaggtatgataacttacaccattcaagatcaatgcttgcatccggggcgagagatggacgaaagtggaactgattcttatctggttgttcaaagcctgcctacttttgatgacatgagattcaagcatgtcaatcatcacaaaagatagcatattacttatcatttatggaatttagtagtgggacactacaaccacaagagaaatattaatgagtaccttaatataccaactactaagcgccaagcaccaaacatatatattttaatatgggaatatttaatttactaattaatataaaaaatcgctaactaattatgaaacatcacatgagtgtagtgttattacaaaaatattaaaggcagggtcggccctgaaaatatatgggcctaagacaaattatattttggggtcctcaaaaatatataaaaaaaaatatcaaaagaagagtgttatggg

SEQ ID NO: 50163 - DNA, 973 bp, Cannabis sativa
  modified_base (628)..(633): a, c, t, g, unknown or other
tatatttttatttttaatttttacttttttaatgatttttgttctttacgtattatttttacgttgcagaaatattgtataatattgtggcaaaatgaaaacaatattattttttctccaaaaaatcaacatccatatgtataaagaaaaatatttgtaaaaaatataaagatggaaagaaaatgtaataagacctaattttgtaataaaaatagggtgttttcataaaaaactacaattttaaaaataaaattatgtgcttttcaaaaaaaaataataatgaaataaaaagaggtgaacttaaatatgggattaaatataaattttcaattgtaaatattacataagaaaaaaagagtattttttgaataattctcattataaaacaaaaaaacatctaatttaaaaatctaaagtgcaatttttcaaaataaattccaataaaaaaatggtcaaaagtcaaaactaaattctcaaagctcactgtgatactactcattagggaagaagaagaagaagaagaagccatgaatttgaatggagaagaattagcaggtccccctggccctaaggttacccgcctcgtctacttcgtcggtgccgcctgtaatctctctctctctctctnnnnnnctctatatatatatatatacatatgttcatatatataataccaatttatgatctaatttgagtttgaatctatttgattcagtcatttgtgtgattggcatcaacaaatggcgtgaatttcagaacaaaccagtggttttaccccaggatcccaagcttcaacagcaatcacaaaagtagccctagctttttcccctgaaactcaaataatttccaggtttttttgtttatttaaattaaagatacttttttgtttatcaataaagacaatttgaggggtttagacctttgtaatgtaattaattttatatattatgacattattattacaaatacagaa

SEQ ID NO: 50164 - DNA, 867 bp, Cannabis sativa
taaaaaatggtaaagcaacctacaaaaatgcagcgaatgttgtgaagctaataagatcccagtcccagaggaggagtttccagagcttacattgtcatcaacgaaaggaacatgaaacaatctcttgtggcttctaagatcaccgtagagatagacacagatttagatagcataagcatgcccctccataacacatgatcctacccgttcctaagtttccattgaaaatacaaaacaattctaaaaatattccaaattttcaagtgtactatccctaagctaagtttaaaattaaaaaatttaaacacacacgcagtgttttaccagcaaaatagtcgagagcaccattggagggcctccacttggagcaagctttccagtcgttaatgcagacgttggaaacctttaatgttccctagataaacaaaagactgtgagtaatactatgatttaaccaaaaaagataaaaaggaggaaacatgaaatgagaaattatttatgtggtggaaacagaaatttacgacggaagcgttagagaattgaatcagagagagtcgaactccatgggggaaagaaagaagtagttcgaaggttccaagttgcagagaagacgactcatccattcactctgtgaagaaagtagcttttggttgaaggaaatgaaatggaatgcaggaaacaatttttattctattttatttttgaaatgcaaagaaagatcattccaatgataaaaaatttaatttttttttttttatgtattttaaaatttattctattttattcacggctcgtttgtaacgccgtattaggtcgtattgtattgtattgtattatactgaattggattatatattatatttttat

SEQ ID NO: 50165 - DNA, 1998 bp, Cannabis sativa
gtcctctaattattcagtatgtgtgtcaagttttatcaagtgtgacatgtaaaatgctcatgtggatgcaaatctgttaattttacttaatattttgtacgtatttttaatactgaattaatttttaatttgattttttaaaaatacatgttataaatttttaattattttattttaaattacgtgataatagtctaaacatctatcaccattttatttaaaaaaataattttataagggtgtacataaatcgatccaatttaattacaagtgactattccaattaaaaccaaccatcaaacattaattattcaattgtaattgaatgttatttgcatacacaaaaattaagattaaaatttgacttttttttctagagtagatgggatgattaaaattaattaaatcagatcgaatggtaaaatctaaaatcaaatatacaattggatcgaatttgaatagacttaaaaacattaaatgtgattttataatactgaataatttgacataataatctataaatcataattccagacataaatctaagtatagccttttgctaaagacccaaaacaaaatatataggaaaaaaaatgagcagtagtgacataaatggaataagaatacgccaatatttttcgaccacgaaggatcgactaaataaatctaaatgaactaatttcagcaaattctctcaatggtaattaaagaagaaaaaaaaaatgagactaactacaaatctccaattatttgatatctatataccaaaatcaaattccgaatccaattttataccaaaatattatgaggctgacctccggggcggtgtgttgctcgggggaagatgatgctcaactttgcgttagctgctgatcgtgtcatcctttcgccaattatgttcatgatgataccgcttctatggcgctgcctagaggccaagctgcttcgacgaagtcattgttgtatttaacttgtttcaccaatgtaatctcgtgccatggatccagacctgttttaatgatgaaagtaataaatacctaacgaattcaaatatgacagaatacagattggatgattcaaaccgagaaataaactcaccgaaaccatcgacaagcaagctgtactggtaaacgaggtccatgcaaatgtatggcaagttagactcgtcgactcgtggatataaagcttttgcgtctttgagtttagtttgacaagctcgcttagctacgtcttcaaaatctgaaggacggaccctagcaacattgtcactgggcttgaccaaaccagcctgaatgtgttcaaatgtgtttattagacaaaactttctaaacacggttaacgaaattattggtctctactatgtgcgaaataaatagaaatacctcagcagccctgtcgaagaaaaatgaagcaacgaaaagattcctttggccatcccctcctccgccattccaaaccccaccgaatgtgcatttcatgtgtgaacacgtgtctcttattctaagagcctttccagttattgtcttgcactcatcaaggcttgagccagatgagggagctgaagccttataggattgccctccatattttaaagaccctgaaaataaatataagagaaaagtaaaacaaagaagtcctattatcttgacaaattgtaacgaaaatgaataatacaatataacaaaaccaagagattcaactgtatagttaggtccctgtgatgttccagtaattaagcccttcacttaaaaactgctgaaacagaaccatttgataaaatggcactgatgtctgtattgttttatgttttctcatgctttacaagaatcaattctgtaaatggttggttcttatcattcaaaacacttttgaaacatatggattaactattaaatgccgcatcctaaagtaaattatatatgaaatatgatttatttaacatgagatgagcaacaaaatgacattaaaaagaacacaacaactttagttagtatagaa

SEQ ID NO: 50166 - DNA, 2366 bp, Cannabis sativa
  modified_base (42)..(62): a, c, t, g, unknown or other
aaaatgcattctgaattcaaaaataacagcataaataattannnnnnnnnnnnnnnnnnnnnttccataattaaacatgattaacataattttccatatagctgtttcgagcaatcaagtttcgtttcaaagcctctaacaatgaatagaatgcaacagtcgatgcactcgcttgactagcaagtagcacgattgatgtcaatgcaaatttggtgctagtttagttcttaaaagaacaaaccattaccattctagaggaggttgacatgttggatgatagtccaacatggattacacctattgcagcttacctccaaactaaagccttgcctaaaaccaaaagcaaggaaaaaaggatgagaagaaaagttgctaggtatctaatgctagattgagttatgtacagttgaagtttctcaatgtcattcctaaggtgtgtcactaacacaaaagccgagcaattattgattgaagtaaatgaaggcttttgcgaaattcatgccatggggaaaattctatccaaaaagatactccaataagggtactttttggcaaccatgatagaggaatcaatggactatgtcaaaaaataggataattgccaaagattctcaaagatcccgagagctccaccacactagctcacattaattcattctccatagccttttgccatacggggaatagagctcattggtcaacttccaaaagggaaaggaggagtggaatatgtcgtagtcacagttgactactttaccaacttgacaaaagctaaaccctagcgacattaacttccaagaaggtcctcaacttttgtgtcaagaacatcatatgaaagttttgactgccacaaaagattatatcaaacaatgggaagtagtaagatattgacatgttcactaatttttccaatagacatgacatgatcaaaaggttctttgtcgttgctcatccttaaacaaatggacaggtagaagctgtgaacaagaccctcaaggacattttgaaagagcatctagaagaggcaacatgaaactaacctaaattgcttctagagctacactactcatatgggacaactaagaagacgaccactgggaaaactctattcactccagcttatgactataaagtaatgttactcgtagagctggtgcccccatctcataggaggacaatctatgactaagaagtaaacaacaccttgttggcataatcccttgataaaatagaagaaagaagagaccgaagattccacaataagagtgtttggacctaactatgaaagcccttactaagttgtagaaataacaagtaagggcgcctacaagcttggcatgtacaatgaggacatggagttcgttctcctactaagatattggaatggagagcacctccaaaagtaccaccagtgaccaacttgtacaaacactactcttcagtagtagtgctggtaactcattataagagataatttagaaagagttaagtctccagcactcttcagtgatggcctctacatcacatttcaggtaggggtagccgcttgagttctagaagtaaacttttaatttttacgcttttagaatcaataacaaataattaagaccaattgatgaataaaaatggtgtttttcaattaaaaaatattgtgtttaaataacttgctaacaagataacttcttaaagttattctttatttttagttgcacttgcgtacaaccggtcccctccaagaaaattcacaggcaaggtttatcaaacatggtgagttgcaagtgactaagagaccataagtctgcttgctcacttggggggcacccacattgtacaagcatcaaatgagcacagtgaatttatcccaagaaatttaatgcttagtataagcaaaaaatataaagctaagtcagtgcaggcatactttgttagacataaaaaaagtgaatttgaatacttacatgtccagaataagaagaaagccaagattaaagactgcatggtcggtcatatgttcatagtaaaaggctttaaggctgaatataagtagtgtttgaaagtaaagggccaacaggccttactgttgggatctgatgccctaaataaaacccatttttaatctaatctgatttgttatcaataaaagattcgaagtcatttatgtttacatgtagttttcatgtttatggtttaatgcgtacaaaatctggtaagtcctgaacatatagttgtcacaataatagtgatgtcaacacagtggaatgtgattgtgattatatggttcaaaagataatgtccctgattcatcagtgcgttggatttacactaatgtgataatcagcgataattatacttacaccttggataag

SEQ ID NO: 50167 - DNA, 1774 bp, Cannabis sativa
gctgctaaaccccttgagataaacaaataacaaaaatatatcaaatggcacaaaaaaagaagacacagcacagcacaaaaagttcaaacacagcacaaaagggattcaaagataacaatagactttcgatcatatccactaatcattagagttctgcaggctcaacaaggttacaaaactaataaaatgtaatataaaatcagaaatttagatctacatttttaaagacatgtagttgctcctctagtagactcccataattacaaaaaaaaaattacggcaaatattttgtttttgaaaaaaaaagcaacacagaactcttgcttctagggaacgagtcacatgggtatgaagtaatccacagtgaccagatagcgaagcgttaacataaatatgtatcgcacaaagctaaacccactatgaacacacatctaagccagtaccaaaaccattaaaggtgcaacctacgatttgcttgtcatgaaaatcgaacagataataacattctactgagtgaatcacttatacatgcttataaatccagggcatacataaaacctagtagaacacttcaccaagaaaacgaaactattatcttaaagcaaaccagacctgataagatttagatttgtgaaagaaaaaaccttatcatcaatttatgcaatcatactttgtcagaaatattcgtgcaaagattcaaatttcgcatataaaaaaaaaaaaaaaaagcaacaaacaagataaaaagttcagagagaacattatcaaaatcacaaagagagatagaacaatactacacagtgaatcaaatacaagaacgaaagagcagaaagaaagagatctatacctcggtgtgaagaagaatcggtcgctcgtcgacttggttgtgtgaagcgagatacagaagaagatgaggaatgaccgaagtttgagactttaaaggactgtggctagggtttctttctcagccattagatcattaggggtctgatccaacggttgatgctctatattgcttagtgagacatagactatactcaaaacaatatacattctaatttgtctattttttttagaaaaaaaaaataggtgatttaaaaaaatatatgaaaaatatgttaaataaaataattataattatattgttagtcaatatttatatgaatcattgtgtatccaaattatttgtattctatgtaattaagaagttataagtgaatatagctattgctaaaaaaaaaaattataatttgcagtggaagttaaaaattacatagatttttgataagttggtttgtaatttgtttgtgaaaaaattagtccccaaattatgtaaaataacagaaaaaatttataattcacaaaaaataaatttaaaaatgtaaaataataatagtaaatcaacaaaattacacttatttaattgtgaagaagatttgttgccaaaaatttaaagtttgttgttcaaaaaaaaaaattgtgaattaatttgccaaaatataaagtttgtggaccgattgtcaaaatatatagtgtaaggacaaatttatcacacaaaaaaagtttgaggatgaagttatcaaaatttatatagtttagaaatgtgcagtacaaataaacctaataataattggaccattcaaaaagtatttgtgtaaatttatttggcatattgatttattagtgagagtttttgaaaaaattataatcatttcagtgcacgattagtatgaaatttgaaaatattttctctttatttcaaaaaaaaaaaaaa

SEQ ID NO: 50168 - DNA, 1124 bp, Cannabis sativa
aaataaatattaggtatttaagtgtataaaatctgaaacattaggtatttatgccgtaatttatcctttgtttttttataatttggtagtgtaaaaagttcaaaaaactaaaatgttaattatatttaaagaaaaaaaaataatctaaattcagtaacaaaattgtttatatttatttttctttctctaaaatactcaatacataggcaaatatttttagttcttatgtcaataaaataccacaattacctgtaaatataggttagattttccgacataatacaaaatcgacactagtctagaagaatttaagatttaactgtaattggtgttcaaacttgatgttgaaactagtttttttctattttttcaataaattaattattaattattgtaactatatgtataatttgttgagaattagaatcaaaatgtaacagcgcagcaccaataaagatgaacaactacttcaacttgtaacaccatttagtttgagattccattttacaccaatttttttttctcctttttaattttattattaataacttgtttgcttatgtttcaatcaaaatcagttgcaaatttcacacaaaaaaatgatgggaaccaagcaaaatatcatttcaagatattacttcttatctaaatgttagttgagtatagattcaactataagtgacttaaccacgacattgaaaccaacatttgtttggaagctacttcggtgttaaatttttatagcaactataaaagtctttatcttttataagaatgccattataatggaatgaattttaatatagagctattttatttaaaatgaaaaaaatatcattataatttgttagagagtctcacattgctaatgtgtagaaaagtaataaaatatataagaggaatgagctactcctcccattatcaattggttttgagatagaaactcattcaccttatttcaaattctaacgtggtattagaacttttttttttttaaaaaaaaaaatgtatatcattataatttaagattaaaaaaataataattttattttttatcaattttaaatttattttatttttattcttatttccatttttttttttttttgtttactcctcgcatc

SEQ ID NO: 50169 - DNA, 1178 bp, Cannabis sativa
  modified_base (1105)..(1116): a, c, t, g, unknown or other
ccgtcaaagtttcatcttctcagacaacaaatgccgatcaaagttccatcttctctaatcacgggtatagcttgaggttccatcttctccgaccacgaccatcaaagtaggctgtgatttagtagttttggctaagaaaagaatgggttgatagggtatgcgattgtgaattaccacaaaaagacgtggtttgcaccttaaagacagtgaagaacttaggtcgaaggtttaagtgctgccatagattcatggtttgaatttttgccgcattttgttttctttttcgttgtccgatctttttgggtttgggtttggtatctttgatattaatcttcctctttcccattctaccatatgaataaatatgatttcaaaattttctctgaacttctcatcaagaaaaaatttatgttcaaatcacctctccttaaaagtaactaagaaagctcctaacataatttccctccaccctatcatctacactaaagattattggattccaagttgttaaatcattcagttgtctccaaaagttgagcagtagcttatagattttctaatttctcgtactgtaagaaattgaactttttctcaattcaatttcattaaaattcctgtgtagataagcttatagtttgtttgtgtgagctcgaggatttagattaagaattgaatttcaagcacttcctaataatctaaaaagatatatgattgaaagttatggatgtgaagatgtggagtcctttcttgagtaaggttttgttagaattttataccctaaataaaactcatttcactataatgttatttattttgaataaaaaattagaagtcatttatatttacatgtaatttttatgcttaaggtttgacatacaatttctgttaaatctaaaacatatagtcattcacaattatagtaatatcaacacagtggaaggtaatagtgattatatgcttcgaaagtttatgtcccataatttatcagtacactggatttacactaatatgatagtcaacgataaagtttacttacacattagataagtgttatgtcagttctagggtgttagtaaagtatactagtattggatgtatggagtannnnnnnnnnnngaccgatattgaacttagtaaagatattataaacttattgttttatatttctaagtcaatat

SEQ ID NO: 50170 - DNA, 1422 bp, Cannabis sativa
  modified_base (668)..(675): a, c, t, g, unknown or other
tttttaaggatttaaagcttgtgtttcatgcaattttcgagattaggttagtgtaggtgtaatttaagtttggttataatttctgaggttaattataagttatttgagctggtttggagttgatttgagtgttgttatgtttgagcaaagtttaaactttagagctcaaaattttctctctcatggtaattttggtttgttggtgttgtattcagttctattgcttgatttaggtttattgtgccataaaaggaggtttggaaaagtttaaagacgtttggagtcgatttattttgtttaggagggttttggtgtttcctgcactgaaccggtcgaccagtttagctgagcttggaggaactggtcttacggttcgtcctcacgcagaccctcacataaccaattttttggttaggaattggtctaccggttgggacatttatgggcaccctaatttttcatgttttgggatttttagagtatttccatgttattcttcgatagggaaattttttaatttttattttaagtccccaaaaagtgatttagcgcgtcactcatcaattttacaaatattgtgatttgggagcctataagtcatctagtagcttttttactcaagttcaccggtacacctaaattaagaaacgaggtaagattagtataannnnnnnnatatgtgtttacatatttagcgtacatgtttattaagcttgttagattacatcgatagcggtatcaatatacgtagagttgtattggatacagatagatgtatgcttggctcaaatactaatcgatactatcacatcagtacgactagaatatgactagagtaccaagtataaactaatattatggtcgatagtattatcgtatgaacgttctagactcaatactgcctagggtgtggggatatgattacagttgggtgtataggcgcctaattataattcgggttatatttatgattatgattatgattatgattttcttactaaatttatcgactcacagatattgtttgcatgtataggtaatggcaaagctaaagctgagcagtcatgagagcgagcggataaaaattgtacatgtcaagacggttaggcctagagcgtacgatattgggaacaacaggttgtattttgtatagttgctaggcgacaacttttgtatagaatattttaaactcgggatcctgattatataaaagttatttatttttactattgatagtattttagcaaaattttaattactcacaatttttaataaactcgttgattagaaccgaacactactacaaattaggcttttagtgacactatatagtgatacgcataaaagtgggtgtcactaaaaagttaagagtggtttttagtgacacacactaaatgactctaaatatttagtgtttatcac

SEQ ID NO: 50171 - DNA, 1492 bp, Cannabis sativa
aggcccggttattagaatatcatctacatatacaaggagaataatttgagtggaacccgagccatatatgaacaatgatgtgtcagcctttgaagctttaaaaccccaaccgaataaggtgtttttgagtttgtcattccaagcccttggtgcctgcttcaatccatatatagccttgttcaatttacatacatgattaggatagagaggatcttcaaagcccttaggttgaatcatataaactgtctcactcaagtctccataaagaaaggcattggagacatcaagctgccttacttcccactgatatgttactgctagagtaagaattaatctaacagtaactggttttaccacagggctaaaagtctctgcaaaatcgatccctggctgttgtaaatatccacgtgcaacaagtcgagatttgcatttgtctaaggttccatcagcatttaatttcactctataaacccatttgttatcaattaaaatcatatgagactcatagggcacaagagtccaagtaccttgagctttgagagctttgatttcagttgacatggaaccattccaaactggatcacgaagggcagatttgagagatttaggctctctaggcagtttgtattctggcagcctatgtttagttgcaagataggcttttggcttataaatgcctctcatagaccgagtgatcatggagtgagtacgagggagattactagcaggcgatgcagaaaatgtattgtcactattagttactggtgcaggcaaggtagagaccgatgtggaagaagagacagattgaaggtcatgagtattagagtgagcaggcaagatagcagtatctacattagcagcaggcacacaaattgcagcagtgtctatagtttcacgagtaccagtatctatattagcagtatgttcagttgcagtggctatattagcatgattcccagactgttcaatagcagtatccacactaggcattgcaataggctcagggacaggattagtagcaatattatgagctccagtaacaaattgcatagtagaatataatggggcctcagaagttaccttggatgaaggggcagaagtcttgaaggcaggaaaagaaagctcatcaaagacaacatttctagcaataaaaattcttccagcagcattttcacacaaataacctttgtgttttggagagtatcctagaaaaatacactcttcagacctatactcaagtttgtgatgatgatatggtctcaaatgtggatagcaagcacaaccaaatggtttgaaaacactataatcaggttgctcattgaatagacattcatagggactaagattgtcaagaactggggtaggcattcgattaatggaatgagtggcacactgaaatgcataccaccaataagaaagatcaagattagcttgagctagaagagttaaaccagtttcagtaatgtgtctatgctttctttcaaccctacca

SEQ ID NO: 50172 - DNA, 1075 bp, Cannabis sativa
ctttaactccaaagtttgattccacagccttttcaccaattttaatgcttttgattcctcttgtgcctctgatttgccaaataatttggaacatatagtacctgataagacatatgaaattaaccatatactgtttccattttataaaaattattttcatttcgaagttatgctgtttttattttaatattatgtcatttcttctaattttttaaataaataaaatgtcaattataaaagtataaataaaaaagtttctaaaattaattattatatatattttaaattttgttttctaacatcgtaaattatttagattaaaattgatcataacacttaattaacactacaaaaagtaactgtatttagtgataattttttagtgataatatatataatttttttagaattaaatgtgattaatattttggaactaattaatataactaaaagtaagatattaaaattataaagttgaaatataaaataataaaaagcttaattattatataataatgatttagtatattacttttaggagatgagaacaagtaagggggcttccgagacaagaaatgcaaaggtgttagtctttgttctctgtctacactgttcaccacacgatttgcaaattcatcatcattttctaccatcgttagtgctaaatctgaaaaaaaaatatatatataaatataaaaaaaattcaactttttcaattgtattatctaaaacaaattaatttataagaattttatggacataacgtacgtaccatacaaatcgttgtagatgcaattgtaaaaaattttcattttgtcttgactttgatcatgagcaaaataagttgtaatttcaggttgcttatacaaatatgatgctacctctccatgaccaaatgaaacagcaatggcaaatgggctgatgatcaaagtttctctaaaaaagacaactttctaaaagagaattgattctcgtttaagaagtttccaaacaaaggaaagttcagctgaaaagtgtaactttcctaacaaggaaaagagcaactagaaccgaataaacaaggtaagaattcggt

SEQ ID NO: 50173 - DNA, 1085 bp, Cannabis sativa
ttattaaaaaaaagtcaaaacttaaattataatgactgacaataaatgagtattgttcaataattgctagaacgttatttatttagtttgacaataaataagtaaattttaattgagaactttagtattacatgtaatttttttaaaaaattcaaataatttatagtattaaaaataaaatttaagtattttcttacatacataattttttatttttttattattttttttatgaatagtaaataattgtttaaatttcattttcaaagtagaaaccttattctatataaatccaacctccttgtagattcttcacaaataaatgctactatttaagatctttattttcactttcatacttttattgggccgatgcgtcaagttaccaggaaccgcaagacataggcgtgatagggataatgctttgtttgctttaatatatgactaaaaaataagctctaattattcaaaatttactaaaaattcatgtgattttaaatatttacaatgcacgtgattttaaaaaaaattaaattaaaaaattttgtgaaatgcttaaacagataaaaatctaccgaaacaaacaatgttataaaaaatttacttctagtatttccaatctttattaagaattctaattcatttactataacgattcattttgaaattctaattttttaaagaaagtgacgaagaaaataagttgaagagataaaatgtgtttgtacataaatattggagaaggaagaaacatccaattaaaatgtgtatttgcacgtggttatatatgagcacactaggccaccaaaaccaaattaatgaagttcagccccatctagtcttggacaataatttctttacaaaactgaattattattattattattatttttttttttgaacaaaagaaggttttattcaaaagaactaacaaaaatacaatcaccaaacaccaatttcaaggctggccaaaacctgcaaagctagctataactttacataaatgtgcatcaaacttgtttttgctagtacctacaaagctcatacgtatttgacaactttcttagggttcgtttggaacgccg

SEQ ID NO: 50174 - DNA, 1040 bp, Cannabis sativa
  modified_base (754)..(762): a, c, t, g, unknown or other
cggatcttaaccggtgctcgttgaaactactgggttccatctaaaagcctattagtgattagtggataaatacatgccttattttctctttatgaatggtatggaaagaggctctttcttagctccaatgagcattttcttttttcgatataatcagatctcaggcagcttattaaaggcccatgataccatattaagagtaagaatgatgaattccataaaaacaattagtgatgagtggagtaaccaataatcttagggttaatatcctaacatcacctcttcgaggtgggacactctaataacaataattactgaaaaacctaacttcaagactttagcatatcgacaaaaatttgaaattccttagtcaagaaaatgagaatttgggtaaaactcacaaattcaaagctacccacaaaaaaatgcataatataaacacagagaattacaaacttaacaccactgaactgcattttcacgaaaaatcgaaactaaagaatagtaaagaacatgcattggactaaatttggtacccaaacaaaacatttaaaggccgaagctaagctttctatgatctctgttgttttctacgcaaccaaacagaaatgaagagggtaattatgaaagagaatcatcacctggttgttaggttgaaacatggctgagttgactcagagtgtgcctcccccctcctctgcgatgaaatttcactcccacctgtcaccaaacgtatatatatatatatacatannnnnnnnntatatatatagagagagagaatcagagaatcagagaatcttcatcatgttcttgtaaaataacgaagtatacctataaatgttttttttaaacgatttgtgactattttattattcttgaaaatgaccaattcttaaaaaaaaataataaaattggtaaatgtatacatataacaaaaatagattatttataaatacacaaaaataataaaaaaaatactaaaatatttttataattttatgattttatttacaaaagtatagttttttttttttttt

SEQ ID NO: 50175 - DNA, 1022 bp, Cannabis sativa
  modified_base (573)..(575): a, c, t, g, unknown or other
cactaaaaataacagttttttataaaatatatatatatatattcatattatatatgtacccaatggatataattatttattctattataaaaaattatccatatagattttagtattgtttattaaatttatatcatcaataaacgacaaatatacaatataattaagtaaatttcaatggaataagaatatatataataatattatataaatataattaactaagtctttaaatttaccaaattttcttcttgctaggagattaatttggacacatgtatatcataaaaaatatatttttaataattacttacgtattaaattacttatataaaaaaatcagattattattcttttttttttttctttttgaataaattattcatctttattaaatgtataatttcatggtatttaattttgttaaatatatatatatatatatatatatgcaaattttattatatattttttgtggagctaataagtcaaagtaagtccataatatcttcaacaactaaattatcatgatgatttatttttttttgtatatatagatataaatatatatannnatatttatataatattttttttttgacatgaatatatatttatatatttatataatattaattggctttgaacttactttgatattcatttatcacatgtgtgtgcttaacaaaaatcaataagcaatacaattaagcccactagctatatatataaacatatatatatatatatatttctcacgtcaatatatatttatatattaatttccatatttgtgaatatgatttgttactataatacaatttaatccttttaaaaaatagaataactaggttaaatttaaagtaacacaaattaaattaaatcaaactatataaaacacaatataattaaaattaataacaaaaatatatcaaattaaaactcaatatatacattctcaatttcttttttttttctcattgattcattaattttttttttttttttttcttataaaaaat

SEQ ID NO: 50176 - DNA, 3150 bp, Cannabis sativa
ggactgccccatcgggtcggggccccgatccgatccgcgaaaaaaccccaatttgccattcctagaaccaatgtttagggatgttcattttatgccaaatcttaggagcatagtcaattttccttggagaggtaagagagatttaaaaaaccttagctttaaaattcccattcctaccacctctcatcaaagcatctttgtcaattgaatctcttaaacagggccttctcaggatgttgagagacttgggcgaaatttaaaacggaacctattttttaaaaaaaaaataaaataaatattatttaaaaataatttttctcgtcacataagttaacttaaagtaatacttgattataatagcatcattattgaagtactacatattttagcacttttgtaaaagaaaaaaaattgtcaattttttctaactatgttatcaattgtataaatttaaaaagacacataataataaataaatatatttttttatttaagttataatattgttattatttatcataaggttgtcagtaactttttaaattataatttcttgatagtttttttttttaaatatttaatttatttattattatcgtgataatttttttaacagcttcacctaaaaatgctactatacattatatatatattagagtaatttttttaaaaaaatatactaaatataatatttgcttcatatctaatgtatatacaatataatatttttttaagtaattcatttttatttttattttttttgaaaaaaaaaaatccaacacctctctatagagcaaaaaaataaaacatataaatattatattatatttttttagataaaagatattttaaaatattatatcaaatgaattctaataacctttagaaatttaaatcaatcactaattatatacataattatatatatgattatttattaaaatatataattatgtaaaggagttttaaaaaaaaaaaaaaaactaaaagcgtcgtttgtaagatttaaacccaagacctcacatatatatataaatatatatacattctaagcttcaactaacaacttgtgttacaatattttcatgcaatatatcaaacaaaattttatatattatattttgtcccacatatataatataaaactatttttctgaggcctccaaaattgtggggtctggggcctcggtcccggttgcaccaccctatggtcggccctgttcttaacctcaaaattttcttgaaataccagttgttatcatgttaaagagggatagaccaaaaatctcaaccccttaagtagatggaattattcatctaacccaaaagttatcttgtttactcgcaatgacccaaatatacttggccatcaaagctatattctactttttctcctctcggaatctaatgccactgtattttttaggaagaatttttttttccaagtaggtaaatagaatttactatgatttccattcacccccaaaaaaaaatctctacaacttttatcgatgcttgttgtcactttttgaagtaaaatgaataagcccatccaatagttcctaatccccaagagaatcgaatgcatgagttgcgcacatcctgtaaaagataagtttctgatggccaagttgttgagatttttatgaatcttgttaaggatgataccaaaatccaaagctttccacttggttggtataagattaactcccaagtatttaagcagaaaagctccttcctcaatctaaactaagctcaagatagcccttttgcaactatcattgacacccccagatttgattgaagactttgccatgttagctttcaaaccagaggaatcataaaaaggattaaaagcttcatgaatatacctcacatgcttttcattacctttgaaaaagatgattaagtcatcaacaaaacaaaggttgataaggttgaggtgtttacaaagtgggtgaaaaccaaagccatccttgcaagcatagtggcccaagattctggtcaaataatccatgataagaacaaagagaagagaggaaataggatcaccttgaagcaaccctttttctcccttgaaagagccttgcagttgcccattcatcaccaagttgtaggaggtaccttgtaaacaaaccaagatccatttaataaattttgtaggaaaaaaaggcccttcaataagtcagctacaaacagccatataactgtgtaataagccttgcttaggtctatcttcatgatgcatctagccgagacattcttccttatatatcttttaagaaggtcttggaaattaagaatgttgtgagccaattgtttattctttataagagcaccttgattgtcgtgaattaattttggaaaaatctttgaaaatctagagcgtagcatcttaaaaatgcatttatagagcgtattgctacaagaaataggtcaataataattagcatctctagggctgtcatttttgggaattagcaagataactgttttatttagctcattcagcattatttcttcttgaaaaaataccaatatagcttgagaaatgtcctccccaatctcattccaaagacccttaaaaaatcctgaaccaaaataatctagactaggacatttagaggtatgaatattaaacatagccttcttgacatctgcataattgaatggtctgattaagcaaacttattgctgagtatcaagtttaggaccatgaacaaggaaaagcatgatctaatctgctagatgcagagcttcttttccccataaaattgctaaaatggctaaggaagtgttcgacaaccaactggtaatcatctacaacttcatcattcttgtaaaatgtgaggatacaattctcagttcttctctttttcaaaaaagtttgaaaatagctcgtattctcatcttcaaaattcaaccaagttatcttagaattttgatgcatatagctaacataattcttttttgcaataagataggcctggtaaagatttacttcaacaagctgaagaataagattcttcgggtcaacagccaaaaaccccttagcagaattaagagcttatcgttgcttccttaaaaatattgatgatatcacccttattttctttctggaacactttcaacacatgtttaattctcaat

SEQ ID NO: 50177 - DNA, 983 bp, Cannabis sativa
  modified_base (47)..(62): a, c, t, g, unknown or other
accttttatgtgtttattttcatcattttagaaattcatatttaggnnnnnnnnnnnnnnnntgttagtaaatctaggtcctggtaaacgatattccaacaacatgttccaactagctggagaagttgcaaattttattatacaaaaatcaaatgaagcaactaaaagaaaaatggatgaagatatggagatcaccacaagttacatggtccttgagatcgaagaaggacaaatatacagtgacaagaacattctcaaaactacaatcagttgttatgtgatggtaaataactttcaaatcataagtaagatatcagaaccaagggagtacaaggttacttgtgtggataaaaattgtaattggtttctgcgtgcttcaaaattaaaataaatacaaacttttaaggttagaaaatatgtcaacaaccacacccgctcattggatgttataacagaaggtcataggcaagcaagttactgttagttttatggtactaaatcatgtatgcattaaaagagttttatattatttgattatcattgcaccatagcccattggatctccagatgtgtgtacattaaattcaaaacataaaataataagttactgcttgatgactattagggtatcctcgaaacttcttgtatattgtatcatttaatctagatgataaggatgatgcaattgaactcccaccaatgtcttccaaatcgatccaccacacacaaggaatagtgtgagctattaggataaggtgcataatgttgttcttgtttgtttctcaacacatgagcaagaataattgagagaaaaaaatgtttcctttttctccagtatattttaaaaatgatgttatgaaaaagcatcttctgatttccaattcagacttctatttataatagttaaatctcattaattaaattatatttaattattaaaataaataaatatcgataatagaatttagttactaatatttatg

SEQ ID NO: 50178 - DNA, 1735 bp, Cannabis sativa
agaaataactattccaagtccaagtaccaaaagctattacgataccagaatcatcacgaaacacctccccaaccctgcatttacccaactcaaaacttaaaccaacatcacacttgattttcatcacctcggaaggtggtttgatccatctgacaatcgactgattctcaggaagaataccaagatgagtgttacaactattggctaaagagaactgctttaggaaatccatactctaattaaatagaaggtcatcatgtacacaaactttttcatttacccatttattttgccaataccaaattctccaaagacacacaatggatttttcaaacatggtaatagacatagtatcatgataaaaataaaagaactcatatatgtcccaactatggaaaataagtacctaaagatggagggtaatgacctcacagatggaagagagcttatcatagccccaaagagcatgcaaggaagtctcaggactcataaaacaaaaggagcaggagttaacagcaggaacactatagctttggtcaaagtactttggaagaacagtaaggtgaaataagccacctaggagctaaagtccggtatgagggctcaatatccagagttattcaggttagatttcgaggacgaaatccttttaacggggagtaattgtaatgatcgcatgttagattatggattagtaaaggcaactagcattaattatggacattttataattatataagatttaatatttgttgtaggctctagttttagaaataggaattagagttataatttctcaatttcagaaattttataaactctaacggtattatttgtgctaaatatgaattatgcaatttttacgatttttttgctcgatgacaatgaaaaatatgatagatggccgttagagtccatgggtaagtttagaacatatttcttagcagaacaaacatttgagacatttagaatgttgggtttaagcggtgttatagttttggaccattttactcctaagcttataattacttaagttggaagaaagaagggcattttgggaattttatttgtttgtttagatggctagtcttggtgttgacagctggccacttagtagtttttcagcctaaattgagattatcggattaattagttagaaaaataataataaaaaaaaccattagaaactccatttctctctctccctttgctcggctcccacacaaactagaagaaaacccaaccaaactttcaaattttatggaattcagcaagattttagaaagatttaaagttgttcaagccaaaagtaaatcctagaactttagcttttttgttgtttaagctttaaagtgggtttcaccatgcaattctgaaaagtattggctgtttaggttaggttttactttagtgtgatttctgtagttattttaagttggaattgattgtttgttgttggttttgttggtttgtgagagaaatgagcaagtttgagtttgagaactcgaactcgactcattaatgttagatttggtttctgtgattaattgctgatgttactgcttgaattttgttattggaagttagtgcaggtattctagaaggtttggtaaagtttgggtacgaattgtgcaagttttgaacttttagggtttttttagtgtaaactagttaaccggttctatagcacttgtagaaccgattaaccagatcagaggcaggatccccaaaaaat

SEQ ID NO: 50179 - DNA, 4757 bp, Cannabis sativa
agtaagttgtattgtcattagcctcatgaatccccaagtcaccacatatagcatctctaatacccacctcagtattacgactaaagaagatagaggacttatcataatttattttctgtcctgaggctctttcaaatgtgttcaataagtgcaagacattatatgactcctcttcattagctttacagaagatataactatcatctgcaaagaaaatgtgggaaacaattagtgcaccatgagccaccttaatgctacgaatgagatttctctgctcataatgtctaataagagcagaaaggccttctgtacagattataaacaagtaagaggataacggatcgccttggcgtagaccacgacctggaatgatgttcccaaactctttaccagcatgactgacttggtattttgctgtagaaacacataccatgaacaacttaaccatatgatcatcaaatcccatccgttgaagtatagcttgtaaataaccccactcaactctatcataagccttactcatatcgagcttcatagccatgactccattcttacctgcactctttcgcttcatgtagtgcataatctcaaaggagaccataatgttatccgttatcaaacggccaggaataaaagcactttggttctccgatatgacacaatgcagtacctttttcaacctattagccaacacgtttgagacaattttgtatagcacattacacaacgatataggccgaagatcaagcatggattttgggttcttcttctttggcacaagaacaatatttgtatcggggaggcttgcttcgaatacacttgtagcgaaaaaatcagtcaccaacttcacaatatcctgacctacaatgccccagaatttttggtaaaaaccaggattcattccatctggccccggagatttgtctgggtgcatttggaagagtgcatctttcacctccttatcatcaattggtgcgagcatttgttcattctgcaactaagatatagttcttggaatacaactaacaacatcatcccattgtgtgatagatggtgtaaaaagattttgaaagtatgaaaccataacctcttgaaccccactttcccaataaattacctggccgaattcgttctgaatagtacggatatggttgttgcaccgtctggtttttgccacagcgtagtaatatttggaattttgatctgcttcttttaaccatagttgtttcgaacgttgatgccaaaaaacctccttctgagtaagagtttcaaacaggtgcttcttttcttcttgatacatttgattggaacattcatcactttttcctttgaggctttttaactttttttttacgggcagcaatacgttgttgaaagttgtcggtgatgtccttaccccattcggccaaaactttagaacaatgagagattttcgaagttaaaggttgatcattagttaaggaccaagcatcttgcacaagcgtacgacacatgggttcacgaagccatgcattttcaaacttgaatttcctttatgtagcaacaacaggacgcattatcaggtcaagaaacagcggacaatagtcggatgtggaaatctcgtagttcacaagtttagtatcttgaaaattatccatccaagtgggagagactaaggctctatctagctgaatttcaatacaattggcagtccccttaccactctcccatgtaaacgggtacccctccatgtccatatcaatcaaattatagcttgacaaaacattctgaaaaccttgtagcagccagtttggataaggacgaaccccctttttaatctgattgactgagaacattgttcatatcaccaataagacaccaaggtaaggaagattgattagagagatcatttatcaattgccaagtcaagtgccttttagtgcgatcgggttcaccatataaaccagtgagacgaaagtcgggccagccttggacttttatgaccatatcaatatggttttgatcataagattaaagaagagcctcttcctgaaatctccaaagaaaagcgataccaccactatgacgttgagcttccacagtgatcattccctcaaaagctatgacatgtttaatacgttccactttttcttttttgcataacgttccacaaagaaaaataaagttgggtctcttttggataacaatatccttaaggaattgaacagtccatggggtcccaagcccaaggcattccagctcaaaatactcataatccttggcgggcccgtgcgtcgagacccgccccactcaagttttttgggctactgatattatcttgttccatactgacttgatcattttcctcatctgattctgggcccagttcagtattaaagcccaaaccattactctgatccacttcttctagtgtcccacgcttcttattctccaccaagatggtccctttttttattgatgcaaccttatttaccatatcagtaattactataccagttatgggatttgattgagcaaaaggtgggtcaacgaaatcagaacttaaaatacctttggcacgatttgtggagaaagcattaacaccctggaaattggttgggattgatgcgccttcaatgccacgaactccaccatgattctctcttccaccagtcctccttgccgtgtctccgggaacaccatttctcagccactgttcaccgattagtttagtcgatctccgaaaaggagccttcatccattctccataaggctttgtgatctcatgctccagtgtctcaaacagttttggacaaaattgttctgaatgacctaatataccacagataaaacaaaaggtgggtatattttcatacttaaaagtgatccatatccagtcatctccagttttatgaatccgcatacgccttttcaaaggcttagagaggtcgatggtgactctaattctcatgtaatcatgccatacacccaaaaagttcttgggacaagattccacaaacacacccacataattaccagcaacctttaacacagttgaagtcataaaaccagtttttaaatcatgtagttgaacccatacgtctaaagtatttagagttaggcaccgtggattcaactcttctttcatgcgagagatgatcaaagccttcatattgaaataacagggactaccagtcacaacacgtttgatatcgatttcatggtaaaattgaaataggaaacgattaacatcaagctccttaatgtaaactcccttacccggtttccataatgccgccagagtttgctgcatagaggggaaatcgatcgcaccagttgagatgaatcggcccaccaaacacagtctccaatcatacacaaactcctcctctcccccttcaccaagatcctgtaacacaagtccttcctctaactcttcttcaataactagttcctccataatatgagatgcattactcgatgaagccatcagaagcaaaagacaaaaatacactttttagaaaataccaaagaaatagagagaaaacaaacaaaccatgatagatgtcaagactatattgagacctaatacttaattatactaatagcgatataataccgaaaaatatgctagacactaataatacgttttagcatttttatttaattaatgttattgtaacatacattaaaaatattctaaaaatttatttttaaaataaattagcaaattatatacatatatttaaaatttaaagtaataagtatcctacaaatatatataagtttaataatatattatgcacaataaaaaaaatttaagtctaggcaatatatgaattaatataatataattataccaaaaattcagtaacataatataactgaatatttcccaaaaaacttaaacctacaaataacaacgagaaaaaaatcaagaacagtaccaaaaaaaaaatcacagtattacttaagaatacataatttatattatcattacatattataaaaattattaaaaaaataatcttaaaaatacacataacaattagtagacataaaaattaattacatagatatattatacatacaataaacacattacttaatcctacactaaataataagttttcatcaataaaatctctttaacaaatattttggaattaaaattaataatttttattccacatataactagcatctaattatatatgaaagaaaatttatgctatgttagtattataatattaggctttagcttaaaaaaatttcaataagaaaaaaagtaagttgtcaaagccttcaagtagcgtctgtcattgcaaaatggaaaaaaaaatatattttggcaccctatgacttcggttacaccttatggctttggttatttttccataaggtacatcaattccttttggctttggttatttttaaataactgaagcctaaagtattccaaacttctaaatgtgtttcgaccgataataaaatcctaaagaaatcccaagtaaaccctaatatactcaacaacctctctcattatcatacctcactccctctatctcttttacttggtaaaaaacaatctctctccttctctttctctttctctttcttttttctgtctcagtgagatctcgcccactgccgaccctaggttaaggtatttttttcttttctttcttctctctctttctctttttttttgtctcacccacagtcggacaagccacgactgggcctagaagctaatttttctccttcttcttcttctt

SEQ ID NO: 50180 - DNA, 1318 bp, Cannabis sativa
ttttttttttttttgaaaaacagcgcattcatacattaattaaaacacagattttaaacttcccggtcattacaaaacaggttctccgaaaaagagaaaaatggaaacagccgtacatctggtggataagcgtccacttaactacattatggacaacatagttacaaataggaaagaagttctattctactacactgctccttcaagtgtagtagaaattatactagttatatttttggtgtgtgtagagtagagtagataggtgatggcctaacattttattattgaatatatatagtaaagtgaaaatggtacttaatcaatggtgggagttgggtataggaagcatgagtatgaaattaagagcctagaacatggacaagtgtatataattaaaacatggaatttctcaacaatttcacttttttttatatatattttatattaagaaatgggttatagctagttttagaacacgagggcgtgagaaccaactctcacctagtggcttcatcttgagaacagtgtgtttctgttttaccaatattagtcggttcaaccctttcacttattattattattattattaattaataattgcccttatttaattaatatactaccagaaaaaggtattataatcccatatttatataatctaaccgacaaaacttaaaaaaaactctttagttaccagcatagaaatttttgtgactattatcacttttagtggccacaaaaaagtacttgtaactacaaaattatatttaattactataatatagttttagtgaacttattatatacttttagtgatacagtacacaactgttcacatcaacttattattttagttgttggtgataccatatatttcttttttaatcatataaaatatatcattttcaaaaaaaaaaaaaaaaaaaatcatataaaatatatatatacatattcattattctacgttatttcaacttattagaaaaaattacacactgcttaatttcatgagagaaacactatattttaaccaaattataaatacaaaaatgaaaatctttaaatttcaatatgtgatgtaaaaacttcaaatatatatggaaaattttcataaatcgattacaaacaagtaacacgcaataactcaaatcgattacaattaaaaaaacaaagaggaaatcagttcctaaaacactaaaatataaattaaaaataaaatgagttccacaacaaaattccttataacacataatacctcataaaatcgattataattttttttaaaaaaaaaatagggatcaatttcaaaaaatattga

SEQ ID NO: 50181 - DNA, 1260 bp, Cannabis sativa
tatacctgcttgtttaggaagagccctccaatttgcatgaccgaattgttggatataagaaatgagtatgtgatcttcttcaggggtccatggtccttttctcagtcccatattctcacaacatgctctcctactacccatctctctttctcacttttaatttattatcgtatgagctttataaatatacatatatataaattaattaattaataatgagaaagaagaagaggaagagtcaagtatatatgtgcatgcaccaaaccaaataagggaaaagctataattaagagggcgtcttttcgtttctcaagaagatagatatacatttactagttgtaactatatatggggccgttggtccaacaaaacaacgcatggtgttcaaaagctagaccaatatattttttattgcatatgtttcacactatatgtatatactaagagcttgctacgagacattactggtacctaacaattttaaatatatcactttgtgattgactagtgatattctttaaaaattattatattaaattatataggaatctatacttaattaaatcaatatagcgataatgacatataggaaagtactagacaccactagtaccttttagcgtttctctatttaggacattagtatgggtcactaagtttcttaggacgtttataacataatgttttctaattggctagtaatttttttatgatttttattaaattaaaataagcggaactcgatattaaattgtacttatagtgatattacattttataaaagtgtaggcatggtgtcttttagaaaaaaagttaaaaaatactactagtgtctaatatcttcctcagtattataccgctattagtataattaagtatcatatctatacaatttaaaacaataaattttaaaaaatatccatagccagttataaggcaccaaagtgcttgatggtgaccaataaaaatgcactttctcatatatttatcattttttctcatgtcacatgtttacaaatgtgggaaaaattgtcgtcgttgatcaccgaagtgattggtcattggagaattcttcaagaatgtgctttgtttaaaagcatgtgacgtatccttttgtcatctactaaactttttcttagtaattgcttacattccaagtagaaaactttataaaagagaaatactaatggtttggttcggagtaccttattagtacaattaataatcatctcaacgattttaatttaataattattataa

SEQ ID NO: 50182 - DNA, 1159 bp, Cannabis sativa
ataatcaaactgggaatattaaaatacggaatttcagataataaattatttgttctcttcctctctcttttttatttatcatcagtgtgacccatttgactataattttttgggctttgttgatttttttttactctattagctgttaatggttttttattgtcttattgctttcgatgtttatgctactttttctttttatattattgttatttttatgaattatatttgatgtaacgcttagatgtatttgtcttattatgaacagaaaaaagtacctattgaatgtgtttatattgtaagttttattatgttttgttggcttctcaattttttatatgttgtttttccattattttgtagtaattgtggtgtttttataatatcattgagatttttagagggctgtggcctgtgggtgggtgaggagggttcgtgcttgggattctttgacaactgtgggtggagaggccttttaaaggtgggatatttttaaaatattatttcactataaaaaatattataagaagttaatagtaatttattaatagttttatagagtttataagtatgtaattatttagagattaataatgaaaaatagaatttttggtttattttgagagatttgttagagaattattccctaatgacaaacatcccaaaaaaaaaaaaattaatttctcaaactatattcattgatctttaaaaaattacatatttgtatactttatgaaactatttttttttttttttgaaaagtaaagcgtaatatgtagattaaaaatattagatcttgtggtcattataaaataagtttgatggtaagtctgcaacattacaacaaccatatatattgtgggtaaacgcccatttggctatgttatgagccataaaattataagaacgactaatatttgaaaagttacaaccaacaaacgaagaagaagtgcatcgatagtgacactgtaattttcaatctcccagttgtactcaatcccaataagagcgttgatcaccgccctagagtcactttcaaccattacaaaattaaaccccttctcagccgccaaatccaaagccaagcaacagacagcaacttctccacaaaaagaatttcaaaagtcaagccttaacgtagtcacccaacagaccgcac

SEQ ID NO: 50183 - DNA, 712 bp, Cannabis sativa
ttatattatgtgctgaagctgatataccccattcttttttctcatttgtatttatttgtatatttcttatctctttttctttgaatatattttattatactatttattatattcattcaataaagaagtaagatcaatctattatatcttggtagaattttagttttatggattaagaactcatcgaaataaatatttcttttagacaacttgcaatctctctttctgtaggaaataaatgaaatgaaaatgagttccaatgtattacaatctcgttctttactattattattattatttgttacgctgcagcataagtaatcctacacaaatttactaatttgcgcggtttattatgcaggcgtcggcgttggatttatttctgctttgatatccttttttgttgttgaatttggttaatttgacttttatttggcttaacatattattcttaataagttttttctttcaaaaggtattgtgagaccttaattatcagaacctttttaagtatgcaggattggacatcgaaaagtgagtattaagatgacaagttctgttaacttgcgaataatctgaaattctttacagccctaacattttccttcttttttcccccatctgttcagtctgcagaacttggagtgttgtctttttgttctttttccatatttctcgtaagtgatctttgtaatcattttgttaatgtata

SEQ ID NO: 50184 - DNA, 1518 bp, Cannabis sativa
cgatcttattttattattttattaaatataaataaaaagtcacacccatgaatttctcataaaccaaaaatttagttatataggcacactttatatagaatagaaatatatattaaaatagagtgtcaaagccacaccattgtataatgtatcacacacctcaaccaataaaattgtaaatattattgttacaaatacacttaattttacttaaataaaaacacatttcattttttatgttaaacccccataaaataatggactctaaacatgagcatagctagctagcttatgcttaaagtttcgtaatgctaaacactaataccatatataataaaaatacaaagctttaaaacaatgaattaatctcaaagaaaccattagaagtaattgaaaccagagttaattaaactagacaagaggctgtgatgaatgattaatcaaaaaccaaagttaaaccagacactgaaactacaatgaaatcatcctaagcctaaggctaagctagtcattaagctacatggaaactacaatgaatgattaatcaaagaccaaagtaatcgaaatgatctctcaaatatttcaactttctctcggattgagcaaatgatgatcggtgatcgaacttgtgtaaattaagctacatgtagttgatgaacaattttaattagttagtaaattattcactcaaaatcaatataagaaaataattagttaagattgaacatataaaaaaatacaaacaaaggggagaaactctatttcaatttccaataatggatccattacatttctattcattgttatatatgtaacccacaaatatttatggcatcataatagaaataaaataaaataaaataatcaacatgacaaacaaaatataacaatctagaatattataaatcaattattatcacaatcaaagtttccacaagagcatggtatatgacagtatacatttttaaaaaaaaaataaaaaaaatcccatgaaggtataaatagaatcaaattaagggtgttgggctcttcatgcatatcattttatttgaaatatattgattaaaaaatgtgaaatcatagaaatgagatcaaaaaatttgatttttttttgtacatttcttaccttttttttcttgtgtgtacgtacttgattagatccaaaatcagcacaagtccacatgaatactcatggtcatatacttaattaaagaataataaaaaaaattaattcagttaagaaaatataattattaatttacactaaacaattcaataattacacaaacgacaagtaatttaatcaaaatatataaaaaaaaccaacaaaccatgcaaactacgtaactgctgacgtacgtacttttcaattattacatcactacatactccacatccacatgcatatgcgtcgttataagaaattaaataatgataataaaaacaatttatttttgctttattaagcggtcagcaaataaagtcgctcatgagtttgcacgagcgtctctattttat

SEQ ID NO: 50185 - DNA, 2155 bp, Cannabis sativa
ttctaaactgttgggaaaaacctccgcttactttttccaacagtttttataattgaccatctttttaattgttgggaaaagccaattttgtagtagtggcttcactatttgtttgagcctgaaactgttgcaatgattttgaaaaggggggagccttcttgtagggggagtaattcttggatatggactaaggaaaagactgggaaattctctagtaaatctacttacttgacccaagcccttaagcaggctcctcactgtgtggtctcaccttccctctagaataaactttggaaccgtaaaactcttgagtgtcacaagattctgtggtggagcatcatttctaacgcgctacctatcaggccaattctgaacgaaagatgttgtattgaaactccactttgccctatttgttaaattaagactgaaactatggagcacttgttcctccaatgcaacttggcttatcacttatggaggtttaccccttgaggcatctttcctaatattgtgattatggtattcgtatatgggactgggtaaagttcatttggaaccttaaggataggggcattaatgttaatgaggtgtttctgtatggcttcatattgtggtggatactatctggtgggctaaaaatgataaggttcacaatggtaatttgggtaacatcaaacactttattaactctatatcttttgttgttacacagattatagagctattgccattatcccactctcacttcgactcagacagatgtttggcaccccctccgctggactaaatcaaattgaactgatgctagagtggggttagagtttatgtgtattattgttgatgctagagatcatcaggggacgttttgttgggcggcgactgctagacttgatttttcagaccctctttgtggcgaggctgctgcttgttgtttggcttttgggatggcggcagagaagagatgcaattttgttatatattgagagtcaccctcaggtggtgattaactctcttaagggagtggagtctagatgggaaatcgagaattactctcggcaatatttaacttcttctttattgcgggttgttttttctctaatgtattcttgtaatgtttgtgttcttaatgtggcaaagtgagcttttatccacaatcattatagttgtctggatgttgatgacattccttcgaacttaatttctaataactttacggtctaactatttcgtttgtcatatatagcacattttctttaaaaaaaaagttatataatgtttagtgatgaaatttgttaactaaagagatattataagtctaacactagataaatattttctgcagggcgaacttaatactacatctgatatatttgattttaataattattagaaaaataaataatagtcatgatatgttagacaacaataatgcttttccttataaagtctggccgatcggttggtgttacattgtactatatacatgaatttcaaagcatcagcctggctctacacaacaagtttaaaatgtatattatatatatatatatatatatatgagatagtatatgataaaaaataggcttctttgagtacttatcttaaaatttctaagtaaagcagagattcataagaagatagctaaaaatgatcaacatataaaattacaattacacatattgaacaatagattttagaaacaccaattaagatgaaaagagactagtcaagttttctttgtatagataaatggtcagagtttcgaagggctgaccagtccaatatttgacggtcttcaatgaaatttaggaatgaccataccgaaaacatgttgtatatatttatatctctaaactattattttgcatgcatgcaacatccgtgaatcttatctttaaaaattgcaattataagagataaatcaaaatggctagtttctatgtgttgtatctaataatcttattgcatataaatagacattatacaggccattatttccttgcaagcatatattatcatatataccattagtattaatattcataactgagaagacttatctctattgaagaagagtacgtacgtagctacaatcggtattagactctaacttctaaattcaaagtagctaaactatgtctattgatgctttggc

SEQ ID NO: 50186 - DNA, 1812 bp, Cannabis sativa
gttccatctcaaaaccaattggtaataagtggagtaactcatgttcttatatatgactcaatacttttacatttaatccatgtgggacaatatcgtccaatagtgattaatgaagttattttgttcttgataaaaaaaaaatctattcattattttttattcttcttccacaccatttcctacaatttcctacaaaatctattatcacaaattttctctttttttttttcttctcacaaatttccttcattttctaaattactttttcacattctcctacattcattaatggattccaaaattttccacatactaattcctataattcaagcattcaatcttctcaatctaaccaaattaccaaaattctccacataccaaccctcaaaattcaaatttgtaatattctcaaattaaccaaaaaatttcatatatcaaccttcaaaatgcaaatttttcaattttttcaatttaaccataaacctccatttactaacccccaaaattctaatttctaatattctcaatttaaccaatattatccaatctctttttccccttactaaaactttagttcttttgagactcctaaaatactccattctttacacgaaaaaatttacttccacattcaagcattcataagcaaagtattaattttattgttgaatcgtcaacacaatctgtctctaaaactcattaacacatggtattgaagagatagcaaaagtagttctacatagtgaagaggaactaagccaaaaaaaataaaataaataacttagatggagcaaggaagaaaatatagttttgataagtgtatcacttaatacatctaagaatgttgttgtgagaacttactaaatttttacaaatttttaggctcagatctaggtttgttcatataatctgcaatttgtgaattcaaaccctaaccaattcggactaaaccatttgagatcggaccaggctcagatctaagtttgttcatataatttgcaatttgtgaattcaaaccctaaccaattcggactaaaccatttgagatcggaccaaatgaatctggtattaatagttttgtcaatccaaactgtttataattctttaattcggtcacgattttaaaattctttgatgtggttctaatcaaaccaaaccgcttaattcttgatatatacttaatatgattttttattgaatattgatatttaagaacaattttaggcataacattgatgattactttaatattgtgctaaaaatatttaattttattgttatttatgtattagaagctttaaatataaaaataatttagtaaaaaaaatattaaaatattaatgaattacaaatcacagtttcaaacctgatttgatttagttagagcagttaattagtttaattcaattttaaattttaaaaaccaacatttaatttggttaaaaaaaaaaaaaagaaaatccaaaccaaactaaagtatgaacacatttgggatagcaaaaataaaaaatgtatttcacatttataatttttgtggctcaattaataataggaaaaagaaagagacaagtaggcataaaagcattgaagagagtaaaaaagagaaaaagagaaagagagtgagagacaacagttggcacgtgtgaccaccacaacgtgtcgattaatgattgggtaaaatgagttagagaagcagctgagagatttgcagatcaaaatactcaaaatccatcatcctcttcagatacgagagagtggcaataacaaaaccaataccaatccaaaatagttatttacgacttttaatcgagt

SEQ ID NO: 50187 - DNA, 2849 bp, Cannabis sativa
acattgttagttaacaaataaaattaaacaaacacactgatcatgtgaggtaattcccacctactaaagcagctgcatccaattaataagaataaatattttatcacattcacatatatataaccagtcaaactgtctattcataccgtattaatgcatagtataaattataaggatttgattatttaaatataatatagataatattgtagttgttgattaattagcaaaccataattttttaatgcaaatcataaggttttgcatgtgaatgtcgtgatggcaaccaaaacatgcaactactcccaatatatattacacatgcttttttaatatatacatgttgataatgtatatggtttttaatttgtcagtggaaattatgcgcgcattttaaagctagctagagtaaaactaggattgagtagttttcatattgttagttggctttttaatgtatttaaattggttagtaatatttcaatattattattaaatcaaatgaggctagattgttccaaaaaaaaatgtatggactaaatatagattggaataaactaattatcatatattaatgagcactattatgaagtattaaagcgtttagtatccctaacatgatattttataattaattaatagttttataattttttttaaattaaaataagtgaaactcaatataaaactaccaataataatgttacacctactataaatattgtttagcattgttattaggcatcagtggtgcctaacactttcttgacatgtcgcgttgcgattagctagcgatactccttaaaagctattatattaaattatatgagactcgatacttagttggaccaacgatattgacacataagagggtgctaggcaccactgatacctttagcatttctcatatattaattcttgtgctacttgaacctaagattccaagcattatttcttagacatgtgtagatttacatatataaaaggaattcaaataatttatttatgaggatataaacacatctctattggtatgatattcttttggcttaaagttggccaatgttttttattcttattattaacggaaaattctattaaaacaaacaagaaacaaagtctcaatcattcaagatggtggaaacaagaggttccacctccttaattactaaaagagcctaattgaatataaactagcagcagcccatggccgcaagacaatatacgggtcgtacataacacgacgtgctgaaaaagcattaatcatgcattcagaaaagtataagagaattaaacttgaatctccaatttgtacaatgttgagatggatgttttgtgtgaaatatatttggttgaaataatttgtataaattatgtttgcatgtatcattactcatttatttatttgagttggtctataaaactacaatttacgtacgtcttaagtcctctataatctatatcatcgttcccgcaaactaataataagtgtatcttattctcaaaaaaagtagtaagaataaataataagtgtatctcatgggtaagaatacaaaaattcatttgttttaggtctttaaaatcaggcaatcgccaatcaaatacatttcttacaactatatatatataaggaacaatatcagctttaatgcatgacaattatttcaagctaaaattgagtctcctttcttgggcttctcttcaggcagctgcaacttggtccattgtgtgcacattgttatcaacatgagtgcgaatgcttgacacaacataccacatgtcataccaatccacaatccctgtaacgaacatagaaataataattattatgtaaactcattaatccctatacgcatttcatttcaataaacaaaagcaaatagcaatgaatgatatgtatatttatatatatatatatgtttattaccttgacatataattcaaatttaaatgcaaggatggctgcaacagtcatgccaatgaaataaaatgttcccaagttcacatatacagccgtttgctgccaaccgcatcctcttgccacgccttcaattaatggaacaacaaatcttaattataaccaaaaaaaaaaagtgaaattaaagtagaaaacaaattgaaattgagtaatccttacctgatagaacaccctggagagaatcaattactatggatattgcaagcagaggagtcaaggaagcaaacgactttattatttcggaactgtcgctgaataaaccagcccagatgttgtgtccgaatcctagagccaaaactagtatcaaggcaagaactccacatagcttcagggtaacaatcattgcactcttagctctgtccggacgccctgcccctaactcattcgatacccttgtgctgttgtaacaacaataccaaaaatgagataaatgaaatgttgaatttgaaagattagtgtaagtttgatttattccatacctggctgcagcactaaggccatacgtaaagttgaatgttatggcttctgtgtttacactgaagatacatagccaagaaactattcatcagttgcaaagacagcagaaaaataatcagaatggattaagatgtaacaagaaaactatgtatcaagctaagtataccatattgcaattagtgaagtggttacttccgagtttggcatcagtcctgctaagaacaccagaatctcaaacgcccagtattccaagctgaataaatcacttaacataattagactgtgtaacatgtctaaattattaaatattcttatagatctccaaaaaaacaaaaaaacaaaaaaaatagatttgagaatttggtatatgatctgatcagtaccacaccatagc

SEQ ID NO: 50188 - DNA, 2684 bp, Cannabis sativa
gatggacagtccaagaggactatttagatcctagaagacatgcttcgggcatgtgtgcttgactttgaaggatcatatgtaaagtaccttcccttgatcgagttttgtacaacaacaactatcaggcgtcaatcgggatggctccttatgagcttttatatggaagaaagtgcagatcacctattcactgggatgaagtgggtgaaaggaagttcctgggtcccgaggctgttcagagaacaagtgaggcagttgataaaatcagagcacgaatgctcgcagctcagagcagacagaagagttatgctgatccaaagcgacagacattgattttcagatcggggacatggtatttcttcaagtatcacctatgaaaggcattaaacgctttggtaagaaaagaaagcttagcccgaggttcatcgaaccttttgaaatccttgagaggataggacaagtagcgtagaggttggctatgcccccaacagtggcagctgtacatgatgtgttccaggtttcgatgcttcgaaagtatgtctcagacccgtcccatattctgagttatgaagcattggaactacaaccagatttatcatatgaggaacaaccggtgcaattacttgatagaagagaaaaagtcttgagaaacaagacaattgcgctggtaaaagtattatggaggaacagtaaagttgaagaggcaacctgggaacttgagacagatacacagccgaaatattcggagttgttcaagtaaatttcaagacaaaatttctataaagacggggtaattgtaataccctaagataaaggaaatagattagcaacccctaactagttaatgtatgtttattatagaattatattattatatatttaattacatgtgaattaatttgataaatgaaatgttaagaccccgttagtgagccaggggcatttacgtaattatgacccgagaagggtaaaattgtgaatttaatttaattgtgtgcttatggactatattattatatagtatacttgttgtgtcatttttcaggtgctttttgataggtcagcgcggtatagtcacaatcgagtatttcgggccgaactggattcggggctgaaatacactttcagaattttatattggcattttatggttatttaaatattttgaaattatttggatattgtgtgggtgagtgatgacttgattgcccttaaatgtatgtatgtatgttatatggccctaggggcatttgtgccattttgacatttgtgttatttataacaaaatgcaatttctagcatattagaattagaattctggttttgctcagccccaaaatcgaccctctccctctcactatattcttcttccttcacttgataatttgtgagaaattggtttgatttaaggttgaatttgtagaattttatgtttggcttttggaagagcttaagatagtatttctaccatttttactttgagtttcattgctgtaattttatagtaaaaatatatgtgaagccatggactaggttcttaaattgcatgcttgtgagattggagttgcttatgatgttgtagacatagttgtgtttgaattggtagttattgctttgtgtgggttttaaattgtgaaattgagaattcttagttgctgaaattgaagtggattctttggagtttaagcttgtgatttcagcttgttactcatatggttgagttgatgttatgtggaattctagctcaatgtttggagcttattttaaggttgttaatctgaattttttgatgaatgttggttgtagattaagcatgatatatgtgttttgatgctctgatttattacctattaatctttggagtatgattttgaggtttatgcatgattgggatgaagtaggtgtgtttgagcaggtatttttgaagttgagtttggggtttcctgggttttaaacccaagggccgtgaccctgctccttgggtgctgcagcccgccccgtgttggtggcttgggattcgaaccaaggtgttgcggccccatgtggaagttctgcggcccacccctttatttttggacagattcatgcatattttcaaatattcataactttgtcatctggagttcgtttcgggagttgtatgtatcgttgaaaagctcgttacgagctttatgtgattatctataatttgaatgccaattatataatttgtggaagtggatttagggattaaccctatacttttgaatcgcgaaaattatgactaagattaccagcacttggtcaggagcacccggggatttggaatctccacgtttgcgggacattaggtacgtagagttatgcgcagtgtcgcttatattgaatgtgatattagtgagtaattagaaaccgggattagggttattaccctaaagtgagcgatttatgggcctagggttattaccctagtaaattgtaaatgttatgccatgttgtatatattttgaaaataaggattatgcgttcaagggagaatcaggttggactcggtaattagaaccgagatgaaccgttctaagatcttattgtatttacacctatgagcgtaacacgtaagtctatatgccacatagacataaataggcgtgtgagcgtaacacgcgggtctattctaaatagacaaatggcattattgtgtatgtgat

SEQ ID NO: 50189 - DNA, 1344 bp, Cannabis sativa
aaacaatataaacatgcattcatatacacatgtacatactttatgctaatcttacctcgtttccagattcaagcgtgtcagtcgacttgaatggaaaattcttgagctgaacggaggtcctatgtcgcattacacaatcgggtaaatgacttgagtgaacctttcccgaaatcctaaacttaaaaccaagggtagccttaaaaacacacacgtaaatactaccgtacataccagagaaaacaccaaactaagctctgaaaataacacaaattggaaaaatcacatttttgggaatccttcctaagaaccagtctaccggttctacaagtcttgtagcaactggtcgaccagttggcaccagaaaactccaaaaattctataactcggccaaaacttccccaaatccaaccatactttccaaaatacctttatgaacattctagagcagttttcacgcagcaatagcaatagaattacactaaaactcaacataccatggttgagtcaagtttgagttctaagaactcaaacttgctcaaacccaaaatcacccaccaacaacaattcaattagacataaaacatcatttagaatcatttgaaaacatccctaatcgaaaatcaactaaacataattaaaattcccaactcacaaccctaacctcaagaaaaaccttccaacaacataacaaatctataatagagtaagcttaggattttacctcagatcaagttctcaaattccacctaataacctctgaaacttgatgaaatctctaccctaggctgctggttcttgctggccgaacaaggaagaagaagaataaagtggtgttttttttctcttttttgcctaaattcctctaattagataacctatagtataatagattatttgattattccttgattaattaatacaaggccagctgccacttagcaaaataaacacatgtcccaagagttcaaaatggcaaaattaccccatcctattgcatatctcaataaatggcttgggagtaagatggtccaaagccactaccccgcctaaatcaaattccaaaatttcacacactataattttctataaaaaggttctagatttacccgtgtgactaaaataacgcccgttgcattttccattgccaccaagctagaatcacaagaataacatattttacatttaacataaacatttacatataattattaataataataaaattaaaatctattgccccactaatccatttctaaatcatacggtcattacataatgcatcttcattagaaaagacatggggatgtacgtgttgggttttgtgccctaaataaaacccattac

SEQ ID NO: 50190 - DNA, 1005 bp, Cannabis sativa
agagagctaagacccttagtgaactatactatcatcacttataaggatatttaggtagaatttattaaatacccttataagctaaagtcaacttacaatagaaaaaaaaagttataaaccagaactgctcaagctcactggttgtcattgcctttctctcaaaaatagaaattacaaaaattaaaataagttacaatagatccagcttaacacaaaatagctactcaaaatagaacctaaagcctatataaacccaaatcatttacctgctgcaattttcattttctacaagttgaaattgagaacagagagagaatttatccattgttgtatagagagaaatgaaagaaagagatagtaaaataaaaagaaagtaaactaaatataagagagaaaaatattatttgctaaattttgtggcatgaaatcttaaagaaacgaagaactgtacctatttttgacgatcgtggaaactctcatcactgaggcaagctcgacaaggatgtcacctaacatttgggtgaaccttgacaaaaatcctatgttctttctgttggttttatggtactaaatcaagtacgtaacgaaagatttgtatatttgattatcatcgtaccatagtcccaaagatctctaaatgtgtatacactaaatcaaagactaaattaatgaaagaaatatatacctcttgaagcctatcaaaatatccttgattctttttgtaagttggatccaataatcctcacaccatagtcttctaaatcgatccaccactcacaaggaatagtgtgagctattaagataaagtgtataatttgttcttgataaattctcaacacatgagcaagaactatttgagaagaaaaagaaaattccttttctccgtgtatttcaaaaattacatagtgaaaagcttcttctgatttctcaaatcaggcttaaatagttgttaattctcaattaatcaaatcctatttattatttaaataagggtaaatagcggca

SEQ ID NO: 50191 - DNA, 1099 bp, Cannabis sativa
caatagatcacattatgggtacacaataagtccaaactatccatgcgaacaaaaaaaagtcctggataatttagataagcgtatttaagagtctttactgactcagcctctccaaacgggtctaagaaaaattgtgcacatgaaaaaaaattatcactagattattatacaaacacaattgttttattctatctttaatttacaaataaagagatcaaatcaagataagaattttattttatactatcttacaatgtcccttttgctattttatataagagaatgtaaaggcaactcttgagtttatttcattctctataactttttttctttttaccaagatagagatttttgggtactttgctaaagagaaaaacttatttttctttcttatcatttcattccattccacataacttgtcgggattttttttggcaaagagatgagatttttggatactctttagaagtttaaagtttaactttttattccacataacaattttttttaacattttaaagttactaaattgttaaaattgaaaattattttatcattttaaagctaccaatttattaaaattaacaatttgtttatcattttaaaatttccaatttattaaaattgacacttaatttttcattttaaagttaccaatttgttaaaattggttaaaactaactcaaccaaaataaataaatatatactactacaaatatatcttttaatttaagtttttttctttagtaaattaaatatccaaagataaaactattttaatacccgtatcactgctttcctcataaaattttggttatattttcagttatttacaaaaaccgaagttaaaagtatttattttttttaatttgaggaattttgttggaagacctttattttcggttatttggcaaataccgatgacaaaggtgctacacaaaataaagcataacttgacccttcatttaccctgtcgaaaccccctcaaacccacgattcactcaaaccctccaacccacgactcgctcaaaccctcaaacccacgactcggtcaaaccctaaaactcttcgatcgcttacagctacccttgatgagga

SEQ ID NO: 50192 - DNA, 893 bp, Cannabis sativa
caattaactcataattatctaattagggctttgctaatcattttcttaattctgggtattacaattaaccaccgcatgctttgaccggagttgaaccatggtagggaggcagcaactacccgctctccaaaccagattcttcatctttgggcatcttgaggttccaaactttcttccagaatttattcaccaaagactcctctaagtttacctcacctttaatttcctagatgagtttatacgcgcttttaacaatgtataaactagataattcaccacacaaaataagatgatcttgagctggtgtaatattgatagggatttgaagaatcagttctctatcacgtggataaaaaagatcattcaacacatccaaagcccattcaagcccatcaaatgtcattagattggcaagactcggatgcgaagaagtaaccaaaggatttcctttatttggtagccacgggtcacctatcacattgatacttttaccatccctaactttccaacgaacagcactagccacaaggttttgagccttaagaatactccgccaaacaaagcttgggttggagcctatagctgttgtaagaaatgtgcatgtagggtaatatcaggctttaaaaacacgagccactaatgattcaggtttaaagattagctgccacccttgtttccccaacattgccagattaaactctcttaagttacgaaagcccatacctccctccgttttgtgattacaaagtcatttttacgacatccaatgaataccagtattattgcttgaagatgactgccaccaatacttggatataagactctccatatctcttgttacctcaagaggtaatagaaagacattaatggcataacttggaagcgattgagca

SEQ ID NO: 50193 - DNA, 1081 bp, Cannabis sativa
  modified_base (44)..(57): a, c, t, g, unknown or other
acgctccccaaactttgatatctaccaaattatgtctctcaaannnnnnnnnnnnnncatgtactaaatcatgcctctaaatttttatctatattagaatatttttattaaaattagacaaaattccttaaatttaataatctcaataattcaaaaaaaatttgaatgaacttacaaaaatttaaaaaacataatttagtacatatcaaaatataataatatttatgagcattattatttcctctctctcaactcgtgcaaactaactctcaatacttttttctcttttctggaatttattaattagtatactattaattacattttggtaacttttttttaatgtaattatcactgtcaaatttagctatatattatataatacgattaggtatagagtacaaacgttagtactagaaaagaatctcattcaagtttagatacatatttgatatgaaatttttttataattaatttctagaatgaagtagaccaatgtggttagtggttgctgatagtggctcttgggttttggtcccaaactcccaatgcacgtgctgtagtcgtacaacacaaactctaagctatttcatagcatggagagacttactgtggctgctctctcatgtcgctttcagtttccataaccttacgatactatatgtgtaaatatatttttaaattttttccatttttttttttttaaaaaaagaaagtactccttgaatcaagttctctcattccccctttatatattataacccctgttggataaattaatgtattttaaaatgaaaaatttgcggtatataatttctataaatgtttaatttattgtaactaattcttaattttaaaactttaatggtaagattctttaaattcatgttctgttaacacttaactctttccatccatatatatttaggtgttaagtgacacgttggacaattcatatatacatactgtgttgtctacgtgaacactatatacacatggaacaattttattttccacgtaaataactatttaaaaaattaaaaaataaataaataaatttaaaaataaaaaaataacaaat

SEQ ID NO: 50194 - DNA, 2028 bp, Cannabis sativa
ttacaaaaaatggtgccttatgtaattattcctaaaaaatatcatgataatattgcaatgatgatcaattacttaaagagaataagtacgtgtgttgtgtttatgcatgcatgcatgcttttgctttggcttaatcaataatattgtactacgtaggtatacatgtagtttgttattattaataaaataataaaaaaatgtagaggacagtccgtataaaaaaaaatacgttagtttgttaatttaaagaacataaggattgacctgagtaaaacacgatacgaatccgaacatggtacaaatattatgatatctaatggctaaaactaatataaccatcataattatatattatgaatatgtattatatactcaaaacttaaatttgtaagaggagaaaacatggtatagtagatcttgattggttaactaaaattactatgtaatgtaattattttccttacatgtaaatgggaaaaccttaaactaacttcaccactaattctattcacatttgtttgaattatatacaatctttctgatttcaaaaagaatcatattctttttgcccaaaggttcgtttgaccaagaaagtctggcatctacaaagaaaaagtgtacaaaggctagcctccatccaaaggctggcatccatctccaatggccggcctccatctccaatggctggcctcctcttggtaaagttaacaagaatatgagttgtaggatcttggcaaacacatgacctaccagatcctagctggagcacggccggctagacctcaacctgcaggtgcatggctgaccaattttttcctttgcatcgggtctgggatggggtcgggttctgcgttcgagtctgtggctggggcttgagtttgggtctggagtccgatgttcaagtctgagttcgagatctaagtttaggtctagggtctgggtctggaactggagttcgagtccagctccaaattagaagatctatatgtaaacaatcaaattattacctcataattatgtctgactttctcggtaataaataaatgatgccaaaaaaagaattaataagaagatttaaccaatcaattattgtattgacttctcaacaggttcttctatatattcacgtggcattattattatccactaatatatatatatatatttttttgtatattataatagatgatttatatatattattgtcggtaagagtaataaatattaaaagaaataaatgttgtagttggtatggtatgattgatgcaggaccagttttaaattattttgttttatattaaaagaaaaatatcatgataatattgcaatggtgatcatgttctcaccaagctacttaaagagaataagtacgtgcgttgtctttatgcatgcatgcatgcatgcttttgcttttgcttaatcaataatattgtactacgtagccacatgtagtttgttattattaataaaataatcaaaaaatgtagataacaaatctgagcccctatataaaaataaaaaagttgatctgtttaaaagaaaataaagattaacatgagtaaaacacgatataaatctgaacatatatagcacaaatatcatgatctaatggctaaaactgatataactatcataattacatattataaatatgtattatatactcagaactaatacttatgcaattatttttcgcatggatcactctccaattacagtagattagccttgatgcaactcaaagggaaaattcaaaattatttctaaaattaagaaatcatgtaaatcaattataattcagctatagttaagttctaaacactacctgcaaatatgagtattaagggcgacaaaagtcgctcctaaaattatagatcatttcatctttaaaaatactatatattgggagcgacaaaaaaattgcctgagattaggggtgacataatcatatgcccctaaaaaagcgtgttaaaattctgtttttttttttttcacttttaaggatgtttatagtcgcccataaagatt

SEQ ID NO: 50195 - DNA, 924 bp, Cannabis sativa
tatatatatatatgggtacacatcctatataatggtgtgtttctatatacagaagagttcttttagttattatttattttttataatacgtgatagtgttttcacatcatttgtaaatttttaacaaattttaaagaattgataatactaaaataaaatttttatcttacctaattattttttttaaaaaaacgcatggtaagaatcatttaaattttacttttaacaatttaaattatttgaatttttttaaaattaattaattacaatattcgtaattatgaaaaaaaaaaagaaactatttttctttttgatgccaaaacaaacaaatgaaagatctactagaactacccattacaagtctacttcataaatttcctatgtatacaatacaataagttgctaaacttggcgtttgagattgttattggattaacgtgtaaacaacttatttctttgcttatagttttgttgtcttttagaaaaagaaaaatcaagaaatatagcataaaacaactagtacaattattacttatttattatacaagacagaaaaaggaaagtatggtctcttacgaaatagaacaaaaaaaacgacattattgatcaaagtaaacatattgtcgttttaacaatagctctttccaaaaatggttggggatataatttttcttctataaaaaaatgccactcaaatccattgcgaactaaatgaatccgatgtgaatgatttgatcaatttagaccgttttaaattctctaatttggtcacaattttaaaaaaaatttgctagcggtaattattttatatatatttaatatatattttttggcaaaatattaatatttaaaattaattttagatagaatattatattgttaagataataattatttattgtattataaatttattaaaataaa

SEQ ID NO: 50196 - DNA, 1076 bp, Cannabis sativa
atgctccaaacacgattaaaactaaattaaaaatatactaaacttaatctaaaattaatactaaaaataacttaacagtcctcattagaaaaaacttgtaccaaggaagcaccaacgaggaccttctaccggtgacttgttcttggtaacgagcagtaccatggatgtttcagcctgtagcgagaacaaatgtcctcgttagaagccttattttttgcattactaatcgtgatcctaaataacaacaaggtacacgatgatgaaaagcaaaatatatttataaaaaactatttagaatgccaatcgaaatagataaatgaacttttaggagtgtaaactagaatatttatttatatatataaacactaagttgtatacatatcgaactctctgcattgcttctttctttatactcttattattcatttcatcgatggcttcttctgttggaagtttgtgaaatcgtataaaaaaatgaaaaataaagtgtgtgagtgaatggagtcccacatgggatagaaacacatcattagaagtatatattatgtgcaagtttgagatttgggtttgagccgcaacccagttttgtgcgcatgggtgaggactcacacattggacaaacacacacgcgtgccactgccgccgtccgacggaccgagctggaatggtgggcgggtgaagtgtcacttaattttttaaagaaaaattattttatttaataaatattcatttttatttgtaacattaaatgaagtagtaaaaagcaatcaattaatgatcttcttttcactgccatgatccaacttctccacgattatattaccattttcttactatttaatcttggatcgacttctctatataagtcttatcagaacaaggtaaggatacatcctttcaataataaaaaattttcttctttcttacaatttttctcaatgcaataatttagggtataatcgaacgatattgttcgatgtataacatatcatatacaaagtctgttttatcctggggacgccatggttgctagctagactgtcgtgcacactttgggcagagccgcaaaacgtctt

SEQ ID NO: 50197 - DNA, 931 bp, Cannabis sativa
gtccagggtgtcgcaatctaatatttgagaagaattggattaatcctccttggtcggtacggttggtttgtcggtttactccaatttcatggacattaggtcgacatagttggattgttctaattgattcaacaattctaacatagtatattgtacttctctgtcttttagttaaactgtctagcctttaaccttccaaatttgtagtgtgtgtcgactagccttccatttaacgtcacgtctccttatttcgtgtcaagtcacttggatgatttttggaacaacacccataaaaaaaatggtgtcccaactacaaaattatcgtataaatagtataaattacaatcaaacaattaaaagaaatatttattttacccacaaatatgcatttttctgctataaggcatcagtacttctgctcctataggaatattttatttttgacatatggaaaagtgatctaaaccaaaatattttacttaatgtatacattatataaaatatatcagatatccagtatttaaattttttaaataattaggcttaattaattatttgaattatttattttttatattgtaaattatttcaaagtttttataaatgagtagaatgtttccataatgtatatcgttatgttaaactatattttaaattggttttttttttatataaaatgttagttttggtccaattttaatatttataccgtcaaaacacaaaattgatagaaaaggataaacaatgaagaaagggattggttttaaaatttgttttgtaattaattttgagtgcaaggtgtaaagttgaagttgttgaatacaatattactgaatcataaaaaataaaaaaataaattacgttttttcaatctatatataattttcatctttacagtttttctttatcacaattacagaaattcacaaaa

SEQ ID NO: 50198 - DNA, 918 bp, Cannabis sativa
  modified_base (41)..(65): a, c, t, g, unknown or other
  modified_base (486)..(514): a, c, t, g, unknown or other
tgattttaatgaaatagattaaattattattattattattnnnnnnnnnnnnnnnnnnnnnnnnnttattattattattattatagaatctttacaacccgcatcactttatttaccaaatactcagcttagcttttttctacagttctgttacagctgcttttccctatagcacagctacaactactttttctcacagcacaactgtgccaaataggtccttaatcaaaacaacaactgatcatcgtaataggttcaaaaatgttagcactaaatagtgtttgaagacacaaattaataaaacgaacttagctgaagtgtgaacaacagcattgaaagatctagaataatgaataaaacaaacatttttgatttatttacaatgaataataaaaaataataattataatttgctaatatactgaaaacaacaacgtccctacataataagggcaaacattacaaaaaattgttacttttagtgannnnnnnnnnnnnnnnnnnnnnnnnnnnngtgactaaatgtgacttttattcacaacaaaatgttatttgtgactaaaatataatatttagatacaagctgtcactaatttagttttagtcacaacaagtattgtgactaaaatacatttagtcacaaattaatttatgactaatacatttaatcacggaccttttatagttacaacataggaataaatttataattagtcacaagtttttcactttcagtagtgaaaagtgattttcttgccgtaattttttatatatataaagtgcggctatttagcaaaatttgttggtttaaataatcattttattattttattatttttgaagacacaaatgagatcggtactggttttgtagcacgcggctgtgatggtcgaataattgaggcgttttcaactattt

SEQ ID NO: 50199 - DNA, 3706 bp, Cannabis sativa
aagccaatgtatcaatgtgctagtgttttcttccccagagatatcagggatcattcagggggagtatgatccaaaacaaaagcatagttacttttgcggttgtctttttattcatatacattacgctatttttttaaaaaaaaaatactttaggctgttattgaagctggtttaattggccctcttgtcaatcttcttcaaaatgctgagtttgatataaagaaagaggccgcttgggcaatttccaatgctacttctggtggaacttcggagcaaattaagtaagtaatctttactttttatcctttttctttttagttttctttgtttccaatttgttctgtcatcatggattgaccggttgtttttttgtgttaggtaccttgtcagtcaacagtgtataaagccattgtgtgatctccttgtctgcccagatgcaagaatagtcactgtctgtttagaaggattagagaacattttgaaggttggggaagcagagaagaatctgggaaatagtggagaagtgaacttatatgcccagatgattgatgatgctgagggtttagaaaaaattgaaaatcttcagagtcacgacaacaccgagatttacgaaaaagcagttaaaattctcgagacttattggctggaggaggacgatgaggcattacctcaaggtggtgatgcttcccagccaggattccgcttcggagggaatgaacttccagtaccgtctggtggattcaactttggctgaaggtaaactaaaatgtttttcaactttcactaagcaaatgacacaatagcaaaaatcctatctacaaaaagggttgtaaaagtaaacaacttttcctgttgaataatctgtcttgggcctcttcaaaacacttgcagaaattcaggatcacatggagcagaagttaagttacttacaccatgatggtgatgttggggtcgtcgggtagagtcgggttgggttgggtcaagggtcaggcatctcgccgtgtcgtcgggttccagtctgtccagagtccatatgtggtcaaagaggtgccaaggtaagtcagtcatgccactgtgaccaaataacatggggttggtgtggtgggatcaatggttgcatgattgactgtctgagtttgcagcattccttttttaaaaggctgcttagtaccaatgaaatatggaaatgtctaaaactcaaggtctatattgtaaagcataaacagggttctcttccactctatcagtgtgtgtgttagtggagatttcttgattgtgccggtgggatctttactcttttcattggagtcgtcgttgtaattttttacatgagtcagtgggattttttggttcttttttctttttttattttattttttggggaggggagtgggggttgaaagtacaagagtcgggatttgctttctttttttgagtgagtatagtattttgatatatattttttttttctaaaaagaaaaattaaacatgtttctttctttttccaaggaaagaaatagtagtggtgttttgttcttctcattatcgctttgattcaaacgatttctttacttttattctgttttgtttctacttaatttttttgaggtttggttttattcttttctgttttatgccaaataatattcttagtataatatattaagggctaatggcatcaacctaacctaatttgataatgaaatattataatagtcacttaacttatctgttaagccgatgaaaatgtatacataaatgtttgttctgcttcaagaatgaaagaaccttatgatgagtctccatagaaggtttcagtggtttgggccctgaaatgaaaaactggctggctatcctcagaatttttggtcacaatatatgaaagaaagaagaaaaagggaaagcctcgaaataacccaagtttatccattggttacattacttgaaaattggatagagcatcacaaaaaaataatcatctgttatgtacatttttatatcaacaattaatgttatatttcaaattaggtcagtagaagaacctttaccatccacagattcttcgtcatttgaaaatgttgaataataaatggtaactgagaagcatctttggtacagaagtacaactatttattatccttggtacatgctgtctatttcccagcacaaaacacaggtgtttttctattttaatctttcaaaaaaattcaaagataattatcgaaaatttaaatttgaaatatatgtgtcaattgagtattgtttcccatgcaaagaataataaataatatacacagaaatatttgtaaatagtttttgttcctggtcttctgttttttccctttcaaccttctaatacatatattaatgaggttatgtctagtaccctttagaaaactacatttcgactgaattttagctgttcttctcttgcgttggtattaaaaataatactaaattttctcataaaaaaaaataaataatacaataactcttacccgagtatataataatataataaataatcttatagaattagcaacttgtaatattttatttaatcgttttaaacaaaccaatcagattcaataaaaatagggttacacacttacacctgaaaaaccataatagaagggccacacttagtcaagcaaaacgatatatgaaataatattaatatttggtagagtatgaaaaagtacaaaattatttatatacctattatagtagtacatgtctaacccaacttttggattgagggtttataaactttatatatatagaaagaagaccctgcctcggttctcaaaaatgtgtatatggtttttatttaaagaaattgataataaatgttaagtgaaagaggtggtatgtatctttcaaaaaaaaaaaaaaggtgggtatatacaaaaggatccatgtaatttatttattattgtataaaagagaaaccaataggtaataataataatgatgttactatcattgtagattggacagaccagcctttcttcttactcagtttcagacagctagctttgctatatatatatttatttaatttttatttaatccacagtaaaaaaatattttgaaaataattttgtggtcctttaattttggtctgtccacaaagagaaacaaaaggggtctcgtgagccttcattatccttcaccatcacattttatctggcaaatttttgtctcatgttttgaatatctttgtttccttatgattaaaccttacttcatttctatatatctaactagtctctttgcaccacaagtgttactcttaattacacacaaatatatatatatatatatgtatatgtgtgtaactcttatttgttatcttattcaaattgtggtatttatcaagcgaaaatcataatatgacctttttgttttgtctccttatatatccttgttaaaaagaatttgatttctttgattaaacatgttattattataataatatgaattatcatgaaaagcctaatctattttttttttttttaagattgtggtcttagtagaactacttggttaatccaatgccacccaatggttttgttggtcacttgtagtccatatatttataaataaatataaattctgcttttcttttttcctttgttatctttttattagatttggatatacacagcaaacacatacctgactcaaattgatgtaattatat

SEQ ID NO: 50200 - DNA, 1190 bp, Cannabis sativa
ttttcttaataaagctattatattttttaaaaataataataataataattaaggtagataatttttattgatgaggaattcatgagtattttaattttaatttttaatagctttatattttttctgaattaatcaagagatttattaaataataaactcgctcaaaataatagaacacacttcagaggaacaatcctccaactgaagcacgtacacaacctgtagagaaacaagagtttcttgccaaacaatgagccaacttgtttgcagatcgtttaataaaacataactcaacaaaaaataaaaccaaaagtaaattccaaacatcttgaacaataagatcaagttgggaggccatttactttggactgcttggacacataccaaactatccgtttctaactacaatgtctcaaggatgagtcgcaatctaactcaaagtttctttaatgtctatgatctcagcaattttaaattgtcgcaatagctctattaaatgaaagggaacatgcgcatatgtgatactgaagcccctaaatattaaattgtacacattattttattgaaatagtcgaaatgatttttctggtttcttccataacacaagttaacagaacaaaaattaaatatatacgtgtaaagagataagagtatatattcaatgcaatttgtaaatatacaaatcttctagtcaattattttaaccaaagtttggcgtgagtgcccccaccgttaacacaatttatatatatatatatatcattgtttatatatagaataaaataattaagttgaaaatataattagtgctcctcgattcttcttcttatctacctaattttatttactatataagatcttttcagatctatttttaacctactgtgagctctgagttgataatgaagaataatgagtaataattaattgttcattacccaatctaattgtagaataatactccatcaaagacaaaaatgaatgatcccttctccttctagatatatatacattattgttaatgcacgtggaatattgtaactacaacaccttgcgaaaaaaaaaaactattactctctaattcgatctatttgacattttctttgagatttttacacctgatgccacatttcattatttttttacttttttgtcattacacggtttattaaacttttataccttttaca

SEQ ID NO: 50201 - DNA, 1156 bp, Cannabis sativa
  modified_base (1113)..(1120): a, c, t, g, unknown or other
ctagaacactttcgagccttcataggatttcatacttcctcagattgttataattcctgaacatgttgacatgttggtctaactcccatggattgtcgttgaggattaattttggagcatcttctcgctccattacctcctcctctgagttagcttcctcttgacatgtttgcttaggcatagtttctgtataaaaagaagaaaatccaagtagttagccaccctaactacctagtatagaaagggagctagaggtcctcccccataaactgcttggagaggtcccgactagactaactatttagaaacgaaattccatgagttactcattccaaataggaagttaggaacaatgcagagagaaagatgacaaatattaataacaaccccaaaactagaaggattttggacaaaagaaaattttgccagcacttatgccataaatcgaccaactctagaaatttttcaaacaagaaatttgaaaaacaatatggttcgtgatgcttaaatctacctaagttgacaatcgcacaaacaaaaaaccctaattgcatcccagaatagagcgtgcaaataaagtttatagcaacaaatttagaaaccacaatccatagatgaagaaataacatagatattgataacggagaggttaagctaatcgtcgctagatttggctcaggaagttgagtgtacctttcatgaagatgagatgctaaggcaataaacgaattaacttctgtgttgaaatccaggctcgcgatttctcctattgtaaaagttttgatcactgggagttgatgatatgggtgccctaatcctcaacaacagacgaatgcaaaaatctatggcactttccagattagagaaggagacattgccctgaattcagattgtagttttggaaagtgcaaaaaagtctataagctttgaagggttgaaaaactagggatgtaaacggggcggggcgggtgcggggattgctcccccacccccatacccgtttcttaaattcacccccatacctgccccaatacccatttaaattaaagcaggggcgggacggggattacccgcgggggaaggattcccatcgggtacccattacatatatannnnnnnnaaaaaaaattataaaaatacgattatacggaatttt

SEQ ID NO: 50202 - DNA, 776 bp, Cannabis sativa
  modified_base (406)..(408): a, c, t, g, unknown or other
ttaaattaccttaagtggccggcctcatcgtagatcccactagtttgtaaaattagagattaaaaattttgatatatgataaattataaaataaccatttatttttcacctttctctaattaagctttatatttttattaacatttattattttaataattttttaatttgtagatattattaacattatgaaaaaattatcttgagaaaaaactttttgggtttttttctataatgaatattttaggtccaaattttatatttttagctttgtaaggaaaattaaacaacaaagtaaattcaaagtttttttttaaataatacggactaaacagtccgtatcttcttcctcattcgttcccagttacacccaaagcattctctcctccatttttcttctcaactnnngcacgatttcaactccaaaaaaaatatcaaagttgtataataacaaggtcacaaaatagatctcaacaacaaaatgattaaccccgacaaatccaaaaataaaaaggtaaactagaaaaaaggaggaaaacagatatttctacatccattaagtcgaaaatacataaaaacaacccaaaatcaataactcgaattatattgtgcagataatttgataacaacacaaaacaaggagaatcgaagcatacccaaatataatttaaaagaatttgaaaaaaaaaatacaaggtaccaatatttttagtattttttttttcataattaggttgttatttagtgtttgtcaatcatatcaagcataattcata

SEQ ID NO: 50203 - DNA, 1062 bp, Cannabis sativa
atattttattatttatgtgattttatataaatatatagaagataattatattatgtgtattactcttgctgttaccagtatgtggggacattttttttttttgagaaattttttaactattattataaatcaaatgtcatttataatatatttatataaaaaaaatatcatttataatagaaaaaaaaaataaaatgaaatctctctcatttaaaagacatcttcatctaactttagggtgtacttcgctaatttgcgagcaatttaattagcatacttacggcaagagtgacagtaactctagagaaaaggataaaagacaatgcacaccaaatattaaatctaaaaataagataaatctgaaagtgaagaggacagtatcgagaaaactcttagtgcatctgttttaatgcgtgatatcagaatgtgttgttgagttgtccaattgatactataaaagagtgattttgattctatttcatcacttttgaagcaaccttaaacgaactaggataatgctactgttacttcacctctaaagttacgaatcactcctccttaaaaaaattcttaatttgatttaaattcataactcaaacttaaatataaatatcttataattgattaacaaattaaaatcagttaaatctttttattttattattatctatttaattaaataaattatctaataatatatttaatttaataattaaaaaagataattaattaatttaatttgaattatttaaaccaataatatcatcaaacaaaattaacatgggtctttatatgtcactttacatgtgtggaccatattttaaggtccaaaattaatttttcaattttaccatgaataagatttattaattattcatctagtaaataataattgattaattctcattaatctcttatttcataaggattaaaataaatattattttttctaaaataatacattcatcgctttaatatatttagaataatattatatttaactaattaataaggttttatctaataaaactaaatagctaaatattatttaattatacaatt

SEQ ID NO: 50204 - DNA, 1690 bp, Cannabis sativa
ggtttcttttgataattagtataagatgacttctaaaattataaatatgatatgttctataaatttaattttacttatttgcttatttactttttatgaaaatctatttgcttcattttttgtcttttaagatattaattttcttctttaataatattaatttgtttttctaagatatgccactttagatttttccaattgtatacaaagtgataatttttattcttattctttcaatttttatagctaccacaaagtaatttttttcaattatgaacatagttaagactatactctctataacaagataaaataaatttttaaataattatttgttagtgtatattaaagaaaaattgccaaaaatttcataaaaattcactcgatgacttttatgatatgcaagaaagacgttttgtattttaattttaattataaatttaataagggatatttacggcaaaacttcctaatatttgcagttttattacacatatgatcctagttaaaaaatgacggcaaaaatatcttattttacaatttgattgcagttgtacccttaagtgccaactcaaaaacacatattaatatattattggataacatattaaaaactattatttatcctattttttaattaaaaaaaatacaaatttgaatagaaaaacgaaattaatttttttaattagctaaataaaagtttttttagagaacagtataaagttttttttatttaatttatgacccaataatctgttattaggtatttttgagttggtacttaaggagcttagttgatatttaaaagtacgactgcaataaaaattataaaagaaagtatttttgttaacattttttttattagagtcatatgtataacaattacaaatgttaaagaaattttactgcaaatttaataaagtatttttgaaatatttatcacttaaatttataatataatttggcctcccctaatttttcatcctggctacgcccctggccaccattgtcgtccaaaaaccgagagcagaaaaaaaaaaaaaaaacagagcaagaacaaagatggagaaagaaagggaaaaaaaaaagaaaaaataatgaaatgaaaatagagagggagagagaaatatcttagacggtttagtatgaagtgaaaactgaaaaaagtaagtgtagaaggggaagcaactatcaaatcgtaatgattacatgcaaaacccaaaaaaaaaaacggttatgtaaaaaaaactgatacaaaaatttaaaaatataaaatgactaaaataacctacagaaactacaaacaataaaatatgaactctttaaacattaattctaaatgtatgggttttaaaaacccataaaatatgcccaaagtttaaaaaaaccataaaaagtgtccaaactaaactatgccatatttatcataaaacatttaaaaaagtcatactgaaaaatataatgaatctgatcataagacctttagattatgctgctattaaattttaatttgactaaaattaattttataggataattttgttcaattttcaaaacatagagtttgaattatcttttaaaaaaaaaaactgtataatttattacttttgcaaaacatgtattttatccattttaattttagtaaaaaaatatattatcaacctttatttccgttttttttttttttttt

SEQ ID NO: 50205 - DNA, 1337 bp, Cannabis sativa
aaattaattttaattatatattttctagtattattattttttaaataatggaagactttaattaattaaatcatctagacatctaccaccatttctaattttccaaattgacagactggttggctttgaattctaattatgactcagatggtcaaaatatatatactcaattaactcactcatcacacatagacatagatttatatattgctacctagttttgactgcaatttttcatttctttctaaaaacaaaaacaatttatatattttcattttattataatttatatcaactaactaatatacatacatatatatatatatgagtagtatatatatggcaacatgtgcaaggaaatcatgttatatatatctttcgattgattccattaattctgcttgttcaattaataaatttgttatatttaatgtgtatgtattttaattgtttctttgtttgtgatcaagtcatatcaaatcaatgaatcatgaaataatattgtttgatatatatatatatatatatatatttatagcttgtaatcaaatcaatatcaaataataattgaatagccaaacaatccatgctgaagttaattatattatataggaaaatgtaaaaggttattaataaataaataatatacgaatacgcgtactatatacaagtacataaatttcatcacctttatttaattaagttgcttagattatatcagaatcagatgatgacttttattataaataaataaataaaagaagcttaataatgtcaaaagaaatgaattcattaaaataaagaatgggtatttagcagtacttaaaatttaattttaacggtataaatatttataaaattataattttttttaattatatggtatcaattattactaaatatttttttaataaattaaaaatagaatctgtattaataaaattaaaaaaaaaatacaatttaaaaataagtattaaatttatgcttctttccaatttaaaattttactatttaactttaaaaaatattaataataaaaaataaaaaaataaaagatttttaaaatgggaagatgagataaaattattgaagttccacgtgggtttataggtagttatctgtaaaaggcagcaagtggcaaagtgaggcagtagagtatagagtattggtggtcaaatcccatcccacttacaaattataatctcaaatagtcaaaatattctgacgtgttgcactatctttcttcttttttttttgaaagaaactaaagttcattaattaaaaatgttgatgggattcacagggggaataccctccccttgatacaaaactgccaa

SEQ ID NO: 50206 - DNA, 983 bp, Cannabis sativa
aaatttttacgtaaaataattagaattttattctggaattatttttcttaaatattatggaaaaattaagaaatttatttttttatagaacttaatttcgattttatttgaattagttatgagttttttaaaattgaaaaaaaaaaatcgggaaaggggacatcccctgcatgcgcgcatacggggtgacactctgtgtcacgtgtgctcggacatgcattgtccaagaaaacacgctctagaagcttgtctaaagccccctccacggcgaacaccatgttggcagcctccatgtgcgacacaactcggtctgctccccttaagcatgcccgcggatggtataccatccgcaaccaatgcaaaaattttcattttttttcaatttttcatgatttttcaaggaattactctcaaattttttgtgtaattttgcatttatatttttatttttcaaatctcaaatttaattattagtttggaattaattaattttagatattagtagattttgaacttaaaaatagattatttctatcttttttgtttaattgattattttatttttaaagtttgattatcttatcttatttttaaatttaaggtgagatattctatatatttaaataattttataaaatgaccttatttgaaatttaaaataagatatattttaataaactaatctaaaaaaatttaaaaatctaactacatattttgtcaacttttaaatttttgttattgcatttaaattaaattataaaattagataaatgatatttatcgatcattttattttattagacatttaattttatttttttaaaaaaaaataacatacattttgaaaagttagttgatatttttgaatagatatttaggtttgttaaaaacctaatttttcaaatttataggtttaattttaaaattaattatttcaaaaataatattttacgatttagatttttcaaaattaattaatttaa

SEQ ID NO: 50207 - DNA, 1913 bp, Cannabis sativa
acaaaacaaggtatgtatgaagttgtagaaccacacatttcttattgttataatagagatgatcatgatattgtcaataaattatttgttttgcattaacttcaataatcaagttctatatttttattattttgatataaactattgtttggtagcatttgtatatggtgataggtactttggtgtatttgaagggtcttgcaatattcccttccctcagtccagagatgaggattattccttggatccttttattatatattcaggttcttatctatctataacacaatccaaattctttatcttgatatttcattaattttagatatcataccaaatcaccaaattcatttataggtttttatgttacaatgctatattacactacacatacagatgttgatttatttgtgacttcgtacttgtgtgtagtcatagagaactttgctagctttttcactaatgatttataggttcattattatattacttttctttgaaaaatttatcttcttctttattttatttttaataagctcgaattatattctaccttctatagttccatgttagtatccgaattgggacatatgcttggagagatattggccctccactacctatctatattttttattgaaagaaaaatataattatatatattactataatagcatggccaacttgtatcatatgtctatacttatgacttacatggtcacatgtacagactcaagttttctgtattgtttttcagaaattaatggaaacaaggataaatgttgtgcaatgtgctgctctgtgccgtgtaaagaacaggaagtaacaaggtgatagagttattgaaactgtaatgagatagggtaaatttcatactaatatctgttactttcaatgtttaagctctaactttatctcgtcatttagtatgattaactcatgtaataatttttgttttagtgcattaggaggattttttacacaaaagatgaaatcagtgatgtacgcaatatgatgacatcaatgaagtatgcaaagaattaacataatatatcactgagttgatgaaatttacatagcagctctattcacttttgataaccaattaaatataggatgtttatttatttttgctcttgaaattatatgtatatagttacaatgcttacgaaatatgattcactttacatgacttaatataaacttattatatttataattggattaaagttaagtatttagatgattgtaatatctactctgatttttgttttggaaaaatataagcaaatatgaaaaaaaaaaatggaacaccataggtcagttgtgcgggaatcgacttgcaatgcaaaacctcataggtcggttaaataaccggcctcccatgttgtacgttataggtctcccatgttgcacatcaaaagtcggttaggcgccaaccgacttcccatgttttacatggtaagtcactgcatggaaggtcggttcccaactaacttatgaatgtttagaggtcggtttttaactgaattctcatgtcatttttgtagtagtatatgtttggtattttataagacattacttatttttggtaaattagttactctaaaatattgttttgattaaataattgaggcttacgcctcaatttacgcctcaatgcgcgacttacgccttgcctcatagaaaaaaagacgctatgaggcttaaattcgcaattataaacataggagcaaatgatgaggggatcacattatatgaccctggctatctaaacataacccaattcaattattgattgacggtgttaagtaaaaatttcacatttagaatattaaaaataaatgcaaaacacaattttacctatgctaaaattatagcataagagtttattaatttaagttcgactcatc

SEQ ID NO: 50208 - DNA, 1504 bp, Cannabis sativa
cagctccaatgcaagtcaaatgtgtacgtattagaaaatatttgtacaaaaaatcacttagcgatcttatagaggaaaataaaacctctggtaaagtacccaacccaacaaataaattacattatatagtctcttttagggattgaccatttacccatttagtgactttagcactggacgttcccaaaataggtactatcaggtcgggtgaattcaataatagacgcatgttggtattctaactttccttctctttttaaggcctatccaaaagaaattcttggtcgtgaatatctgaataggacaaacccaagagttccaaatgggagccaaattatatctcaccagaatatcgggaaccaattaaaaatcattaataaacaaccaagtgaataagtgattagaaagagttcgagagtcaaactctctctcttcttaactttcttatctttttgcttcctgacaataacaaatgaagtgtcttctgagagtactatcttcaatgattaatgtactaaataaaactcttattggtagaggttgacttttatgcttttgttaggatttgaacccatgacctctattatatattatagagcattcttgtaacatcgtactcagaggaacgctacgtcttgtgattacaaactactaatcccgttaatcgggatctataagccaagtgatttaaaataaataataaacttaattaaataaataacttgcaattaagatacacattttacttcaaaccaaaatatttaaagttacatatttaggatcccacagttttttttttcaaaatataacaagttattacgtacaggccgacctaagcggcaaagtgaaatttctatacaattttctgttcgactcaaccctcgtggtctagcttggccgaaacatgtacaagtcgtcctcgaagccctcgaactaaaggttgacccgacactgctttacccttgcctacacaatagagcacccgtgaaccaaggtccaacaagacaaaaaaaaaaaaaaataatacaatatgaacaattataataattacacttcatacagtacgcctctgcatataaactgtgctatcgcactacatattacattattccatatattataatgccattatatttaatgtctacataacatagacttacgtgttacgctcacacgtctcttttacatatagggccttactagggtttatctcagttatagttaccgagtttaacctagttataccttacccgcataattctactcaaatatctattcaacatattattgcatatttatcacagtacgcacttacagtaataaccgtaaatcacgatttcataatagctagtatattttcaaaatgaaacccaaatttgaaaattgaaaggggtgtatattcataaaggagtaataaaaaataaaaaggggcgtatatatttttgtatgtagttttaggaagtgctagacatatgttaatactttattaaaattcagaacacat

SEQ ID NO: 50209 - DNA, 985 bp, Cannabis sativa
aaaaaaaacaaaactatgtcacacatacaaaactaaaacactcaaaatcatgtcataaaaacaacacaaaaaacgtttaaaattatgtcacagagacaaaactaagacactaaaaccacgacacagacaaaactaaccgcagtagcaaaaattgaattacaatagcaaaatacaacctcgatcaagtcaaacctaagcccaaggaaggccaacatgcctggccagagaaaaaagacaaccgtcgatagctatagatataggaacgagaaactctaatttttcccccattattgaaccttcaatttttttaatagaatagggcctgagattcttttttattatttttcattaaaaatttgtttattgtcccctttcaatttttttttcattttaccccttacaaatactctatgccttcgtccctataggtgagtgttggttgcaattagggatgaaaatctcaccagtgggtataaaagcctcgcgggtacctacccctaatgggttagggattctctatctaaatggagaatttaacggggacaatgacaacttttcatccctaaatgttaaactggtggggatggggatagcacctcccgccttgacggggaccctaacttgctactagtttccaaagaggtcgagagggagagagagtgtttgtctaatttttctatttgaataaatggtaaaaaaaaactttaatagttatctaatatatttcattaagataaattcatattaattcagcttaatataattcactaaaggaaaaaaaaaattatatggtaaaagaccattttgccccttacttaaccaaaaagtaaccttgccacctagggccattttgttcaaatctaataccacaaatattttcgacattcccaatatctatctaaattgcctctctatttctaaaatactaaaccatacgaaaatatgaatctattggccaaacgtcgtgtttcactattatgggaca

SEQ ID NO: 50210 - DNA, 1290 bp, Cannabis sativa
cttttacaatcattaacaaccaaaccaaaaacagaagtcatgtgttgattgctaaaaattgcttggaccgtgaccatgctatctgtctctattacgacgtgatttcattccttatcttttagccaactaagcgcctctttgataccgagagcttccaccacctccgctggataagtaccaccatgataattggctttaaaatcaacaagacaacccatagaatcacgagcaacaattccatagccatatgcgttttcttcctcaaacaaagctccatcaacatttaacttgactgtatgtagatcgggtttggtccaacgctcaatgttattatcattatgtaggagagacaatgataataagctagatttatcttgagcagaacgccattggtcaagtgtacaccgtgctgaatttagaattaaagttggagaggaggatttcttttcccaaacaagcttattacgagacttccaaagtacccaacataacatgatagcacgacatgatatgtcatcactatacttctcaaaagtggactcaagccagtacccaacagttgaggaagcatcggattgcaaagtgaagtcgcactgcccccaacagctgagagcaaaggagcagtttagcagcacatgagcagcagtctcggttgcattatggcagacaggacacatggaggaaatgccaacatttttagaaaccaactcgaggcaagtggggagggtattggtgacagcacgcaacatgaaattcttgactttcggtgggattttgaggtgccaaaacttgtgccaaaaaccagaattcggatgtctctgctgcccatatttgctgacttgcagaatgctatatgcactactaacagaaaaatggccagacttctcacccttccaggaccaacggttttcaacataggtagagctcaagggaattccaaggattaaatgagcatctcgggggttaaacatgtcatgtacaagagaatgatcccaagaagtatcatgaatatccaaaagagaactcaccatgtgattttcgaggcctatagtggcagaggtgacatacggatttgcaggatcggggagccaaggatgcttcaaaatattggttgtaatcccatttccaatagttctttgacagccaagctttaccaaattttgagcactccatatacttcgccaaacgaaactggggttgttgccaaggtctgcagaaagaaaatctgattgaggataatacttagctttcaaaacacggttggctagagatgttggagagacaagtaac

SEQ ID NO: 50211 - DNA, 3964 bp, Cannabis sativa
  modified_base (1444)..(1449): a, c, t, g, unknown or other
  modified_base (3173)..(3182): a, c, t, g, unknown or other
  modified_base (3209)..(3218): a, c, t, g, unknown or other
  modified_base (3245)..(3254): a, c, t, g, unknown or other
gggtaataatatgtgcaccaaaattatgcacgctaaagtattatacacaagagtatattaattaatttatttcaatcaattatacttatatttaaaaaccaacgcaattgtgtataatattttggtgctaattttagtacacattattgcttattattgatatttctaagaccatcttcaatagttacactaatttagtatagaatctacattaatttggtataaaatctaaactaatttggtgtagaatcttttactttttgatataacaactctaataattcacataaactatcacactaaataatatatttttacttaaaaaatcacattttatattatttacattaataattaaaaataattaatttatgatataattgtatcatgactattagtaagaatttaagatcttaaaataacttaataaaaaaaatatttatgaaatcaattaaatattacactttttttttttaaaaaaaaaaacacttaaataaaatcacacccaaatatttattaatttacttaatatttatttgttatttatgttgttctttttagttttataacttagtattctgttgtttttattttacttaatattagtatttttgttattgttattttgtatttttaatatgttagtgtgctttaaatcaactattactcttgtgataaattttaatttgaagactaaaatgtaagattaatttttgtggtatagttcctccaaatgaaaatgtctccgcaattgtcatttctggaaagttgttcattcgcggttgtcaatccgggaaggggttgtgtggaatgatagtctagtccagaagggagttcccggatgactgtcatgtccactccgggtccaaatctcatgatagttagccctgccctggaaaggagttccagctggctagttgtccctcctggaatggtagttccggatagtcgactacagcaggctctatcctatctggaagcgtcttcaggaagtgtctgtggtccgcaaattcagaagcacatttatgtttccggaggccatagtacttaagctgacgtggagattttactcaaagaggagttagttaagttagttatttctaactaacttaacaacctcatttcttacagctatcgactttaggatcttgatcctaagcctataaataccaccttaactttgtcatttgaaaaaggaggagattcaaaactttagagatgagattgagaggcagagagagaggtgcagagaaacgagagagaatggatttggattttgtaagaagaatcatctgtagatgaagaagattcttgggtgtaaagtgtgagagctgaaacacttagaactcaacagagaatctcgtcttgactatattgtaccttttcttgctcaatcaataaagatggatgacgctggtgttccagaactggagtagagccatannnnnnatcgatctatcagacttgaaccaatatatatcttggtgctattttcttcatttacagtaataggtttttggttttctaatagtctgtttgctcctatttttttttatacaattattgctcttggcttgataatcttgtcattactgattgtttgattgtttaaaggttagttggtttgattctgcactattagtcgtaattttcccacaaatcagagctaagtaatcaatgaagaacgcagaatcaagattcgaattggagaagtttgatggaattggagacactgcgttatggagagaaaatctgaaaggaatcctagtgcactagaaagtttccaaggttcttagagacgtgaagttattagcagaaaagaaactagagaaaaaagcagaaatggaggagatagcatactacacaatcatcatgtatctatcaaacagtgttcgaagaaaactcatcgtagagaagacgacgaggggagtttgggataaattggaagaaatgtacttaaagccatcaattgctagcaagattaatttgctagaaaggctatacaattttaaaatgatttcgtccctttttttagatgagaatattcatagatttaataagattattgtaggtttggctaacataaattacaaggttgatgaagaaatccaagtcatcatcttgttaagatcacttccaattgcatatttagaagtcaaggcaaccatcaagtatggcagggatgttattacattggaagatgttcttgttgcacttaaatcgaaagattttgaattacagttggagaaggaatccaaaaaagaagaagtgtatttggcaagagaaagatcacccaagaaagcaagtttgaagattaaacaccatcactctcaattaagatcaaagtccagagagaaggacacaaggaagtgttacttctgtggaaagtctggatacttgaaaagatcttgcaagaagtacaaggagcaacaaggcttcaacaaatcttataatggagataggaaggaattccagcaccatcaccatggaaaagactatgttgcaatcgcagaaaatagtgatgaatgttccacggacggagagttgttctctatctcggagtcttcaatgaacatggagtcgattctcgactctagatgcacttatcgcatgtgtcctaattgaaagtcattttttgattataagtcagttgatggaggtaaagttctaataggtaatgatcattcatgcagggttactggaaccagaaaggtggccatcaaatagtatgatggcgaaatcaaagtgctgacgaatgtaaggcacattctggaccttagacgaaacctcatatccctgggtgcgcttgaggatgaaggatatggatacaagtccatgcatagaagcttaaggatcaccaaaggttctttagtagtgatgaaaggtgaaaagatggtctatatgttctccaaggacaaactgtcctagttggagaagcaagtatggtgaaaaggctagaatcagatatgaagttgtggcatcacagacttggacatatcagtaaacaaggcctcaaagaactacacaaacaaggtataatcaaaaatttaaattcttgtgccgtaccattttgtgaaacttgtgttttaggaaaacaacataaactgaagttcactccgacaaggcacacaactaaaaaggtacctggatatgtgcacgctgatctttggggnnnnnnnnnngtgcctactcactccggtaagcaatannnnnnnnnntactcactccggtaagcaatactttcnnnnnnnnnntcactccggtaagcaatactttctatcgatagttgatgattatagttggtgtgtttggacctgcttgttaaccacaaaggatgaggaagtttagaatttggaaaacttaggtggaaaactagaatgatcttaaaattaagaacattaggactgataatgggttgatgtttgttaactccgaatttgacaagatgtgtcaagagtttgggatcactaggcatagaaccgtagtgaagaccctagagcaaaatggtattgcagaaagaatgaaccaaaccttgttgaacaaaattagatgtttactattcaactctgggttagaaaaactattttggggggaagccttaacaactgcaacttaacttgaaaagaggagcttgaatacattatgaaatgtggtacaatagaacccttaacctaacacatttaagaacattcgagtttacagcatatgtacaccaatccattgacaagctagaacctagatctgtgaagggaactttcctaggttatgccttaggaaccaaggggtatagaatctacattttcaggaagggtaaaccaaaaggtttgaattgcttagaattattttcaatgagttagaatatcctcacttgacctccgagaagggtggtatgactctgtgtgttacaggaaacacaagaagcaaagacactgtaagtgtggaagtagagtacggaacgaagctc

SEQ ID NO: 50212 - DNA, 909 bp, Cannabis sativa
cactccggcacgctcaccactataagaaatgggttaacctttgttaatttgtaaataataacaaataaacaaactgttttcaatcaaccatatttcccaccattttttttttctggttaatattattattatttaatattattttttatatataacgaaagaaataaaggagcatattttttttttccactgtacactaccgtttaatgaaaaaaagttaaaatgattatttaacctgtattccattttatgattattaggagaatatataaaattttactttaataggacaatatatgaaattttactttaactagggataattttaaagaaattaatattcgaagccatgtccattagtgctttatttttgttgagtgaaaatttgttaggaagattgtggtactcggcttgggtacttaattgggagtgacctttagatatgaaaacgaaaaccttaaatataatagactcaaaataaatttacaattaaagaagaattttatttaacaaagagattattacaacttttctctaaattaaggggagttcaagtaatagtacttttaaatactgttattatagttcgtaaataagttgtagctagttagttgcttaaactgctttttctgttagtttgtaatgtctgttttcccttaaatgactttgtataaatacctctttaatcaataaagaaatcaagtttttctgctattttgttcatctttgtttctgcttcttttctctgcaactcgcaaggctttgcctcaagctcttacatggtatcagtcgcctttgactaacgtcttcaatggagtcgttgtccacaggccagccggttcctcccagagctccttccacaaacacggcccttactcaggctgtcgtcgagcgtccaaatcagatgaa

SEQ ID NO: 50213 - DNA, 1231 bp, Cannabis sativa
aaagaataattttgttgtagttagtttagttaattatttgaaagagaatttttttgaaagaaggaaaaaaggggtatttttctaaggtgaaagaaagccatcagtttgaccatccagattcaatggactcaaaaatttggtctaaaagaagttttctcttgaacacgtgacaaaacaaatggatcatttcaagttttcaacccctttatttgtacacgtggattaatatacaccgtccattctatttctccacaactatatatttaaaccaaaaccaagtctagtactacacactctcacatttttaagccatgcaaaattttcatacaaaatattagttatatggataacaactcctcctcctcctcctcctcttcaggggtaaaatatagaggtgtgaggcggcggccgtgggggaaatttgcggcggagattcgagattcgacccgacatggggctagggtttggcttggtacttttggtacggctgaggaagcagcaagggcctatgatcgggctgcttatgctatgagaggcccattagccattcttaacttccctcaagaatattactcttcttcacaaaacaatactactacccaatcatcttcttccacgtcagcttcttcttcaatgcaggtcatcaccaccggtgacagtagccttagtagttttaatagtagtagaaataataacaatactaatcaagttattgaatttgaatatttggatgataaacttcttgaggaacttcttgataattatgatgatgataatcacaaaaaataagtgagattataaatatatatttacttctcttttctttttttattttttacaaaagaaaagatttttagtgtttttttttttatgggaaaatctcatacattgtgttgttatatataacaaatgataattaaggttattttgttttgaatttagtgtaaatttgtgtgtgaggaccaaattatatatatgaatataatgcaagtaagccacttagccacatatatatgttttggataagttgactaagtcttcttcatttatatatgaattaatgccaataagaaattattatcatggatgggctccatttctttctttcttcttctaattcataatcattttttatttgtatttttttttttttttgaaaaaaagaaattttttatgtgcttagaaaatggtcattatttttatcgagtatgtactatgtatatagtacaaa

SEQ ID NO: 50214 - DNA, 1986 bp, Cannabis sativa
  modified_base (26)..(29): a, c, t, g, unknown or other
tattttcactttttcaattttaaaannnnaaaactgattaaaaaaatgttaccaaacgtcactttagtgtttgagaaagtaggtaattagttattttattaatattttgtttttttaaaaaaggaactttaattttattgttcacagatctactatggtatcaatttttttctctctgtgaaccttcaactatttttttattccgtcgtcgatctccatggctcgaactcgaagtggtcttcctcctcgggtaagaccaatggcgactcccactgctctcatgaatcggcgaactgctcagcttgccactcctcaagtttctcttattgttcaagatcatgtaatttttggctcgtctgatcgttaccattgttgtttctgttgctctagttcccattgctttgattccttagacagtgtcgacttcatcttttgatgctgccatcggaggcttcttcactattgttgacgataagaactcatcaactacattgtggctagaaatcttgagtaatgattgatgaaatagtaaagtgatgttaatgtaaaaatgtaagagagagtgactaagagagaaaatatgaaatgctatgtatttagaaaatagtctctccaagttataagggtttaacccccttctcaaatgaaagtgcgagttatttataaggggctctaatggcccctcattacaaactggggtactcttaagtgctcccatagggggaccatgtagtaggctacaaacatctagggggcaaggatcaggatagtggtggtcggatgccagattttacttacacttgggataacttgtaagtccactactttgtttcagcttttgcaggtgttgcgatcgtgtttctctggcattcatccttcccttaggtagccttccttatgctttgcatattaaggaggatcaaagctccttctgtgcttatgtcatgagaatggcctccttcacgtttttcatctcgagtcttcttcttttggtagatttttttgagtgacgagagtcgtatgttaagtatttaggatttttttgtaggtgggtgagtggcctaatcccctgtttatgttggtgagaagcaagcctcatgaaggtgtggtgcaaggtgatggatgttagggttgtacgccttaaataaaatctatttcaatacaatcttatttactaattaataaatgatcaaaaattattttataatgcttggttcacatgaatactttcatgattatatatttaatatataaattctattatatctcaaacatatagttactcttaattatagttttgtctacatagtaaaaaataatcataattatatgttttaaattatttagtctcatgatttattagtgcatttgatttacgctgacgtgataatcaacgacgtattttacttatacttggacaagtaaaatgttattttcaggacattatagtaaagtaaacttgtatcgaatgtattagctatacatcagactggaccgatattaacagtgtaaaagatatcataaacttacatttatatcattgtgtaaaatagtactttggcaatcatccacatgggactcggcctactcggcttgggctgacccctagtgggacacttggtctagtgtaatatttacgggacgaacacctttgcttcttatattgatctcatttgggacttcatagttttggtcacgcgttacttctctacttgtagttattgtatggagattgacccatcaacacgaaagaattttgagtatgcaagacgaacctcaaaaccctgaaaaattagccatcacccatgtccaagtggagataaagcattgtattaaagttgtacgagaacaagagccaactcgaacaagagaagactcgatctaggccgacccatatacttggtctgggtcgtcccctaggggcagggacggagggacttaagccattgtgtaggtttaagccactcaattttataatatataaaa

SEQ ID NO: 50215 - DNA, 1862 bp, Cannabis sativa
aaatttaaaataaaaaattacatcaaaacctataccaaaaatatggtgtatgagttttctagtaaaactataaaattcttaacacaaatttaccatataattaacgattaacattcatgcataaaaaaaacttaattctatccattcgcattacatcaacatatatatataaatacataatcacccagcacagtatttaatttatatcattatgaagatttctctagtgccaattgttagtttttatagtccatatcaaagttataaaagtgaaagcagaattttgataaaataattttttatctaatatgaacaataagcccaagaatttcaagataatgaatatagattaaatctaattactataaaaaattcaattacttatttgacgcctagaagggtatctttgattcttttcatataacaatcgaacatccaatccaagaacttgattgaagaatccataccttgatctttcaagccagcctcaacacttggaaatagagtggaccattagatcttatcggatgaacaaatttaggtattatagggtatagttaactcatgagacactgtaatgagattagggtttagatctcacacacatttagaatagtgtgtggcgtgtgagactagagagagagagatggcgtgaggagagagagagaggtggcatgaggagagagagaaagagaggagtgagtaaaatatcaatcatattttctctctatttgcctctatttttttttctctctttattggttttcttaaagtttattattaactgttcttatttatgatactataaatcctatatgtagtgttataaataaagtctttaatcttttatttaaaataaaagataaatatttaatttgatttgaattctcaaatttaaatataaatatctaactgaatatcaaaatatcagtagatcttttacttaaataattatttaataatgtatttaattaataaataaaagataattgacttaatttaatttaaattattttaacttaataaaataattaaatcaaattaattgtgagcctttatatgtcatcctacacgtgtgatctatattttaaggtccaaaattaatttctcaatttttccacaaataaaatttattatttattctactaataaataataattgattaattcttattattctcttattttacaaagaataaaataaatattattttctctaaaataatatatttatctctttaatattatttaataataatattatatttaactaattattataattttattcaataaaactatatttttaaatactattaattatacaatttataatttccataattaattaaataaaaatttccttgtacagtgttgtatataggtgactcaaggaccatgaacctatattttaaagttctaataaaccaaagattaccatcaattttatcaacagatttatctggttcattaattctattattacttcactataaatatgaaattgcactctttcataatataaaattatatttacaatatttttacttttagtccattgatataatcaatataagtagcttgccctccaattattaatcattattagagttggtcaaaatactgttttaccattctaatatttatctcttaattccttatgtaccattaatttaatgtgaacaattaatctttaacttattatagatttggacctaactgttagcactcctaaaattaacactataagcgaactaatatttgatttattaggaaagcttggattctgttattgtataacatgttcctagccactcatgttattaagctctcaaaaaagaatttgtaagaatcatcttctc

SEQ ID NO: 50216 - DNA, 729 bp, Cannabis sativa
ttgttacattgtcttgtaactgagattgttggttaataaaattattattttcctttcaaaaaaaaaaaacttgtcttgtaggcacctatactataacacatatattttttgagataattatgtaattatagcacgaaaaaataataaaaaaataacataaaaataataagaaaaaatattcaaacaacaacaaaaatataacatataaataataaaaaatcaacaataaattaataagaatataatataaaagtaaatctaaatattataatttcttcactcaaaaaaaattataattcctataaataaaatcataaaaattctaaaaataaatctatttttataattttttttaattgatattatcaccatcatgttattatcaaggagagaagtcaactaacctactttgggtactaggccgggaattaggtgcataattaattgctccattagtgagctaaaacacatttaggcctttgttaatgtggctcactttcatacatggccgactatatataaatacgagccatcttcctactatagagagagtcgatttcaattctttaagtcaaaatgctgttgaaatacccgttattgtgaactttcacaactctaatacagtgactctcgtaaactatagttatttatttaaccactctttaatctctgtaattttctcaaatttttggatgcaaaaaaaacttgatcaacaattattatagaaag

SEQ ID NO: 50217 - DNA, 1642 bp, Cannabis sativa
cccgaactttagattgggttagaaaatatataggataaaccgcctaaatcgaccgatgtacaaccctaaattgtgtaatgttaaagattgcgatgtgaaagggaaaatacatgtatgatgaccattgtgatgtatttacaaacctgaaccattgcccatatggatttggtcagatcctggaaactcctgaggagccattagattgtttaaatctggagttaagtggttagttgcttctgaatctggataccagctttgatcattagcagtttcaggtgtagcaaccatggcttgcatctcagttgtggcagcagatccagtaaatgattgaaaggactcaggtcatatgaatgatttgtcaaagcaaaagaatcattgtgtgactgtgtgaccttgtttgtgacacagttggcattgagttttagaatttgaggatcctcgttaagaacctaagaaaccgcaacaaaaactaccttaagaacctcgaggagagttagcaaaaagaggtgaataaaaattactatagccagtagaagaatgtggaaatccaccatatacagaagagtagcttgggtatgctcctcgaaaagatccacgaccacctgtgaaggtaccaaattgtatcggagagaagccttagtgatcaccacaagacatatgaggcttttgttgagctacaagattcacctcttgtttagaaatatcaagatcaaattcactagtttcattttgaaattcttgagccaagaacagtgatttaacttcagctacagaatattcatcttttcaagtagataaagatgttacaaaaatagagtaattaatctcacgcaagaccataaaagatcgcttcaatatgatcttgagttgagagaacataaccaatggatcatgcgagtaaataatgtgcttaatcttgaggaggtaattatttagatttctagtgagcttggtgcaacaaagttgagtgtgaaactagctaactttggcacgattttgggcagagtagtactgtttgagagtggaccaaatttgagttgcactgttgcatccaactatgcgagttaggattttttctgtcatggatgagataaaccatgagacaagaagcctctcttgaacatcccattcaagaaactcccagagatttgatcctctgctatcgtaaatttgggaggatctcttttttggattgaggaatttaagaagacaatgacctttgatagcaacataagcccggtgcctctagatcttggtaacaagttggatccattagaacgaatagaatcagatgatgtcgcatatatcattagaataaaaatagctctgataccatgttgatttggagagaacgaaagacatagcaaaatagagttgaataacagtgtactgtagtattgattgtatgaataaaattacagtttaatgataaatagatcagtgtatatatacagataaagcaggattagttaaagctaaagattagctacaaagttagttacaataatagctagcaactaaacagtagtaaccgaaagcaattaactaacagcattaactaatcctaacagtattaacaaatcatattctcaacagtgtataaagcccctctctatcagtagtatgttatcattgtttaatt

SEQ ID NO: 50218 - DNA, 1438 bp, Cannabis sativa
gaatactttgtattgattgaaatggaaaggtacaagaatggagcttatatagtttaagaatatgtggtataaataaattttttgagttttgactgaattttcactgtataaactaattaaaaaacaaatattgtactataatatcaatgaataccaaaagtattgtactcattattcaaagttcagaaattggtttggtaacattcatttcatacatcaatgtttcctcactaataaaagaactaactctaaagatgtaacaaaacactaaaaaaactaaaaaaaaacgaaattaaaattataatcttctaatcatgattgacaacttttatgacatcatgatcaattgacagcatcattttccttataagaggttcccaataataactctggatatctctatgcatcaaattcagttgtttcaaacacttgttgaattcaccattgacaaaatctaataaaacatcataacttaatgttttatcattttgatcgagatcataaatgcgtttcatgagttcttctactttaaaaatatgatcacaaaatttattgaccatattacttatatactcctctgtaattttgtgaggtttagtaccagtattcttctttgatgatctctgtgttaaccaattctcttccaactctaatactaataaaatactatctactacccttatctttccaactaattttggttttataattgttctgaacatctcaaaaactttaataattttttcatcattggcatcatcatttgaaattaaggtcaaaaaatcaaccaacatgagagaaagtttgtcggctgctgtttgagcagccacatgagcttcaaaacatttcttaatgtacttttcaccatcattagtactagtttggaatgaagagattatttttgagagcatttttgaggtttagagagagagagagaaatttctttagttattaatatgagagtattattattgagtagaatagaatgaaaataatgggttactatatatatatagggaatagtttagttctcctaacacgtacaggaattcgaattgatttaaaattttaaatgttatctttaatctaataaaatatctttgcatatttcacttcataattatattaaaattatcttaaacaaaatatctctccacatagatatatttgtattgatattttaaaaaataagatagtataaaaaaaaaaagataagatagtatttcattcactttttgaatttcagttattattttttttaaaagcaattttaaatattcaattgagcactagtggaaacaagccctaatcgcaggtcttgactcttgcattcatcgttacatttgaaaataaaatagagtcggtatatttgtaaataaaaattaaataatcgtccttccatgaagatatcagtccaccccacccttaatttccataa

SEQ ID NO: 50219 - DNA, 1161 bp, Cannabis sativa
tagtaaatctagatcatggttaaaacataattcaacatcttcgacaatgaaagttccaaggccctaggtctgattgaattgtctcaaaaaaataaaaatgaaggggaatgtgaatgtgaatgaattccatgagagcgtatttgaagacggtgaccagaagatggcattggactcctctactagctacaaacctctgaaatatctaacgtcatcagatgagttatttattttgtagtttggtttttttctcttgaagtcttttccattgggttttggacttatcctcttgtgcaatctgagttttttttttttttgtcatttgttttgactattgtgtttttgtgtattctcagagtaattatttatttgatttttaaatgttttattcaaattttcaatctcaatttttatgtgtatatttttaatttcatgttaatttttcctagtcgttgttttattggattctaagtgagtttagttctgacattaaccttaatcgataacggttttgaatgttgaatttttctatgacagttcagtgatcagtctcaattttgtgaggtgggggcagtgaagatggttttggtaatttttttttttgaaagaagatggttttggtattgcatcgccatctttcacattatcgtccttaattttggcttttatttcagttaattaattattttgtatattgtattttgttaactttttaattttttcatttaatatttttaattttttaatattaatctaatttatataattttattggtattatatatattgtttatgtcatttatttgctattaatagtcattttttctcttgattttttccttgtatattatatttttgtaaagcataaatgtgaatcttttcattttattaaattagaaatttcataattctttctttaattatttttattttaattagatttttttattattaatatttatatatacttttacttatatttgtcttatttttaatacgtatagaaattgattaatggagtgttaatttgtagtagatattaatagggaaattcaaaaaactatccataaaacactctcaaattatatccctaaatctatatctattaaaattgctcatatatgactacatttgatttttttccccataatacccctcccattt

SEQ ID NO: 50220 - DNA, 747 bp, Cannabis sativa
ttgagagccacaactcattaccctaatcaagatggttggaacgagatcaacagtgttgaaagaagcaccaccaatggtctacccattgggggcacgccagctgctggagctattctcagctagtttttaattagattctcggtgggtaccaagataagggtcaaacatgattgcatacttaagcaaatctaaagatctattagcccagctcaagcgctactccatccaataagtgtcgtgtgaacagaatgcaaacacagactcactagctaaattggctagtacaataaattcttatactcttagtgtagctcccgtcgactacctcgccaaatggagaatttatgatgactcgaagcctatcctgatgattaataatagtccatcattaatgccctgattgcacaatacttagaacaaggtattcttccaactgaccgtagtccaagagactgctgaaaaaagaagctcatttcatcatcatggactgagtaatgtccaaaagaagcttttcaatgctactattgatgtgtgtcacgaaagaagaagccaaactcctcatggtcaaggtgcatgagggcttttgtggaaaccatgctggaggacaaagcctctcaaagaagatcttaagacaagggtactttcggccaacaatgatagaaaacttgatggactacgtcaaaaggtgtgacaagtgccaaagattctccaaatacccaaagttgccccgaacgaattcaagattat

SEQ ID NO: 50221 - DNA, 1177 bp, Cannabis sativa
aatattctccatcaacttatatatattttaggtcattcctcataagcgtaatataacattacaatttgtattttctccatagttcatcaatatttgtctccctcgtgaagttgaaaaattgttggtttaactcctagtatattaaatagaatgctaaacaagtagaatataaaaaatcagtagttaaatcttaattcttttaaatggacttttgagcaattggttttttaggagtctctttactagtttttgagctcttcttaatggttttagagctctcacatttcagtccttcataagccactgattgatgctcaagctcattccttcatcttaaaagacaaggaataacttctctatacctcacacaactttccatgtccacccattcaaagaattcacaaccccctcaacttgaaattacaacataaaattctcaaaatcaacataaattattagtgtaaatcacagcccctacaaagcctctgttttagaaagagaagccaaactcttaccctttgagaagtattagttgcggaagtgtgtagagaaagagagggaaaaaccacgagagatgaatgagaaaaatagagtattctcattgattgtaaatgtgtacaatagctgagcttatatagctcgagaaatacaatcagacagttaacattccaactatctaaaccaacagacttaaccgactaatcacactaactctaacaaactaactaactttgatactccccctcaagatggatggtatatgtctaccaatccaatcttgtctttaagaaccttaaactgattaggaaataaggctttggtcataatgtcagctagttgttctttggtagaaacatgtatagtcttgattagtccttcttgaaccttttctctcacaaggtgacagtcaatctcaatgtgttttgttctttcatgaaacgcgagattggctgcaatgtgttgtgcagctttgttgtcacagtacattaaggcaggccctttgtgttctatttttagctccttgagtaaagataataaccaaatcaggtcactagttgtatttgccattgctcgatattcagcttcatctgaacatcttgacacaatatgttgctttttgcttttccaagagatgatggagtctccaagaaagatgcaaaaacctgttgtagatctc

SEQ ID NO: 50222 - DNA, 1012 bp, Cannabis sativa
ggtggctacatagtagaatagcgaggctagaaaaaggtcgtgaaggagataagagaaggagcaaagaagagagcgtttgaagaaatgaggggggatagctttcttgatttggcttagcgtgaatggtggtttggtgtgtggtgctcgcttaaccatgttgtttttgttgcgcacatgtgtttggtcgccaagttccatttttttgttccttaagaaggagagaaagcaaagaaaacaattaaagtcaacaagatctaaaatcacggtaaatttctatgtatgaaactttgtttaagaatatatataactattattttgttattttgttaaaataatattgtacatgtattatagttacttactttgtacatatatgaatagagctctaaattaagtaaatcaatataatatgtaaaataattttgtatatagaatgatcaaataataatatttataattatggatagtacttcttattgctattatctgaagttgatacgtttggatgttagaaatgtttttgtaccaatacctctttattagaatacaattaatttggtatcaaaacagattaaaaaagaattattacataaatacacaaaaaaaaaaaattacaaaaatacaattatacgaaattttaaatatttttacgatatttatgaatttatttatagaaaatacggtattttatattgtaatcttattaatttgttgttgattttttgttacttgtatgttatttttgttgtagttgatgttgcatgtttaaatattatttttatgtaattttcttgttattttcttagggaatgtttttataaaattctgtaaaaatatatataaaaaattgaacgtaaattttacaaaaaaaataatgttttatttaattatctcaataaaaaattggatatctattccatataaagtgtgcatatataactgaattcttggtttatgagaaatttgtgggttagtttttttttaaagttttctattcaaaaataatagtttt

SEQ ID NO: 50223 - DNA, 4904 bp, Cannabis sativa
tactatttttcattacaattttataaattaaggtgtatatggaacaatgaacattttgtctttttcttgggggattatttgttctacaagcaaaatctaacacaacacattaataattacatattgcatgtcaggataatgtaaattatatataaattatattgatttttgacagatttattttattctttttcaacgcaggtaagatgttggtgttttgtttacaattgttatttgttccagatcagctgtttttattctcaaatacaaaatatatataactatccaatatttatattacatattattgatatttgttgctttagagaaggggcgcagtcctgctagctataaaccaatttaactccaccgacactacttgtcttcgaaaattactttattgtcttaattgtaattgtgattttttagcatgattgtacttatttactcatttatttgtaaagttataatggattttgaccaaatgttaaaaattttaggaatttttataaaaaaaaattatattttatttataattttatgatttaaaatttttatttataaaaatatatttttaaaattttaaaattataaaaatacaatgtttaataaaaaataaaaaataattaaaaaaaaaactcacgataaagtataaactataaaacatttaaaaaactatttgttatttttactgaaatatgtatttttataaataaaaaagttatgtatcaacatatttttgtaattttattccttcaaatttatgtaggttatagtttttaagaaatttttagtttatactatcacaatacgtatagaaaattacaaattctatctttagaaaaattagaaactttagtacaaaaatatatattttaagagtttaattattataatatatattattacattactcaaagcatttaattgaaaaatatatcataattcaaatttgtccggggctttttcttttcttatttctttttaaattagctaaaatatgtgtaactaaaataattaaaaaggaatagataacaatttttgtgtgacccccacaccctaattgcatttactttaatatatatttatttttattttttataatatgatgtaacttttatctaacatttaccaaattctatgcaaacttaccgaattgtttttttttttttttttttgtctctaagatataaaatataaagttcaaatatgtataattttcataaaaaaaaattcatatatataataaaaatacagaaaaggtcgtcgattatgctttattccaattaagacacacacatatcagaagggcccattttttttttccttatagtttttgtgccatttgtactaaagcatacacataaatcaacttatcatgagccaagaaaccttgcatattattctttcttcatcaaaagtgtccaaataatttaggcaaaagcatattgataattttttttctttaactaaatggcctctctaattagtcttattttagcatctcaatcctttttcaccagctatatatatataaaataaggaaaatgggaactttaactcatgacatattgttattaattattacattttaatattgtatttcatacattagtttaatttgataaataatataaataattgataattaatatacataaaatttcaattgatattgactacatagtacatactcaatattcctctatctctctctactgttacagatagttggatttgacactttaatactacgggtcaatattcaattcaatcgggttattactttgcaaattctattgaaaaggttgatctaaatctaattttactaaccataaaacttaatggaaatacttttggaatctgaaccttccttcactttccattgaagaggctgatctaacttctaattctactaaccataaaacttaatagacatacttttagaatctgaaccttccttcaaaagtgaatatattcgttgggaaggtgtttcacaatgctataccgtctgcctgcctccttgttttctcgaaaaattattaattctacaacttgcagcctctgtacaaatgcttaggaattggtgggacacgccatgtttaactgtaaacatgccagagtaatttgaaaaatagcaagaatttctattatgattaagcagctttctatctgcaaattggtgattatctcatgtttgtatatttcatgttaggcgagatgctaactaagctactcacggcttggctaaacatgctctggtgtcgaataatgattgtatgtgatctgatgaggaaatctcccctgccatcttctctgttgatgtaaatgattctttttaatttataataactgatctttctcaaaatagaatgtcacattaattgatatattattagactattgatatattattagactctttaaaatattaaataacaatgttgagaatataaaaagtccactaacactcaaaagagttggtatgaacgctaaattgtgtaaaaatctgatctttgcgttggctcataataaccatatctctgatagtggaaaacctactcaaatggatcttttttctagtatagtagtagtgcgtgattgttaattaagtactacagtatgtacgtacaatacacatcaatttactgataattattatcatataattcaaatgctttttgactttatatgcttcactggcctttcaagattaataatttgagcctctacctcgaccaaattattttaaatatttttttttttgatatatgatatttcaaatcaatatgatttgagtaaatattgaacttaattttaatacgtacgttcttacatatgtatagtatagatatatatataaattttgtatctgatcatgcattctatatttatataataatagaaacatttacatacttaattatataacatatatatttgcacgcatctcatacatatataagctagctgcatgcaagtacgtactagcttattaattttttattttgtcaggtatagctagctaattaatttgttattaataattacttatttaattacgatcaaacattaatataattaatacaattaattgtattataattaattgactacagtttataattaaatagatctataaatactacaaaaaaaatattagtaacacatactcagcacatcaaattaatatcaactttaacacaacaacgataataacaactttctagtaattattattcggaaaatattatgtaaaattatttaaaacattaattcactctttataattagagtttttgagaataataattgtaatttaacgaactttttaatttataaataactagacgttatagtagttctttatttgtgcagtgattttaaatttatttttatgtgggcgcaatttagatatattttttttaattatacattttttaattttattttaaattttttgagttattattgatgaataaagattgtaaaattttgagggttaaaataaagacataaactaggacattactatataattattatagttttttgtcattaaaccctctcaattattattctatttgcacaacttaactttcaaagctcaaattttggtggtaaaatattgcaaagtactattaaacttatagcaaatttaaagtgatataactgctaacatggactgtttatgtgtacacatatcacgtttatactaatacacctaatattattatttaaaaattatttaaaatttataatattttttatgtgtacaagagtagacataagtagtccatcaaggcagctatctgtatgacactttaaatttactaatagcttaaacgattttaccattaaaattgaaattttgaatattaagtgcaaataaaacgataattaaataataaatttagccgctgaaaactctaattattatattgtatatagatgtagtactatgactgaatttttaacaaagatgtaattaatataaattaactgctgaccattaaattttatattataattactgatcatgtttagaatataatttttttaataataaatattaatcttacatatataagtttcctatagtaagttttactattttgtattttaataatgaattattatagcgcatgctcctttatccattaatatatatttatattttcgtagggagcatgtgaagtttgtcgtatgaatataagtattgactgtcgtcttcttccttttttatttaatattttgactgattcatttcctgaattcttcacgtgtgctacttggtagagcagatcatagttgtcatcatcatatatactctcaattctagtatatataatatctaataattaattttttattttaaatgtatgtatatatttgttaattaattaatatattttttttttaaaataagttaattaatatcaattaatttggctcactatacccgaaaatgtttattaattttctattattattttaatctcaactctgcatctcatgaaataaatatgcaacaacggctaacaagagtagtacactcttaattatttaaagcttggatttatttatctgtctttcccaataaatagcagaaataatacgtatagaaagtctgtatcgatcgttggaagttgatgaaatcaataaagaaatattattgtaattaattgacaagctaatttaagacccttgttattactgcctgctgaagagaccactgcccatcctcaatattgtacgtagtacgataaaaaaagaaaagaaaagaatgactaagcttaggttaaattttcatttaattagcttttactgtacttacttggaaccatctttcactttcacagccacgtactgtcactttcttgaattcagtgttagaaaattac

SEQ ID NO: 50224 - DNA, 2441 bp, Cannabis sativa
  modified_base (2223)..(2224): a, c, t, g, unknown or other
tgtttaatcctggctatcttcgtatggcctcgatatgtaagtatcagaattttattttctttatgtcaaacccaagtatgcctactttgacttaaaggtaggtttagtagcttattatcagctttaatttctcatgttctctatgctagtttgatgcattgtatagtgttggtgccccccaagtgaacacgcagacttatgatctcttggtcacttgcaattcaataagttcacaaacctttcctgggactttgcttggggtgctacctgttatacggatgtggaactgaaaaaggataaatttaagaagttaatcttattagcaagtggtttaaacacaataaattaggcataaacattgttttttattcattaattggtctttgttgttgtgcaacttacataaattgaaatgtaagttaacattacaaagtttcagcttttagatatgaagtggctacccctacttaccttgcatagccaaggccaccgttgaagaactgtgggacaccacacccaaagggctatgataactagctcttttgtactaggatgataagtaagtaaaactgctactttagagtagtgttctataagctaactactgatagtatttacaaaggttttatccttaccaatatcttggtaggagaacgagctctatcttcttgttgtaccttcccatcttttagactcccttactagttatctctgtaacttaataggggtattccgagataggtctggacactcctactgatgaatctttagtgtttaggaacactcatcggagcactaagtctcttatgaagaacttactatccttgacatgcttattgaagtgccttgctaccttttgccggtaggcctatagctttaggttggcttgatctcttcattcttcttcttcgtcaagggactttgtcgttaggttgttgtttgtttgctagtcataggttgttctcttgtgagatggtggcacaacctctagaggaaacattgcctcatagccataagcgagagctaataaagtttacccagtggtcatcttctcggtagtcctgtgcgaccatacgacctcttagaacaattcaagccagttgccttttgctttctcaaagtgcttctttagggtgtccttgagggtattgttgacagcttctatcaacccattttcttgaggttgggccatgacaaagaagctgttgttggaggaatttggacaacaccaaataaaataatatatttaaaatataaatagaattacgtgagtactcaacctagaatggcaagtattcaaactatggatagacacacgtattggaaatataatgaacacaaaggaagtatagtggttcagtcagatcactgtctgcatagttcatgttggatcactcctttatgtacaacacaaagtacgagttatctgttcatcttctcacataagctcgcaggcttaagatacgcacaagactagtcgagtctgagatgtctgcgtcctgttcaagtcacttatacggatatcctgcaataagtcgataacctaagacatgagagtcttgatcaggttatcgaggttgttgggtcattcgaactagctccctgagtatagaatcgatctctactacttgataactttatggtatagagttattttttatgccttaaatctaaaaatattgtgaggagagtagtgaaaatgtgtttgattgcttaattttaagtagttttggtttaatttctaattagtaagctaacttttgagtcttgtaaaaattattgtgttaattgtcttttttttattaaatgttgcttgtttgttgtgggaaagaagaattaacttgataggaaaagggagtgaagcaaaggaaaagtttgaacaaaagctcaaaactgggcagaaatgctgaagcaatgttatagcattttaggcaggttgagaaaaaacgtgaaaaaagtctaaaaaacaactttcacttatccacatcagcaaattcgtcccagtcactcaaaatgcaccagctggctactgtggaaagaaaaagacaaaatgtagtgggccaaagtggaaaaagattgggcttctatttttagggtatcattttgtaccctaaagacccaacaactaatagaggagaaaagcaagtacaccatcatcatctttacaataacgtgcagctgccattttgaaattccatattttaatattcccagtttaattanntaattaagtgattaattaaatgcggaataatgaaactggtactgaaatcagtttttccgtagataaagaataaaactttgtaactccagagaaacccagaaaaacaaacagtgcataaaagtaagaacacataagaattttttacgtgatttcaacaatcctttcagattgttactagtccacgaggccacgcccagagataagactcattagatcg

SEQ ID NO: 50225 - DNA, 632 bp, Cannabis sativa
aaggccaaggtggcccaaaccactaggtctagcaattccataaggtcctcactacctccccctcctctagggtctacaccggctggtcaaccaatgactgtagatcctccatcgaggaggaccccacctccatgtcgatctttgggaaaggcagcttagaagtctggtcgtggggcatctcaaccaccagacagagggttattaaggttcctcatagctaaattggcaatagtctggccatcattgatggggagctctagaagctagaaaatgacgagttggactgtctaacgtctaattgtctccaagacttgactttggtaagttgcatatttgatattactcaaattgttacaccggtaaaggctggcgggcttggtatggaacactgtaatgttatttggctgaaatagaatatagtttatgcattatcatcacttattcaaaattggaaaaaacagatcaagaaagaggaaaaatgtaagctctctctctctctcggttttcttggggctgttagggctgggatttttctattgaaattcttgttaattcagctagttggcagtgatcctaagctaaggtatggttcttgaaacttgtcttgttattttcttgaatttttgaggaaa

SEQ ID NO: 50226 - DNA, 806 bp, Cannabis sativa
gcatttatttaaccatagcaagaaagagaactctaagtcttaaattaattaattgattaattataacgaaaatgacgaaataattaaatctccatatagaacgcaaaaaaaaaaaaagtaaaatataaatgaaaatcttctcaagcgtgtgaacataaacaaaaactcgtgcgagtgaatttaaagaaagctgaaatggcaaagaaagtcaaagaaagacactcaccctgaatttcgaagcattcggactcggtccgatccgagaacccgactgtgtaattcggatcatcgatggacctaagcatgtactgcttcttgccggccgattcgttgggaacgatacaagcttgtagctcagtgaactcatcccggccacggcgaactcgtacatgaattgaagtatctttcgccctaaaagagttgtggagaatcttctggactccactccgaccattcttgaagggggcttttacggtgattgaggttccgattcgaagctcctcaactatgtcgccggtctggagcatatcatcggtccattcatcggccttggaggtccctttgaggcactcgatcgataacaccgtcggtgattttgagtctctgtttggtgagtctgatgatgatgagttggtctgcgatcgatccatggtcattttggaactctgcaattacacatctatatacatataaatactgtacatatatacatgaaaatgaaagaaaaggtatatatatagtatatagatatagtactgttatatgttgaaggcaggggactattttattctacaattctagagaga

SEQ ID NO: 50227 - DNA, 1421 bp, Cannabis sativa
  modified_base (1105)..(1113): a, c, t, g, unknown or other
  modified_base (1203)..(1229): a, c, t, g, unknown or other
ttaatccaattccctgtgggatcgacctcacttgcgtgagctactacttgactgcgtatacttgcgtagtgtttataattttcgtaacaagtacatgcctctctcatctctttgcacttcgatccctaggaaataatgtagggaactaagatctttcaaagtaaaaactctgttcaatttgctggtaaattgcttgtgtttatctgagttgttccctatgacaattatgtcatcaacacagataagcacaaacacaatgttagtagtatttctataaaagaatagtgaggaatcagccttggaattgtaaaatttcccctcaagcaaagtttatttcaatctgccaaaccatgctcttggagcttatctcgaaccatacaaagattttgaaagtttacaaacataatcaggataatccttatcttcaaaaccagcaagttgagccatatacacatcttctatcaaattgccatttagaaaagcattatttatatcaagctgtgtaacctcccatgactttgagacaactatagttaagataattctgactatacatgcttttacaacaggactgaatgtctctccatagtctatacaaggtgtttgactaaaccctttagcaaccaaccttgttttgagtctttaaacatatccatcagagttaagcttgatactatatacccacttgtttcctacaatgttcataccatgcatctttggaactaaaatccaggttttatttttctttaaggcatagacctcttaccccataacattgttccaacctgcatgagctaaggcttctgcaatagaactatgcaattcatgttcattgacagtgataatttttaccatttaggtcttaggaataaaaattccagccttagctcttattaccataggatgaattgaagccaaaggcgctccagattggtcattattctgattctgatcttgctgatcactacaatcattatcttgttcagctaaatcactactagaattttcacttggaatttcaatgttttcatgaacatagctgctgtcattgggaatattttaccaggatctagatttacgaacaagtatgttgattaacatcctnnnnnnnnntatctctaaaacaataaaattaaaaacataagaatttagaaaaccttacattgattgcatcgaaatataatgactccttccactcagatnnnnnnnnnnnnnnnnnnnnnnnnnnngagtattatcaagatttgagtctggatctctctctctcctttgggttggttaccaccgtcttacctactatgattgagtactttacttgctatgtgtgggtatggcactctatcattataagctctagtatgaagaacaatgaaggaggcttgaaaatcactatagaaggtgtctttcatctactagttgtc

SEQ ID NO: 50228 - DNA, 819 bp, Cannabis sativa
tgcactatatggtcttgctagttaatcaaccaagtttcaggcactattatcttcttcataagttttacaattggaaaaaatgtggcagattaatctacttcataaatttgagtaaattctttaataacacgacgagctttaaattgaggaactgatacatctaaattggctttcattgtgaacaccattttttatcatataaccaatattcttgctgattaatcaatcaagtctcaggtactattatcttctaataagtatctccttaattattgtactagatcaactaagatgagatattgcttcacaagtaattttagaaataaacataaaatcaaatattaaaagaacaataggaagatgagaaacaattatatgaaacaaaagaataaatacgataaatattgatgttcttgggcgggacatgtggtaagctcattagtattggtgtgacatttagagtctcgtgatttgtaaggaaaaagaatgagtaagttgtaaccatgtaagtatgagactacacaattaaatagataaattgatatgtattacttatactaataagatgcatctttttttcgatagtccatcacttaattaccccaaaagtaagccgcataatttggagcaattttaggatatgtcaccttgtaagagatttttttaggaaatatgcgagtgaggacaaagcatactagaaatattcgtgtaggtttgcagaggtgaggacaaaacacgtttcaaagactcgtcttagtttgtgggactagtcgtcatttcaaaatacaactaaagtgacatacttgtgtatactaagta

SEQ ID NO: 50229 - DNA, 977 bp, Cannabis sativa
tttctttcacattctaagtattttttttgttatggcaatactaataagtgttttatttgctctcttttcactaatttccttaattttataatttctaaattatttattattcaaacacaaataagaagtttttaaaatgaaattgtgacaaggacccactcttctaaaaatgttcttaaaatgaaaaacacaaaaacaaatcaaataaaccatattatataaagtagagaagttcttgaatgatcagcgacagtctatatacaaacaaataagaaccaatacaaaaacaaaataatataataattaacatctaggtcactattatatgtttaagggcacgtattatttatacttacatgtgtctaacattaatatatttttctttttcattaaacagaaaaaataatgaactcggtggtttcgtaaccaccagagtcattcctggcaccacaaatagtggtgtcggttttcaaatttacatccgaaacaatgctaacatgagtggcggcgctgctcttgttgccggcctttttcggagccttgtagtagtagtggtggtggtagtactcatgatcgtcttgagcattattatgatcaggtgtacctgaaggaggatgatagtagatgcgtccagtttgaggacaacgggagtgaaatcttgcagctattcttacccccacatctaataattctacaaactttcccatatatgactagttgtatatataactctgctcagttatatttgatctttataatttctgtctatataatatgaaatataatgaatttctgcaatagaagaaatcgaaacagatgaaaagtatgcaaacaaactaaaataaaataattgaagttgagaaatgcaattgggttgaagtactttttatagtctctccaatttcttgtgattttagttgactttattattacacttaatttattgtcatacaaataggccgttttcattttatccg

SEQ ID NO: 50230 - DNA, 3717 bp, Cannabis sativa
acttggtaaattctagttctacttattggaagcttgattatatatgtactcgagggaagtactcatactgctggccattagggcaacatgcaaagtaatagcccctttcatctcggaagtatttttgagtatgaagtggttcattggtccttacttgttcatagcctctggtttcaaagtaaagtcttcaattacccccttcattttgagtggcaggcccctttccctttgtagggtcttgaggcctagtgtcatgagagcattgaggagaacctaatggaggagtcttgttagatctctctgtattctgaggttgcctatcggttggtgcccgtgagtttgagtcctttcaaacttgctcgaagttttcttccctttggggggccttagcaactgctgtttacttagtactcatacggttaccaagcatggtagtagtgttcattgcgttgagggtttccccttgagtaatagttcccacgtgaccagttgatcgatgtggaatctctcttaccaactcagaaagacctctgcagggggtagttctgtgaccagagtgatagtcttctttgattcgttgagataggttagttctcttttgttcctgcttaacttgttggctctcaatgttccaccagttttctatgaattaattttgaaactactagtgttgtctgtcgatagagtctcacatctgttgttgtagatcaaccacaatttggctaagctattcaacttgaggatcagcctccttcgggtcttccaactccatgtgtggctctctagatagaatctactcgtcaattccagtaccaagagtgtttagtggccttgagggacgagctatggagctagttttggggcctcctcctagcagctgaggtgtaggagtagtcctagttcaagcttcagtaactagcgtgcccccaatctgctggctagttgttggagctcctctatcgacgcttgaggagcatgttacaaccatcttgttagtgacttccttgagttgtagctctcaatgaaagcaccaaaatattgacataaaaatttggacataaacttctaagacacacctgcttgctagattggtgagaataaaatatatgtcaagtataaatagaaagacacaacaatttgtattagttcactccctatattgtgatagtaatggggaacggtctactttgagtttttattctcacgagacggatgactaaaaaaatagctaagtctagattctttaatttctagagaaagaaactaaagagagatgttctgactttgtggctacttttctgaatataatacatgagctagtggagatctccttttataggtgaaggaagtcctattaaatatgaataaaataatccaaaacatataaaaaaaatatatttagactatttttgactataaataatgatctaatgatgaaaataacttctgaggttggtcatcaattttcacagctcgagtcgcgatggcgtgacctgctacatgtaagttgtagcttaaattcgtaactccattaggggtgaaatttggagtcgatggcttcaaaattacgattgaagtgtgagacatcacttgattaagcattgaattagcttgaaaaattaagttgaactcatcaattagatcaatattgagtgagttatgactattttttacaaaatgttatttaggacccagtaaccaggttcacatctcaatgcccaggttgacatgttattttaacctagtcactgggtgagtgggagaacatgtcagggatgtacttatttaatgccaaagtgataatttaacatcacttagtccatttctgtgttctagtgaagctggtcaccagttctcgaagatgttgttgttttacagaaatgggagactcgaaactacctaatttctcaataaatcaccttgtcagaaaagtgaaaatatgaagttatgaatttgactattctgacttcatggctctcggttattatgaaaaaatagacaaacagtcaagacaaaattcaataatagcaaacagcacaccaggccatttgtcaacctgggcgctgggtgcttatttcagagattctgagatgtcgttttgatacttccaagtatctagaacttgaggaggaggtctcttaccatgtttttgataattttggagatatttcttggagcaaaatatgaatttggatgatcaaaactagagcaccaagttgaatgtcatcctaagtgttgggcctaacaccaggccagcctaggtgctgggctcgattttgatgcccttacaattatggtttctccctgagtttatttgtatccttgttatttctgatgactataaaaatgcctgaaacattatttcgagaaacttattggaaacgacccattttgacaatatatcaacctgggcgttgggtccaacaccaagtgtcaacctaggcactgggtccagtttcaggccatttggaagttctgtttagtccccagaaaatagttgaatcctaatctttgttgaaaacagagaatatgcccagaggacttctcagaagaaccccttagaattggtataggttaacaaaatatcaacgtgggcactgagccttggttcttgcacctaggatgtgttgtttcttccatgaaagtacttgtttccttgttttttatgaagacggacaagatacatgagttgattttttatttgatgcttgaagtggcctattttgatagttgtcaacctgggtactggggtgtccgggcattgggtgttcgggtgctcaaaagtaaaagtttctccaaatctgattgtgacgcctcaaatatgtttattgtatgtctagttcatgtctcaatgaaaagtttgacctattttcactaaggcggtcctggaaactaaaactctagttgaagttgtcaacttgggcgctgggtgaaaccctaggtgcccaggtaaacttttgaggtgttggttcatgcattttcagctccccaggcctggaattgttttctccatgtcctcatggtacaaaatactaaaagatagtgagttaaaaataacttaaccaaatttgaattttcattctagagttctcgtagtcaacttgggatagggctagggacccctcccaggtcgattgctatgactcaggactactcaactccaagatgttatctttcttgccacgtgtcaaacattaatatccgtacattactatgaaaagttttcgaattaacaatatagatagatatagataaatattttttaaaattttaaattttaaattattttttcgtataacttctgttataaattttatttgcatacatataaactttatatatttttttaaagtaaaaaaaaattaaatactattttggaccctgtgttttgtaaaaattactaattgcaccccctgttttgttaaatgacaaaatagactttatatttttcaaaattgtacaaataagaccctgaactaattttgtatcaaaaataataattcgatctagagatattatgacaagactggttacattttctatgtctgttcgtgttaaaaattatcttaaagttgattatattaaaaaataaaattgttaaaaattgagctcagggtcccatttgtacaattttagaaaatacaggattcattttatcatttaacaaaacagatgatataattagtaatttttacagtctaaaatagtatttaccct

SEQ ID NO: 50231 - DNA, 1470 bp, Cannabis sativa
attggaataaacaactcagaaattctcattcactttctctttctctcttcatcttcttcttctttattctcatctattttatattattttataacaatatatgtattcttcttttttttacgcattgtttttaaaaaatataaattttaaatatagattaagattcttttaacatgaatattataaatttggtaaatgattataaatttataaatataaataaaataaaaaataaaaaaattaatgagagaatatagaagatataggtttaattattttataaatgtaattataaaaataaaaaaaaatgagagaattaaaaaaaaaaaaggagaaaataatttaagagtaattttagaacatcacgacactatttatttactttttttttttttttgaacgaaactatttatttacttattttgaaagccgtcacgccactactttattgctgagctttatatatgtatagataggtgtaaaacttaaaagcatgtatgatataaaaagctttttttgacctgccacataaatttgagaagtcggtttttttttaatagtccaattttttcatcaataaaacagaacaattaataaaagtcaattcttattataaaaaccttacaatcaaaaaaaaaaaaaaaaaagaataccaggcaaaatattaaacatatggacaatacatataattagtattataataaaataaaatattttgttagtaatacataaagaaatatatatggggtgaactaaaaaattttactaacaaaacacacaaatataaatgaaaaaatatagtctaaacaaagtgtgttgtgttcaattaagaaaaatataattatactgatatgaggctttttatttgattcgaaagataaataaacaaaaggatgagaataaaaacaataatctgtacacgggttgagctttatgagagagagagtgtgtgtacattgatgttggtaaacatgtgtctacatatataattaagctttaaaaaaaatagccatgcaattgcaaacgtgatatctttattaaaaaaaaataataataaaaaataagagaattaatagaaaataaatagaaatatatattttatattaattaatatttatgaaattaataaaaaaattaaaagaagagaaaattaaattaaatagattttagaccgcctcatacttcttctttatatatatataaatttttttgattaattaaccaaaaactgaaaaacaaaattacaagaatttgttaagtgaaattgaaaaaaataaaaaacaaaaaatatacccaacaagcgattatttatttttgtgtagaaaaataatactttttagaaagtgcgtattcctcacttgtaaatttggtgttagagattttataacaatagaagaaaatcaagatttattacaactctattgtaaaataatacaaggactaaaataagaaattgattaaatatatgtt

SEQ ID NO: 50232 - DNA, 982 bp, Cannabis sativa
attagcattcaaaagtttatctatatccttttaagtttccactacttgcttagataataacccaaatctttgcttattccaagttgaaaggaaatttgcatagtattcaagagattattaaagtcccaaagggtcagcctcatctaccatacatctttgccaagcctcaaacataatggttcgacattcttctttttaagccaatatggttcaaagcagaactattgcttaactcgctcatgacttcgtacgacaacattctcaagttttgcgactataggatgatggttagaacaaagaaaatcaccatgtggaacactcagactgaaggatacaacttagaccaagcttaattgcacataaaacgatctaaccattcttgtacatgtgaaataccttatcttttattcacccaagtgaatgtcggcccttcgtatcccaagtcatctagcatacagtcatcgagaactttttgaaactcactcatcgccataagatcgcggtgtgtcccaccttttttttttcatgcctagataaaacctcattgaaatccccccacaaatccatggtagattaaagaactattttatacgcataaggagtaaccaagactctttttgaaggtgggttttcaggttgccataaaatttcatgaatcaccacaactcactccctgaacattatacaagagcatcatatatccaatagagtagcttttaacagtaacatcccaatcatcattccacattaataagattccaccaccactccccacacaatccacatgaaagttatgtcttcgaataccctctacccaattaccacaaagcttagtgtcgaacaggaagaccaaacttggggaatgcttgtgcacaatagtccgcaatccatttactgtactgggattccccagaccccggacattctagcataagatgtagggttttatgccctaaataaaactctttacaatctgattagt

SEQ ID NO: 50233 - DNA, 2422 bp, Cannabis sativa
tgagttaagtggcagagacaataaccaagtatttgctcgttccctaagtaagaatgggaacaacctcaagcaaatagcaacgtcactaacttcattcaccttgaatgtttggcaaagctttaagaagttagttaaatgcatgttgggatcttctgacgacagtcccccaaagtggactgtagattgaaccatttgaagtatggctgaattgtatcaatgttaatgggaggcaggtggtcttatacaagattggacccccgttaatgccagtaatacatagtccctcaggcaacggtcaggtggattgcaaccattagcctggtcttttacaacacctttattattgccattatttgctgtaaacacttcttgttcaattgtttcaacaactatttctaatctcttgtttttctatttcgtctgtaggttttctcaatcttaggatcaacaggcactcttgcgcttagttcttgacatcgcataaactaaaagtacctgaaataagataagaagaatttaagaaaaataggctggagtaaaaaaaaaagaaactaaagtagaatttaatctagttattgtaatatcaatttaaataattctttggcaatggcacgccaagcagtactcacacatgtgaggtcgaaccataaggaattgaaattgaatatgactaaattagacttatatttttatctggttaaccaaaataatcttgtaaagaaaaataagaaaattgatagaaaattagaaaaaatgattaacgttgtttaaatatggatgagagattaggaatatgaatgcagtcattttaattacctaattgtcaatactatttactaatcttctttctttaagtgatgacatattatataaataaccctaactcttctcaaatcattaaggtcctaaacaatatatcatctattgcatctctgagaaagaataacatatattttgcattatgaaataatctaagggtcatataagctttgtgaatactctcgtttcacatctagatgtttgtttgtttaagtagaatcatagggttttaaatatgaacaaaccatgttaaaggtggacaatctaaaacttgtattaacacaaatatgaataaaccacaaaaatccagaatgaagaaaaagtaaatcacattaacaaattagaataaaatcaatcaacagtcatcatattcttaaatttagaaattagttcataacttcaacaattaaattcgatccatgtttaaactaaaaatagaaattaacataagaatttaaaaagagaaaagaaagaaactagatggagaacttgatcagatcgccacgcttgtttctcaagccttttttttttttctagggttctatttctgaatcattggcataaaagtttgaaactctcttatagaaattaattttacacttcaaaacggctaaatatagtgacaccctcgagtcaaaaatcaatgttttcgttgatgatctcgccgtgaccatagggtcttctcgtcgcggcaacaattagtcgtgactaaattagtgctcgctgcgatgagcttcaagcatttcaactgatattttcttcagttttcaatactcgtctcatcccttctatatttgatagattttgcactttaataccccaggaacttgaaatcaagaaaaacaagcataaaattgtccaaaaaataacaacaaagaagaagaaaaataactctaaaaagggacgactcaaaaacttaggctaaaaataacctaacatatgtcgacgagaacaacttcgaaattaacctccttctcgtagaggccaaccacacctcgttggaaggcagtggagagaccgagagagagtggaggtggttgtggtggttcgtttcgtcagggagggtggtcgacggtggagtttcaatggtggagagattgaatctatgagagtgagagagggaggagtgagagtcgaagattggaatgaaatgaatagatctatgaaactttgtggattttatattagaaagggaattaccgacacttattaaatgttgccccgtttcaatttttgaagtgttttaaatcgttagctattctcaatgactatttaaaaccgacaagccgtgtattttttaacactactcacttaattttattagtgacaacccttaaaaaattctaattttatatgttataatgcatatacttgatgaatttgctttttctcctttgactagccttgtcattagatcatccacagatgtattcttaactccccaatccacctactgcttgatttcttttaaacactcatcactcacatgacaattgaagaacacatgttttttgctttttctgtgagagccatacataacacaatcttgatgatcttggaccattttaaatatgaatatcaatttaaccatgaattatgaaaa

SEQ ID NO: 50234 - DNA, 3396 bp, Cannabis sativa
aaacacatctagtcacaacaaattataatttttgtgactaatacattcagctacggaccttttagtcacaacataaaaataatcattataaattagtcacaacttctttacttttagtcacaaattttcttgtgactaacagtaaaaaaatatgttgtaatttttaaggctcaatgtaccaccctactagattatgcacatgatcgtaatttcaaattactgtgcactcctttactaatcaaggatttactgaaaaatgtgaataattagaaattttataaataaacttaaactaaaatacataattacaatacacatttcgagatcccattttataagttacaaaagtttacaaaatacttgtactacaaaagttgtcccctaatgactatcaaaataaaccctaactatcctcgaagatctgaatactccaggtctaactgtctcgatctgtacaatcttcatctagcctgagctcactattgttcagacttcgctttgcttttacctacacatgtaaacagtatcagtgagtcgacaaaatcaataacaaaaccctagcatatagcctagcatactaggtctagaatgtttatatgataaagcctagcatatatccgttgacatctgatgcaaatttatgtacatcgatatcgctcttactgatatgcctagctaatggctttgtaatttaacttaacatatattcatcgatattcagtgcagctttatgtacactaatattgcttttactgatatgctatctaacaggcaactataacatgtaagcttgcatataattatactaatcttacctcaattctgaatttaagtgtgccggtcaacttgagtggaaactactgctcgacgatttaaaggcccctaagtaacaacacatatgaactaataagtgatccgctaaatcactttttgggaacttagccttaaaactaagttctttagtcgataaatagcaaggcaatatcctaaatatcaaaaaaaaacaaagaaaaatgagacttcaagaaaataccccaaaaaatagcagaccatttttttgggtccatgtctactaaaaacgatagactgtttctggaaaaatggtctgccgttttctattacaaattttcgtaaaatctcatttctaagtcaaatctatcccaaaacttctataaagctccagaacacctatttaagtcataactaacataatccaacaaaaacattcattatcaagcattagaaataaaatccaccattaaagacctaagtttgatcttaaaaggtcaaactttggtcaaaccaacaaataccaacacaacgagcatataatcaacataacaaatcttaaaacaactcaacataccctaatcaacccagctcttacaaaaaccaaaacccaaaaaatatgtataaaaacccaatttcaactaacacaaccctaggtttttatgctgcaaactccttgaattctaatctaaaagtgaaaagagaactgatcttctctttggttcttttaaggtcgaaataaaggagagagtgaaagcttgatatcttttcttaatttttagtttttgataaggataacataagttaattaatttctttatttcaacttaaactattcaatacactaaggattacatcaaaagtcccattaatctactaaaggcaaactaaggccaaaagactaattgccttttacttcaatactaagaaatctaatgatatagggataaagtagtccaaactataatcttaattaatctcgacattctaaatatgtaactattttaccccgctaaatctaagatattcaagtgaatctatgtgactcaaattggccaaatcgttgcattctactactaccggacataaaatatgaaaaacatgatatctaatatataacataaataatacacctagaattcaaatatatctccataattgcaaaaataataatttaaagcctattttaacaataagccctaattgtctattaattcccaaaataaagttaagcggtcattacaattatctccccgttaaaaggatttcgtccttgaaatctaacctaaactacttctgttcctccagggtaccttgaccaatgctatggtcttatttcgaagaactttgtccttcatatcaaggatctggaccgattgctcctcataacataaatctggttggagctctagtgtttcatagttcaagacatgtgtaggatccaaaacgtattttcaaaacataaaaatatgaaatacgttatgcactgttgataatcctggaggcaagggtagatgatacgctaccaatctaatcttcttgagaatctcaaaaggcccattgaatctagggcacaacttgccctttttcccaaaatgttgaacccctttcattggggatacccataagaagacatgatctcctacctaaaattctatatttctgtatttcgaatctgcataacttttctgcctactctgagaaggaaatattatggccttgattttttttatcgcctcattggtccgtgaactgattctggacctacgtattttctttctctagtttcatgccaatgaattggtgatctacatttttttaccatacaacatcacataaagagcgatccctattgtactctaatatcattgtcgtatgaaaactctatcaattgtagatactttctcgaggagccttcaaaatccatcacaaaatcttgtaatatatcctccaatatctaaattttcctctttgacagaccatctgtcagaagacggaaagttgtactgaactttaactttgtacccatggctcgttgaagacttccctaaaacttgtaagtaaacttcaaatcgctatctgaaataatggacttcggagcaccatgaagtcatactatttcttttacatatagctctgcatactgatccataactacccatacagaatcaaacatacccgtggttttagttaatccagccacaaaatctatggtcacttcctcccacttccacttaggaagtgttaaagctccaacaaccctgcatgtctctgatgttcagtcttaatctgctgacaagtcaagcatctagtcatataatctaccacatccttcttcataccgcaccaccagtaatagagttttaaatcttggtatatcttggtggtattgggatgtaatgaatatggagtggtacgagcttcattcaagaatctctttcctaagctcagcactgctcgaaacacacaactcaggttttataaagtaacattttgttacttgactttgagaaatctttagcttggccaactatgacttcttctcaaatttttaccaattcttgatccatcaactaatacttttaattctttctagcaaatctaatt

SEQ ID NO: 50235 - DNA, 2492 bp, Cannabis sativa
aagttatggaccatgattgaagatttgaatgctattcttcatgagaaggaaaaacatggtggtaggaaggtgaggaagaatgaagaagcttacttgcagaattttttatttgaaaagggaagtatcgacttgggttacattgggtcagtgttcacttggacaaatgcacgagatagtcatgatagagtgtggaagcgactcgctcgagctattggaagttcagaatggtgtctgcagtatccaatggcaggagttagacactcttctatcttgggttcggatcactcgcctttgctttttgatacatgtatgacacaatagaaactcaagtacctgttcagatttctggaagtttggacatcagagcaatcatgtggtgatctcattgacaaagtctagcaggagccgtgcgacactcatcacaggttcaaggtgattcgaaagatgagcaaaacaacaaaggcgcagaaggagtggaactggaacagtttcggattctgtgacaaaaaactaaaggccttgtatgacagactggcggttattcaagcttccctgggagcttttgctgaagaagagcaactggtacagattcaaatcactgatttggaattgaaaatggagtgaatttggaaacagaaatcccgggagctgtggatttcccaaggagactgcaactcaaaattctttaatgcgtctactattattcgaagaagaaggaatcacatctaggcgatacataaggagaatggcgactggaaaaggaaaaggaacgaaattggctgctacttcatagataatttcaagaacctttttaaaagttccacaccgagtatttatgctgagtttgatatgctctttgaggaaagagttccggatcgagaaaaccaggagctgtgcagaatcccaacttctcaagaaataaaggaggttgtttggaagcttcatcctttaaaggcttctggacttgatggttattcgagaattttctttcgaaaatactggggcactatagaagaggatgtggtaaacatggtgcaggatttcttcagctcgggtcttttggcaaaggatctaaatcacacctttatttgcttgatcccaaagtgtgagagtccttcaaagtttgaacaatttaggcccataagtctatgcaatttcggatacaagataattgctcgcattctaacggataggctaaaaccaattctggataaactcatatctccttttcaatcttctttcttaaaaggaagatggataagtgaatgctcagtgttggcctctgaagctcaacatgctttgaagaaggttaaaggaaaagcggggtttgtggctgtgaagacggatatgcacaaagcttatgaccgaattgagtaggggttcctcaagaaggttctggaagcgaacggattcaacgaacaggcttgtagccttattatgcagtgtgttacgtcggtcagattctcaattttactaaatggagctccttgaaaagctttctatccggaacgggggttgaggcagggggaccctctatcaccatacctttttataatgtatagtgaggtgttatcaaagttggtttgcaatgcggaggcaaaaggagaattgacggggataaaagtgggaagggatgcgatgcccatcactcacttattttatgttgatgatgcaattttctactgcaaagcaaacaatcgagaaactacaaatttgcttgcttgctttgaaaagtatgaaagctggtctggccaatgcattagtaggaaaaaaagtggtgtagtcttttctccaaagaccaggactagggagaaggagagggtcatgaacatcttaggaatgccccttttgggtaagcaggaaaagtacctgggtaaccccttctttgtattggcaagaaagcaacatgacttctcctttctcaagaataaaattctcaataggcttgagggatggagggctaagcaattgtctcaagcgggaaggctaactcttataaaatcgattttaagtagcatcccttgctatacaatggccacttgtatgattcccaagtctatatgtacagatattgatagcatcctggcgcggttttggtggaagggacaaaatgatgataatctcaacagacggtatttggctctaaaatgttggtctgaactctgtcaaccaaaacgaaatggaggtttagggataagaagactttatgatatgaatatggctctgcttgcaaaattggcttggcacatgctgtgccaaagtgagaaaccttgggtttgaattcttaatgctaagtattgccaccgtctgaacttctggagggttgaaaaacataatagtgattcttttgtttggaagggaattctggagggtcgaaaaatttgtgcggatggtgtggggtgtctgattgggaggggggactgtgatatatggattgttccttgggtcccagggttctgcccagaagaagtgcaacacaactctataatact

SEQ ID NO: 50236 - DNA, 4289 bp, Cannabis sativa
  modified_base (27)..(28): a, c, t, g, unknown or other
  modified_base (113)..(114): a, c, t, g, unknown or other
  modified_base (1974)..(1985): a, c, t, g, unknown or other
  modified_base (4233)..(4261): a, c, t, g, unknown or other
tatttatttttgttacaatataataanntgcaatactaaaaaaattatataagctaattttattattatatactttttttaaaaaatatgtgataaatgtatttttataattnntattagctaatttattagatttagtcattttcttaatttttttaaaaaatggacatttactaacttagttttcaaatttagggccattttgcatctcaacccaaaaaattattatatataaggagaaatgtcataaaaaattttaaaattgtgttttttttttctttttttttttttttaaaattaaaatactagaataaaaaaaatgacgtaagtgttttttttttttacaaaaattgaaggaatactaaaataattttattaagacgataaattaataaatcaatttattctatataatcaaaaactggtttcttaacgaaaaaaattagttacaaatacccaaactcatataaattttacatgcttcttagaagctctaagacttgacctccaacctagtatcaaaattaaaaccaacacaagactaaaattaaagctagttacaaatttttgagaagctccaagactcaattattaactcactatacaaaacagtcactgtccactaaaacaaaatattagcttcaataaaaatagaaaatagaatgagaatattcaacataattgccatcatcgttggaaaatttatcgctaccaaaaagtcaatgtaattagacattgaagttgtcaccgatgttggacgttggagttgtcgccagagttggaccttagaatttgacaaagagaaattcataatatctagtttaaaatatgacaccgttaatcaaattaaaaccaaatcttagaaccagatacgtataataacaaaaacaataatttaatacaaaaaccagtttcatttacaatcaactaaacagtgaacaaacatatgacccctaaagtattgaaaagatatatcaattacaaaaatcagttacttaaaaaagaaaaacaacacataccataaaatattttttaacaatgactttaaactaaataacaaaaactcgttacaccaaaaaacttaacaaaaatttgatacagagaaacgttaaacaattaaattaaaaattaactcacataaaccaattagctaaataactaaaacaaaaattaaatataaaaaccaattactaaattcaattaattaaaataaaaatataagaaacctaaaacaataaaatgatatattgaaacaaaaaaactagttaattaaaaaaaatataccatcataagagaattcttaacatataaataaacttaaatctttgaaacatgttgcattaactaaccaaataaaatttttgatacagaggaattaattacattaaacaaccaattgaatatcatatgaaaagaaaccaattacatcgaacaaacacgaaaaccaattaaaatcttaaagagaaaagctaattacataaaaaattgaacaaacataaaacaactaaacaataaaaaaaattgaaacacaaaaacgagttagttaaaaaaatatatagcacattattttttattttaacaaataatttagaaaattaaattatcagatgccaattttacttatcatctagttaaaaatttcacacaacgaaaccagattcccaaaataacaaaagaaaaaacaaaacttaaagcttaattacgtacaataacaaaccagtttcaaacatgtgaatcctcgtaacaaaaatcataacaaaacataaaataataaataaagaagataattgaaaccagttcatcaactaaccatatggacaaaaaatacccacacagataggggtgggcctgagttgaaataggctataggcaaacaaaaatttttaggcccttactataaagataaatagtatttctaaaaattattaaaaaatatatatattttttaaaagatattttttttatttgggcccnnnnnnnnnnnnggccctaggcgcgggcctagcctgcctatacctagggccgaccttgcacatagagataaaataaatgttggagtaaacctccacttacactgataaacaaacttaatacaaggacagaaaagtaaatacatgcaaatccctattttggccttcgacctctagaatccctaacacaaattagttagaatggattaggttaatccacacctaactaatttctgtaactaaattaactaacaaattacagagacaaaaggctgaaccctagatctatatatacctgcatcagacacacaaccagatacggttgagggctctgcttcaagatccagaggtgattcacttgaaggaggaggagttgatgatctcacatgcacaagaaaaacaaacagagagttagagattgtgagagagagggattaaacactaaatacatgtattaaaataagagattaccagtcagaaattacctgtgacttggaatctccattgttgtacttctgatcagcaagaaatagtggaatcgagctctcaaacttgaggagcagctcaaacatagacgtagccaatttattggtgaacttcgggaaaaattctggtgttttctaaacctaatttctttctgtttgtgtgtgtgtttgaggatagatcagatcttgttagatctgatcttggctttgtgtttgtattgggatttctgggttatcgagggctagggttcgagtttctcagagagaaactctcttctagggtttcgaggaaaaacctaagggagaaaggaagtgattgagaagcttctggagtattgggttttgttcaaaggcaaaacggagtcgttttgactcagctgactttgaaaagtcaggaacagggaaaggtcgaaattgaccttggtaaaactgatttgtttatttgttggtgtagggtaaagttggaaaagacttaaaatttcctacaataaaattaaaaactcgcaaatataattaaaataacgtacaatgtacaataaaaatctaaaaacaaaatataagtataaaaaccaattttgacttggaaacaaaataataaaaagatacttaaaataaaatatataacaacatcataaaatggagcaacctcattgcaaaactttcaaaacctgtgaaccatgtgaagctattttcaaactactaaaccctatgaaactagttttgaacctataaaaaattataacaaaatataaatgataaacaataaaaataactaaaaccagtttcattaattagtcaaccaaattgaaagaaaaaaaaacacacacaaaaaatactcacaaatataatcaaaacaacacacaatgcacaacaaaaaactaaaaataaaatatacatgtgaaaaacaattttaaatctagaaacaaaataataaaaagaaacttaatgaaaatgaaattgcaaatgactatcatctacctccttcaaggtaaattgtaaaactatgtagcaagttttcattaaaatgctttaagtggcaggaactaaacttggtgcaaagtaacaatgacaagaaaagagaagaaaaaaaataccatttcatatatgttcggactaaaatgaaaactattgacgacccaaattcaatcatccattcttttataacactcaaatagatcggcataccatcaatagcctgtgcatctacgctctttgaaagatcatcatcaagataaaatccacttccatcatcaacaatcataacactaggtccgtatattgtaacatcaacatcagaacaagatttcataggaagaagctctagtgaaactaatctcaagtctgaattgtagagcgaccaattatgaagcatacttcgaggaagctcattaggatagcacatgtccaagtcactatcaaacagaatgaactcatcaattttgtcggtaaaggtcttgtaaaaagcaggtagatgatagtcatttgtaaaaagcaggtagaggaaagtcatttgtaaaaagcaggatcgcttgtagccaaaaatgcaagaacagggacagaaggagggagctagtgtcggccattagagagagaaagtttaggatttgtttaggaagaggctcatgaatacaaaatatgggatctaaagaaagtctttacctaaatatgacatattcaaacccatataaaagtttaaaaataagtattaactgtaaattgattattagattatttgttaattgcttgaataatctgttgttggattttgtgccctaaannnnnnnnnnnnnnnnnnnnnnnnnnnnnctaattaataaagattagaaatcgtttt

SEQ ID NO: 50237 - DNA, 771 bp, Cannabis sativa
ttttttttttttttgcaaaaataactatatgagatttattagtataattgctgttaaaaagatggatgtagttatggtttttgttttatttttaagttcaccttattatgtttattagttaggcatccaaaaaattagaaaaattacacttaaaatttttgagaaaagaattctcattttatgatagaaataattattttttgtaatatatatttagaaacttgtaaaatttatttacaaattcgtaatctatattttgtaaataaaatttgtattttttttttcaaatgtattgtatttttaacaattttttttagagtttttggatatttttaatatcccaaaagatattgcaatatatattatctaatataaatggtaacaaaaccagaaatctgaaattccaaaagttcacatgtgatcaataaagtgttctctctcttttttttttttttttttggtgggggatttattgatagaaactttattacaaaagaaaaaaaaaaacattattgacattgtaagacaaatagttcttctggcttacccaaaagagaaaagaattattaagacaaataatttaaattgagaaattgaaaatatttattgaacaataaaaatacttttaaaaatgaaaataagtcaaatatgaggcccatgaaatggaggtactaaaaaacatcaatgtccatactaaattttacagagtcaatagtagtaattaataagggaaatttgaaattatatgcatattagggattaaaattggta

SEQ ID NO: 50238 - DNA, 840 bp, Cannabis sativa
ccaggactcgagacctgggatcaggacagggaccgagactcagacccaaaccctgaccccaggaccagtgaaagaaaaggaagaagagtactctgtatattttttagtaaaatctcagctcaatgagcatgagtaaattcattgcaatttatagtttacagaggcaaatcatagccgttaacaagagggccaggtggcaccaaattacacaagaataaaggtgcagaaaatcattacaacggatttgggaatcctaggctaacaaccttgtacgaatggaatattcagaaaagatatttttctgtaccagcaatgacagaaaggcagtccaagtcatcatccagatcagctacacctcatcacttatttcttgacaccacccctcaaacgacagggggattcgaccaactgaagtttgttaatcaagaaattgaatctggatggtgagagacctttagtcaagcaatcagcaacctgatcatgggaaggtatgtaccgaatgtcgacttgcttctgcagaaccttgtcccgtatgaaatggacatctaattcgacatgcttggttctggcgtgatatacagggttcgtggccaaggcagtagctcccatattatcacaccagataattgggcgagttggagagttgaatttcatttcactgagtagtccttgcagccaggttatctcagctacaagatgagccagggctctatattcggattcggtgcttgagcgtgcgactactgactgtttcttggatgaccatgaaatgagagtatctcccatgaagacacagtaacctgctatagattttcggtcatctgggcagcatgcccaatc

SEQ ID NO: 50239 - DNA, 1076 bp, Cannabis sativa
acgacatatgaaatgtcgggtcgtgttatagtcaagtaaatcaatttgccaataagacttcggtatgaagtaggatcaggcaaagggttaccttggtctttgctaagttttaaattgacttccattggagtggaagagggtttggctcccatgtaaccggtttcttgtaaaagttgaaggataaaaggcctttgtgaaacagaaatgccttcatttgtccttcctatttcgagtccaagaaaaaaccgaatggaaccaatgtcctttagtttaaacttgtcatgcaagtaagttttaaaatgagcaatagcatcagagttgttgctggccacgattatgtcatcgacataaacaagggcagctaggaacagatcggatgtttgcttggtaaataacgaattatcagagatagattgttggaaaccatctgatatgagtgtagagcttagtttgatataccattgtcgtgaggcctgtttaagaccatagatgcttttgtttagtttacaaactgtgttaggaggggctttgtatcccggaggtattttcatgtagacttcttcatgaagatccccgtggaggaacgcattgttaatgtccaattggtggacattccaattgttcattgcagcaagtgcaagaaacactttgagagtgttaaacttggccacgggggcatatgtttgggaataatcgatgccttgacgttggttgtaacctttggctacaagacgagctttaaggcgctcaacagccccagttcgatcatattttactttataaacccacttacaaccgatggccttatggccaggagggagtttagttatgacccaagtattgttattttcaagtgcttgagtttctttatccatggctaacagccagtgcttgaattgggaagcttcagcatagctttgaggttctatttcagagtatgctgccaggactgcagctcggaattgaggatgcagtttaatgtatgagagaaacttttctataggataatctgttgtagtggtgtgacagatatagtcctttaggtgatctggtttggtaaggactcggccagatcg

SEQ ID NO: 50240 - DNA, 730 bp, Cannabis sativa
cacccaactgttgctgaatcacactaagcatagcctcgtaagcagcacgagtctccttcgtcctaggctgataaaccccttcttccgtagtagtaagaacactctcctcctgaagccggcgtctcttagcctgacgaaccagaccaggctcagcaagagggtcacgctctttcttcttcttctccttagatttcttcaatttctcatccaactccggtggcctccctctgtaagccctatcaccgaagcttttaggatcgattttcccccaaagagtttcaggctctccagtgggctcgtgagtatcgcgaggccgggagtctgtggtgagcaccagactagagttggcccgatactcatactgcttgaatcgggcgtgagcctccgcaccaccgccgaggtgggccattatagaaacgcgctaccgattcgaagatcccagaaaccctaaaatgagacacagaaaacaaaggatagggaagaaaagagagggtttttagggtttttgagttttggggaagtaataaacagaaaatgataaaccttgaaaaccctaaatagaaaaaagaagagttacagtgaaaaacttacttgaggaagaggaagacgaagacgataaggagtgaagaagaaatatgaatgaaactttgagctgagatgagagatccttttgctctaagttctttgttcctaatttatttatttatgtttttttataaactattttttt

SEQ ID NO: 50241 - DNA, 918 bp, Cannabis sativa
  modified_base (707)..(720): a, c, t, g, unknown or other
atatgtgaaacacaacctatatatctatataaaagtgaattcccaccgtcgattcatggtgatgatgtgggtgcattgcatggtctcgatcattttgtcataaatataaatatatatatacaataatatcatatgggttgcatgtaacatgacagagtcatcagaataataataaagttattaataattaatggtttttgaatgaaaagtgatgagaatcgttacagaacggtactacgtacgttacgtatcacatcataatatattaatataatatcataaaatataattttgaatccacccttttaaaataaatgtattgcttcatcttttatttgttttgctatttaaataaatttttatactctatttttttttatatctgtatacattataattatttatttaatatatcttattataaaattttgaaataattttctaagacgtcttaaggtacacataaaaaattagattaattttttttttttcaaatgccaaaaaagtaaggagtacatcaatagatttttcttaagagtgtgcttatagaaatttctatgaggcactaaggtacttgatactatcttataattaattagcgatttttttatgtataatcttagcttaaagcattgctattaggcaccagtagtgcctaatattttttcaacatgtcgtgttgcgattggttagcgatactctttaannnnnnnnnnnnnnaattatatgagactcgatacttagttgaactactagcgatattaacacatataaaggtgttatgcattactggtaccctttaacatttcttcttaacttagagcaactccaaggtagcactaaaacttggatttagtgtctaaaatccatccaacgtagcaccaaagtttacagtatatatgtcgtgtggctacagtg

SEQ ID NO: 50242 - DNA, 1002 bp, Cannabis sativa
aaaatatcatttgagcaatgtttacggtcacttttagacatattgagtaatacaaatgctcaaacttttttgttttgatttttgggttaaatagatacaggagattggtgggaaactcaaaattgaataagagaaaataaccctcctaatattggcattaaggtgttgtcttttaataaattcaagtatttcttagaattactcaaccttaagttgtaaaagcatctctaatggtgctctttatttttctttagctataatagttaaaatatgttaacatagaaactcacttttattattgttgctcaaattgtgctctccattttatttaattattttaataatagtttacaatttgaattgtaaaatataaatttattttataaaataataaaaaattcataatattttttattaaaataatattaaagaacagaaatggagatgttaaaagcctatacctcaaatgagcataaaatgttgatatctttgattctaatcaaaaaaggaaggaaagagtgctttgaaacttgattaaggaataaatcaaatcgatcttgaactaaaacaatatccatttcttgttgtgtcaccaagttacggagttagatctgtgtgttttgttcttcaacttgtaaatgatgagtttcatcttgaactcatctcccaatttaaattgtaatttaatttcattctattttaaattcaacaaaaatattttccatctttctttttctcattattttttttagttaaattaaaaccatgacatttgtaatattacaaatttaaacaatatgtaatataaagtctcaaataaaatagtttctttctacaaaaagagatttgatttgtcttaaataattgagcatttaatttgtcttaataacatgtttaaccagaaaatgtaggaattaactactaactaataacaatcaaatactttacatattaaagatgtaaaccagatcagatctaatctaagagctggtgaacttagta

SEQ ID NO: 50243 - DNA, 860 bp, Cannabis sativa
ttttacgtgttaatattgttattatagtttaaccaagtattcgatcctaaataacttaatacaataatttttaaaaaatactgtaagtctattgtaagacgatacatctagaacgtattcaacactattagtacctaataacaatactcatatatatatatatataatattttagtattattatattctgttatatattatatatatgtataggtgcagtaattattaataagaagctgagtgtagcccaactcattggtacttgtggccaatacaaatttagagcacgagcaaaatgggctcatattattattatttttttcttttttgataagtgtacaaggttataatgctccattaatttgtgctcagaatggccaacattacacttagattatcttttgtcttatgttattatattatttctttcaatcaactacatccaaaaattattaataatataactaatggatcgaaacatagttaattagtttatataatattgaatgtaaaaacctatatagcatgattatttattggtataatttttacattaatcattctatgggaaagttacacaaaaacatgttggataaaaagtaacaatattatagaaattctttattaggcatatgtagtatttaacactttttaggtagcacttcaagattaattagtgatattttaaaaaaattattttttaaaattatatgagactcagtacttaactacattaataacagtatgatactgaaaaaaatactaaacaccaattgtatattttagtaattctaaatatcatatatattgtgtatatgtgtatgtacgtattagtgtacttttccaatcaactttccact

SEQ ID NO: 50244 - DNA, 965 bp, Cannabis sativa
agaccccaacttggacccttgaccccagacctcgactcggaccctcgaccctaaccaagacttggattaggatcttggccctgcatctaagacccacacttcagacctagatcttgaacctctaacaactaacctggacccagtctcgaaccccaaacatggacccaaactcagacccgaccctgacccaaactggggtcggatctcaattttggatcctagatcctggaccccagacttgaacttggaccccaaactcgaacctgaacctcaactcgaaccctgattagaccctaacccaaatgaagacccgaatcccagaccccgaaccctagacccaaactcagaccccgaacccagacccaactaaggaccttagacctacccccggtttcaggatctgggttcaggtttgggtctggggttagggtccgaggtcgggtcgggatttggggtctaggtcttgggtctaggtccgagtctggggtttagatttgggtctgggtttaagccaaagtcctagtttgggtcaggtctagggtaggatgggttcatgtcattgtatggtgtagaatattgattttttttagtataaaaaaatttaaaaagagttttaaaaaacctgtgccaaatacgattaaatttttaaaatgacaaaaaacggttttctattctcacttttgaaaacacaattttgaaacatgaaaaatgaaaacataaccaaacaacctcaagatctcttccatccaagatgattttctctccgtacagtgccacatcgttcatcatcaccgttgccaccatcatatttgctatttgcacccaataaccaagggatcgttgtgagggtaactgacatgataggagtctgaatctttgaatgttgtgggagcacactcgtagcgttgagactttggaagatgctttgcaacctccagtacttcaggttttggttcatgtcgcag

SEQ ID NO: 50245 - DNA, 1321 bp, Cannabis sativa
tgtaattaatggactaaatttgtacaaattaagaaagggtataaattttgatatgaggtatattattaagggcaaatagtgaaatttcctaatgaaaatagattcattttcttccattatctgaaacataccctaacaacaaaacaaataaacaatgctaccaataaatcatgaaagactcgaaaaaaacgtcctagctcatacagaagcagcagaaattagacaaaaagcactgcaagttgtatgcgaacttattttaataaaagatacatataaagaaaattccaataagaataaattctttcataattataaattaatattatatattttatgatagtacactaagttatacttaaagaaatgccaaaaagtaacatggtacattctaacatgtcatatcactattaattaaatatcaaattttatataatttaacatataattttttataaaatatcgctaatcaatctattatgcttagccgagtccatgaacgtgttgacccacatgagttaacactccaaacatgtccacataagtgtgctttccaatttcccaaaactagagaaaaataacacattatgacttaatttgataacagttaaagcactggctgtgacttgtgaggtgactacgaatctttcaaagcagatatacaagtcaaaatgcgaccaatacacgtttcgtgataaatctattttactgctctacaacttcaatatatagttcactgagaaatgctaaagtgcacagtaatacctagcactctcctatgtgttaatattgctattggtccaaataagtatcagatcccatataatttaatataataatttttaagaagtatcactagccaatcacaacgcaatatgtcgagaatgtgctactggtgcctaatagtaatgctcgtagttcactgtactaaaagaaaaaaaaaatccttttttacatgaccctatcaccacgtgccggcctttttcgtttttctcagttttggagttagtgctttcatttcatttttttaaaaagaaaaatacctcagcatatatgtatatgtaatattttttatccctcttattactaagattctctcaagtggcagtcctttcctagaagttgccactaagaaatgtatacatataataaaaatacacaacagcctaaacatatttatttactcgtggaaaacatttgtccctcgaccacaatattaaatttgtttaatataaaaccaactcagatgtacatacataaaataatttaaagtaacagaagaatcatataagctttaagtaaattaattatggaatcttgttta

SEQ ID NO: 50246 - DNA, 1838 bp, Cannabis sativa
aatcgccgtgatgaggaaataattatatgcacaataacatggttattcaaattacatgccctatacagtaggtagattacattgagaaataataaagtttatagacaatcattaaacaactcaaattagggaaaatcaacctcaaatcaaaattcaatacctgttggagcttggaggtgtacccaaattggtgaaacagaaacaaacaccaaattcttgttattgatcctaaaagcaaaccaaaagtaccgaaatttatataggcagaacaatacttatacatcctcaacaaattacagcgaaaaacacaaaattaaacaaaataattagctcaacttactcaaacattgattgaagctgaaaattaaatacctggtgaagattcataagagggataccggagctgggactgccgagggaagaggagctatgtgatgccgtctgccgagagaaatgaagaaacagaggagagagaaatggagaacggagggtggtggagacaatagagaaatggggaacggaaggtggtggagatgacaccggcgatgagcgagagggatcgactgagggtgagaggcacaacgagagagggaggcaaagagaggggaacgacggggagagagagagaaagagatgagcgagatgacttgtgagacgtaaatgagctggatcgggagatgagattcgaataaacagatatatcaccctatcctccctctaatgggattttctaaataagggtagcattgctactgaattactgctatcgtcttgcgatttattagggatattctctaaaaattattatattaaactatatgtaattcgatatttaattaaactaataataatattaacacatcaaaaagtattaagctatgctcatattttttagcatctctttttaataatatgcattttttttttgctaaaattttatattttcaccttaagagaaattaaacaaaaaaaacaaattaatttttttttcaaaaatatgggctaaattacccgttcacatcttctttccccttgtcgaactagatcatctcgctttcctctatttttttttctcaatggaggcacgatttcaaatccaacaaaatcgtccaagttgtgtaatactaatgtagatctcaacaagaaaaccactaatccccacaaatccaaaattaaaaggtaaaccaaaaaaaataaagatttctacctctactaattcaaaaagatacaaaaacaacctaaaattgtgcagatttattaaaaacaacacaatcagagaggaatcgaagcttggccaaaaataacttaaaaaatctaatggtactaatatttttagtatttttctttataattatgttgtttttagtatttttcttcatagttatattatttttcaatatatgtcaatcagatcagtcataattcatagggtaaattggttaatttgaaaaaattgctatacttagtttttaatttgttactcgtgtttctagcaagggatacatagattttatgtcagcaccaaaggtccaccagtgggtccaaagaagataatttgggccaagcccaagtcacataagaccttctaggaaggcaccttaactccatgaccagatgagagcttctgctaatgacaatccgcccggaagcagctctagtatcatgatgtcgaagggccagacagcatattcgttggaagactagtctggtttccttttttatccaagcgcacaggataaggaagtaaatgctcctcaaatctcgataggatattgtatcaagctaaatagggtaactacctaagcaattaatctataattaattacccacaattatag

SEQ ID NO: 50247 - DNA, 635 bp, Cannabis sativa
aataaaattggtttatttcagcaattttgatattttatttgtggcctgtgtgaacaacataacgtaattttttctgtcttcaaagaaagcaaaaatatgttattcatatcctatgccttaccctatataaaagatcttgatgtttgaccttattttcctctgaaaagttatttgttgcaactctgatggtactaaagtcaaacttcaagcattccacatttccaatttcttctgtaacttctgcctgcactccatctgtaatcagggtgagataattcgattaaattctgttaggaagagttatccatttgtaaaggttgttggaggctaagaagtaagaacaacaagagttttccaaggccatgtctatttcgttaaggttgaatagtgagtgagctcaaactcaaagatttttgtcatgcatatttgactcagtaagcctatatgggtgtcatcactcaacaaatattaatgcattcaatagggacttcagcccggacaattatgtctctcatagatatatgcataagggtttaaaaaataccgatccaaagagagggaagaccacattctgtacatattttcaacaccaaaactattggctacgcctaacagaagagcaaaataaaccagca

SEQ ID NO: 50248 - DNA, 1206 bp, Cannabis sativa
actcgtcttattttgctaagtactctgtctcaaataaggtaaaatacaatataatttatcattaaaaggtaaatcgctaccttaaaataagataaataacatatcttattaggtaaactttctgccttaaataaggtaaacgacttacattattgtataaataccgtgccttaaataaggtaaacaaaaatataatttatcattaaaaaagtaaatattattttaaaataaagaaaacgacatatcttatttaaataaacacctcaaatatgataagctaaaatataagttatcattaaaaaggtaaatcattactgtaaaataaagtaattgacatgtcttattaagtaaactacgtgccttaaataaggtaaacaaaataatcattaaatatgaaaattattaccttaaaataaggtaaacgactcgctttattaggcaaattttttgccttaaataagataaacgatatgctttatttaaggaaatactgtgcctcaaataatatccactaaaatagatttatcagtaaaaggtaaactactagtaatataaggcaaaaaaaaaaatgtatcaaatttaaagtaaaaataattaatcttttttagagattaaagttagtttctcaatattcccatgaatctcaaatttaaagaaaatatatttataactattaagtattatatttataactattaagtattaatttctcaatattgatataattgctacctgacagacaaatttacatgggagatataaaaaccacttatcaatcatcaaagcaaaagttaaccatagtaaaatatcttataatctcttaaaattaatgcacttcagttgaatgtttctcaatcatctttacactaacaaatctctctccagcttcattttccatgtacttaagaaaatatttgcattgctctttcaccatttgtctgcaatcccaaagtagcaaaaaagattttacaatgtgttagtattctatactactaaatgagaatgaaattttttatacattgacataatcttaattgaatatatgtactataagagatcagttttgtagaaaaaaaccttttaaagtaatagaattttatgttgcaacttgtgtaccaaactatacatacatacaattatgtttcgattaaatttaatatgaagataaatttggttaattgataaaaagaaaaagagatattccta

SEQ ID NO: 50249 - DNA, 3078 bp, Cannabis sativa
  modified_base (2569)..(2570): a, c, t, g, unknown or other
tttcaaaaataaataaaaatatattacatatattttggcctaggagtagggatgcacgttaagaattttaatcctcattcgtttattccttactagagacgggacgaaaaatcttctaatgggatagggacaatgcattatacattataataatattaaattatataaaaattaaaatattatacattatttattattcaatatatattacttatcatacaaaacacagcttaaaaaattataaaaatgacactaatatataacaaaaaaaaaacacatattataaaatataactaatatattaagagggtcctcatctgagcgagaagtgtcatccttgcccccgccctgtttacctttcgagaacaaaaaatgatcccaatccccgtcccactccccctttagacgacaaatctccacggctctgccccactaggggcgagtccccacggggtcccatccctacctatgactattagtagtgtggctcacactaacaaaatttgttttatctttgaatgagaactatgtttggtggtcactggtctgactatcctaatatgctacttctttgcaaaaggataaaaatcttgttgggtttactcgaaaggttttaatgaggtcaacttttttttttcaaaaaaaaaataataaatacatattgttaacttgaaaactttccctgatgacatggacattaatgtttgacacgtggcaagagggatgatgtcacggagttgagtagacccgagtcaaaacagtcgacttgggatgggactctaacactgtgcccatgttgactttgggatcttcgggatgaaagttcaggctttaataacttgaattcaactcattatcactaactttcaatattatgtatcatgaagacataaaacaacctaatccaaaccccgagagctgaaattacacgaacatacaacccgtaagccaacctgagcacctagggttttacctggcgcccaagttgacattctcaactagggtttcagttttcgggaccgtctcagtgcaaaagggttaaaacttgcattaggacatcaactagacataccacagatatatttgaggcatcataatcagaatcgaagtaagttcattttttagcgcccggggcccagggctccgagcacccagtgccaggatgcctaggttaacaacttgtcaatctgggccccttccaagtatcacatcagagatttgactttttcatcttcttcgtcttcatcaaaaatggggaaagaggtcctttcaaggaagaaacaacacttcataggtgccagaagcaagcccatggcccaggttgatacttggggctagcctagtgccgaggttgacattttgtcaacttgggccactttcaatgaaattttttagaaactcttctgagcatcttctttgtttccagaaaatattgagattcaactatttttggggactaaatggaatttttaaaggggcagaactgggacccagcgcccatgttgacacttggggttgggctcagcacccaggttgacataatgtccacttgggttgttttcgatcaagttcaccaaaaagtgttaagggaatttttttccatcatcagaaataatgaagattcaagcaaaattggggagaaaactacaaacccgagctcctagaatcgggacccatcacccaacttgacaattaacttgggacgctgccttcaattgctcagatgccaaatttgattcgatcaatgaatccagaatggtcaaaacaggataggagacctcatcctcaagttcaaaacgttggaagtatcaaaatgagatctcggggaaaactcgggaatagggtacacaatggcttgatgcgctgggttctgcttatctgattctgattctattttgctagaacagaaatatgctaagtgatgtcaaaatatcacttagacaccgtaaagtacatcccttatacgcttttacacttacatagtgtccaagttgacatcatatgtcaacttgggcgctggatgtcaacctcggcattgggtcatgaactgccttcagtaaaacagccataacttgttcaatattaatttgattaacgcaattcaacttgtgtttcaatgctaattaaatgctttatctagtcatttgtgacacttcaatcgtaattccgaagctattatcgtgaaatttaaccccatgggagttattaaaacaagctctgtgtacctgtagcaagacccattaggctccaaaaaatagttccaccaagagctagttttctccgttagatcatcatttacattcaaaaacatccaatttttattttatttttatttttgtgggcatccttcacctataaaaggagagctctataagctcatttttttaagttcagaaaactacccacaaggtcagagcttctctctctagtttctctctctagaaattggagcttctaacacttagtctatttatgtaattaccatctcgtgagaaataaaaactcgaggtagacgtatctccattactgtcgtgatacagggagtgaactactataaagttattgtgtnnctcttataattacttaactacttattaattctcgtcgatctagcaagcaggtgtggcttaaaagtttagtccaaatttctgagttaaaattttggtgctttcattgagagccacaactcaagaaagttactagcaagatggttggagcacgttctacaagtgttgacagaaaaatcccaacaactggccaatcagctggtggcacgccagttgacggggttggaactgaatcctgcgccccaggtgccaggagaaggccacaaaaccagctcctcaactcttcctccaaggccaccaccaaatgctcctgggactggcaccaacgatcagatccagcatggggagcctcaagtggagatcgaagaacctgaagaggttgatcctcgggttgctcaactcagccaaattgtggctgacttgcaacaataactgcgagactctctcgataagcaacatgaacagtttcaacattggttcatgaaaaactggaggaatattgaaatccaac

SEQ ID NO: 50250 - DNA, 1075 bp, Cannabis sativa
caatacaatgcgacctaatacgacgttccaaacgagtccttaatatataacaatgtacttaatgtccaatgttcaaaaataactcttgaagtagaaatgaaagtgtttattcatgttgtttctttgtgcaggaatcaggcaagctcttgttttcttttcaagtttatttttgatgctctttgatttaattgttgggtgtgagaattctcattttatttggattcttgctaatcatttctttggttttgttcctgttgagttagtggaacctcttgtttccactatgaacttattattttttaagtgttcttttgcataaaaaagaaaaactctattgaggattgtaggagtttggggtattatggtgatgataaaagagagaagaagagaccaaatcatatgaaaattggtgacacttgaagctagtgaagagatgatagtagggacttgttcattcttaatcatcactactcccattgacaccataaagacaaggcttcaaagtaatggattactatgatgatggggttgtgggagagggagaccctcaatttttaagaccacaaaaacactgcataaagaagatggatgatgcatggtggggtttgtatatagaggttttggaccttgtttcttaaagaaacatttacataataaactaaaaattaaaaaaaaaaattacaaaaatatattaacactaaatttccaaaaatacttctttagttttaaacaataaactgtttttttttttttggttattttatagttacattatagctattgaagttgtttttctagttatttttttattgttttataatttgtctatagttgtcgtgagtaggggtggacattcgatccaatccaacatttttctcctcatccgatccaatccaattagacgtcaaaatctaatccaattagtaattggattggatcggttttttaattgaatatccaattacatttccaaattttaatattaacataaaaatatgaagaaaaactacgtaaaaattaaatattacattttatttaagtttaattcattaaaaaaaaagtttagtactccata

SEQ ID NO: 50251 - DNA, 1169 bp, Cannabis sativa
gtgtcgccttacgatttgctagtgatactctctaaaagctattatattaaactatatagaacccgatactaaattagaccaataacaatattaacacgtaggagggtacttgacactagtggtgccttttaacatttctcatttccaaagtaaaagttgaataaagtagtctaactctaactttctcatatatgacacgtgtcgttccaaactcagaaagaccatgtttagtgtgtgaggagtaagagagaggattaatcccaaagcgaacaagattgggctcttggctaactcaaagagcaactttacttatttatttttcttaaaaaaaacataataagggtaaaatagggaaaagtgaagagaccgaaccccacgtgcggcaccactagatacttcaccgtacaccaatcacaaactttcataaagtggaccccacaaacgccacaaccactattcccttccactttattaacacgcgctactcaagcgcgtggaatgtaaaaatactattatttttatgaatcacatatcttttggaaagagaaatgaacaccaatgcccaacatcttctatacccatcttttttttttttttttttatataaaatttattacttaattatattaataataattcgacaataaagagaatattagataataatgatattttttaatatttttatagtacttaacacgaagtataatttaatattaagtcatacttattttaatttaataaaaattaataaactactaaccaattatatgacgtcatctcataatagtgttagacatcttattaccccgtaacaatattattttagaaaattatggtcgttttggtagacacctaactgtttgttgcgtacgctataattaattaaaattatttgtaatttttaaaaaattcttaatagtttctaatgttaaaaattaaatttaaacgcatataaaaaaaataacaagtacaataaaatatataaattttatttttattattgtaaattacttaattattttttaatttaatcctaaataattataatgtaaatcaacacaaaaataaaattttcactaaaaaaaactcatttatatgtcaaaaaattaccttatactttactttttttttttttttttttttcgtaagcccctaaacaaaaaaaa

SEQ ID NO: 50252 - DNA, 1141 bp, Cannabis sativa
taataataataataatctattcaaaataataataataataaagaaacaatccccaaaatttaagcataaaaaaatatatgaatttaaatattatcagtccaccgtttgaaagtcacaagagcacaattaactacacagataactcttatcccaattccacaaaatggcaggaaacggaagtcacttcacttggagtagtttaaagttaggagcagctatatatatatgtatagagccagccatccagctgttctaggccaccaatctaagatcactgtgaggaccataccctacaaagacaaatgtgaatagcaaagcaatactactacgtacgtactggcacaaccttggaattagaaatgaaaaatttattattttaaaaataataataataataaaaaaaatgaagttctttaatttactatagtaaaggaggtggatgagtcgaggcctagctagagtgggttttaggcgaacgttgttgctgttgttttttttatgtaaggttaaagagtagattgaatgaaagagaatgaaacaaaagaattgaaggtggaataagatttggtttggtttggtggggtttttggtatttccaacatgggtggcttttgatttctgccacgttctatcaaacacaggactttcaattttggtctctgcatgcatggtagctttttggcaattattgctgtcatcattactccactttactcttttttttatatataatatttattagttggtatatatctttatgtacattaattaattaatatattagcctacactaacattactcctcacaaacttgtaaaaagaatagccagcagccaagccatattgcagtttggtttggcttgcccacgtggcaaatcacgtgattgttttgtgagaggaaacgacaatttgttcggccaaaccaaataggtggagtaagtaatcataataaaatgatggccattcatcattgtgtatttttctattttttttttgttatgctggaaattaacatatatatttttttattgtcaaacaaatacatcaataaacactttttcttttaaaattacataaacacttttttttttttgaaaaaaaaataaaaagtaaacagtttttcttttaaaattacataaat

SEQ ID NO: 50253 - DNA, 1087 bp, Cannabis sativa
  modified_base (948)..(953): a, c, t, g, unknown or other
tttttaaaaacaaaaaattttactttcattttgtaattaaaaaattaaaaaacaaaagtgttaccaaacgacaccttagattctttataaataacttttaacattttgcaatccgtagttttaaatcccaatcattttaaactaaactatatgcaatgaaatttggtgtgaatgatttgatcaatttggaccgttttaaattctttgattcggttacggttgtagaaatctcagtaacgatttaaattaaatcaatttgtataattattgtattatacttaatatatgtatttggacgaaatatttatatttgggaataattttagttaaaatattgatatttagtttatattgtaacgataaatttttttattgttatttatattataaatttattaaaagtaaaaaaatattaaaaaaatgaaaaattattgtaaaaaaattaaaactacaaaatacgaactatagttcgaatcaaaccaatccgttttgagtggtttagtttggattgaaaaaattgaaatttcagaccaaattaatctgtgaacacccctagattaaatagcgctacaaagttttgagtttacaaatgttataaatttaataaattttttaatcgtatagtacttaatatttataaaattgtaattcccttttagttttatccattaacgtcactaaaataaaattattggttattctcttttaaaaataaagaatccaaatggatagtttacaataacaaatggctcaaataatatatttatgtatttcaaataaaaagttaaaaatagtatattaataattttttttataaatattatatgtggtgtaattttaaattttctttttcattatatcatattttatattttaaaagaaaaagactaaagctatgtgttgcctattatatataaaaagtctttctctatatatatttatatatannnnnntatactagcaaaaagttacgtgcaagacacgtatactaaataaattttatgccagttttttttatgttagttgaaagtgatacaattaaaaattaaagaaaaatattattagttattaggtgagattattatta

SEQ ID NO: 50254 - DNA, 1083 bp, Cannabis sativa
gcgacagcgacgcatgaagcagcatcggtagctagcaaagaaggaatgctacctccaagtctctgatacttaagcttaggctcttcttcttcttcttcgtcttcgtcctcttcaacttccacttcttcttcttcttcgtcctcttcttcttcgtctctctcatcatctccctctacgccgttctcagagggaatcggagccatttgcatgaagtttctgaacttcgtgttgagatttgggggatggaattggggagaagatgaggatcgatcgatcgatcgatcgatgattgaaagagaggaatttgggtccagaccagagctctctctctcttctctctgtaaagttggaaattatatatatttaaaataaataaataaaatgaataaaatctttagttgaaggttgaaacggtttgtaatatatgtaaaataagagtgtgttaatttacaaaacgacaaaatgttgagacattttgacatgaaccaatgacgattgcttgcccctaactttttttaaaaaaaataaataaatttttccaatagttttacacaagtttgaaatatttttatattgtaaattatttaaaatttttattataatattataactataactaataaggctataaaaataatatttcaacatgcaaggacagaggcaaaaattcattgcgatgggtcaaaatacaagaaaataatttgaagggggccatttaacaattgtaaagaaaaaaattacaaaaatataataaagaaacttggaaaaaaaattggaggcaatgtacatttttcgacatgtgaagattgtaattaatacttttatttttaattactttctttactttttatttttttctaagaaaattttaccataaatattactttatttaggcacttttttagtaatttttttttttaattgctttctttttttttttcttacttagatctttctcttgactttaccattttgttttggggaaaattataccaggaaggtgcattatttttgtctctactaatatggaagtttctatttttagaatttagaatttaaagaaattataattaaattttgact

SEQ ID NO: 50255 - DNA, 4369 bp, Cannabis sativa
ctcaattaaaattgaagaacaaaatcataatataaacttaaagtgatgtagttgaaaacccaaaaggtttcaaatagtatcaaaagaaaaaggagaaagaaaagaagaaaagtattgttattgttcattgaaagagacccaaaactccatagaaaaagttaaatgtactatttgaggtattttgtctttaagtagagacaatttgtctaattatcctaatggtaccaagtgggtgtccaatgggtttatgaaagagtccaaatgggaaaatggtgagtttttggagtgacttgtaaagcaaagacctttctccttagcaatccccactatcaccacactaaccaacaacaaaggttgttgctttgttttgttactacatgtttggattgttgttatatcttagcataataccaaaactttggccagctcttattctccttccacttcactacttgacaaataaaaaactcatctttattgttatgaaaagaaaaccaaaacaaaacaaaacaaacaaagaattcagatagagaagaaaaagagagagtttttaatatgtgtgtgtgaaggaaatgagggctctttctttcacaaattcctcatattctttctgaacctattcaaaagacaaaccaaatcaataatgacaaaatacagactctttgtattgtcgccaaagcagccattgaaaagtccttacaaaacaagaccctttctttaactttattattaaacctttttatttcttaccttctttctcagatttcatccaaacccattttgttaaagaggctcttttgattgaaagagagagggtttctacttgggtttatcttcaatttcaaaacccagttggaaaaatcatttcttttttctgtttttgagttcttgatcatcatcagcagctgggacactactcaacttttttttctctggtaattttttctttctttttgttgaaatttttagttgtaatacttctctagctatacatgagttttaatttcttctaaagattgtgactttatctaattttctgtttggttactaagaaaatgttaggctcagatgagaaaaaatgctgtcttttttcatttctttctctgttgatactttattttccttagatatgtgataaagacaatacccttttatcagattcatgaattgttatatataatagtcattgtcaagaaagaagaaaaaaagttgttgttattataatattgaaataaacatcataatggtttatgctaaaagaaagttttttgctttgtctgaaattatttttcagataaaccccttttttggtgctccccaaatggttggtgaaatgatcaaagatgaaggatcatcatctgtgacttcttcaccattacaattctgtcatttgcttccatcacctggtttaggctcaccatatccatggatgagagagcccaaatcagaagagaggggactttatctgattcaacttcttgttgcttgtgctaaccatgttgctgctggtagtcttgaaaatgccaacattggtcttgagcatatttctcacctaacttcccctgatggtgattcaatgcaacgcattgttgcttattttgccgaggcattagctgatagaatgctcaagagttggcctggtttgtatagagctctcaattcgactaagatagtttcggtttctgaagagattattgttcaaagatatttctttgagctttgtccctttttgaaacttgcttatgtgattacaaaccaagctatctttgaagcaatggaaggtgagaagatgattcatatcattgatttgaattcgagtcagcctgctcagatgattgatcttcttcagacactaagtgctcgccccgaaggccctccacatttgaggatcactggtgttcatgaacagaaagaggtgttggaacaaatggcgcttaggttgacagaagaagctgaaaaactcgatatcccttttcaatttacgcctattgtgagcaaactagagaatcttgatgttgaaagtttgcgagttaagactggcgaggctcttgcagttagtgctgttcttcaactgcattcccttttggcgagtgatgatgacattcataaaagaaactcgccttcatcaatgtcaaaagtatctcttatgaatcaaagacctttaaaagattggcttgagaaagattcacatagtttgttaagcatgagtcctgaatctactctatcgcctttatctgtaactggttcacctaagatgggaagctttttaaccgctctttggggcctatcaccgaaggtgatggtagtaaccgagcaagaatcaaacaacaacggatacaccctaatggagaggttatcagaagcattgttcttctatggagcattgtttgattgtttggaatctacaataccgagaacatcaatcgaaagacaaaaggttgagaaaatgcttttcggggaagaaatcaagaacattatagcatgtgaaggagcttacagaacagaaagacatgagaaacttgagaaatggatattgaggctcgagttagcggggttcggtagggttcctttgagttaccagggaatgatgcaggcaactaggttgttgagacagagtcatcttttcagtggctataagattaaagaagagaatggttgcttgattatgtgttggcaagacagaccactcttttctgtttctgcttggagatttagaaggtaaggcttagaaatatttaacaagaagtttgttgacttgagtgttcttcttttgttttatctctgttgtgaattttaattttcttttttcactgtataaaggatcttaatcatgttcttgttctttactgcatagtgttcctcagcaaatattacaagaacattttcttttcaacttcttattaacaaccccatctttgttttgtttggtcaaacttgttttgaggaaattaaagaatgaaagtacataccatataatgtaactctatagtgtatgtatatatatatatataggtagctaggtgagagtatcgcttttgttcttacaggcggtgtacattatagttacagtaggtatcctgcacgtgcaattcacagtttgaatctcatttttgacggagttaattatctagaatttattgagaacaaactgaggatgtctactattactatactcctgtcatataaaaaagtttagttaattagtttatactttttttacatactaatttttgaaaattgaacaattaactagtgtaatttactatttgaattttgtttttgacacagtaaattatttcgagtttcttaaaaatagtccgagtttcttgaaaatagtcgggatgtctactattactatatataactaatttttttatatgctaaaaataaaaaatggtcttacggttgaagcaaaagtgatactcttaccgaagaaactgtttcttttatatatagataaaattagagagattttattgcaagtggtgaataatttaaaccctcaaagtcttactagctcgatccactgatttgccttttaaaaattctctgtaataatgtgaaaacatctgaatctttgtggggacaattagtggaagaagatatgttattactttttagtcaaaacaacatgaactgccattagtggaagctttaacaccttggcaatgatgagatttcaatggtggatgatgtttctttcttcttgcttgctatgattaaataaaccgaaaacaaaaacaagaacagaagaaaaaacatctcttaaaacagaatgagaaaaaaagcttaatagtgtaagacataaacgttgtactcaacaatggcgtctccagttttgacgtcaaaatgaatcgtgttagctagggcataaccacgggcgaacctaaacaagccggttcctccaactagtggcatttctctaacgttttcaagaaccggattcctcccaagaatactaatagtacttccattgtattttccttcaatgaatacaaaattcatgaccattagtagtgctacatcagtctttgactgtgaggcaagagaataaatcccttgtgctctaccgacgatttttgaggttggttctgctttctcagtcaatgcatcatcgaccataaaagtaactccaaagccggtgaggcccttagcttcgaatggcgattcaatgattttaacagcactcggtttctttccactgaggatgtcatgaaagtagaagtgaaggtggctcatcttttcggttcttttcatttgtttggcttcggttatgtattgcttagcgaaagctccattgatggagtggatcgaggttgtgatgagagtgaagatgaagaatagagagtgagtgagtaaagaagccatg

SEQ ID NO: 50256 - DNA, 2105 bp, Cannabis sativa
catattagcttgtggcaaagaactggtagtcttgctgttgagggtaagattttggagcctttcaatcttactgtcgaagcttagcagtaagtcttggagttcctgccaggtggtgttagatctagcctcaatctgcacaacaatagaaaggtattcatcatcaagtccggatagaacatttgcaacaaggtgagcctctggatacggatctccagccaaggccaacatgtccgaccaattctttttctgcctcagatactcgctcatcggagtcgaccctttcctagttgtttggatcaaagtgcgggtgtcgtccatcttcgattttgagtaggcacggtataggctctcaaggtttctccatagattagcaacagagtgagaccccataacttatgtggcgattccttcggtcatggagctgtaaagccatcccatgagtaactggtcacttattatccagttctcatattcagggttagtaacctgagtatctccaaccatgatgaactctagtgggcacattagagtaccgttgagatatccatgaagtctatgacctctaacaatggtggagaccattgtcttccatagtgtgaaattgttgcggtcaagtttaagtgaaaagggctgatttagggttgcttgggcgaaggcatttgggagctgagatgcctggttggtgttattgctgttattcgaaccagctccggcaacactagagttggccggtgaacttgcagctgatgctggttgattgtcttgtggagtagacatggcagaggccagcaatggctctgataccaagtttggattttaaggagaaggcaaattatgaatcttagctcatttgctgtatgagccagagaagtatatttatagcaatattcagaatacaaaaacagccgtttggctggacacctggcagtgattacatgagcaaaggactagaatatttagcctaaatattcccctaatgattatacaatgacaaggcataacagaattcatacaagacaaattacacaattaaaaagggcacaattctgttacaaacatgggaccactgaatgtatggctgcaatgtattttcctggtattgcaggtgtagaaatacagtaggtgaattgttattccttgacagccaccccatacaataacatagttccgccactggcaagtatgatgttatttagtccttgaatgtggctcagtgtaagaaaaatactaatttaatctctgtgttttatctttaaaattttcaccactacagatagaggttacacttacctcgttaaaaatgtgtgaaaggtagtattggaggttaattagttcttaagtcaccggttatagaggagaacaattagcatgcaaacttaccaagtgacaaaataatttgctcaaaacttgcataacttgtgtcaactcaacatgtaagtcattcaacatcttgcaatttttcgccatagatacttataacttaacaatatagtgtcatctagggaacgattgtattaatgctgagagttatgagaatatcaaggaggtttatcttcacaattccactcatatataatagattatagtcgtactcaggcttccaaatataatcatcagaactatattggaccaaacaatccactttttggcattcgcattcctgaaaaaagaacagtattggaaagcttcctcacaattactgaattctagtttgataaaattactagtaccttcaatagcactaagattttcattgtttaatgaagcaagatataatggaaataaatattcaaatcgttcataattttttttaattagtataaaagtcaactatctaataattaaagggtatatacatgagatatttttaagtagattgggaaggttgtcaaggtaccgcttcgtcccgcactttattagaactcccggagattgctaaaaagtgtaaagagtactctaccacaaactttttaaagttaatcgttcttagatagaataatctcaatttttacaacaatcaccattgcacaattattcttgacattatatttatttaataaggtaaatgccaatctaaaaataataagagtctaatcttagatcta

SEQ ID NO: 50257 - DNA, 1692 bp, Cannabis sativa
aaaaaaatgttcgaaatttctaagaaatgtgaacgtagtatgaaattaaaattattacggttaaaataacattataagtaataatttttttattatatttttttttatataaataacacttaaattaaatattttttaataagaaaataatattatttattaaattgcattgaaaaacttatacaactaaaatatacataatcaaaataaatatttagaatgtgactaaatatacaggcaatacacgtcatttaacctattgtgtgtgtatatatatatttatagataagatttcaatgtttacatcaaatatgtaactattatggttacatttaattttagtcattgaattactattttatgtctataattaatttagcaattataaataaataaataataattaacttgtaacctgatagtaattcgatactttatttctatataaaatttaagtaaaattaattttttttaaaattaaattactaataattattgattaacttactaattaaggacatggcaattattatttttttacacttaattattagaatatttgtaacaaaactctttataatttaaattattacacacataaccttaattgataaaaaaatagtaagaatgacctctaattagaggttagtctacactcaatcttattatcaatactttatgtcagttctaaattggttcaaattatttagttatttttttaatttaaaaattaaattaaaaaatagtgtaaaatctaataacaattataaaattaaagagaagttaattacatagtaaaactatcactaagaaataacattatttgaggaggtggagcctcttgtccccagactctccaccatgaacttgttttagtttttcttggtatgaattttttaaattgacaaaaaaaaaaataggaatataagtattatatatgaacgacatagtgatcatggtagaaatatcatttaaaaatgagtggacctaaaaattacatcatgtgaatgagaaaaaaatatattatatgtggaaaagaatttgaagaaattgtaggcaaagcaaaataacattttgttgttattgtcaattaaattatgaaggatgtgctacatcattgtgtggccaggacaactgagaactagggagaaagaaaagaacgtgatatagctagtggattggagggaatggaattatggtagagatgtaagagattgcatcgaagtagaaaatgcacatgatgttaggttgagacaatgaaaccctaatttttgaaattaagttttctttttttaaaaaaaaaaaggaagatgagtcaagcggttttgcaaaaaaaataattaaatgtcatttttagaaacaaattaattattcaaaaatttattttagaaggggtggaagtctaatatttgtaaaaaaaaaaagtaaaattttattgtaaatattataattaaatggttttgttgttaaaataataataatagggatttaaataaaaaataaaattatttataaatattaatttctgaaaaaaaaaagttttgtttaatattaaaatcaacaataaattattttaagaatttaattaatttaattctaaaaaaaattgtacatattggtaacgtgctagtacaagttaaaataaatgtaaccatcatgattatatcattcagtacttacccatatatatat

SEQ ID NO: 50258 - DNA, 1248 bp, Cannabis sativa
agatgataaaagtcttattattcacgtagttaaaattttgtttgagatgaatgaagagcttacagtcacttggtactaggaaaagatctgtaaacctagactacaaggtggcttgggaataagtaacttggagaaacgtaatatacttttctccaaattcatcaagattatgctaatcaagagtctaatagcgaatagcgatgatctcatgatcaaatcatcaaatcactccaccacttattgatatcaccgttggggacgatatcatattgttattccaaatttcgcccacatgacgtggtatatccacgtaggcaagattggggccacgtgaaatacagtatgtttataggtatgcaaaatcaccatgcacaacacatcaattggcaaaagatccaaacactcgggcaaggtcaagttacaagaaaatggccagctagagggtctggccagaccataccctggctggccaaggatgagtatgtgccggccagccccagacagaaggtcggccagccagcacagataaagagcagcgaaaggaagcccaattggagagtgggggtctagagccattctcctggactgatcacaactcagtttcacccaccagacagctccaacaacccacaaaagtagggtttcaaccccaaaacatctatcaatcttttagggagattagttagttatttttgtaacttaaatatatgataaaagagtaatatctcttatttttgagggatattagtttatttgaatatagatcttttgtaagctctaaactatataaagagcattagggtaagtgaaaagggacctaaattctaagtccttcaagccctagagcacccttgcttctcctctctcacacgccacttaccattcactagacacttagtctgttttctcatctcacttattcaaaatctgtcatatctcagtcttcactattgtaacattcaaagagagttatagctagaaattacaaggtaaaaacctataatctgcatagtgttatctctcgaattaatacaactaaaaggggaataaatcattacctgctaaacaaggaaaccgaacctttataaatttttgtgtcaatttttttatttgcttttacaattcacacgtggtgattgtcagtcataaataaggctccgcagtcaattgaccaaagctgaggtcaacattttggtgtttttattgagagcattgtttatcatcatgactactcatcatggttgtaac

SEQ ID NO: 50259 - DNA, 1359 bp, Cannabis sativa
aagggaagtcctttgagatgcctaagtgatggtttgacaccccttagtccttttataagttctagtgaagctggtcgtacattctcggatatgttgctattttgcggaaacggaagactcaaaactttcggcttccaaatgagccaaattgaagttgtgcatttgactgatctaacttcatgggtcattgtacttgtgaaaaacatgacggatggtcaaaacgcatcaaattctgataagcataacccagcgaaccagaccatttgttcacttggttggggcctttaaacaaagcatttgatattctatttttgatacttctaaggctttcaaggcttctgaacttgaggacggggtttctttccctgtttttgaccatgctagattcaatggtcgcattggatttgatcagcaattgaaggcaacatccgaggttgattgtcaacctgcgtgttgagccttgcaccatgtcaaattaggcgttgggccttgcacaaagtcaacttgggcactgggcctaataccaggtcaaattgggcattcggcccagcaccaagtcaacctgagtgttggatcctatttctagggactcaggtttgtagtatcccctcaaatttacttgaatctttgttatttttaatgacggtgacgatgcccggagcactttttgctaaattgaattggaaatagataggttgacaaaatatcaactgagtccctcaatcttctgccccttcgaaagtttcatttggtcctcgaaaatagttgattctcaatattttttgaagacggagatggtgctcaaattttttttgagaaaactctatttttgtggcccatgttggcaaattatcaacatgggcgcagggctagccccaggtgtcaacctaggcattgggccctattttttatgtctagaaattattgtttttttccttcggaaggacttatttctctatttttgatgaagacaaattcaaagtgaaagtagaatattcgattagacacttagaggccccaagattaatagattatcaacctaggcgctgggtggtcggggccccggggaccctaggtgctaaaaaatcaacttgtttcgaatctaattctcatgcctcaaacatgtacgtaatatgtcaagttgatgtcccaatgcaatttttgcccactttgtactaagacggtcccgaaaattaaaaccctagttgaagatgtcaacttgggtgctgggtggataccctagatgcctaggttggcttttggattgcaggttcgtgtaatatcagctaccgaaccttgtattaggttgcttcatgtcttcatggtacaaaatattgaaagatatatagtgagttggat

SEQ ID NO: 50260 - DNA, 1546 bp, Cannabis sativa
gaaattaagaaagagagttaaataagatttaatttaaaggaaaaataaacatgaaattaacttcatccaaaattctaatgataaaggaaaatgaagtatcaaagtaatgaattttgataatgagtgtaaaatttcataaaaatgaatgtaccaatttaccaagtgataattgcacacgtataactttagtgtaattaagtatcgaattttatgtattttcatttaataattattaggaattttttttatttttattgtttttcaaaacacaagtttacaaaaatgtgattttatggaaaaagaaaaaaaaaatgtggaaaacataatataaggtaactggtaatttggttacccttaactgtttttctcatatttttaattttttctattaaatattttttcttttcaaaaaaattatatttttgtacatattgtataaagagccataaaatatgtaattttctctaattattataaaattcactatatctcgtagtaatattaaacaccactatgtacctaataacttaattcttagacaacaaacaaaacaatcaataggttaagcaaatttaaccaaataaaggaagaaaaaggttataaccaaatttaactctatacatttcaattaagagtaacgatgtatgtgcatccaaacatattatttttaaaataactatcatgtcactatgtgtaatattttagtacagatatcattactaatgcagttaaatacgacgatcaaaaaatacttaccgacagttgccatggtaactatggaaaaatatagagaggtaacataacgcttccaaagattaatctctctgaattgagaatagctataatcacccatcttcaaacttcctatccatgtgtagccttcctgagaaggctccacagtggtagcgagataataaaggatgcacgccgctgtatgtgtgctgtagagctcaacaacaaaaagtttcgcgattcttgtaaacatgtaattaactcgagtatccttctctaatttttcaaaaaactctgttaccctgcaagctcgacttaacctaatgcataataagtatctcaccggctcttttctcccggaagcctaaaaacaaacatgtcgggtttgagtacaagaaccaaaatagctaattcgaaaattagccaactattagaacgaattaatggttttagttttattgtcaaatttttttaactaattttctcttttgttcgccttttttcttcgataaattggtttgtatgtcctttggctagatgaaataattttattgtaggtttccatatttcatcattaaatcactaatttgaaaaggaaaaaaaaaacacctcctaagaggtttacttgaattttcactttaattagctttgaggtaagtatagttcaatataaagaaattgaataaataatttattttcctaagtcatttttttgataatttatcatccaaaactacactagaatatatttgaatcaaaacaaagcaccttatagatataatcccaaggtaagcaacccaacaaatcaactgta

SEQ ID NO: 50261 - DNA, 685 bp, Cannabis sativa
attttttcctatttttgtggacctctttcacctataaaatgagagttaccttagttcattttgggtattaagaaaactacttacaagatcaaagcatttctctagtttctctcggtagaaactagaggttaaatagttagcttttttttgtaataccatctcgtgagtaataaaaactcaaagtagaggaaataaattaccatagaagtataaggctgagattaattgttggaaaagggggagggatgaggcctcggtgtcaaagttaaggaagctaagaagaaacttttcaaagttttcactcaaagagaggtgttttggaggcaacactctaaacaattatggcttcaagaaggtgatcaaaatagtaaatactttcatgctgctaatgctagaagaagaaataatgcaatagtgaagcttcaagggcctaatggagcttggtttgattgggaaaatggtttgtcggatgtggtaatcaattattttcaggatatttttttggcttcagggctggacaattctaaagttattacttgcatcagaccatgtattattggggaacaaaattgctctcttcttcaaacggttacagaggtggaggttcgaaaagctttatttcatatgcatcctgataaatctttgggtcttgatggaatgtcactagctttttaccagaagaatt

SEQ ID NO: 50262 - DNA, 1585 bp, Cannabis sativa
ctctagaacattgatctcaagaatgaaggacaatctacgtgcttgatccaactcgagatcattgaattttttgtcggcccggccttggaacatatttttcaattcatccaactttgcctgcagagatgggtgaacttgtttgccctcttggccaatctgtgccacgtcacggtctctttgagctggttcttggatgcaaataccgggctgagtgggcagttgaacatattgttcgtcctaacccctccttctatttagatcatccctgaggtcatgagttgttccaagtctgttgaatatagaaacaccatgttgtctcagggactggttggttggccgatatgttggccagaactgctagtctgggcagagttattaagtataatacctcctgatgaatttccaaataaggtctggccgcctacaacatggcccacaggtggaacctgtgaccatggattggatggctgatcgttcagagttttgtcgataggccaagcaggaatttcttccgcaccgcccagtgggatgctggacgctggttgctggttagcaacttggtaggctcttcgtatcaatatggtggcttgtcttgttcggtcaacgatggcggtttgttgagccttcaacatttccatatctctgtccctccattcagtgaactaaaacctttgctcttcaaatgcaaggttctgtacagcacggagctcttcctaatcatgatgcaaggaattggtacgaccttgcataagcccaagagcattgcggaggttctgaatcttagtgtcatctcctatggtcgtttgaatattgtttgctgaagggattctaatactgggagtacccaggttggcggccaaacttgtatttccagtctcttgcacaccaggtgtgatccaagccagagcagatgtcacaccatgacccactgtaggtggttgtgtgtttagttgctcaagattggcgactggtgggacacttgcattcccaggagtctgcaatgtaggatctggaaatggattaacctgatcgaccatgcctctgcgagtttggtccaccattctatgtgtctaattaaacttaaagaaaatagcaaacttggattattgctctcaatgaaaacaccaaaatgttaacctcgctcttagccagcgataatgagtcaaatagtaagcgatagaaaatataattaaaataaaataagaattaatgagtactaaagaacacaagattttaaagagtttcggcctcgttagtttggtaatagcctactccccttgaattgaatcaactaaagaagaaagaatacagtgtttcctctcttaaagctctcacaatgaaatctcttagtgtattttgttagatctttctgaagcaattctttcgaccccaataccagtgagaatggatgactatttattgggctaaatgcttgagggaaggttccccttttgcttgcaatatctataattggtaagaacatacattacatatttagaatacgtagattatgggattcagacagcttgccatatccctttgatacgatccctagattatagggattggttttgtgcatcacgat

SEQ ID NO: 50263 - DNA, 1914 bp, Cannabis sativa
gggtcccgctggtattaattcgctgacattaatgttttcaaaactttggacggtaaaattcccgccctcttttttcgaggcggaattccctcggtattaattcccatccgccggtattaatcaatttaaaataaaatattatttatttatttaaaacgttattaattaaataattattaccggcggattactaattccgtcggtaatacccctattattagaggcgagtctgttctgccgggaataataccgcggtattaatccaaattcttgtagtgtatgtctactttgagtttttatcgttcacgggaagacaaggaaattgacaaaggcaaagagctctatatttctagagagtgaaactagagatagatgctctaaccttatggacactttttcgaatgtgaaaaaaaagctattgtgatctaatggtgaaaatgacttcgaataacgatcgttaattttttgagattgaatctcgtctattcgatcgatttcgagtaatctacaaaacaattgcacatgtcttggggatgaatttaggacttgaaatcttccaaattacaatatggttgtgagacttgacttgaaagagcttcgaaatgtaagttgaatcacgttaattggatcaatattgaagaagttatgactattttactaaagcttgttaaacaaacaatgcccgagttgacatactgacatcaacctagatgttatatgagtacaaaaaagtgtcggacttgtattttttgatacctaagtgatcacttagctaatttcttaaatttggtgaagttgttcaccagttcttggagatgttgctatttcaaaaaatcagccagacttgaaacttctcaatttgcgattaatttgccaatattcaactttgccgaaaaggtgaaatatcaaagggtgaatttgacttgtcacaaagagtaggtcccgcttactacaaaaaatagtcagatgctagagaccgaacaagaatttgataagtagagcccaatgtaccaggctgcatgtcaacctgggcgttggatgcttcttcggcaacttcccggggtaatacttctaaggaatttgagattgtgaaagaggtctcctacctcgtttttgaccaaactaaagagaatgtctagagcataatttgtgttaatggagagaaaatattcgaaccaagatgtatatcaaccttgttgcagggccagtacccatgtcaactgggcgttggggccctattttggctttcaatggatctcctttacttctcaagattgcttgtgttgacggtgagaactcatcaactaacattgtggccaaaaatcagaatttaaagtgaaactaagagatatgatgaagatgaagtgaaatgaagtttaaatgactaagagatttcatgagtacgagaatgcattcaaaatgtaagttacagaattgattttccaaccccctctcacacttgagaattagatatttatatgctctaattgctgagttacatggtgatcccaagaagacaagttgttgcttttaggctacaaactgcaggtgcagaaggtggtcttgcgccttgtacatttgtgtggtgtcaggtggtcccaggttgcaaaggtggtggcaagcccgttgctggagaagaatatcaatttattgcttttgattatggatctactaacaaaaattaaatgcgtaatcttagcattcaatgtgtattcctgaaaccttctgtttaagagtagattattttcagagtctaatattgaacctgattattgaaattgctcaagatacccttttttagctatgctttggaagaaagaagataagttcttctttctttgatcaaaaaagaaagaagataagttcttctttcttttatcacaatcgtattccatgaatatgatatctatccag

SEQ ID NO: 50264 - DNA, 801 bp, Cannabis sativa
aatgaaattagacaaaagtcattaaatttaataatctcaatatttcagggagaatttttaacagttaaaaaagttcaggggcacgattgactatatgttaaagtttagaggaaaaaattactaatggttggagatgattttattgaaataataagaagaaaattactcaattttcattgaaaagagaaacggcgtttaaagcggggttaaatctggagactgaaagaagaggaaccccaacccattccccaacacagaccaatctctctctctctctctctctctctactgacatacttctcttcttctctctctctctctctcattcatacaatttctccaactcatctctcgctgtcaaaatccacacgcacttcatccctttccacactctaaaacttcaaaaaccttaattcattcaatttatttgtgtattcaaatccttcatttttttctggatataatctcatttatagtttctagtatcactggccggccatggcgattgctgccgcagccgtcatcgtgccattgggattgctctttctcgtctctggccttattgtcaatgtcattcaggtactacttcttcttctctttcgtttattcttttcaatattgcctcgatttagtttctcttcttttactcccttttttcgatttttccaattctggggttttgatttcttcttccttgtttggagattcaatgtaatgtagcttgtggttcacgattataggtatagtttaatggttgtgtgtgtgtggtttttttttttttttggctgtgatttgctacaa

SEQ ID NO: 50265 - DNA, 1134 bp, Cannabis sativa
  modified_base (870)..(870): a, c, t, g, unknown or other
gatgttatattgaccattccctcccaagtaacgagcttgaaaaacttgctcatctaccgtgtggctcatagtttgactctatgaccttggattggacagcttatttccttggataagtgtttccagttgaacgttcttttggcccatactaaggtccagtggggatgtggacatttgtccttcgactcgaatcctgtataattagagtgtctgccattaatttttgcctagttatctgataggcctacctaaccagcatggtagcctgcttagaacggttatcaattgcctcttgctgggctctaatgatttccatctattgatccatccacttttggaattagcatctttgctcatcaaaagcaaaatttatagctgctcgggtatcttgctaatcgtggtgaagagtgttggtatgctttttcatttggtctagagtggctcgcaagttctatagtttggtgtcatcattaatcgtccttcagggatttctaacagatggattttcaatactaggggaagtctgcttggcttgggtactggtagttccagtttcttacacgctcggtgaacctagccagaagggttatcactccttgtcttgtagattaaggacctaccggaggttgaggaataattaggtcgggatccgacatcactggatcttttcaatttgtaagagtttgcacattaggatttgtgatcactaaatcagttgtatcattttgatttcatctacttgtagttacaatcatctttgtgtgtcttgaaaagactcaaacaaagattgtgtctctctgctctcaatgaaagtactaaaatattgacctcgcttttagccaacgacaatgagtcaaattaaagcgattnaaataattaaataacaataatgataaagatatagcaaagagaacaccgatgttattgtagaggttcggccccgtgatggtggtaatagcttacttcccttttacttgtattgacttgtgagaagagaggcaagaagttcatgatctctctcgaaagcttttataataatttcaaagtatttctctcttgaatctatgattcttgtctctaatttttcttgtgtccctgaatagtgaaatagttccactatttatagggaataat

SEQ ID NO: 50266 - DNA, 1393 bp, Cannabis sativa
ccaattgaatttgtaaataaaatatcaaaataatagtataataaattaatgatactatattatttatagttggcatgaagttaaaagactaaccatattttagtagacaacttttatatatatattttgttctttgaaatattaaatttgtaaatttaatatcaaaataataattataataaaaaagtattttattattaaattgcttagcagtttttttttttttttttttttggtcatgaccactttagttggtcagaaaaagtaaacaccaataagaggaggagtctttttcatctaaaaaaattcattatctatcctaagggcatgcttagccaatctatgagccgcaacaaaagattacgactaacataagagagagatgccctagaaaaactagataataaagctttgatgtctgaaaataaaacacatttggcccatcttagtcttaccaataaagttagagcttctgtaaaaccataaaagatggctaaaattactaatttctttaaaagatgttaaaataagtaatttagaatttatgtcatgtataagtttaagagatagtaaattttaaaaataaattctaataaaaaacttatctcattgaaacttcttagatctttgaatagagaagtgagtgaaatagagaaccacctataaaaatatatgaaattcatgtcacactctacttaatgaaaataggaatttaaatttcagtactaaaaaaaacattccaaataataattattgtgaataaaaacttatcttaaaaatctcttgaattgagagtgtctaccacacattatttttagggtgaacccaaaagttttaaacgtaaaaccactatatatgacaaaccaccatatgtcgtacaaaacaagttatactgaagcataaacaaaactatcacaaaacatacaaaataaataattatgtaataaatttgaaataatactagtaaataattgattacactttaaaagcaacaacattaaataataataaaaaataccaatgaactgacaaaaaagtaacaaaatatagaaaacattataaaagtgaaaataatatatgaaccattaaaattttatgctaaaaatcttttcttaaagagtttttttatttgtgaatctaatacgaaaatgacaaatataatgattaaaaaaataaggtattgcgagttaaatctaatactaaaatagtattttagtgatattttttaaaaaaaaaaaaatgtgagattttatacttaattatactatattgagtaatactaaacaccagaataattgtaataactacacctaaattacattttttcaaaaaaatttcttcttgaaaaaaaaaaagaagatttaacaaggtgacaagaaataaataataaaaa

SEQ ID NO: 50267 - DNA, 1130 bp, Cannabis sativa
tatatttccctttagatttccaatttacctctaataagttggtcaaagaccatatatggagtctctatgaatatgttattttgcttgaaagatttatatgtgaaccatttttgaagctcttacctaatcaaaattcaagaccctttaaccaattaatatacaacattattatatatatgtataaatacttgaccttctcattattatgatcatctcaatataccatatatcatataacttaagcaagagtttggagtcataaaagagagtaaaatggctccaacacataaattttttttcaacccttttactattcttttcttgggttttctcatcagctttattatgatatcttttcctgcagaagctgccattaaaaaatacaactttgatgtgagtttgtacttttaatgatatattatatgtaccctttaaatttaattaatatttgatctcaatttgatgagttttttgttctgttttttcagattcaaatgaagaatgtgagtaggttatgtcatgcaaagcctattgtaactgtaaatggaaggtttccagggccaactatatatgtcagagaaggagatagacttcaaattaatgtgacaaatcatgttaaatataacatgtccattcattggtaaaaaaaaaaaaaaaaactctaaatcttattacacaaataaatcattttatttgtgagctcgagtcatgtgatactatgtgagtagtagaggctattataaaagtaaatcattctatttgttgcacttatggttaggcccgaccttggactaaggtaggttagactcgtgtttaaggtttaagtctacctaaattcagaacctaaaaattttatatagtatattttatgtcatgaaaaaatagtattatttttgtaaaattttgttaaataaatttaataatactctaactccactttagatataatacacacaaataaaattaagttcattaatactcaaggccggcccttgaaagggagagctaagtgcaaacgaaggcctttgctctcccaattttattttctaaaaaatttttatataatattacataattatacttaatattttgaaaaaaaaaaagtacattttggctcctcttaatttgtt

SEQ ID NO: 50268 - DNA, 3588 bp, Cannabis sativa
  modified_base (1662)..(1662): a, c, t, g, unknown or other
tagaaaagattacattgaaatagagttttatttaaggcaaaagcccaacatcagtgtgtgttgattaagatacactagattaacaaagttcttggttttgtctcaacacatgatcaagaactctctctggagtgaaattgatgttattggcttaaccttttttagttttcctaaattatacacatacaaagatttaggatatatcagtattataagtcaaactaataaattataataaaggcttaattaaataaaatatttatttatttaaagattaaatactaatatttaaatatttgataaatatctataacctattttgttaaagatatttatcttgaatttagatatttagtttaaactaaatatctaataattgattgagagaatctctcaaccacttgagagaatatctctactcctggagagaatctcttaattactttgaaagaatatctcaaccatattaaatatctataaccactttttaaattcaaatttaaataaatatttattattaaattaattaattaatccaaaaataaatccagtggtgtccatcttatccataggcgccaatcattgtgttattacacaatgagtggtgccaccattgtcttacctagacaatggtgatgtttttatcctgtgaacactttatctatccaatttatttaaataataaattttttaaaaaattattcattacaaaaataaataattactattttgctaattcaaatagattttttgaacattaatttttaatgttatccatacccttgacagtgttgtaatgtggcaattcgaggaccatgaacctataatgtcaagttccaataaattagatcgtttattgaatctcatcaaccaaataatcttatgtattaatttcatgattacttcactataacttgttgggattttatgccataaataaaactaaattcaatataatcttatttactaattaataaaagattagaaattattttatgttgcatggttcaatgattactttcatgattttatgtttaatatataaattctcttaaatcctgaacttatagttattcatgattatagtgttgtctacatagtagataaattataatgattatatgcttcaaactgtttagtcccatgatttatcagtgcactagatttacactgatgtgataatcaattatatagtttacttacacttgtataagtggaatgtgttttccaaggtgttagcaaagtaagctagtatcggatgtatcagctatacatcagactaaaccgatattgacagtggtaaagatatcataaacttattgttatattttttctaagtcaatgtcactaagttgatcttaggtcaattgatctcaatcccgagatagttaagttctagcttaattgtactatatgagttctttgacttgttcgttaccagcttacccgtaggactagcccatacttacatcttgggaatttggtagtacaattgagtgggagcgttaatcatagatatggaatctatagcttttacaactatttagaagtaaaatgatggtttcctttgaacttaattggcttaacgcaataaatgatatagtgcttattttagtaattatattagtttatcgaagtatcatttacaagtagctaagtgtnttaaggataaaatacattgatgggtaaaacgattaatttatccatactcaatgtaaaccatctacagaggatcattgattatttagattatcacaatggataattcatagtgtatctatattttatatatagagcgttctatgtaatcagaattgtaattctgaatctatagtagagtcaggaggaattaataagctagaaaatttacttggtaaatttcaaatatacttattaggagcttagttacataggcacatggttcccacactaactgagataatattattttgtagtttcaattaattgatttatttaatcaattaggattttcagtaagattatgtcttatttgtgaattttactaagaaatgacatatttaaaaagataggggttcatttttcaatgaagatacattgtgggtctaattaaaaaatatatttaaattgtattttattttataatttttataattattaaactaaaattgctatttaaataattagaatagataagtggtaaaatagaaaaagacacattatttaatttaaataaaataaagtggcataactctaactctaaagtctataagcaattcaaccataagagttgattcagcccaagtctttattttaagcccatctcatctaagcataacccttagtgaagcctataaatagaaaacaatagagctttgtcagataatgattttttaatattgaaaaccctaaaaagctctcttcttcttctttttaatttttgaaaatttagaggctattttctccctcaaaattcatgctccttggtgttgagaaatttctcacacatatcaaagcaatactcaacatagtgaggaagattgtgtagttaaattatcataagaaggagaatccaagttcagatcttgattattctctatgacagaaaagatcaagagtcagagatctgaacggaaaaaatcgtattattccactactattaatgtaagaattttttaatcccttatgtgtttatttattatttaagaatttcatatttaggatgttagattataataataataattatccaatgtacatgattagtaaattaagatcttggtaataaaaatttcaacaattggcttcagagtcatggtagtatttattattcatgaaatatggattaaaacgattttgggttgattttgatgtttcatattttgtttatgtgatttttatggtggtatttattattcatgaaatatggatttgaaacgattttgggttgattttgatgtttcatattttgtttatgtgttttttttgttatttggagtttcttttcaataatatggtgcctaagacacctgactttcacaatgtaacaccctaatactaaggcacgctacagtgatttttcaattgcagtgttatctttgctaatcaaagaactttaaaatcgtgtcaaattaaaagtttgcattaataataatactttataaactttagtaaaacatttacaagtatcgggatcccgtttctaaactttatacaaaatatacaaattacaatacgtcgcagactcaaaatggaaaccccagatgtcccaggaccgaacactccaggtcgcgccgccatgacatgtacaatcccatcctaccttaggctcactcctgtttagctcttgcctttcctttacctacacatgaaagtagaaatatgagtcgacagactcagtaagaaaagcatatagcatatcatataatgctgacttgtatctaggtgcccatacacatatttacaaagcttatcagatgggtaagaacgttccatactagggtacagccactgtaccacatacactacgaactcattgtatgagtgttggtagggtttttttcgtaccttgagtactactgagtgatataccatacacaccctgtactt

SEQ ID NO: 50269 - DNA, 1036 bp, Cannabis sativa
aaattacgattagcataaggttgtgaaagtaacagatacataatgaattaaagaaacatttgaccgagaagctagcaaacacttacaatttaattaagttggtttttagaatatctgattatcttatttgaattaaattactctttttttttggtcagaatcaactaattaaatatctacttttgtttaaaaatcttttccttgttttggtattgccaatgccaggttggactttgacttgtgccttcaatttggctcagcttctgaaggtataagtctcacttctacccatgttagatcattatataaatgtttcaatttattttaagttaaattgtgtttcatttataaatttgactctctcaaaaataataaaaataataacaaaataatataattatataatgtcatttatatcatacagaaaaggaaagtgcacataacttgaaaacgaattttttatgcaaaccattgcttatatgtatataatgttaaataaaagtaatacttatagcataaacattaaatgtgatgcagtagattagaatggtgagctatgctcaagctaaatctgtgtcaacaatggggataaacttctaaattaaaaaactctcaactttactatttaatgtgtttgcagtgtgttttttagctatttttttaaactaatctgtacatgcaattttcacaaattctcaaatgcattacaaaatctcaaaactacaaaaaccacaccactaaaatgtggtgtgatgcggtgtgttagagagaggttatagtagtcttgtttgtaactaatctagttggttagattaattagctttcttgttactatgttactctgtgtaactacttttagctttctttctagctgattcatttagcttgtataaatacaattctctagcttgtataaatacaattctctatgtagttcttattatactaaaagtttcatattacctatatactacgattgattaccaagtttcaatttaattcgattatcaactcatttaaccaattcaagaatcaa

SEQ ID NO: 50270 - DNA, 2856 bp, Cannabis sativa
tagttcaatctttgtccatactcaaaaaaaatctctaggacccaagtcaaacataacagttagcacccgaacaaatggtagggatgggcatcccttgttctagtcatcaaatcaaagtttgccataaatagataatatagtatttcattgaaattgagcagcatagtactaaacaaataattaataaatcacagattcaatgcaatttaatcaatcgataaaaggaaaattaaattaaggacatgaaaagaatcttctaacatgtcatgcaggtgggagagctggcaggaatcgcggtgggagcaactgttatgctcaacatacttgttgcagggtatgtttgaactctgaccttctatctatcttcctgagtaaagacataagtacacataataaactacattagcacatttctaaactcgtacacacaacacagatcacataattaatacgtgtattttgaatggagacttgaagttacgaacctttgattttgtagggaaataacaggagcttcaatgaaccctgtgaggaccttagggccagcaatcgctgcaaacaactatgaagccatatgggtgtacctcacagctcctattcttggagcactttgcggtgcaggagtctattcagctgtcaagctgccagaggaaaatcgcgatgataatgacaagccttcaacaaggaggagcttcagaaggtgacaggttcactgtcaattagatatataagaataattcaggttcagaaaggaactcaactctagtatgagctctagtacagatagaagtccatctgggtacatagatataatttataaactaaaaccagtaatgtgcatcattgacaatcaagtcagaaattccactctctcctagtccaagctgaccttcttacagcaatgtagcctttctataataaaattggaataataagaagcttataatatgaggcctaatttcacaatcctagtgatcttggtttctttttccctttcatgagtatggttgatcatgcagtaaagccaaaaacagaaatctaaagtattatctcatgtcttaacattatacagatactcactccaatcagtgtgcttatttcattctatgggcaaagcttcaattttaattaatcatcgttgtctcaaaaagacaattaatcttggttgtattacttaataaaaagattaacttggctcctcaatatatttatcaaattctaaatcacaagttctgcgtgttcttttttgtaaacaaaattcaatctttcccaatcagttagaaaaatgatcgaaacagcatccagtcaatatgcaataccaagataatgagaccatgttagtaactaatgtaatgcattacaaagagaaatggaaatcagcaagaaaatgttctaaagtaattgatcggttacattggcttcacttacaaataaatttgcatcgaaatgactgaatcccaattatcaaaatcgtaccttttgtaaaacttttctcagcaaccaaacaaattctaccccttttcacaacccaacacaaattcccttatgccccttctcaaaccagcgaaatccctcgattttgatccgttacatgattataattaggtcgagagcaacgcttaactaacgatagaacaaaaccaccaataagaacaccgaggatatcagcgacggcgtctcttgacgaggctccggccgatctaaaaaaccccaattcgtcggcgacctctttggcggcgccggcgaagagggaagcgattgatccaatccaaatggagtggcgacgcagaaaagggtagcgggttaggttagccaaggtggagaagagaagggttagagaaaagcagaagaggacatggtacaacttgtctcgacctaaccatgggtcttcgtcccccattgaattttgattggtaatccaaaaattccactttgtgttaatcctcagtattttttgtattttaaattagaaaaaaaaaagaaaaggttaaaagttgtgaactttcatgaaaaatgtgaaatttagaattaaagattgaaactttcatgcaaattgttcttcttgacatgtttatgggcatattaacattaagatgtttcgacatttctcaagaaattttttcatagatttgaatatgcaaagaagtatcaaggaagctaatttgataaaatttgttggcctcttaatgtaaactatcagactatctaataaacttgctactcgaatagatagtttggtaagacacttttttggtggggataaagaaaaaaatggcctttatgtgaagcttgggacaaactttgtcctcctaaatttaggaagttttgcaagactacggaaataataaatttattgccaagtgggagcaacttcttaatcttgatggagactaggggtgaaaattggtcggtgatggtcggtttttacaattttataattgaccgtttagaaattataaccgtataaaattaaccgtacggtttttggcgatttttagtggtttttcggtttggcggttttggatggtttttggttttgggcggtttattgcggtttttgacgattttgacagatttttggtttaacaatttttttatttcaaaaactaaaactgaccgtcatgccgaaaaaagcgaaatcgactgccaaattcggtgatgacttggaatcaaaaattcagttacggtctggtcggtttcagtttattgggttttacgatagcctatgaattagttgtgtgtactttttaaataaattttgtttggttagataatttttcattttttcatttaaaatgtataatattttaaacttgtataatattattatgaaacttttttatttttacacttcaa

SEQ ID NO: 50271 - DNA, 883 bp, Cannabis sativa
acgttttgttacttgcactatatgttaaatcagtagtatattttcctatgggttgattatctgtatattttcttttcccttaactttaacggaaataatttctcctaatttccataagggccaaactatagccttcttttttatgacaacgaaggcagtttagaaaacgaaaaattaaaatttcagggggtttggggaggttgtgggtatggatgatctctttcaaagactcaaatagtgataagtttgtcaacttttttattttttaaagaatgaacaaaaataaaaaatccaatggaacaattaactgcatggcaaattttgtataaggactcaatttttggctggttatttaatatataattttgagatagttgtataatctgaagtgtttagctatccatttcagtcaaccaattaatgttgttgtgctgtgtatataggttaggagaggaatcagtctcattcttaaagggtatttcagggaagggaagagggagggtacttgttcgtggaggctacttctgcgagctttgggtcctctctccttctttgaaagggtattaagttgttttagaggaatgttgttggatcaatagtttggccgcgtttgttttctttcaatgagttgaagaattactgtgttggaatttgagtcaaaagtgtggagctggcataatgggttctgtttgttgctgcttgagtgtggacaattttgaagattacatgaatccaaacaggtctatatcttggagctttcaattgccaaagagatggtaggtgcaaagagactaggtgtaaccaatgtgcctctcagtgttcccattgtgttgacccctaagttcaatgccaatgacaacaaatggaaaagtagaaagaaccc

SEQ ID NO: 50272 - DNA, 1718 bp, Cannabis sativa
aaaagttatttatggcataaaatccaacaaaaaattgctgctaaagtggggaaggaaaagtaatttcaatcgccaagacctctatttatatgggtggcaacggttcaaacattttgaaataaatggtctagattgatcccatccaagtctacctcatccaacgactagggactcgaaaagttttcatttaatgcacatgaagaaaaataataaagtatttattactcatcatctcgtggctgcatctccaatgcgacataagcatggcatcttttcaagatcagtcgtcattctcttcccacgagaaacgtgcttaaaactcgaagcgtgagcttcacgactccactaaataagcaccacgcttcagaaaattgaagtaatatcgctgaacatgataactctttggatgcctgaggcaatgtggaagactttttccacattccaacacttggtcaacgaatcagaaacataagaaaagcattggaatgtggaaaaagtattcatgagtctcgagagcttggggataaatgttatctgtattcctggatgaagtgtacgtggcaatcgcggaagggtgccacgttagattatgcctggttagtatataccctctgtcctttggcgtcacggaaggtgttatatatcagaggctacctggaggctcttcctgttagtaagggtgaaaagggctctgggattcctattaataaaaatgctatatagaaggatcagaagtcatgagtgctttaggatgatagcaggctagtctcatccgagaaagccttagccagatgttcctagaacctagtcaagaatgtcctagccggaggtaaattcgacgattacacaccttctgacaccaaatcagatcttttcccttgcatcaaactttggtagtgtgtgtactctgtagctcttttttgcccatcagcttgtctagacaccaacgttgcaaggtgaaacctttgggcaacacgtgttcttggtcccgcgagttgggttgcaataactgtgcaccgcccgatgaggaggctccctacctaccaacggtcagattgtcatattgtaaacataagctattgaaacgtgctgagtacgaaatcctaagtgggtgaagggtatgccctcacccacacatatgcttgtaaatacccgtattttttcctatgcgaagggtgaacaatttttacttatagaacctatgctgaaatttctaaaagctttcttcttctctaagagaaacaaaaggaatgcagagttaatactcatacagtaatcattcgtaatacttaaatactcaccgacaaagctaacaatagctcgtggaactagggatcattaacgtccgaactacgtaaaaaactactggtatattatttatcgtttcatattttccttaagctctaattaattagttatcaaggttcatcacttggcaatactctgtacagaatgggaatcgagggttaaaatgtattaaatgccaaaatattacatatttcatagtataaagacaaagttaattaaattttaaataatattttcatgaaattaaagttatatattttatattgaaaatattttatttaagattaattttatctttgtttaaaaataataaatagtatttatggcataattgagaaaaaaataatgaaaaaatacattatttttattaaaagaaggctaattaggattttttttccctcgaactttga

SEQ ID NO: 50273 - DNA, 752 bp, Cannabis sativa
tgtgtcaacaatttggtaattttattgagagcagtgaatacaagtgttaatgaccacttaccatcatagtgagtacgagacgaatgaactatgaggaggaagactatggtggccccatgaatgaacaaataccatggaacaacatgaagagtgtctacccactgaaccagctagcaaagggacctctcgatgcccaagcaaacaaccaatgcatgacgatgaaggttaagtccaagatgctaggagtttgtcaccaccttcccatggtgtacgaaggactgccaatgtctatgaggttttcataaaaaatgatgtattgcgccaacgcttggatgaaactcttagactcaacatagtggcaagagagatatggtgcccaagaggccatgattaaagtttaaattcgtacattttaaaggtttaattgtgtttctaaaataatttaattaattattttcatagtttaaattataaaaaaaatttaattgaaaaaattttatttatttttaatttatttttttttcaggttcaaagtgcaaatgatcaagttataagtgattaaaaaagaatgtgtgaaaagtacaattcaaagttcaagagaataggccgagaccatatgcatctcgttaatggacttgcatcccaccttaattaagctaataaagaaaaggaaatttacatggtatactaacttttgctatttttttataaaaatactgccaggcggtgttttttacttttttactgtgttt

SEQ ID NO: 50274 - DNA, 6162 bp, Cannabis sativa
  modified_base (970)..(974): a, c, t, g, unknown or other
ttgactaaaaaattatttcagatgctaaaacagataagggtgcatcaatatatccattttaagggggtgcattatagaattttccaaaactttataatattattaattataataatattatggatataaattgtaaatctttatttggctatagttaattatacatgaattaagattcagttagttctcgtgatcatcaatgtgacttatatactaacttttctaagttatatttcaatttggtaattatttataattaagaaaaaatattaatgtctcaaatcctatacgttaaaaaatctgaataaattaagtagtactgtgtttcagtaatttgatttggttataaggttttaccttaagttaagatataaatatatagtacttaaacgtgaatttgtaaaaaaaaatctgacaaaccccaataatgaagataattaaatatatcccatcaaaaaccaaaatggattcatggtaaaatggattcatggtatagttctaatttgccgcatattataagggtgttttatacgatttaattcgtactattttattatttgattcgcactgatttcaatctgtatagtaactcaaatctaattaatctaatctaatctaaaaaaaaatacatattggatcggttatatttgattaattactttttaatatatattgaattatttatatttattaaaaaaatatttttttttttacataactaacaacaaaaaataaaacaaattattgttgttttgtatcttcaacaataaattaaaataaataaaataaaaataacaaatttaaaggaagaagaaaaaaaattatatgtataaagaaatgtttaattctggtttagattatatttttcttgtaaataagaatgaaatacacatttggtttattataatctgaaatatttttgtatcacatgtattatatttttaaattattattttttatattaaaatannnnntgtatatataatttttttaatatatataaatatgtatggattagattgattggatcgattttttttacatatcaatcaaccttttaaatttttcaatctaatctaatccgcacatgtgcggatatctgaactttacaaattaaattgaattgaatcgtgtaaattagattagattagatattttataaacccctagtatattatatactataatttttttagaagacatagagataatttaccaataattattttaccacataatctttaaatattaattgttacaaaaatattatatcatccactttttttatatatacttttgctacaaaaatagtattacttatacagagaacaaatttgaatatatttacataaaaattagaataataaatgttaaagtcatatattgttatgacttattataaattatttcttcacataaggataattacattatgattatgtaaatattacaattaacgtactttttattattaatatcaatgtacatatcgtaactttatgtgtacaagctagtatgttttactaaccaaatacaataacacaaagattactttaataaaacaaatcattcatataatcatacttttagttacagaaatttaaaaaaaaaaatcaagaaatctaaatcttaaataaaactaacagttagtacgtggctcgacacgcaacattcaccatgttaattgttatatggagatattcaaaagggagttgcagcaaattaaaattttctttttgtaagggcaacagcagtcacttaggaataatttaatttgatgatgaatctttataaattgtagggaaatttcttttaatatttctcaatctaaacacaatatgtgttttatgctgtgaagttaattaagtgtcgttattagtaattaaatattaaattttatatatttaatttaataataattataaaatattataattatttataaaattattaggcctggcacagtttttttagcaaaaaaaaagacaaaaattcctaaagtttgttgacttttaatataattggataacatttattcattcattattttttttttttgaaagaacatttactcattcagtgccaatggaaaaacttaaatgtgagaagcctttatgtggtctccctccgaaatcagagcagccgtactcattataattaattgaggtgagaggaatattaatgtatatatatatttgtgcgcgtctttatgtgcagtaataatttacgaaatccaacgataaggttcttattgtgcaaatagaaaatgatatattatgaaaatttatcacgatatgataaattaaaataattataactatgattcattgatttgtttcaaaaatttattataattattattttatatatatttgaatatttttaggtgaatatgttttattttaaatataaatattgacacccacatatctttcaaaataatttacgataatttatcaaaatattgctctataacaatttgctagtagatcgtaaattcgtaaggaaaaataccactcttattacactgaatattatatgtcacgtgtattataaatagaagatccctcacttttcataattttgttttactatagatatctagttttttttttctttctttcttttttatttaaaaatatataccaagtgcatatttaacacttgtaattctgcaaaccgtggccatatacgttcgcatcatgtggagtagtgcttttttttgttggattatcttttagcctcgtttagtgattattatatttctaaataaaaaatattgaagatttgtgtgaatatatatagatatatacagctcgttaagaatgatatatatatttcttttttaattattatggttccgttttcaaataggttgggtgaggaaccaaatgcggccaattatattgtgttattttcccaaacgattgatggatttgtcgtcataccttacaaatttggtttattctctctgtgttgctgtgcactgtacaatactgcacacacatgcattatttaacacataactatatatcaatattggttgtcattctagaagaagttaatagatatatatgtacctgtcttttcttcaacgatggttgaagtgcgagttcctttcatttcctatcacttctcaatattaaagtttctacttatagaatgaatatgatgacgaaggatagacaacattaaagtataaactagtatttaaaactaaaattatatagaacacttctaaataataattagtatttaaattgaatttctatgtataatttagcttacccagccaaaaaaatgacataatttagccactaattagttatcaaaaaaattacctactaattaatttaaaaaataaaaaatatctctcttttttaaattatattaaaagtatatttatataaaaaaatatttaagttaaatttaactttttttttatttttttttatctaacaactgttattttttttaagcagatggaacccgagtccatataatgtaaaaataagatatttttccaattagataataaaattaagtataaaaactcaaatttttttataacacacattcattagtaatacccattaaaaattcacctatatatatatatatgtttaatttttctattcaatcgaaaaaaatcttttatttttacttatgagttagggttgttcgattgactaaaataataaaaaaagataaaaaaaaaggagtttgactcaaatttttataatataaacacattattgatattgtgtaaaaatagatttttttttaatatttttttttatttaaatagctaaataaaacataaaaattcaaattttttggttattattcgtctatggatcaaaatttaacaggtttaatatttatagttaaatttttttagtagcattaatataagtaatattcattaaaaaaatattatatatataataatttcttctttcctcacacaatttttgaaatatatatagtactattactatttaaagggtcaggctaggttgatataatgttaattaacaataatgttgtttgctaataatttgctattcgatcttgatactttacttgatttgtcattttttaaattcctaaaagtctgaataaagcagctcataagttggctgcttgagctagttgctttgtcaaactttactggtgttcttgatttcagggaagtagataaccctttgtttctaatgtaactacttggctttcctttgtttgttatgcatcaataaataacaataatattatttaaaaataaaaatattgtttctaaaaattttaattgatgattattagcagttttttctagaaatgaaactttgagaaaaatatatattgataaagtgttctgttcccgttcttttcccattatcactctatctagctagctatgagtcatcattaacttttggttcatacaattttgttagatattttattttcaaaacgaaaacatattaatttggtgagtcctatctacataatgtttttttaaatttattaggtcactttttaaatttattaagtcactttcaaccctaatcaattagtggtagtaaaaactaagttccaaattgtaattatcacttctaatgtataaaataaataaataataaaaattaggcgtctgatcagatagtgaggattagttgttacttgttagttggcttttattttctgttagttaaagttagttatgaattctgttacatgattgttatactccgttttttttatatctaattcaatatatactctataaaagcttgaagcctatattctgtgattgagcttcatttttccatatattcaatctctttttcacatttttagagcgtcgtgctatatttttttccgatcaaattaaataaaacaagtataccttatataattttgtacatgtaacggcattttctgccaagtatgtatcttcgctgatattttgataaacccaatattagttgtacatatttttatatatttatatatatattttctttatgaaaaaaaaaattatacaccaaataaataaacgtgcagacaaaattacagaagataatagggtcctgcgcccatataataatgtcaaaatggcatgagctggaaattgattgaatgtatatatgtggtaagaattatgtcacgttctacttcgagagaaaagagagaatctaaaagaattcttgtatgtgaatacgtaaatattatggaatttgtaagagaaaaacaaataaatatatatgtcctgtttaaatcaataatgttagagtagtgatataaaaactaacaacgttagcataataataaataataaagaatatttgatatacatgaatgcaagtttaagtagctaagacaaatatattatcactatcacttaaaaaaaatacatgaatattactcttgattgttccacttgcgcgctatcaaatgtagaatgagacaatttttaattcttgatcgacatggatatatgtttgtgttatcaaacttacacatcgttattaaggaccgaaaataaatattctttttatagcatgtgtgtaatatatatatgtgtaaaatatatataacaactgtatttgtaattatttgtatttgtattaattcgaatatatactagtaaatggattttttaaattcttataaaaaaatctaataagattgaaaatcaaatcaaatgtaattggattgatttgattttttaaatggatgtagatttgaactaattttaaatataactcaaatcattaaaaaaaaaaaaaaacatatactcatatatatatttatatatataggtgcaaccgtacttatttactaagttaatttttttgccggaatatttactaagttaattaagttatcaatctgacaaggttaatgcaactattttttctttttttttttttttttggaaacaggattcaaaagcagtacaacaactaataatatatataagatgtgctttttaaaattttaagtgtaggaaaaaccaataattaagccatcaataaaaaatgcaatataagtattatatatcaactagtatattgttacgtgcgatgcacgtatgctatgttttatattaaatattatagtatgagttcggaagaaaataaatgaataaaaaataaa

SEQ ID NO: 50275 - DNA, 943 bp, Cannabis sativa
ttttaggaggcaattgttataccctaatttcagctaataaccagaagctgacacatgcacaagagaaggaatatgaatcagcttaagcattgcatcatgaaatgcatattaaataactcgcctcaagagttacggttgatagaaatattcaaactcgctgccacttagacaaatgcgagataagaataataactattaacgagtaagattggggagataacaagtccatctcgaaataaatataatacataatgaaaattattcaagacgagtacacaaagagcttgcaactcattgacctacatactcgaaaataagagcttgcaaatcattgacccacatactcttgagtaaagagtttgtagctaattgacccacatacttgtacgaagaaagaataactacattcatccatctcgctctttatacgttaaagtaaccacctcgttgataccttccaaaatggtaaaagagaactgggagaagaattgtatctctatacttagcatttttcctacaaagacgataaagaaggacaactcatacttagcaagaaacaaccggtatagttagcataacaagaataataacaaaagagtggttaggcagttatttaatagtatcccatgtgcataaaaatgaaacgtggagaatgttcacgtttcataaacagttacgaattattagatcccaagagaataactgtcaccctgtgaatctataaataggggcagaacccaggaaaaaagggacggagaatctagagagaaaaaaggccaaatattattatcattaatattattgtattctgcaaccaaaatatttttcctaataagatatacttgtggactatgaggagttaacttcaaacccacgttaaaaactttctagtgttcatttattactataattaattctgtggtatatttattacaaaaaaaaa

SEQ ID NO: 50276 - DNA, 2622 bp, Cannabis sativa
  modified_base (44)..(59): a, c, t, g, unknown or other
aactttatatgtgtttaaattatattgttttagaaattcatatnnnnnnnnnnnnnnnncatacatggtagtaaatctaaatcttggtaaaacataatccaacaatgcagaactcctgaaacggagtctagatcacaaagatacgaacattcgaatattgccttcgaatctgcccagaaataagggggcgggcccactccccacacggggccgcagcacatgggtttgaaacctaggtcttcaacaagggtgtgccgcggtgccaaggagtggggccgcggcccgtgggtttcaaacacacctaattcaccccaatcatgcataaacctcagaatcatactccaaaacacatattttcatgcttaatctacagccaacattcatcaaagattcagattaaaaacataaaagctagactccaaacattgagctaaaaatcaacacaattccatcttcaaagacttgcacaaccaagccataaactcatgcttcaagcaaatgattttaaagctacaaaccacattattaaactaaatatcaccaaattattcactctaaaacctacccaaagcaataatcaaaagctaaagacacaatcatgatcacaacaacaaaaacaactcaattatcacaagcatgcaattcaagatcacatttcatagtttcacacatatttcatttcagaatcacatcaataaaaattcagtaacaaaagctggaaactacctcaagatcttccccacataagcaccaaaatcccaagctccaaacacacaccaaaaatccaatggaagcaaatattcaagtgaagaaaatttgagaaaaagagacgggaaatgagggtcggttagggctgagaaaattccagaaaataatattttatccttcaaaaatttcctttattgaatatacattaaatggtaaaaaagaccaaaatgcctttaggccaaatataccacacatacatgcattaaaaggcaaataggtcaatatgacataacacaccattcaaataattttcagaacaatcactcattaataaaatgctattataaaatctcgaaactgtatttcggcccttaacccggttcgactcgaaataccatgttgtgactataccgcgccaacttatcagagaacatctaaaaaaggacaaaacaagtatactatataataatatagtccataagcacggaattaaattaaatttatagttttacccttctcgggtcaaaattacaaagatgccccttgctcaccaacagggtcttagcatgtcatttatcaactaattcacatgtaataaattatataataatataattccataataaatacatatttaactagttagggttcactaatctgttttcttaatcttaggatattacagaacagtaccgacgactctcctccagctcagctcccctctctctttcgagtggtaacctgcttaactctctctctcactctcccaagtagattttttgtttgggtttactagcaaaaaataactcaatcctggaatataaatatttttttgttgttctaaaacatttcactttgggttttatgatagatcattgttttgtttaatttgtgagaataagctaaaataagaatctctaccactatatatatatatatgtgtttatgtaaatttgggatctctctagtgttagtgcactctctcttgcacagtgtatgtatatatatagaattttttttacttctatatatatgtgtgtttttttatgtatatatgtcattgtgtatatataattaagtattttgagagtggaaaaagaatcgatcgatgtgctaaagtaggcagaaagtacgtagattaagttttgattttccataagttgttggctatttcattgaaattgtttcaatgtaaattactctcatgtctcgtttacataaatcaacaaggcactaatgctcaatcatttaagatagcttggtaagaataattatatacttgtgtaattatatgaattatcagtatattttatatgtaaaatattagtactttgttatcaatataatgagttaacctacatatatgaagattggataaattataaaggagtaaaattacatatatgttgttgtagtttttgatttgatctcagttcctcttagaatttaaggtgtagtatacacgtgtcttgcttagtcaaagggctgttatggttgttaaattcttgttggagttagttagtttgtcctaacctcctaaccgattctgttatgtttagttgttggttcagagttggttcaaagtctgtatataaaatgtgtcctctgctgtaattcattcattcaatttttcaatgaaacacattttgatctcttcatcttcttattgctaaaaaaacggtcaattttggagagcttgattttacaagttagaacctaattacaaatttcgacgaccttaaaagtagaactagacttggaattgaaaatgaaagttgtagatctcattcttatattttctgaacatcttgaatcgttcaattctgaaggagtcatggccaaaataacaatctaaatacgcgacaaacaatattcaacaataggctcttgcctcagcgagcgagtcatggttgc

SEQ ID NO: 50277 - DNA, 1909 bp, Cannabis sativa
tatatattacaacatgttttacctgggactcgaacctaggacctccaacactcacacacccacctatagccccaagtggttttatttataagtattttgacgatcataatacatactatgtagtgtgctatcaactttttattataattttttttaattaatttttgtattcgaaattatatatgagaatattttttcaaatatttttttcagagcggtgtttgttatactgataacattatctctatgaacttttgaaaaatttcgaataatttactgtatagaaaacatgtttaaagtttttcgagcacacgtgctaaactgaaatatcagaaactctgttttcgagacggtaaagtattattcgaaattttcaaaagtttaaagggaaaataatattgtaactatatagaatcgctatgaaaaaaaattaaaaaaaaaatattccaacatgtaatttcaagcgtggaggttgactaagaggttgtaataggaagttgtaattagcactcctctatattttaataagatctaaattttattaactcaaataattcaatagaatattacgtacttagaatcatagtagttgaataggtacaaccaacatttaaccacgaagttcaagtaaaatagtaagcaacacaattagcggattgcttgacaaaaattacaagacattattcaaactataaagaattcatctctactcagagatatagaacccaaaaacaaaaggcatatccatccaacttcaaatagcttagatcgtgatcaaactgtccgattccaccaccatatcttcacgacctgtctctttcaaccacctcaaaacctctttaaccctgatagcctcgacaagaacaaggtcaatcacacccatttgacttgttgtctgagccagaataagctgatcagaagagtttcacgccacccaaccatacccatgcttgttttgattgttaaatatagttgtatcaatattgattttgatcgtattaccaactagggcaatcaacgtgttgtaaagagaacaaagaggaaccaaaagttttatcttgagcacatatccatcaatcaaaatttcccttaaccaaaaaaactacttctttacagtcttattcttatatcattccaaagcttatcattgtgcacagaccacaacgcccagcaaagcatagcaactctatactttctcttgtaatttcaaatctgaaatctttcatgaaactattgctatattattttatataatatagtatttagattaaataatataagtaataaataaattagtgtgaatatttatcaaattataacatatatatatatagttacatatgtataaactatgatataaaaggagttataaatcttttatattcatgaccataaaattctaactcatctctataatcatcactctttaattagtaaattgagttactaatggtatttgaataatattaaatggtataaaaatatatagttggagacttttttctattatttatagggtgtataaatgatataaagtcaattgggaagttttaaattgtgtagagttattttgttaaatgctgaaaaaattaataaatggttacttggtactagattttgaaattttgcactaaatgcgacatgtcttgtggcaattttttcagcatgtatttttaacattttatgaacgttgtgcttggtttataatagctcccataactctcaaatcacctgtttaagtttataaatgtgtccaatttaatattggtaatatctaagggctttatagtgaccattcatattcaaatgggagtgaaaactctataaatagaggtcatattattcacttgtgagacatgtatttaaaatcacttgttgtggctacaaccttgtaaggatatgctcatcc

SEQ ID NO: 50278 - DNA, 861 bp, Cannabis sativa
taataatctcacaataactaatattgattcatcaataaataaaattagcattgattgattattagaccagaaattaatattctctgttccaactttaattccagtactgtctcaaattaattctatatctctggatatatgatattattatctattattcacaagtagctactacacattttgtatatatattgataacttattcaattcgaataaatgagcctgcaatgccttcttttaattttttatttttatttttgccccacctaaatttactttggattttaacgagtatatataaataaccatatatttattagtgaccatagtaattatggcatttaaaaaaaatacaaaaattaagaagctggatatatcctttacataattgtcaataaataagaatatttttagttgattaaaaaaatacttacaccataaaataaagcaacttacaattaagtattatatcagttttcgaataaaggaaaatttttaaaaacatatatattcttttgtgttttatttatatttttaaaatttttatttacaaaaattgataactataaaatagaattagttttttcaacattactttttaaatttatgttagctaggttagagtcttttaggtttattttcttatattttgtttgtttcattcattttgcttagttttagtactaatttattattttagtatttttagtagaaaaattttgtaagaaaaataaagttgaaacttcaagtctgaattcgaccatgttctgctaagattttgaaaaatgtcagcataaaagttttaaatgtctttctcatctttcaaacacatcttgaatcaactaatttagagtttgtaca

SEQ ID NO: 50279 - DNA, 1277 bp, Cannabis sativa
  modified_base (566)..(566): a, c, t, g, unknown or other
aaagccagaggtttccccaggcccagccataactttgttattccatttaccattgacaaaatcaaaaatcaaaacttgaagcaaaaacacaaaagcataataattatattccactcattgatttagaaattttaaagaatatcaagaacaataatttacacacaaaagaataaaataaataaaagaatcttccaaatcctaagaagaaaaattcgagttacaaaagccccaattatggatcttaaataaataaccataaaattagattgtgaggaaggaaggaattaacagtatatataatatatatttatatcaaaagattagaagtgacagccgcaacagaggaagaaaaaacagagagtggagacaagaacgacagcttcaacgacatataatatcttgaaaacgacgtcgtctaagatgtttaactgagactgagttggagaagaagagtccttccctttccatttgaaacccgaaaatctccatggccatagctctttgatcatcgtcttctttaacgacaatgtcttcatcattcccattaataataataataataatantaataataataataataatcacagatatgagatattactctctctctctctagatgaggaatggttctttaagtttcagttgtaataagcattgctatatatagacgttagataaggacagcaggtaagtgatgggcaaagataacggtgccttggtttcctcgtaagaagagagtgaaaaacaatgaaaaataggggtatttttggaattttaaaaaatctagtggagtaagaggaatatatttggagttaggggtgtttattagaccaaattcaatatttgacattatattttatctgattcaatctaattaattttaatcatctaatcaatctattgaaatttgatcggttttatcatttgatgtatatttgatcggtcagtataaaagttggaagaggaaaatgactaaactagccttactccacattataacgactgtatccagcactgccgttgttgacgttgtcaaacccaaatcatgacgtgtccagttgtagataacggctacactctgaaactcattttattaattataataagagccatatataatttgatatctcattcaatctaatacttttctctttctcacctgtaattaggttcatatcattctatccaattaaacttaaaaattaaattcaatctaattcaatttaatttaaaaacatgaaaaaaataagataaaatctaattgatattgaaaa

SEQ ID NO: 50280 - DNA, 1661 bp, Cannabis sativa
tagagtcatatttggctaaaatcaatgaggaagagaaatagaattttcaaactctaatgactaaagctattttcaaaaatacaaagtgaagagaaaagagaagatgagatattagggttttctatctttttctctttctttatagcacataataggtttaggtttaaaatatttatttaattaaaataataggttaaattattttaagtggttgagatttaatatcagaccaccataaatttaaatatatacttatatatcttttaattaaataaatattaataataattaattatgtaatataaataatgtatatatatataaaatcgtaaccaatttagggtatgcgtttggcccgcagaggttcagcccacgcgtgtcagggtacggacccagtgaccaggctttttcatgtacaatgtcagagattgtcccccacgacacgctgtcgtgcaaagcatgtgtgtccttgtatcctgggctaaatgatccaacggctaggagaaagggaaattcaaatgtgaatgaccttgaggtgacacacgtctgaagcccagcctgtacaactggtacaatttgacacccataaaagccacatgggaaatatgccacctaccaatccaacggtaggatttcatccctacgatgagccatccaaggtggcccatgcaagaaagttggcctataaataccccagaggaagcacaaaggggggatccctttatttcaggcgtttaccttaagattgaagacctattacttattcttcattaagaaaactcattcatgtaaccctactattaactatagaatattcctactaaatgtcctcttcctcaagaggaacaaggtggaaaggagtaaaagtccattatttatgtatttgtataaacattcatcggccaatgagcttgataaaatagactcgtggattaaggatagttaacgcctagaccacgtaaaaatctcttgtatgttattacattatttacgccttcattattttcttaagctctaaaaatatttgattgccgaaaaacacagtaaaaccatctcaaataatgaattctctacaggccatgtttgggcagcagtctaatcaaacaagacatgatgctactcgtagctacatgaattgcaagatgaagaagggtgtccttattcaatctcatgtattgcacatgattgagctaatgcatgagacacatgggctatcattgaggaaaggactcaagtgttaggatatatgccctgaaaagcatgtaaagatatttttgattattaaataaagagtaaacatttgatgtatgtgcgaatgttaaattgtaaaatatcaaaaaattccttattaatatatgaggttgatatatgaggttgtgatgaggttgtggcttgtggcttgtagctgtactgtagctgtacagagaactaagaccacttagctatgaataaaataatcaacaacatattaaagttattaattctttaatcaatagttactagtacagttcactgagtctagttcttcggtgcaagtatcttggttcggattactgatattgtgagacatcaaagtgaaggtactatatataatagattttatatatgacaaggacttctatgaataaagttgtctttattaacatgccatttatcataaa

SEQ ID NO: 50281 - DNA, 1449 bp, Cannabis sativa
tgtccacattgttatggagatatagaaattcttactcatgccttgttcttttgcagctgtgttagaagggctggaaaggtacaatcttctatcctttatttatttattttttgatcaattagtgaatttcattactccgaaagaatatacaattacaacctattagcactttcatctgaaggccttatattttagtctatacaatctgattactcctctattacacgttttttatattacaaccattggattacaaaatcagaacaaaaacagaccaaaaccagaaattgtttcctggtttgcacaacttctggtttttagatttaaaaaccattctctgtctatcggcttggttttgcttggccagaaacacaatgttctattcttcctatcctccttaatctttctcacaacctgcttaactgatatggcatctgaattccataaaataccattgcgaacttgccaaatgtgatacacaacagcagcaacagcaactgttataacaacttttcgaaatgagctgctttttgctctttttatccacctaagcaatctgttcaaatctgttgtttcagctctccaatttaaccattctttaactttggataagcaattatgagagaaagaacataagaagaataagtgtttagaagactcaatctgatttctgcaaaacagacatgagtcctcctcaataatattcaacctatgcaatctttctctagctttgagcctaacctgtacaacaaaccacaaattaaagctatgtctaggaatatttagtctattccaaacctcatggctccaattcactatgctttgtgatggacaaagagctttgtagccattagaaattctataagggactgctgcattttgctgaatgttcatgacctctttaacttggtttttgacagccaccaatttcttccgataccaactagcctgggaaggagcttaataattccaccaatcctcgcctttcatatatacacaatggatccatctaaccacaaattgtcttccttgtttgcaattgcccacagatatttggtcatcgcagcaatgtttcattcaaaaatctttttcagtcctattcctccaactttttttggttgacaaacataatcccaagctataggagcagctcccacagacacatgatgacctttccacaaataggctcgacatatagcttcaatgtcccttatagtcttcttaggtaacaccataatttggctccaatataagtgaattgacatgaggatagagttaacaaaaacaacccttcctgctagtgataaattccttgaactccatgttttgatcctttattgtctcgtatatcttttcatgagattatctttaataataatgctaatatgtgtgcacaagatgtgaaattttttctgtgtagcttgatttatttggcataataagaataag

SEQ ID NO: 50282 - DNA, 1484 bp, Cannabis sativa
cacttgtgttggtctatagggtcagtcgtcaatctaggaagtggctagagttgcatacttatgtataagagtcattattccatggatgtaagggcccaatggacgcttgaagcggggatgttacaattatattgggctgaccttataaatttttatacagcccaacaataaaaaattacaagaatacttattgctctaactatttagccgcacaaaccaccatcttcaacaacgacagcttcaagcaaacaaacagcacatcaactaaaaaaaaaatatagccagacggagaatcaccataaattttgacgaattcacttgagaagaagaccataagcaatccaaacacatacaatttcaaatatatgcaaaattgtgcagaaaaattggtatgaaatcaaaattcaaccttgaattacaatataaatcgcagaaaactaatcctcctaatatcactttttagattcataaaatgtaaatctgtttgaaatagatctggagttcccaatcaatctaaattaggtataaatagaaaaaaaatgtatcaatgcactagctattgtttctcctattccattaacgttattttttagattttgaatggtgaatttattcatattaaatcacgaacaacaaagaaaatttgaattcatcaagagtcgcgtacatagaaatattgctctggcttttaagtttctgtgtggttgcattgcagttacattaaaatttactaacgctctgaaactcaacatatcaatgattacaaactgataacgatacaataatttttatgatatttgcaagtgtttcatatcgacaatccaacacaaaactttttttaaaaaattataacatggttagttttattaatatattcatttagttgttataaagttagtttacagaattttaatagttgcttctccacataatattattaaagtacaattgattgttgatcggtgacaaaaaaaatactaacaaattttttcatgacgatgtctattcaaaattttcatttctagttgcaattaagttatatattagttaagtaatagttgtgctactacaatattattatattaaaaatttggctcgaaattagcaatacacgactcgtatagataaaaattaattgtggtaagtttttttgtatagcatagggacattattagttattttaaggtttaatattagttgcctcacagcaaatataattgttgcattacagtttcatgacagtcatcccatagatgacttacaattcataaatttttaaactgtcaaaaaaaaagatgcaattttgtttctcatattttgcaatggacaacctgatcaagaaatgaattgtgtaaattgtgaagctactggccaatacattaattcaatagatttcaaatatgaagaactagcacacaagttaaaataggtgttggaatgcaaccaagaaaatactcaactgtaactgaaataccaagtgaaag

SEQ ID NO: 50283 - DNA, 1144 bp, Cannabis sativa
ctaagactttaattctaatacaaataacctgtttaacattttgcacaaatctctttacacagtagggacctctttatcccaaaaaactttgttcttagttctccaaatcatatatacacaagcattaaacaccataatgtaaatgtctctcctcgtcttgctttgtttacaatttgtatctcccaatccaattaagtatttctttaaactggtattgatttgatccaataccaattcattgcatcaactgatcaaaacaattcttactaaatgtacgctgaaaaaacagtgtcacaagcttctcgagtccagtatttcatggtctcaatctagtagcaggtcagcatttacctttattacttttgtccaataccaactactatcttggtgaatttatacgtactcccaccaattcaaacctttcatataaatttcatgaacccatttcacttacaagttgtcttgtttttgagccgaagcccacgcgtacttacccatagctgcaatgtgtcgcgaaccatgccaaagataatctctacagatccctatcaatgacttgcaagacttttttaattaggcaagaccattatttgagcccaataggagtgaatggcaacaagaatggagttgactaaaatgacctttcctgcatatgaaagatgtctatagctccatattcacatcttctctatcaacaacagttcacattccacacttgagatcttcttagaacatattgggacacctatatatatacttaaatggcagattcgaaaaatctgttgcacatcttgactctccattctcgtacagaaaattgtagttttattagcatttgcttggagaccagatgatgtagagaatctcttgctttgtagcagtaccatttaatttgtagataaaattacactatatttaagtttttagtgtgccattggagatggactgagcatcccaaagccctgccccaaaatatctaacattaattttggataagcttttggattctaccccaaaggcctaaaatagagataattttcttaaaactcaaaatgatgaatatcattacaagcaatcaataagttttaagaaataattctcatatacaaaattcaaatttttatttaaattgggaacacactat

SEQ ID NO: 50284 - DNA, 849 bp, Cannabis sativa
  modified_base (253)..(254): a, c, t, g, unknown or other
ttttgaaaacactcaaccaatcaagaattcttatgtgtacccccaccattttaattttcaaaaacataaaatagttttcaaatcctaaaccaatcacaccctaatttcagatgattttttgccaataaattgacttttaaaagttttgcttttattatttaacttcgtggagttttgttttggtaaaatagttaatttgatgaagttttaatgataaatagccaaaagaaaatatgtatatttatatatatanntatatatatatacgtatatataatagactgaatcctggtttattaacatgtgatcttaacaagtgaaaaaactttatttgttgtgttgaagatttttttttcttacaaagttgtcccattccacaggtaagacacgctaacaaaatacaattaatattttaacatgatcatttactaaatcagaagctgaaaaatcagtcactttccaatgagtcccctgaaaactaccctagctcttttgaataatgtgataatgaattaatgaagaggttaatctttattagtttgctattgtttgtttgtttcaacagctaatcagtggtggcattcttgctgtattctttaattagcattaacatgaagcttgttgctgatttatcgtggaagccatttcacacgttgcttttttttttttatgatttaaaatctttgtttataggattttaactctgtaaaacttactgtgggaattgttggggaagtgcaatgtaaaatcacagtgattactttggtaagttccatacatctcaccttcacttcctctatatttatcttttatgatgtttatttagaccatttcttttttttttttttt

SEQ ID NO: 50285 - DNA, 848 bp, Cannabis sativa
taatttaattataaagctatttttcatatgagaattaggacactattgagtttccaactcatcaatttcatgattaggcaaaatggaggcaaccgactcatattttatttatcataatataaacccataaattggccacttacacttgtaaagccaacttttgaagttttaagtgttgacaagcaaaaagaaaaatccaaaataataattatttgtatgaaaatatattatagcataataagcatgcccactaaatattattattttatatcacattatataatattatatatttaaccattcccactagaagtcgacaacttatgagttggattaattgatcatttgcatgctaattacacaattaattaatcattaattttctttaagtttggtcccatgtagctaggtttttgtgtgtgtgtgacaattttataaaaataaatgtaacatatggtatatgtgatttgccaaaataaacattttaaaacccacttcagttgctttcattcagtacttgatagatatagtgaaaaataatactatacaatattagtcaattatataaatatatatatatatatatatactgtataagacaagttcacttgtttctaggatttcaaatttcttcaatactattctgttgaaagtgtaaaaatatatgtagttaattaatataaaatatggtatatatccttgtctgatgactattgactagttttcaaaccttggattttttcttcttacttcttgttttttctaatattttttcattgacttgaatagttaagacttctagctaatgaaaataaaggtcttcttaggaatggctattaagttaatag

SEQ ID NO: 50286 - DNA, 1347 bp, Cannabis sativa
aaagttcaaattactatatttcttttatggaggttgatttaaacttttaattcaatctatatatttgtctcattatatcaattaactaaaatatagcacatgaatgtgaaaaaaaaatattagtgtttattttaggcgggttgcacttgtaacccgatttttatgttgggtttaaaaaatataacgtaaatcgactaaaacgaccgatgtacacacctagcagagacatagatagggtactgaatcatattaggaacttgttgttatttgataatgttattgcggtatcttttatttatcgtgaagcaaatggggtagttcacgctttagccaatcaagtttgctacacaaagttagtgctatatagattgggattggatctccattgtgcaaagcttgctttagagcaagattggcctaatcctttgtaattttctcattaaaataatttttgttccattcttttatttgtgataagcctccaatacattttggatataatagaaggacacataagctaggaaaaggtttttatttttatctaattagcttttattttaaatggttgttttgacttaatattttctatttaatactattttatattattcaatgcctataaataagggggaggggtttatttgtgggggagcttgaaaatcaaagaaaataaactttaagagaaagcagcccttggagatgctaacatcttgaaagttagattttttctttatttcatcatcaataaagaagttgtgtttaagggatttgataactctgtgttcaaatttggatagataattttattcttctaaacaaatattactaaacgccacttataaaagaaatttttaagactcttattaaatcaaaaagtgtgaaaaacatattaaattgaaccaatattaatttttttaaataatactcttaaataatactcttaaaatggagtaatagcattaaaataagaatctttataaaacatctttatttcaatatctcgatagagaagaaaaaaaaaaaaatctcgaagagactttggtcggaaatggcagagtacaaagctaacttagtccatctcctacagtccgtcaagcatgattctggcaagtcctacactcagatagcagaagagactggactcaccaatgtctacgttgcccaactccttaggcgccaagctcagctcaagcccgaaactgccccaaaattacaagcttctttgcctgacctcactcaagatcttattcatcacatgatgaagccacccatgaggtcttacgaccccaatttgattcaagaacccactgtttataggtcccttttctcaattttcttctgctctaa

SEQ ID NO: 50287 - DNA, 1168 bp, Cannabis sativa
cttacttctaaaacttgttgctcaactgtccttccttcagatgcagaacgaccaccaacaaaggcaaggtaccgcataagcattttagttgtctcggtctttccagcgccactttcaccgcttaccagaatagaattgctctttccctcattaatcatttgcctgttcaaagaaatatgattaagccaacaatgaacctcattttcaaagtaacaaaagtaggatgtgcataaagttcacctatacgcaaaatcagctatggcaaatacatgaggacctagttttccaaatggagctcccttgtacaattccatcatgcatgcatcatacaaattggaaaggctttgaaatggatttatggctatgagaatgttcccggtataagtctgcaccataatgtcaaattattatcacatcaccaacactaccatataaacataattaatgtaattaggcacagaatattggagtaaatcttacataaatttcgttcatctcatatctggttgccaaattatgcagtaccccaggttcatgcaaatatgataatttagtcatgtcatctactccatctttaggagtttccatatctttcggatataattttgaaacttttgcaacaacctaaaaaataatgaacaaatttaccatgaatcaaaaagtttgaaattgtttaaaaagaaaacaaaaataaaaaattataccttctttccattggtagtttgaatctcagcttcttctccatcaatgtttaaaacatgtccatcaacccagactaattctggatctccaacccaaacatgagaaccaacaataatattaaccggcaaaccctgcatcaatgttgaattattattagtattcaaattctcaacaaagatttgaattattattcaaatacaaaatcattttgagatgctgctaaaatcaacaaatttcaataacacaattttcttaactataaaatcaattatcacattagatcattatagatagatcgtaggagattaccatttcgataaatcaaagagattatctgtacagattgaaacccatttcttcttcttcttcttcttcagtggaagattagggaagaaaatgcataaagtgttgggtataataataataataataatattaatgatttgttgcattggatttgaatttg

SEQ ID NO: 50288 - DNA, 1091 bp, Cannabis sativa
agagaactgagaaatcaaaagaaacaaagaataagagggttagagagaaggagaaaaatatgagaatatttcggtaacaagtgtaaataatagtatattttgttaacagaggactaaagtgaacttttttgttatgatgtgcatttggaaacataaaaacttaggggttgtttgacttcataacttaaaattgtttacaatttttaaaaacagaaaacaacttttaaaaactaataggggcgtttgactaaattttttaaaaataatttttcgaaaacgagttttaaaaaactagaaaacatcaaaatgttgctttctattttcaaaaataatttttttaacatatttttttttcttttttgctcacatatctagacttggatcctggagtcggaacttggaccaaaacccggaccaggatccagatgcagacccgaacataggcctgaaccccaaccccgactcaaactcagacctaggcctcagccccaaaccgagacccagacccaaacgcggacccaaacccaaacccgaaccccaatcttgatccagacctgaacctaatattgatttggaccaagaccctaatcctgatctagacctcagaccccgtcccggacccagaccctaatccaaactcggactcgaacctcgaacctcaactcgaacccagacctaggacccagacttggatcgagacttagaccttggacccagacccaaacataaacctcaaatcctaaacccagacccaaacaccgacctggacctcagacccagaccatagacccgaatcctagatccgaacccgaacctgtcccgagtacggggtctggggtcaaagtttatgtctgggttcaggtctggggtcaaagtccgagtctaggatcgagtcgcggggtccgagtcctaggtctgggtctgggtcggggtccgatttgaagtccgaggttcgagttcgagtccaagattcgatccgaggtgggatgagttcatgtcatggtatggtgtaaaatattaatttttcttttagtaagaaaaaaatctataaatagttttaaaatttttgagccaaatacatgttttattga

SEQ ID NO: 50289 - DNA, 1036 bp, Cannabis sativa
aaaaaaaaaaaaaactaaaattgaactcataataaaagaaaagagttgcatatatctatgaagggaacagagagagagattataagaggcccctccggggatggggtattgagtgtagatctagatctagatctggaaaacaaaaccaaacaaaaaaaaaaaaaaaaaagaagaagaagaatataaactttactactcaattagtcaagtctcttatcttctcttcatcaaatactcttattttgaactctacttaaagcacagaaggaaaaccgtacaataacaaacaacaaaattctgtaaaataagaagatgggcgaagagattaaaattttcagatcagaaaacacaaaaacaaatcattataaaagaacagagttgtaaatatttatgaaagattataacctcaactgaaaggaacagagagaagagaggctgctcaggtgcgtttagggttaggggtgacgaagagagaagaagaagaagaagaacaactcaattttattttattttattattattattttaattagatagatagacttaagattgtttctgactcactctgacacaaaatcattattactatctttttttttttacttattattattctaaataataatcaattataatatatcctattattctaaaaatatataatttttaaacggaaaatatcatttgtttaaacatatttgcctcaatttaaataataaattaccctaaaaaaatatccctataattaagaatttctatatatataaaccataattaacagtttctatatatatatataaaatcgtttttaatttaatatataatatgaagattaggaataaattaccgtaaaaaaatatccctataattaagagtttctataaatatttataaagcataattaagagtttctatatatatataaaatcgtttttaatttaatatataatatgaggattaggaaagtggatctctaaggcatttatttttaaaattaatttattattaaaatggaagaaaatatctttaacaaata

SEQ ID NO: 50290 - DNA, 1289 bp, Cannabis sativa
taatcttgaatattttagaagtctgttctccatcttggtttagtgtgcaaacatccttgcaagttatttatttttatttatatatatataatttcccaagaactattccatatagaaaatctctaaaactcaaatattaaataaaatttgtagatttgtaaaaaaaaacttaattgtctattaattgaatgatttaaaattgtgaagaaaataaacttgaataaatttgtaaaatttaattttgaatagatgcacttttaagctgtataaggtataaggtaaattaataattaaaaaagttatggagaaaaatcaatcttccaccatcgatcatttttcatttatctctttgttctaaattacaatagaattttggtagtatatattcagatgcacttattaatttaattttaattacaataattatgttgtagttaataaaaatatatttaatgactaatatttgttgccgtaaactttttagtaacaacataaaaataataatttacgtctaaccacaataaacatttttatatatagtatgacatcgatagcttatatacatggtaccaaaaccaaatatcatatgcgtcacaattttagttttgatattttttctttcacatttctccatatgtttattaattacagttttacgagttcttacaatttacgtacattagggttgacaattaagtgcttcactattaatcagactattaattaaaagagaaaaagtaacaagctcgattatcctactattttcaacttgaaaatccaataaatgtaagcatttgaaaattagtgtcaacctgctcatgtaacacaacctaaccaaatatataataaataacatatactaattctacaagaaaaaaattgattttttcctacactactttttcatcaatgaagaaaaattattagtaggatagcaaattcaagaattatatgtaaaggcatcggtaacttacatgccaaaaccagacatcacatatgcgtcacaattttagtgtcgaccgataactgtaccaatgctaatttgttttcgcttcacttttctattaatgcgaaattttcttttctctttctcttcttttttgtagtgttcattacagatttttgactgagaagttaggttggttgaaccaaaatctagaaaactaattaagaaacaacaatgggaataagtctagacaacaaaggaaaaaagagatagttcctttcactactacaaataaaggcttttaatcccggtttttaaggccttttatcccggttttcgctaa

SEQ ID NO: 50291 - DNA, 1473 bp, Cannabis sativa
caaatctgaacaaatggaaaattatcaattgaaaaccagccctcaatcgcaaagaagctagcagccattgacattttttattaaagcttggatcaactgcaaagaaaacaagggcagaaaacaattattcttgttttcaacttcccaatatgatctctatcaattattcctgttttcaacttcccaatatgaaaacaagggcagaaaacaattattgttccttgttgagtctagtctcgcggtagacttctttgcctcctcggtgagtattgcaaggtgttcgtgctccttctgcctctgtttcttgggaccctaatctattatggttattatgaaggaagtttgcactggtgaaacgactgtggaagttgacactatcgactcgggcacaagtaacattatgcaacgggatagtactatggaagtggaaatgatggaactttttgaagaccttactcttgaagatattgtggccaaaaaagcttgtgtggggaaggtgatagggtgcaaaacgatggctgcttcagttgtgaaaaagatcttactggggatatggaaccttgacaaaggctggaaaatgaagaagtttgaagagggtgtgcttggttttttctttgactcagaggaggactgccaaatggttatggagagaagaccatggttggtcaatggagtccttctgaatcttcgaccgtggccgattgaaggggaggtgtgtctggctgagtttgaggtggcacgtttttgggtggagttccacggtttgcccacgagatgtctctcggaagataatgcccctatactagctaagaaagttggaactttcattaaaactgatgggagaagaaaagaagatgtggtccggcgagggttcctccgatgttggatagatgtttggatctctcatccttttccagcggggtttttcttaaaagcaggggctaatccgagttcttggattcaattcaagtatgacaaccttccatttctatgttttaactgtgggagactagcgcatgtgactggcaaatgctcagcccctattatgtgggtcactccggctactggtcaagcggtgagaatgtatggaccttggattaaggttgatggagccaaatgaaactgcttcacggcaagggggagtcaacgcgaattgatggttaacgatgaaggcccaagcttcctcaaacttagccgtcctaatggcaaatggaggagaaaatccgatgtccgaccgagcaatggaaccagccataacggaaacacggaggcagccggcgacgtgagggacgttgtagaaggtacgatgcatggtactacaaccatgcagcgtagtgggagcatggagcgtacggaaggtacgaagaatgccagcaaggcaaaagtaggtgacagtagtgtggaccctgtttcaaacgtgcctgaaatatggaatattcccccaaagaatatcttaacccaatatccgttacc

SEQ ID NO: 50292 - DNA, 1763 bp, Cannabis sativa
atgatatttacccttaaaaaaattattcaacatttaaattatttatgaagaaaacaaattagaagttgttggattggactaattatatatggagagataccaactttttattgactagcttgaaaataatataattatgaattaattaaccaaagattaattcccttttaaaaaaagtttaattaacccatattattatttttttagagagagaaatatttgttgtttagtgagaagaatgataattattaggagctaatcaatttctaaaatgtgttaaaagtttaaaatcagaaatgatcaatcaaagtctttttcccattaatttccaacttttaaaaaggtttaaagtttatttattttttctttttgaaaaaggaaaaagaagttgtagttctatagagaaccacgaaaaaaacgaataaaatgtttaataattatctttttgaagatggattgatttaattggtttaaactcaaaatttgaagcgtgttgaaaattgaaactataataagaacgacatctttagtttatatttgaaaataaacaccaaataattataccaatatgccctactttctgacctataacatatatataattaacacaaataaaaatttatataactccaaaatatttatatttgaaaaaaaattatgtggctaagaaaaaaataaaagtgcttgtaaaggatttcatcattttgatgcttgaaaaaagtctaacatatttttattttttatttttcaaatacatgataatcaagttggtgggatccagagatattcctatttagtgtttatatataaatgtacatagatttttaagtactaagtattatatatattagatataaaataattaaaattattactatatattaattataattgcaatgttggattctatatattaaatatatatatgtatatattattgttattattaataattatataatgcatgtactttttgtagacatatgccagttaataatcttgaaaacgattcaaagactcttatcattttctttttgatgagagaatttccatattgtacgttgattgatcaaactataatgatttgtagtactatttacatcaagaaaaaaactttttatattgattaaaaagaaaattatataatatatacacacacaaataaaagatatatatatatatatatataaatattatatagtttttttttttttttttgtaaaaaaatatgactttcgatatgaacattgaaggtaagttgtacatgagaacttaggttgtgtttggtcgaatagaaattaattagttttcatacatacatttatttatttagttgtgttttaagtattgaaatattttaaaatagaaagaaaggaatccaatacaaaatgaaaaaaaaaataatataataatttttttgtgcattttataaattttattttatatatcctatttataatattcctactctcattgttataattattaatataatatgagatttagtagcaacaaagttttaatttgttttacttaaatataatattaattatctcactatttggcatgttattataaccctagctctattcaaatatatatctttgcattctattaatcatactatctagctataataatatactatacgtacgttattagaatattttatttatggaaattattttctaattaaggaaatgattttctatttaaggaaataaataaatagttgattttctgttaaatgaatattttatatt

SEQ ID NO: 50293 - DNA, 1049 bp, Cannabis sativa
gttttgtttatttagactttgaattcagtatcaacattttaactcaaatgaacccaagattctattgtagcttggaaatgaatcttcaatatgtataccttaaacattttcctttctaaatacaccaaattcaaactcattccaataaggactcatttaattgctaataatgatacgtgcacccaaaatatgtacaaaacattacattgcacataatgatgctgcaattttttttcaattgaaacggtttcacgtgtgtaatgttttggatgcatttttattaatattcacattttcttaaatagaaaatttgtttggttgcatcttattaccagttaaatagtgggatgagttatggagaagaagcaacgtgagaaataagaatgagttgcacacttcattttcatgtcaaatttgaattggcatgtgtaatactctagtctctactaatacatgcattaatttgaaaatgttagaataaataggtggtgttgtttgatagatcacatatgatatcattattaatatttggtgttttaatgtaatttttattagtttcatttcatcatattaacatgtatttttttcatgtttaaaaatataatttatccttttaaccttcaattccattctccaactaatcttttaaccccaaaacccttttcagtattactattgaccttaataggtgaaacgacaacctctagaaacaaaatgatatttatggacactataataaataggtgatatttatggacactataataaagaggttattgagggtgaaattcttttatattttaattttatacatttaatttttttatatatttttttttggtaaaatcctctatatttatttatttttttaaaaaaatttgagataccagttagatattaccattaaatactaattagattatcactgaattggctttgaggttttactacaatgtatatacatgtatatatagtgatcatccgtatttaacaataatatttagttagggcttatatcaattgggttaaaatttacaaaaaaaaaaaaa

SEQ ID NO: 50294 - DNA, 1104 bp, Cannabis sativa
gtttttcaggcggttcagacggtgatcgatcgattttgctgaagggtttgggactgtgactgacggtggttgcaggcggaggtttgtgactgacggtggttgcaagcctggttcatttaggggcgggcagtggtggtgaagaaccccagattttatttacccagatttttttaaaaaaaaaaatacccaggcatgcaagaagaataaagaggaaagagaaaaggtgaactagggttctcagtgtttatagttctctttttataatgatttaatttaatttgttgttttaatttattaatgtaaaaaaaaaaaaatatttaggttacattaaaacatccatataactcaaaattaatatctacatgtcttgccatattattttttttaaaaaataatagtgtcatgtaagtcgttaaacgacaaaattaaacagaagtgaacaaaatgactatgtaagtcattcgttataatttgaagactattcataataaccagtatatattagagattaaaatttagtagggtaaaaaattcagaaagtaaaaatgctatttattatttttgataagaggaatggcattggcagagaagccagagtcaagtattcaacaataatactatttttttgcccaaaactttctagcaatagaagcccaaataaaattgccttttagttcagccaccatggggtccaacgtggcagccaaatgattgatccataattaatagtgcttaagttaaagagtcatgtttacaaaattcatattttaagaaattttgtaggagaggatatattttttttttctttaaataaaataaaagttgaattggataaatatattttattcattttaaataaattaattagattttttttttctgaacacttgttatagacaaaaattattatatttaacaattttaacgattttaaaaattcaaaaacgtaatttaatacaagtaaaaataataaaatgctttaatttttttttcgattttttcagtttaaaaaagaataatatatatatatatatatatatatgtattgttatggtaggacctattattaacatttgttttagtaatccccactttagttagaga

SEQ ID NO: 50295 - DNA, 2072 bp, Cannabis sativa
aaattttgaatattattattttttcataaataatactaaataaatgaaacatattttaataaaaaataatatttattgaataacataaaaataaaaaaaggtatgttattagtttgagatatataaataaatcttctttcgtttgatatgaattctgggtacaagttcaacatccgctagctagggggctagtttaataacatatacgaagttatatatccaaactaattaacaagattattaggttacattatatattttgaagattacatataaagtttaattagttctaggcaatctttttgctttcttttgtagtaaactttgtccaatttcttttctctagtactcttctctttttttttcttttcattacaattactttgccacatacttcttcttatacttaaagttggccaaagcatacgttaaaaggataattgatcatggacccttttggaggaaaaaatgtcaaattcattcctctttctcaatttcttattattattttcttccttctttttttccactgaaagtgcaattctttttttccctttaagagccaaaaaaatataaattaccactacatgcatgtattttatttgaatgcatgtaattccaaaaaagcatagctagccatgtttaaattgtcttttatttgtcataagcaaatcattttcatcaatagaaatacaagttgttgcaattcacataatacaaatatgggatatttgtgataaatttctgactatgattttatataattgtcatttctataaatgtagacatataaaagacaaagaaaaaaaaaagatgggagggagcgggggttacagctaaatgaaagaaggaaaaaaaaaacagtgctaagcatatatatatataggagttaaactgctttatatgaccatatcttatgatttataagtataacaatgatttagaatagcctagagccaaacatgttgaggcgttcttagagtagaggaggtaagaaagcaaaaggaaagtgatataatgataagctcattgaatatttagtacttaataatgattcagcaatccctttttcagagaaattgagccttagaaatggcccacgtgtttttttatttcttcccactttcttgacaaaagagacagccacttggcgcgccgtaattgattaggaggccacgagagagaaaaaaagaagaagaagaagaagaagaaagaagcacagcacacactgtacaacactacactacactacactacactagactactacactctccatgtatcaaaatatgtatgagttataactaagcatgacccacttcccatctcatcacactcctatcaatctctttgggaacttgggcctctcttaatgaccaaaccctccactaacaaatatatatatatatataaacacgatcatcatcatcatcatatctaatctaataataataatatcaatttttatttgattggttttttgatttttattaaggttagtggcttcattataattgcatggttacttataaatcaaccttatgtgcttatgtttggccgtactatttaattatagcattatggccactaattgattttttctaaccgcgaaaattatatatgggttaaataatacttacattacaattggacataggaagccattaaaagttaacttaaacaagctaggttctgcaaaatgtatatatattaaacaacgaatttagtgtacgtacgtacgtgtattaattatttgttcatgcacgatcgaaattaaataaatcagtttaataatattactggaccatacattttattaactgtcgctatttatgtaagataaataatgaagtacatatatttgttaagaaaaaaaaacatatatgtggaaaaagttttaataattacattaaaaatataattatgatacttatattgctataacaagttgtaataactcattattaaaaaaattcaatttatagaattgaattaatatttaattatgatacttatattgctataacaacagactttattaagtctaattaataaatatattaaatagcaat

SEQ ID NO: 50296 - DNA, 1683 bp, Cannabis sativa
gtcaactttgtgaacagtagcgttgaccgacgcaaaaactaatttttgtagtagtgatctaatctttatcaatggcaaagtgctcaacaacatagatttgatcctcttatttctcgtttcgagataggaaaagaggaagagcattggactaaaccagttgaaaatatggtaaagataaatgttgatggagcaatatttgaagcttataattcttttggctttggcattattgcccgagacagttctggttgtattattgaagctgttactgcgtgtagggctggaagcatttctcctgaaatggttgagctgataggaataaaggaagccctaagttggataaaaactaagggctggtcttctgccatactagagaccgactgtcttatggcagtccaggctatacacaacaagtgcttcatttcttctacatttgggatgttggtccatgattgtcaacatcttttatctgagttgtttaatgttaatttgtcttttgttaagcgttctgctaataaggtcgcacattttcttgcgcgcagctcttattatttgtcagattgcacctttgatgctagaaattcaccttctgagttggtggatattgttatgtttgacctcaattattaataaagcatcttttttcattcaaaaaatattgtttatcatactttataaacttatgttataaattccctttactatgtggagatttgaataatttaatatcatgtttttattatcataattaaataatattacaaaatgatattgttcaacaaaaattgaaaatgataatggtaaaaatatagctctctaatctatgcatgccatctgttcacaatggtcttctctttgtacaaacagtcatattaaaaaaattatcattattcaattttgtcattaaataagaggattttatggtaattaacaaaaagataaatgatattttaataatttactacaaaaaggccgaaaagagcattgtctcttttatatagttatagattatagatacataacacgtactttttatatattatatatgattaaaataacatagaaatttctaaaaactggccatgtttattggaggcgatttcacacgtgagaataattggacacacatcgttacatatatttcttttttaacaagacgcactcggtacattattatacatactagtataaccattgaggtcgtacatttaagatagaaaaaaaattataccggagaaatttagacaacactaaaatacgtgtaaacaataaataaaacgaacgaaaaaagcacgaacacttacttagagtagcgagtattcaacattaatgaacatgctggaaaaaaataaggacaaaagaaaatatggtaattcagtcagatcacagtctccttagtccactgttgcaaatgatttctgtcatttcttatttaatttagattactcctttatataaaaagcaagtgtccttttagttttacataacttatcgattgtagaatcattttacaataaataatagtattaaatcaaaataaacgtaaaagaataaatgaagaacagtttaattcattttaataataagtacaacaacgtatgcaacctatcgggtacgagttgcctgttcatattctcgcacaaactcgcaggctttagatgcgttctatattcactaaatggc

SEQ ID NO: 50297 - DNA, 1094 bp, Cannabis sativa
ttctctaattttcttacagctctataaacttataatattttattagttgccaaaaacctcggtcaacaattacaattgaagttaattgcctcaaaactttgatcattactattgaagttaattgcctctaaactttgatcattggtattttcttattattttatcactttatttttagtagaatataaacttttttcaaaaatcattgccaccagataattttaggaatttactagtttaatacttaattgcagtctttgtaggttcgacctccttgcgcgagcatattacttgtaactagagatgtgcagaaagtcattcgatctaattataacctatcgatccaattccaaccaatccaataaaattggatatccaatcataattggatcggatcagatgtaaattttgaaaatccaaccagattggatcgattgttggatggatatcagatccaatggataatcgaacgaaaccgatccaattatcattcaatggtcttctaattatatttatatatttttaaaatacatttataatttcatatatttaatacattttatttaaaaaatatatatattaattaattttattcttattgttcacttgcacaaatgaggttaaagaaaaaaatcttagatctaaaatattaattttcatcttcctaaacactaataacaagtttcataacaagtttttggcgccattactgggtactatatttagttaatattaaaacaactaaattattttctaatttggttctcttttcacattttttgctaattttattcttgacaatctttatctctcttttcagctacaagtattttatgcgacgtcaaggaccaactgcaagagtgcatgtagatcctaaaatagagaaaacttgtcgacaaaatagaataaacaagaggttggtaagagctgttcagaggggttgaattagaagaagccatggctcataatagaaataatgtaggtgtagtggatcagggtaatggctagaatccacttggcagaagcctaagagactatgtgctagaaaccaactttttagcaacaaaattttagctaccaaatatagttggtag

SEQ ID NO: 50298 - DNA, 917 bp, Cannabis sativa
  modified_base (596)..(612): a, c, t, g, unknown or other
tttgaattctataattgtttttaagtcactattataataaaaggaatacctaataataacattaattagagtatttcattattaattaacttgccattcagctcattcttcttcatttttcatttctctattaatattgttttagaaatttaagtaatacaccttctaaagagatattctgatagaatactttgtttcggaattcaaaaagtcttacattgctaatgtgtggaaagatataatagaatgtacattacaaaaaatattatctttagtgacaactttttagtcacaacataaatattttgtgactaaatatgagtaatttgcaatatatattaagttgaagttacatcattccgtgggtgtaagggcctaatggaggcttgaagcgaagacgttacaatattagtttctggaaacatcatttataagtaataaagtgtttttaaggaaaaaatatattgaaaagtaaaatggtaattttgtccctactagatgtaaaccatctatagagaatcaataattggcgtgattgaaacaatggatatacaattcatatagcgtatttatacttggtgtatagagtattctannnnnnnnnnnnnnnnnaatttcgaatctatagtggagtcacgaggaattaataagttaggaaattcactcagtaaatttcaagctttgcttattaagagcttggttacataggcccatggtccccatattgtctgagataatatcattttgtagactcaactaattgatttaataagtcaattagaattcaaaaataactgtcttatttgagaatttttaccatgtttgggtaattttgagaagaaaagagaaatagaaatttattcgttagaaatagaagtaaagtgttggggctaaaaaattgagataaaaagacaaag

SEQ ID NO: 50299 - DNA, 1676 bp, Cannabis sativa
aatatttacagcaaaatttaaagtagtgaccgtaaattataaaattaaaaaaaacacgaattaatccaaaattatatttattcataagtatattcgcacgttatattaccaactatctaaataaaagaaataaaatatatatttgaaaaaaaaacaaatgacttttcatttgttataacgtgtaagaaaaacaaattttaatgctaataaatttcaaaaatcctaacaaaaaagttgatttttcaaaagttctaattattataacattttaaataaattaaatactatataaaaatatacaataaatacataaaaaatcataattattatttgttttattttattattaattatgtgaaaaaagaatattttttttaataaatattaaatactttaatattaaaaagtaattaatttaaaaataattgattcaatacatacttttacaaattggattgtatacaaaatatgaaattcgcacttgaagcatatcaaaagcactgtaagtaaaatagtacaaattaaattaaatgaacacttttattattacttttatatttttagggatgtaatgtgattctgacatagacacgatatatcatttaactcgaaaaaattatagtattttcaataatagtatattcatgtttataaaaggaaattctaataatatatgtatcttgcaagtagtcaagtagagtatgatcttaatcattcatcaataattaaataactaatcgataatgtatagaaagattctttaatgaatctataaaatcgtaggaccaatcttgaatattgtatatacaatgtttatgtgagatgatggttagtcttgcttgtaagaatgaaattatatatagttgatgatatatatatatataaatataaataggagataaggatatttggaatcttatttaggtagttataggccaggcatatacaagttggaaattgtgtggtggaacaaagttggaatctttcctaaaattttccaatgggaaactaaaaattaacttttactggctaccaataccatagcttgcctcttatcatttattttatacaataatatatatgttatgtatggagtagggtgttcgggtagtgtaagttgtaattttttttttttaaatcaaattacatatgttgtttttgtaatttttttaaccacaagcatattgcgagatcttcaaacggcaaaaaatcacattacgaaaatatagtgtggtgtggtacggtttgagcagtttacattattatcattatcaaatattataataaaaattaaaaaaatcaatctaataaagtttagcaatacaaaaaaaaaaatcttattaaagtttaaatatcataacacatataataaacatcaagtcattatattaaattgtctctaaaaaagaatataatatacacatatgttaaatatatttgttctcatatgaaaaaaaaaatatattgtaaaaattagtaactttataatatatagtatgatgcggtttgaatcgcaattattaaatttaaaactacaaatcacaccacaccatatattttttacatgatgtggtacgatacaaagagtttatacaatgtgggcagtttgatgaacaccccttatatagatgaatcaagatcacctgtccaaatattatatcccatattatgtctaa

SEQ ID NO: 50300 - DNA, 876 bp, Cannabis sativa
  modified_base (809)..(824): a, c, t, g, unknown or other
aaaaaaattcaaaaccaaatataagtcttgggttgcctttgtcaaaaacaatgagagccctagcaatatcgtcacgtaatcgatcaattgccaaggtgttttccaacgtatagcttatttttttttctctatatatgggggaacataatcattttgttgagatatatattcctttaattccaattccaatttctatactttcactaaaatatatccctcataaatttatatataattaagccttaattatacattaattattatggcaagatttgccatttggtttgcaattcttttagttgctgcttcgatatcactgagctttgctgccgtagtagaacattctttcaatgtaagtaaattttcttaacactatcatttatcaattggcatgcatataatcatccaattgtatacaaatatatatataatatagatattggtattttgtatatataggtggaagacgtgagtgtaaggaagctatgtcgtaaccaagtgataacagcagtaaataatagcttgcctggcccaaccataaaagtgaatgagggcgatacccttgtcgtccatgtctctaacaaatctccatacgacgttactattcactggtaataaatacatacatacatgtatatatctttgtgtatctatgttatattatatctgtatgtttctatgtctacatttaagtgttgttttttaaaatattataatttaaatttaaactcacaatacatatctctcttattttttatataacataattttttttttttaatattacattaagggctcgtttggaacgnnnnnnnnnnnnnnnntgtattgtattgtattatattgaagtgtattttatgcaatatttttatgtaa

SEQ ID NO: 50301 - DNA, 1379 bp, Cannabis sativa
gaaatagaagtaatgaccaatctcgacagttaaaaactgccaaaataaggtactctatctcgatggttcaatgtgtaaacgccgagatatagttgtgccatctgcttatgcgtgcgattttgacacttagaactgccgagataggttaatgccgtaattgattttagcagggaaagaataattttaatatttttttaaaagtttttttccttcagtattcacaatatatataagatacgttgtagtaaaatattatctaataaaattcataatattcactttatattggttttgtaaatgattttaaatatgacaattaaaattagtactaactataaatctacttaagattaacttgctaccaaaaaaaaaaaatagtaaaactatgctaaaaatactcatgtatattagtcgaccaattctccactcacagtgttagtattatttgttgtatactcgaccttaccatcatatataaattaattataaactttatgttagttcttgaattgaaaattgatcaaattttaaagaatatattaactaattacgtgtttcgaaagatatttttttaaattttttaactatagttaattctctcattaaccgcatcacatataaattacttattaggtatcctaggaccctatatgtatcaatatttaatttttatatatctttatatatatatatatacataagaaatgatcaaatgaaacacttgttaatttcaacctcatacttttactaaaaatcaaattatgttcttattcgttcttcttgaattcgaagcattatttatgctaattaaatacccttaataatgaaataaaattttaattagataatataatagtttatattgtaagatttgcgtttttaattttaaacaaatttaatataaaacttacattctaattacaatcatagcgtcctcctttaaatcgctatcagctagatcatagaaataggcttgctgtatgaaaaataactatcttcatctaatgttgtttgtagaaataatattatgtcactatttactatttgattaatgttgtatatatctagctagaagatcccacatgtattcatccataagatcccacttgaaattcaaaagagattgcttttctgtcatatgccagagtacgttggatcgaagatctccatttgcatttgcaaagaaaatattgaacatcatcatggtaataatactaataatcattgttgttgtaaagttaatattcatcgatattggtattgcagccatgggtatggtaattaaaagagaggccttagacttagaagatttaaaatttgtgctaaatttagcataaaaaataagtttgtgttatatttaacacactatttataattgt

SEQ ID NO: 50302 - DNA, 1067 bp, Cannabis sativa
gatttttctttttattttgtttcatgcacaacacacactactcatattgctggataaattatattgaagtgggagaatgtccaaactttttaaagtgaattattaaagaagaaaaagttactttaagttttgtggatgagggtgtggagataagtccatgttagtctagccgagtcgagctgtcggtgtgttttgtccgagattcaaaccatttcctatttaatagtgcagcaacttatactgacaaaacaagtctcagatcagaagaaacataatcgtttgatataatgttttctcaaaatcatagctcctgttgctcactcctacttatcctcttcttcttcttcttctcggttggcgccttggctcttgaggttgctgtcaaggctgcagttggtgctcctaatgttcttggggactgtccatttagccaaagggttcttatgactttggaggagaagaatgtaccttatcagatgcatctaatcaatctaagtcacaaacccaaatggtttctgcaagtgaatcctcaaggaaaggtgcctgtggtgaagtttggtaataaatgggtacctgattctgatgtcattgttgggattcttgagaagaaataccctaaaccttctcttactactccaccacaattcacctctgtgtatgttcctcatattttttctcttgagtttaactttatagcttatcagatcagcttttcatttttttgggtttttttagtaattctatgtagtgtgtgaaaaatttaaactttatgaccactagtcacttgttgggaagggaatgttggttttggataaggtaatttctcctcttcttctaattaaatgagatgaatttataatttttgatgtgtaggggatcaaatatatttagtaactttgtgactttcttgaagagcaagaactcaagtgatgggtcagaacaggctcttctcacagaattgaaggcacttgaaaaacatcttaaggcacatgtatgcattttactactacaacagatatcatataagtgcttgatatttgatatttgtgaatatgtaactgattaat

SEQ ID NO: 50303 - DNA, 1488 bp, Cannabis sativa
tttttttgatgtctaattatagaatggggcaccccattttgttgcttacatgtcttactatattagccacataagcttaggagctaggaccccacctgtccgtcctaggcaacaagcgtttttgatggcctaatagtttttaaagaaaaagacttagctgattgatatatatataatataatatatttttaacaattaatggatagttgctataactatagtatccaagtgccctgaaataaagtatgtcatgtgattagaaactcggtttcatttactctatacatacttttgatatttgatatttgtattttttttttttaaaaaaaaagttgattattgtggttactttacgagagcctcacaatctgaggtggtccatcaagagacatagccatagatatttatgtatgttttttttttttttttttaatgatactgaagaatcaatcaatctttaaacgcgttctaacgttctaagaccaaataaataattggtgggggaggcttttaacttttatgtacttccttttgtttggaaagaatataatatttgggctactttttcatcaaataagttaaacaccaatcgtttatatacatagtggtaagcatgcctatgggggaatgacttggttaaattattgattaaaaataaataatatttgtattttttgaagatgctaatctagctaggtagagatacccagatatttatggagatttctcacatgatataaaattcattagacatgattaataatgcaagaaagaaaaatgtataatagtgtaatgaattaatagagtattttgtaatgtaataacttaccaaagtgggaaagttcagagtacatgaccaaatataccctctctgcctaactgccactgggacacttactcatataaacgaagaagatactaatagcattagtagatcatgggattgggatggcatgggcatagatgtaattataatccttgatcgacagtgtttcgttgtacaacataaaaataataattgaataaaaacgagaataagaatccaacgaaaataagaataaaatgaaaagaaaactcacttgcatagttaggttcataataataattaataaaggtgtatttgtagtttttaagatatacatttttatcagtttagagtaggcaaatgatatttatttatttattattattattatttttggaaagttaggcaaatgagatttaagaatatgggaaatgatttaagaatatggaacgttgaagtaagtggggaatattgagatttgaaatgaatatgctttccgcctagttgaccgtagccactcttgggcagcctttcggttttcaggcataaaaactattctaccaagatttattttattattttttaattcacttacaattatttttttgatgcttttttatttttacacattaaaaaagttttttttttttttttttttttgtttttttacagaattctacata

SEQ ID NO: 50304 - DNA, 2037 bp, Cannabis sativa
tcccttcacattcaccattgatgactgatgagcacccctgattctaagctcacaactccaagtctgtgtctttactctctagatgattcttttaacaagagaatctttatatataagagatttatagagaatcaaaaaaacgtaactttcacaaaatcatggcatgagaagacaacaaggcatttaaacatttctgatctcgggcagttttgccctctcttttcctagttgccttttagttgttctatttggactaaagtgaagtcacgagatatatacccaaaatatgaatatattattttttttattttttcatttttttcaaatttaaggtttgaattttattcagtcatttttatgtggattgttatacaattcatagttacaattaagttgttctgttagttacatatgaatttttatgtaaaattctgtaaaaatatataaagtatatttaatgcttaatattttttttttataattataaagtatatttttttttttttttgaaaaataaagtatatttcttaagtacacattgttgttatctataaatttacaaaaaaattaaaataattaaggcccgaaattaaagtttaaatagtttgtgtcttttattttatacagtttaaagttattttgtgtattaaaaaaaatatgaatttataaaaattttagaacttatatataaaaataagactaattatctaaatatcaaaaatatgaaaagatgcatggatacatcttttctttagagtgtatggtaggagctttgtctttcaaactattaattaaaagaataggatcctttgattttttgcttagttgaaaatttctcttaaattatgtaaatttcatattagttttttgagtattgttattagatatcaatgatgattaatattattgtgtcacattgtaattggttactgatattttttaaaagaaattttttttaaaaaaaaaacataaaaataacaaaaaaaattataaaaatacagtggtacggaattttaaatatttttaaggtttttaaaattttatttacataaaatacaattttttaatatatttttatattgtactcttgttattttgttattgattttttgttatttgtatattattttttaatgttattttgatgatgtttttctgtcaatttgttatttatttttatgtaattttttttgttatttttcttttatctttataaaattctgtaaaaatatatattatatataaaaaatattttgaacgtaaaagaattatttttttacaaaaaataaaaatttatctacctcatatttaatgagaccaataataatataactcattaaaaaatattagacactactagtatttttttttagcaattccccttagatgtcccctaagtaaactagcaaagacagtattaattgacaccttgcacatttgatctcatataattcaattaaaatattaattttaaactaattttaagttataaaaaaaataaaatatttggtttatatttttttaattatgaaagcgtatttataaatacatatttttagttaaacacctgaaatttgatctcataactcttacacatgcacttactaatactctctatccaaacttttacaaagagaaaaagtttaagaaatatcatttaaacttaataaattttaagaaaattattcgatatattttttaagtttttttaaaaaatttacggtttgaattgctttagtcgtttttccagtaatttttatgtgagttgttgtgtagattttatttgcgatttaagttactctattagttaccatgagaatttctatgtagaatttcataaaaatatatatataaaaaaaaaaaaatacttattttaaaagtgtaaaaataaaaaaaataaaaaatcttaaattttaagagaaaatcaaatttattctatttaaaattagtatattgttttttcaaggactttttcatttaatgtaaattattatggtgccgtttggtaacacttttgttttctaattttataattac

SEQ ID NO: 50305 - DNA, 1130 bp, Cannabis sativa
gtggtggtggggatcatatgaaagaaggggtggagttatcagtggtaggtgataagaagtttatatgccatccaatacatattactatgcatacataataagaataacagtgaaagagaagcatgaaaggaattcagtaaggtgttcttgggattttcttgatctgttatgaagatgactcattatcagtaagtaatttaatctcttatatttatttaaagttttattttttgtttaattattaaaaattaaaaatttgtataaattatatatttgtgtgttgtgtttgactgctgtatttgtatgtatgtgtgctgtaatgattatacaacataaagtgttacatttatgggtcattttgttttttttaataaaaacataattatagttccccatgtttttctcttattttcttactttaatattttttattattattattattatttataaagctgtatcattctaattcttagtaagacatctgggttgaaagatgattaaatgaccaagtcagaagaagtaaaaattgaaaacaactcccaccacaaaaactactacccaccaccatcatagtgtctttgtgtttaagtgtgaatttatatcatttttaatatttgttttacaatattatttattttatttcatatttataataatgtatattaagttgtaattttactttagaaaaatcatatatattttttttaatatgtaaaatatattctattttaatagataatgataaaagaaatagtgtaaattagatatgttgtgcaaaataaaaatttaaaaaaaaaaaaagaaaacttttagaatttaattttttttatgtattatttataattttacaacctaatatctttatttactaaagtataaatatacttgtaaagttttaaaattacaaaaaaaatatactttttcataaaaaataaataaaaagtaaaaaataacgataaatcaatatcataataactataaataaactataaaacaatctcataataactataatacaactataaataaaaaataatttattatttttactaaaaaaaatatttttataaataaaaaaattcaaaacgtaaaaaaaatccgcattaatgtatttttgtaatttttat

SEQ ID NO: 50306 - DNA, 1038 bp, Cannabis sativa
aaatacttatgcttcaaaagacttggtaatgcatgagttaggatcctaaagtaatcttcgcattttattagccaccatcgcttgattaaataactctaaatccttaaatcctaattctccctttgatttgggtttataaatagtatcccatttcacccattcaattttccttttgttactcttagcaccccacctgaactatagtataattgagcgtaacttatgcaattaaaaaatcataagatagtttggaacagcctgcagaattgacttaatgagaatatcctgtcctcctgccaaaaagatctccgcttccacccacgaacccgctttagaaccttctcacaaatactatcaaactatcaaaggtcctcttcttgtttttcttaaaacagtcggaagccccaaatacttatcatgagtttccaatgaagtcaagcctaatataatacactggtgcgctccgcttgttgaatttgggctgaattccaaattgacttaattattgtccaaaactaggctcataaaaatgaagaactctttggattgtagttgaatccaatccattagctctaccaaaaagaaaactatcatcagtaaaaaaataaatgagacaccctaggcccatactgagaacactgaaaacccatcaattctccactcaattcatcttgtcggagaagagttaaagcgctttagcacaaaacaagagcagatatggcgataacgggcacccttgccgtaaactgctttgtgtttttcctttcgaaataattatagttttaaatttttttatatatataatgatatatatattatagttgtttaagatattttacaaaattttataaaattcaaaataatttacaatataaaaattaaaatccaaacaatctagtccaaatgatgtctaaaataaaagaaatacgtatgtaacaaactgtttgaattttttctgaattttctaaaaatttacaagatgtcttagataactattttgtataactgacatacaaaaaattaaaattaatttttttc

SEQ ID NO: 50307 - DNA, 6018 bp, Cannabis sativa
tacaataaacaaacgaagaaagaaatagaaaggaacaaagtaaaagagatggagaagaaagaataatctcattaaatcaaactgaatacacagtatatatacaactcgagctgaataacaattaacaaaaaatagctcatgggctagaccaatagctgtcacaacaaaattgataattaactaactaactaactaactaatacttctccttaatgttgtaatgacctagtttccttgttagataattttaatagtttactctccaatttttctcgatgcgttcttatttcatatatctcatgaattagctgtgcatgtgctagggtgtgaatagtaaaatagtttggtcaatatttttctaccatttaatgtattcaactctaattattctcaatgataatgttcaatgttaaaaaaaaaagttgataaatagtttaatataaagtgatttatttgaaaagagaattgttaaaagtattattggtggataacattttttttggtgtaacagagttattagtgtaattaagtcaaatttcatataacttcaagaaaataaagttagtagtgtaattaagtcaaatttcatataacttcaacttcaagaaaataatttttttttaaagaatatccctatccaatcgtacaagctacctataaaaagtgaacgagcaatactcatttaaaaaaaaaaaaagaaataagagtgaagagaaagagatactcaacctttccttaaacaaagtgtagttaggagttagttgtacaaataaagtagagacttctctaaccataacccctgcccctgcgatagggtttatctctttattccacatttccatgagcttcttccgccattgaaatgggcggcgccaccaacagattcttcgctctcctatcttcatccaccaccaccaccaccacctctaccgccgcagctcccctccctatcctcttccaccgttactcttctcttctcatccgcctccatcgtcgtccaaaactctctctcctcttacactcctctactcgcacccacttcctcactctctctcattcctccgctcccaaaacttctcgcctttttcattcccacgtctctgcttcctcatcccttcacgataatttccccgactcctccgtcgctggggccagcatttcctggcctgagtggtccagcctcgtcaacgcgctatcctccgccggttacttcaaccggagtcagggtttctccgccggtgaggatgagcttcttaaagtcgaagagttatctgaagagttcactcgcgcggcgagggcttgcttagagttcgcgcgggaacgacctaaactcatcaggttttgatttcattccgaatggatttttaggttgaattcgtttggggcagcttttcatgatttgggtttgtgctttttctttgggtgcagattgctgccgaggagagatgtggaggtggtgattggaaatgggacaccatttcttttcaaagatgctgataatcttgtgcaaaagcttaagtctttcgcatctaatggtgaatccaatgtgagtgccatgatagtcatagttgatagataagacttaatttctttgtggcttggaatggagttatcgtttttcctttctggatttatactttaatttgaaaactttgtttttcaataagattataaatagaaaggaaaaaatgatcaaatttgattgcagagaacaacagaacaaataaaacaaacaacaaattagtacaacgataagccattctgagtacaaaagactttcctattttctattaacgaattgttttagtcgcataatgacagcatcattcactaaaatctacattagcttaacacatgatatagcttagcttgtttgtcctttacaccaagagataatagatatttcgacctacatacattacttgctgtcatctctctgtgcctttgaacatcttaccacataaaagttctttacaaattctatattgggcagtgatgtttcttgaagttatgcatctaagaaagaataatgtatccttgttgatcaaatttataatgtggaaattcccatgtgatttatttatcgaaaataacatgtatccttgggatgaaacagagctgtagacttgtccttgtaatttagaatgtgtggcagaatgttttgtagtcattttgttcttttcatttgacttagtgttcgactagttgctgataactgcattatccccgtggatagtgtttatttagaaaaagaaagttgattaatttgactttgaaactcttaaggctactataggatcttaatatttaatgtttccttagataggaactgtaagtcaagtgtacagaactttacatgtataaagtccaaccataattctttttctttattttgtaaaaccaggtactggatatggataaagtgagcacagttgatttgatgagattcatattaagttatgctagcaactttgtgtcttcttcggaaagtaataatttctacaatagagagctagttgaaccatctatccggaatttgttgagagaattgacgaagctatgtactactattcccgattcaacttcttttggctcagtgcaaagtcagtttgctggtaataatggacaatcacggaggccgtttgggcaaaatattgaaatgaaaagaggtgactggatttgttcaaggtagtccttctcctttctatcttgcatattagatcttttagccaaaagaatctttaattagctcatctgttcacttatcattttacaaatctttaatattttgtatattttcaatgaaatgctgagcaggtgtagtttcatgaactttgctaaaaacataaaatgtcttgaatgcgaggaggcaagaccaaagagacaactagctggcggggagtgggagtgtcctcagtgagtattgcctcataattcttttctctgtttgataacagatccaattgtttgaaaataatgataataatcattaaagtgatttctcattttcagatgtgacttcttcaattatgggagtaacttggtatgcttgaggtgtgactgcaagcgtcctggaggggtctcagttggtccaaccaataccagaccacctgtggcatatgaaagtgcaaacaattcaaataaggctgagattgatagtaggcttgctgccaatgaagagaaggcacaacggtggtttagtaagatttctcagctggacagtacttctgacatgagtagtgccatagcagatgatgattttcctgaaataatgccattgagaaaaggagttaacagatttgttgtgagcacaaggaagacaccactagagaggaggctggccaactctcgataccaaaccaacttgggtaataatggcaccactgaaggtaaaaactgttctcttgtatttttatcttctttacattttttttaaaaaagaatctgaagataaaaaacaaaaatcaattgagtgcaaataaataatgagcgtaactgttgtacaaacttctgttccaggtggacagccgcaagggagaaattccggttatgttccatttgtgccattaccagcagatatgtttgtgaagaaaccagagaatacacaaccagaggatttgggtaaggtagccacaggacataatgaatctgttgcatcgaatacaattgagttgtcagataatgttagtgggagttatgagtctactaaatttaaatcagaagatagtagccagaaccaggctgaaactaaagagaacaaagaagctgaaaaatctgatagatggtataaaaagattgctgagttgcataatgtcacagatctggctagtgaaatttcagatgaagatttccctgaaattatgccaatgcggaaaggagagaatcgatttgttgtaagcaagaaaaaagatcgttcattaacctctccagcctacaaaagacaaatggccatggatcaagctagcaatactaaatttgtaccctttgttcccttcccacctgattactttgcgaaaaagggcaaaccccaggcagatggtactgacttatctgataaggatgctgagccaaaaactccagattctagaatggcagaacaggtaccagaaaagttggctaataatgctaaagcaggggaacacagtaaggaccattttcagcaagcagaaaatcatgctggcatgccaagctggaaatcagaggcttcccgagttaacataagtgagaataacactggtactacctatgggacaccctccaatgcaaacttttcccagagttctgctaagacgtacaacagtagcaacaacaacttgagcagggaaaatgttagaaaagaaacttcaaatcagctatcgaatataaccggaagttcaccccaagccaacaaccagaataatggagatggttggacaggaaaaagtttggaggggtctgcggtgaaggaaccagatcctttagacatgtcagaggaagccaaggctgagaggtggttccggagagttgcacatatcaaggacatctcagaactgagtcagattcccgatgaagatttcccgtcaataatgccaatgcgtaaaggggttaacaggttcgttgtgagcaagagaaaaacaccactggagaggaggttgacatctcctcagtacagaagaaatcttcccattgtgagttctgatccagttaagaaggaaactgacaatagctaaattatgagaagaacaaaaaaaaaaggttgaatgaaaatagaaattgtttgaatttaaaatatgatgtttctcaatttaattagtcataattgattatgaaaggaagaagaataattcatcttcatacaatacaaatcgttgtaatgtgtatacagaattttgacattggagctaagtgaattaaagattatttgcatgggtatcctgatttttctgccaattggcaaaatgatttatttactattttctttttcttttctcaattgagttctttaatttatttagtttgtaattaattgtaaattataattttgttcattttttttttgtatggaagggttatacatgttaatggggtttataccatttgtatggggagtaatgacatgtgcacgaattaggcaaatttaatatacacttatatgccaaattatttttttaataagttggacatttattataaatgatatattgaaattttttaacaatatatgactcttaaaattactaccgctataattaatttaacaaatattgtggaacatcactcattattagtaaggcctcacatattttaatttaataaatattatagaatattactaactatttgtaaggtatcacgcagtgcctaattgctatgctaacaataaaccctatttaattatccataaacttgtttttaaaaaaaaataaaaaaattataaggtggctccgataccaaaaatttgtgaataagatagattgattattttttttttggttgaaaaaatcaaaaaatctttattaattagaaaagatagtggtgatcacatgtggaatcaactcccaaagattaacaaaacaagagcaagggttagaaagatcccatttagcaagagcatggacaccctattgagttcacaaaagactcaagctacattacaatcggtgctatcaatagtagaaagaaatttgacaagagatggatagaatagttgataagaaataatatttatatatagactatagattagtataatgtttgtatttatatgtatagacaattgcctactattaaggtgtttgcttttattaaattcatttattctatgtggtttctctttatatttatacgtaatattgatttagaatgatatgttattattatttttttaaaaaaataaatagttggtccttcatgatatgtatgttgactaagcgatgataaattttatttgttcttaatagttgatatatatatttaatagttgatatatatatatatatatggatatatggaacacttcttaatgggtattacccatga

SEQ ID NO: 50308 - DNA, 1100 bp, Cannabis sativa
ccactccaagatcgactgccatgtctgcgctgacttggaatcctttctcccttttactcactgcttccttaaccgtgaaactcgatcgtaccaattttcttgcttggaaatcttaatttttccccactgtaattggtcacgatcttgacgatatattgtttactggtgttcctcctccaatgcaattagttacaggagctcccaatgctgaatgcaatcaattgaagaaaagagatcaactacttctctcctggctcagatcgtctatgaccgaaggcgttcttgctgctgttgctaattttaccacatcttactctgtttgaaaagccttggaacagaggttctcgagtcaatctcgagctcgcctccttcaacttaaagggcagttctctcatataaggaaaggctctttatccatttcggactttgtagataaaatgcagatggctcattggacagattcaaatcaaggttagttgcaaaaggttatcttcaaactcgtggtatagattatgaagatacattcagccctgttattaaaccaaccacagtgagaattgtcttaagtcttgctgtcagtgctcattggcctgtcaaacaactcgatgtgagcaatgctttccttcatggcacccttcagcaaactgtttacatgcagcaacctaaaggctttattgaccctacaaagcctactcatgtttgtcaatcgcacaaagcaatatatggtttaaaacaggctccacgagcatggaatgacaagctcaaaaacactctatatcaatggggttttcaactctcaaagtctgataattctctttttgtctatggcacgggtccgtctcttgtttattgttgatgatatactaataactggtccaaataccacactcatctctcaattaatttatgatctaaaaaaagtcttttctctcaaagacttggggccaatccactacttccttggtgtggaaatataccgtgacacaatagggatgtatctatcacaaacaaaatacataactaacctactcacaaggctgcatatggagggtgcaaagagttgcccgaataccaacactgccatgaaactcagccttact

SEQ ID NO: 50309 - DNA, 2661 bp, Cannabis sativa
aaaaacgtaaatcatttccaaagaagaagtcaatacaagcagaaaatgtagtaaaattgcatgatcagataagcattaatctatcaagttaaacgaatgcagatcaacatatatacatataataaacacaaatatttgtataactcaaaactccatttcatgcatcaggttacaattttgatctgtaaataactgtacaacggaaaaaaaaaaaaaacaaaaaacagagtggtatggaattgaagggagacaccttggagcttaaggtttgaacttgtgagacagattgtgtgaatgaaaccctagaaagagaggagtggagaagagagagtgagagtgagagtgtgaaacaaatgaggaaacttagatggtaaggcaaaaaggcacacactcatacaaactctattggtgtttttccaaaacaaattacaatgtatgattgccacgtgtccaaatatcatacgtttattcctgccttttttgttttatatagaaaaagctcttttgtttagaaatgctatatctccggattgtctattcatgtgcttttacgagatatgtaatatggtttgattttgtattatgtttttattttgatttgcaaacacctcactacagtttggattcggatggcttcattgatgatatgggtgagaactcaagtcaaaatgtttcctatgatgatatggattcggatggcttcattgatgattccgcggagattgcgttgcaatcccgcgatttattatgaaaatcttgagttggaatgcacggagtttggggaacccgtctgcattcaggcacttacgattgcttgtcaaacaacaatcgccccatattttgtttcttatggaaacaaaactcccacagaattctatttcccgttttcgtcaaactttaaattttgccaatggattggaatcaccacgatctggccttggtggtgggctgctactgttgtggcatcagaacattgatgttacattgctgaattttggaaaaactttctttgattgctatgtcaaggcagataatgaggctacgttccatctcacagctttctatggtgctccggaagcccaaaataagccagattcatggatgcttttgcaacggcttgctgatgtttctccatctctcccttggttagtcattggggattttaatgagattctctctaatgaaaatacatcgggtggctgtcttagaaatgaacgacatatggaagcttttcgaaagactcttgaccattgtaagcttcatgagacggtgtttgaaggggacccttttacatggattaagaatcgttctggagtgagcactattaaatcgcgtctggactggtgttttgtgaaccatcactgggagaatcaatttcaagctccaggggttaatcatctcgattactttagttcagaccacagagctatatccgcttcttttgctcctcttaattctcggatacaacacaatcagcgacgcagtcggtttcgctttgaaaaactttggctctcggatgaccaatgtaaagatatcattgctgctagttggaaatctttaacaaactctaaccccatctctgttgtccttggtaacttggatgaatgtgctgttaatttacagaaatggcattttgaaaaatatggtaacatgaagagaagaataacagatgcacaattacaagttgaaactctcaataacagtccccatcgtacaccagcagctatgacttctttgaaaaattctgaatctttgttggatgaattgttggagcaagaggagatttattggcaacagcgctcccgcgttgattggttacaagcaggagaccgaaacactaaattttttcacgctaaagcctcagcaaggaagtcgaataacacaataaaattcttgattgatgagaatggtaatcgggtttcttccaagtctgaacttgcagctgccatccacgactactttgctgaaattttttctacttctacattggatgaagttgcacttgctaccaccttaagcaccatcccttcaacagttacagcagagatgaatgacacccttcttaaaccttttgaagctactgaagtcgaggctgctctgcactcaatggcacccgataagagtccgggcatcgatggcatgtctccaatgttttaccaacataattgggctgtagttggtcacttagttacagctgctgttttaagtgttttaaatgatggagctgatcctacaagtcttaacaaaacacttattacactaattcccaagatcaagaagccacaacgattacaagacttccgtcccattagtctttgtactgttatctccaagcttgtcaccaaggtgcttgttaaccgctttaaacatgtccttccttatgttatttcagaatcacaaagtgccttcttgcccaatcgtttaattacggacaatgttctagtagcttttgagttggtcaatgctattaagaacaaaacatcgggccgcaaaggtgttgcttcgttaaaacttgacatgagtaaagcatttgaccgagttgaatggaatttcattgagaaggtcatgggtaagatgggatttgctagtgattggataaggctgattatgagctgtttgcgtactaatagcttctcctttatcttaaatggtgaggtcacg

SEQ ID NO: 50310 - DNA, 969 bp, Cannabis sativa
aaaaaaaaaaaaaaaacccacatagttttataattagatcattaattatgaaataaaaatataaaaaaaaaataaaatacaaatatgagcccgtaaaaataaaaagttattaacctattttttaaaaaaagggtcgtgtccgaataaaacagcatacacaatagacatgacccttgaattgacttccagcaaaaaaaaaaaaaaaaaagaaaaaaaaaagcctccaattgacgaaatatatacgagcttaattttaaggattcggtatcttaattagtgtacagattacgttttatttccccattttatttttatttttctatgtgttttcaataaagattaggctttaatgcatgtatccataatattaattaaaaatatagattttatttattgaatgatccaaactaaaatcggaatcatatataagacactgaatgactgatgaatgaaattgtagccaaatgtacttatcttatcacaaattctaagcacaattcatagccaaatatgcaattttctatttctcctaaagatatttttgattggagtcttacatatttctgccagcacttagatgcacagttaaagcaggtgcagagatcaggttcagagtggagctcagtccatgcagggattcaaccatcttgttccaatggttttaaactttttacagatgcagccacggatcttcataggaaaagacatagcattggtgtggttcttttggatggttgtaacagagttcgagcaggtttttctactccttttcctggatttgtcccacctgctgttgccgaagccaaggcggtttatcaagctgttcaatgggcccaattgcttcggtttccagtggatattctgatgacagattgtaaatccatagttgataaacttgctgcttgtaactggaataatagtgtttttgatgatgtagtttgtagcattaagaacttgttatcgttcagt

SEQ ID NO: 50311 - DNA, 765 bp, Cannabis sativa
aaaaacaaaaggacattaattgaacacaagattaacctcaacagagtacctacttgaatctgtcaaaatggtaatgaaaacccttcaatttatctcgagtatgcattactccaggaagatcaattggaaaactcttcatccatacaattgaactatttgaaaccccatagcataagataaatcttctaccagtattcatgtgaagaaaataaattaaacaaacaagtatattaataaaagtaactttgcaatattaatgcatgctttaatttaacttcataaacattaaaaaataaataaattcttggaaaaacagaataagagaagcaatttgagataccttaaaatcacaaccagagtatggctgagttgtagaagctaatgtatcgaactcagaacaatgttttaaattctcttatcaaacaaagatattaatatacatgattaacaactctacattcaataaaataaatctaagtgaaaacttcacaaaacccacaaaattttttagctaatacatcaaatttaatcacaaaaaatacttattactaaatataaaccagaaacttcaatcaatattaattttatgctagttgccggaggaagatcctcctcttcctcttcctccggttttgaatttcctgaatcttcggtgagagtccatggtcaacctagtttggcttaattgctttaccgattgggaaatttacatgtgcagtcgctttttatatcttattatcggtaatattgtacagcatttaatta

SEQ ID NO: 50312 - DNA, 2088 bp, Cannabis sativa
aataccacattggagatgctcttattgtcattttttttttagattttttacactacatgttaaaatttctatttttttttatttttatactgtaaggcgattttttttttaaaaatactgtgtaagttttatactgtgtattgtgttaaattttcacagttgttctacggttgttttttaattgttccactattattttaattgttcagttttattattttacggttgttttataaaaagacagtattttcgtaacaaaatccgtgtgatagtaaaattataaaattttacttaaaatttaatatttttgtaaaaatcttttttttataatttatttattttaaagggcttgataggcctattatctatactaattaattttactttacaaatgtttaccttcaagaaaaaaaaaaaaaaaaaatcattggttgtagtcctttcaaaatcaaaagaaaaaagagaggaaaagaatagatggagatgtcgttttctgtgtaaatgtcatttaatcaaaatattgtgcgtcgtttcatttttccaccagcctcatgcgatacttctcgtcagtctgttaacctatttttggtcaactgttttctcataccaccgatctaaccactacactctcctctcacccaactctcagagatttttaaaactgagaaccaattccagcagcttgcttgacgtctattgttattttgaatttcggatttcagtttctttttattttcgagaattaggctttgaattttcgctttcgtttattgttggttgcatataaatgtatataaaaggcttttgaatcgattgggcggccaatcccggccgtcgcagagcatgatagtgcaacaccttgtttacggtgacccgaggctttagccaggatgagaaagagaagagtaatacttggggtggtgtgcctgggaattctcgagctttgattcgaagaagaagaagataaatgcagaaatcaatattacgctccagagtgattcaatttgtgttcgattctggttctctctcaaaattctgggattgaaataatagattttgaaattttgggtaaaagaggtaaaagttggctaaataccattttgaacttttgttttgcaaaattactaattggaccccatgttttgttagatgataaaatagatgttgtattttttaaaatagtacaaatagaactttaaattaattttttgtcaaaataaaatttaattataatccgatttaaaagtgatatgacagatcttcaagtttgttatattaaaaaaaattgtccaaaattaagcttaaagttttatttttactattttaaaaaatacagagtccattttatcatttaacaaaacacaggatccaatcggtaacttttacaaaacatagggtctaaaatagtttttacctttaaatatttaaattataataattttttaatataattatgagtaaaatattattgaaaattatataaatatatttaaaattataaaaaatatgtatatactttagtaattggctcattaattgaaaattaaaatacgaatttaaaactgaatatgaaaacagaccagcacaaatttaagcacgacacgaaaatacagaaccttcaaaacatactgagtctatcttttaaaaatattggcacctgacatacaacatattctatgacataacatattttaaaaagtaccatataatatagattgggcgagcacgacacacatgaatttaaacagaagttatgaaacactaaacacaactacttacttaaccacttgaggcccctattgggggagttttttagaaagctaaaatcatttttggaaaaagttatgatttaatatgtgtttggtaaaatttaaaaaatagttttttcaaaaatttaagtaaaatttatagtttttaggaaaagttggcccaccctaactttgggattttagcttttaagggaaactacaattttggttttaataaatttttaacttgacacaattgcccttatctaattttaaaatttcccatttaccaattaattttagggtttcttacattctttcaatttcatccttattcaaa

SEQ ID NO: 50313 - DNA, 1262 bp, Cannabis sativa
  modified_base (974)..(977): a, c, t, g, unknown or other
  modified_base (1037)..(1046): a, c, t, g, unknown or other
tcctccaccaagtccaaaggcagtagtagtaatagtggcttggccaatcttagtcctgtttttttctctgcttttggtatcacttttgtccatattaacttaatattaagatcccaaaatgttactggtaatgttttgggtgttggttttattagatttgataaagtagttagttggagggagcttgaagcggacttctttaggtgccagattcgctacttggcttaataggtttgagattctgctattctaaccgggtactaaggtttacaggctaatcagcatttgacatgtgttgcttcatttatttttcattatggtgctgttaattaggggtattcatcaaaccgctcaaactgcccgcaccaccaaaaaaaaaaagcgatttgaaattctttgcagtgcggtcgcgatttaaattttttctaaaccgcaccacacattataaaaataccaatttttatatttatttaggtcaaatatgtgaatgtttaactcaaaacccactaattattgtattgttgaaacttaattttttttcatatttattttcaagccttatggtgtttttgaatgttgctaagatttgttgtatttgtgatagtttaattatttggtgatagtttaaactgcaaaaaccgcaaaaatcgcaccgcaccgtaccacactattttttgcagtgttgtttctgcaattatttagtttcgtggtgcgagtgcggtttgggaaattgtaaaagctgcatgtgtagattggtttgaaaaaatagtcaaaaactgcaccacccgcaaccctactgttaatagctagatatatatataatatagatttaagggtaaatactattttgtatcttgtgttttgcaaaagttattaattggactttctgttttgttaaatgacaaaatagaccttatatttttctaaaatggtaaaaataggatcttgaacttaattttcaacaattttatttnnnnatataaccaactttaagataatttgtaaccagttttgtcataacatctctagatcagatnnnnnnnnnnttttattttgacaaaaaatcagttgaaggtcttatttgcacaattttagaaaatacagggtcaattttgtcatttaacaaaataaaaggtctaattattaacttttgtaaaaagtccaaaataatatttaccctcaaatttatattatacgtatctagttattaataagggtgttcgtggtgcggatgtaacggtttttgactcttactttcgaat

SEQ ID NO: 50314 - DNA, 1614 bp, Cannabis sativa
attctgttcctattggtgaagcataaacatgccaaattactaactatattgagtaattgtaaatctttgaaacccaactcacctttaccaatggctccgacattttttattgtgatcatatttgctttatagaagcgtgtgtggaaactaaaatgttgcttcatacaggtaacagctcaagatatttctacgatgataaggtgtggacaaaataccattatatttctcataaataatggaggctacactattgaagtagagattcatgatgggccatataatgtcatcaaaaactgggactacaccggacttgttaatgctattcacaatggtgaaggaaaatgttggactaccaaggttagaatgttgatgacactaacttttaggaaactcttatcttcacaagaattttaaaaagttcacttgataactgatggtatgactcataatctactgagtatcccctcacatagcaattttcctcataaaataattatacttcgagttcgaagtgctcatctagataaaccaaagtgaataaacctgatttgaaatttggaactatctttcagtagcctgaacatggattacaagctaacaaattaatgtcctgatcgtttataggttcgaacggaggaggatctagtcgatgccatttcaacagcaacaaatgagcaaaaggattctctatgctttatagaagtatttgcacacaaggatgacaccagcaaagaactgttggaatggggttcccgagtatctgctgctaacagccgcccaccaaatcctcaataacccatatatagagtttatgaaagacgtgtaataaaaaccttgcatttgtttcaataaatggattgttagtgtaaagcttctaattttctacctaagaaaatttacgggaactggaaataaataaataaataaataagaaggtagcctgatttgcagtttcccagcattgtactttgttggtcatagtaatttagttttttttttctttttcttttttttcagttagtattagtttgcttcaatgttaagggctgattgtgattaaaagatgtgtcatacttaaatatctaaaataaattttgcaactcagtatcattcattaccttaagttatttttcataattgaaaattagatgtttacaacaaaactatctaaactttaactttttgtagcttaactccccattttttttatggcaaaatcagctaaactttcgtttttgtattgaaggtgttgttagtttaggtacattaactgctagtgtagattgttgatgtatatgtaagtgtagatgttgcatttatcttttcacccgattttctaatatttactattaaaatattataaaacaataactaataataaaagaaaattatttctctcttttcttatctcttgaatccgacctatcatcttcttcgttcttctttcctcaacatcactacaacgaccaccactacaaccagtattgtcacgttttcattattactgttaatttcatttttgacatctttaaattggcaaaaatattttataatttattaattaatttcggttgtggtaattatttggtttctttatttgtgtatttgactttt

SEQ ID NO: 50315 - DNA, 1480 bp, Cannabis sativa
  modified_base (257)..(273): a, c, t, g, unknown or other
attacgtttctgaattctaatatcgaactaaataatgtttttgaattttaatatatactaaattataccattaaatttttattcacattaaactttttttaataaaattatactaaatgttttaaatttaacaatttgaataattgaaaaaaaatttaaagtacttttcagttaagaggcattttttgttatatgtcaaattttaagattaaaaattcaaattagcccttttttataattataattattattattannnnnnnnnnnnnnnnnattattattattgttattgttatgttattttaaaaaaattgacctctaaatgtgtagcaatcagtaaaagtggaaattaactattgaccgagataaggtgagactaatgcaaaattatttcgtctgattgtgtaagaaagaaactcaactatttttttcataagaaaattcaactattttcttagaaaaaactgcttgcacgaacaaactaacataactcggtagaagaagggaaacaaaaaaagaaaattaagcccaataaatttgagatcctacctctgtgcctcaaataatgaccacatggagtatttttcttaatttttttttttgtatggttgttaaaaaatcaaataccaaaatatatatttacaaatctgtaagcatcatccatatattatttgtcttttttaaaggagagacatacgacttagtattaattttctttaaggaaatcaactacacatgatttaaaatgtgctttcgacctcgagatgatgataagatttgttaagatataaataaaaaagaataggtaaaaaaaaattattagtgtctaatagcttcttcaatatcatattattaaagtatgtaattttatataacttaataaaataatttttaaataatatttctaattaaaataatttcatataacttataaaaaatgttaagcactataaataacaatgctcaaataaaaacacaagagtattaaaagtcattttctaatatattaattattaatttttactttttgctgaattcttttgttgtcctatcctttatggtttattggggtggagtaaaataattagaaatttgttgaataaagggaggaaccaaaaaacatggtaggttaggtcggtatccaactataccatctaattgagttttttttttttaaaaaaaaaaaaaaaaattataaaagtaaccatcaaattgagttagtcaaatatgtattattatgattatttggtacaaattttattgctccaaaatatataattatacaaatttcatgcaaaactgaatgattcgttaatacttatttaatatttatataaagaacaatcattaaataagagtctgccaaaacattcataaatagtgtatactacaaatttgttaaatattatataaatatataataggaaatttaccttctaaatgttccttttgtataagtctttatctgtttcagtatttt

SEQ ID NO: 50316 - DNA, 1310 bp, Cannabis sativa
tatcatttatcatttaaattctttacaaacaagttcttatatattttcatttttgaatatatataattaatgaccatttttagttccatctacacaactttaatgtactgaaaaaaccatcatggttcattaaattccattgaaattttaccagttaaaacagtctgtgtaactttgatgcatgtgatttgtttaaagtacacatttttctttttaatgattatattttaacatttactgtttttgttcatgtgaagcctctatctatctcttggcttagtctattgcctttttcagtgttttttttaatgaacacagtacttatatgacctattccattttcatgaaacaatgaaacaactacgtatttggctttgttttatttgagcttttcttttaaaaaaaaatgtccttttcaatatcttatttttattagtattttttttatcaacactaataattttttgtattattataattgtaagataatgaaccattatataacaaagaaattatataattattctatacttgtatataatatatacattttaatgcataattgattaattttttttttaattcatatgatattttttccatgtacaaagataaaaaaaaattaccagaaatacaatgaaaaattacattttaattataatattgaataagtatacaattttaagttgagatatattacaaagctcaggaggaatatatgctaataataaaaatgaaattcatggctaaactaccactaaatattataaactaaaataaaaataaaattaccaaaaatctatacactaatctaacaaagccttgcaagatcaagaaaaaaataataaaaaattaaaaataaatatatattataagctcagttaggatagcaccgtcacgatttatttaaaataattactaatcttatctccaaaattacgataatatgtcaaaatcgaaagctcgaaagaagaagaagaagttaaggttaagctcatggtagtgttattattttgaaaaggttgaaaggagatggtttttgtactaagaagagacaacattgagaaagttttgatgaaatgagatgacatgaagaatagaagaatgtatatttggtaaaattatgaagagaagagttttgatggaagtgatgtaaatgggagaattgaagagatagatagatagaattgagattgagaatgtagtgaattatgtgagtgttaagagtttagatatttatatagaatggaaattggaaagagaagagaagagaatatatgaataaaaaaaaaagtataggtaggtaataa

SEQ ID NO: 50317 - DNA, 1932 bp, Cannabis sativa
attagaaaaaataaaataattagacatgatttaaaaaaagtaagaaaataaaattaaaataagtattaaaattaacatataataatatgagaaaaaaaaattaaaaaaaaattaaaagtgatttttaaaaattatttaaagtttaattttttaaaatattaaagtgtatttattattttgtgtagtgcaaataaaattctctcaattgctaatatttagaagtgtaaacaaatttttatatatgaaaaaatacttttattatcaaaattttgtatgggcctaaaatagttaacccattcttaattacataagtaataaaaagcccactatattttttttgtataattgggtacaattattgacataatgaccacttcatgttatcacctcaagagtgcccatgttgatttgtttgatcatattagttgagacatcctctcctagttaagattttgatctaatctttaagatgtctccacaaattagtgttgtaatgcacatcactatgaaagaggtaaaatatggtcgagtctctttcttttatttctttccttaaataggacatgatcgatagtatgacattttaaacttctatcacgatgaataaatatgttactttatgattcgaccatgttggtatattaagtgaagagaggctcaaatattcacttacctaattgggcttcataaatccctcaacttgtcttaggaactctttcatggagtagcaattcttcttttgaaattattttaaggtttctacttgtagttttgtaaatattgtcattagcttcttgtcgagctactcactctttcggccttaaccgccctctttggttgtatgtgtgagcactaggatcggtttaagcattaggcagcttggactattgcacaaggtcccctatattaaaatgtcccatttttaactaaatatttatatatagtgtatacaatatacataataaatattcataacaatgaacatgcacataaacaaaaattgataaaaacttgtggtttcaatgcacatgattttaaaatttttgcctatatgaagtttctttttttttttgaaaactgaatttatgaagtattgattagtaatttttttaattttattttaaataaaagacccaattttaatttttcgcttaaagctggcaaaccagtccggcctggtgagcaccatgaaattattaattaaatttcaaaaacaattaacaccaagacctaaatgcaaaaatatgtattaagttctaaatttttaccacaaaactcaagtctctcaagataaaacattggatagaatagtgaaaaggacaatcaaagctaatttttaaaatatcagggatttaaatataaaaaattaagattgggggacctaagtgtaaaaaatagttaaaagtttggagtttagctacaaatatgctaagacaaaatgatgtgtatcttactgaaacttgacaatgaagggttttgggcctaatggcccactttagcagaagtgtcagtttcagtagttgccttctactttcctcaatctaattatgtctaaacaaaccaaagggtatgaaaaagttaaaattatcttttggcatttgtggtaagaaaaaattgctaataggcactaatgatatttagcattatcatcaagtgtgatatcatttttagtttaattaaatatctaatttaacacatttaatttaaccattattataaaaattggctatacatttgcaagtcatgattaagagtggtaattcgtgttatcatgtcatatttacattcgtgtaaaaggccgacctttaaatttagtgggccttaagaaaataaaaattattagatcttttatttaaaagatatgtagtaattttaaaaattactgaaaaatatttatatttttaaaagggaaaatattttttttttggcccc

SEQ ID NO: 50318 - DNA, 1646 bp, Cannabis sativa
  modified_base (170)..(171): a, c, t, g, unknown or other
ttttttttcttaatcaatatcttagatttcgatcagatccggacccaaatcccctcacggccctagcgctgaacctggcctctgaattaaacccaaatctaaccccggacatagacccggcgtaaataaaatcgaaaaataaaaatgaaaatgaactttacagaacacanntttgttttctgtttttaaaattaaaaacaaaagtggttatagaacgcatttttgtttttcaaaagcaaaagttttaaaaacaaaaattttactttcattttgtgattaaaaaattataaaacaaaagtgttaccaaacggcacctaagtgcgtagttatcaaggggagcataagttcatcgggcataatttattagagcaactctaaaaaatttaaatttagtgttaaatcaacactaaaatgatattatttcaacactaaatttttttccaatttcaattataatactaaaaattacattaaaaatagaaaaagaaaattgagtgtagtctatagtgtatataaatataaaaatttaatcataaacatattattttaatgttaaaaaatgaaaaagaaaatttagtgtaatttatagtgtcccactaaaaatagtgggacactatagactctcacatataaaagatagcttttagtgtttcattggagcaattttgtgtcttaactccactatttttaaaattttagtatcttgagaagcctttatatctcaaagttcagaagtaaaaatcctaattagctttaacttaatggtatgtgtttgataaatagagaatatgtgcatattaattcaagaacagaaatattaaataaaaggaacaaatatggctgtgttttatttttcaaaaaagattaccctatattatattttacaatgagtataaaagggtcataatgccattgccgcaatattgcaagcaattaatttgtgaaaacaagaattttcctaataatatttgtaaaaaaaaataaaattacgttgatatttttttaatcaattttttatttttaaaattataaaaataaaaatattttttaaaatcatattttataaaaatatttttactttttaattaagtatcaatttttttttaaaaaaaatttactagattttattaattaatattttagactttaactagattcggaccctcactgacctgtcttaaataaaataaaaaaataaatatgaaaatgaattttacaaatttctatttttaaaattaaaaaacaaaaatgattatagaatgtattttttaatcacaaaaataaaaatattaagaagatggaataataatgaattaattacttacttacacaaaagaaatagtaaataatataaaaataccatggaattcctaattcccctccccgctacaaaatatggcaatcatacaagcaatctaaattcaaaactaggcagtcccttttcaaccttctcaattttctaataatcctaactaattcaatcatgtttttcttaagaaaaaagaagatattaaaataaatattccctacgtacaaatcataattaatcctcttctaggactagtttcatgtctgccaaactaatttatagccatctaatgttggagatccaaaccatttctgagtaaccaatttcaacctctcat

SEQ ID NO: 50319 - DNA, 2152 bp, Cannabis sativa
  modified_base (368)..(371): a, c, t, g, unknown or other
  modified_base (429)..(433): a, c, t, g, unknown or other
atatcaggattaagatctatagatttaagatcaaccagtgatattgacttagaaagatataacaataagtttatgatatcttatccaagaacaatatcagtctcatctaatgtatactccatacatcagatactagtaaattttgtcaatgccctagaaaggacataacacctatttaaggtgtaagtataccttatcgtcgattatcatgtcagtctaaatctagtgaactaacaaatcatgagaattaaacttttgaacatataatttatgattatattttattgtgctgacacactataattatgaaaaaatgtatatgtactagacttaatagaatttatacattaagtataatcatgaaatannnnatgtgaatcatgcaacataaaattatttctgatcctttattaattagtaaatctgatnnnnntgaaatgagttttatttagggcagacaacccaacatcaaggtcagggacgaattgtacgcctgaatgacatgtcattcatgtctctaagggtctcgtcgttcttggtaaagcaacatgtcgttttacgaaaaaaaaatgccagcacgcgcgtaagggagcgggataggtccttttggacccttttctccattttttcactcaaattttactactctatcatttctgtaatattatgcacaagattaatatatgaattttatttttaattgtatttatatttaattttttgtacataaatctaattatttattgacagcaattattgcttattttctttcctgccgtaagaataagcatgtaaattatttggtgatgagaaacatttacaaattaatttatttaaattttgtatctttctccaaaatttaatgaagatccttataagtaattggttatcctatcgataataattgctcgctaaggatgcttaatatggtgaaaaaaatttattaaatgttatgcatcacaatttatctgtcctttcgataataaattaatgtatttgatcataatatttaatagattgttcttacttgtgtatgagttctattttgttgttttgtctaagaactctagcatacatgcatgatgattatttattattttttttatcattcatttatgagaaaagagcacaaatggcatgatttgttataacatgcactgaatggttattactctttttctcattcaactttaagtgttccaagaacttctaccatgttgacgctaaatggaactaaccacaagtagtaggatgaatccctcatgctaaatttgactcttatgagagtggacttggccttgagaatggatgcaccacctaaacccgttgatgatgccactgaaaaggacaagaagtcctatgaggattgggagcatccaaatcgttgttgtttgatgcttatgaggtatcacatggatgaatccattcatgatagtattcctcagaatgaaaatacaaaggatttacttgctgccattaaggaaaagcacaagaagaatgagaaaaatgtgtacttaactttgttccatcgcactaattatgctgatacatgtgatattagatcccatatcgacaagctcatggattttaccaaaagcttaagggtatgggattggatcttggtgaagattacatggtgtgattttttatggaaccgttccttctcaatttgattcgattagatcaagctacaatgctgaaaaggagtaatagaccattgaagagatgacttctattcttgccaaggaagaaaaggacatgaaaaagggaagagcaagaagtatctccatggttataaataaaaacaattctcacaagagagagttcacatccaataactttagtgaccaatcctaagggaaatggacaagcaagatcatcttcaactggtcacaagaatgagtttttcaaagagaagtgtaacttttgtcaatgtttcgggcataagaaagctgattgtccaaagcacaaagctcacttagagaagaaaggtaattgtcttgtgatggtttcttgagaatccaatattattgatgctccctcaaacacttggtggttagatactggagatacaattcatgttacgaacttcttgcaggcagtgacaagtgacaagtcgaagaaggcagagtaggttggaggagtatgtata

SEQ ID NO: 50320 - DNA, 2055 bp, Cannabis sativa
agacccctcatttattgatgtaaaataccataatagacctctgataccataataaaataagataaatgctaaaaggcaccagtggtgccaagcaccctcctacgtgtcaatattgctattggtttaattaagtatcgagtcccatgtaatttaatataataacttttagggagtattgctaaccaatcgcaatgcgacatgtcttaagagtgctaggaggcaatagcaatgctcataaaataatggcttaaatatccggtggaatatctttcaaaaaaaaaaaaaaatatccggtggaatattgatttacaagtacataaatatttatctaaagctgataaaaaacaggtggtacttatgtataattgtccatcgtgttgggtcatgtatttagcaacaatgtactatagccaaccccataatataaatatatatatggttgtgagttgtcattctatttcccaatcaaacgtgtgtccctgaaacatttttgatcattaaaaaaagtttgttataattcctttccaaaataaaaaaaaatgattttattttatatttctataaatatgccttaattaaacataaccaaaagcataggttcatttcaatctataacattcttttttgataaacatgaaacgtagttttgtgttgttttctcttacaacaatttctattgtgttgatcatactatcttctaattctcagccatgttcatgttcatcaattcatgatcaagaccaaacttatcaccatcactatcatcatcaacaacatattattgcaccaaaaactaaagattttgttggttcatcatcagaactcgatcatcaaaagcttcgaatttatgtcaaaagaaggggaggaggaggttactatggaggatcatcagccgcggccacaattcagaaaccttttcttcatttcttattgtgtttggctttggtgttgttttgattgtaattaatttgtttttctaattttatatgtgcaatctttttttcttttttctttattgtcaaagttgtttttgttgagtaagttttataactttataaatataaaaagagtaatttgtgacataaatacttaactttaacttctgattataaaaaaatatctaaatttaatttttagaggtaataatacataagttatttttccgaaacttttgtaggtatctagctcgtcttaagtaaattaccacgtgataattttttattggtctaagtcattaaatttttattttttattttttgtaaaaattaattgaaatataccaataaaaaaagacacatagataatggcttaacatttaatcttcaggtacctatatagttctaaaaatataacttaggtattattactatcaaaaattaaacttatgtatttatttacaattaaaaattaaacttaaatatttatgtcgcaaattatatatataaatatatattatttttgtttgcaagtgtggggtttgaaaagaatgtgaatgtgaatttattattttgatgcatttgaaatttgtctaattctctttataaaaaggggtctctctcaaacagttattcgtttaaatggaagctgtcgagagtatttctaaaatgctccatttgtgttttattgcgcaaagcaccatttaatttattttgatttggtaagatttcattgaagtctcctacaaccagccatgtagatagaggtgcaacatccttatgtctttccaaaggagtccaagtgtgaattctttgctggacagagggaactccataaaaagtagtaagttccatcttgtgttatttgcaaaggtaatataacaatcaaaaaaatttgcattaaaatttaaaatatatacatgtacatcatctttccaaagcaacatcaaccctcctaaacctattctagggacttcaagtccattattgaaatttaaaacttgacaaaagcaaaaaaaattcattaggacctaatttagtttccattaaaaaaagtacatgtggggatttctctttaagaaaacaaagataaaaaaatgcgcttggattccccaaacca

SEQ ID NO: 50321 - DNA, 1273 bp, Cannabis sativa
ttattcataaaaaaaatataaaatggtattagactgaattgagattttattcgtaactaaaaattaatttctttcatgtaaatttttaaaaaattattaaaactgcgcgaagcgcggatctattccctagtttaatagtaaaagaaaaactgtaagtgtgttagatttttttttttttggattgttctatttttttttcttggaattctaactacataaacttctatttaatatttatagggttgtaaaataactaatgtgtgaataaacttatgggataagttaaaaattactccattttactacacattaatcaaatataattccaaaataattttaattgataaataccctcttttataatcaaagtactaaatataacctacaataaattatcaaaattagagtttctaattcacataatgagaatatgacatataaaactgatcataaactaaagaataataaaataggagtaaaaattaaaataagaaataaaaaatgggtatagagtgtaatttcctctaaaatgattttgtaattaaaatgactttaatttcagagtgccacgtggcatgctcgaattggtcgaattgggctaaactgtgccacgtggaagactcgaattgggcatatgtgctgagtcattgacatgtggcgcaaggagagtttgccacacaaaaagttggctgaaatgcttgacaccatgtgaaacaaagcccactctcgcagctagagcgtgtgagacacacatggaggagagctagaggacatgttcacttgcgcctgggggagagtaggggaacaaggctatccgcgtgggcctcggaaagcaccatgtggcgctggttggtgtcaaatgggcctattgggctgctcttgtttgtcaatgctattcaaaaataccatttttttatgttttgggccaccatcttactcctttttttgttcctttacttttatgccacaaaatgatgctttttaactccaaacaaagataaaattgaattcaaataaatattttctaataaaatatattacaataattttatgaaaatattatatagaattcattttattttatatttttatactaataaatatacatttttaactacctaacacttagttataaaaatctttacaaatatctccctgcaattgcattatgcttatttctctaacgtaattttaatctaatcccttcaagagcctaggtaaaaaataaatacataaataataaataattatctaatgatgaattataagaata

SEQ ID NO: 50322 - DNA, 2536 bp, Cannabis sativa
tgtttgttagtttcaaaatccaaattaatctgttgaattttgcgattttttgataaagcgatttagtgatgaaacctcttaacaataatgaaataaaccctaaaacattttcaaagtccaacacgatcgaaagctccactaattcttgattgggttctgttgtagagaggaaacagagccatggctacgtccattgcctctcaattacaggccatcaaatccttcctacaagctattatatttaaatccgaagctacttaattgatgttgaaactattctctatattgcccttaaaggtcagccactcgctcaatatctcccaattatctctttgggccacaccctcaccgagtaagactgggagatggatatgagattgctcgaatcatcgttgtcgtcgggagatctcaccttggtattctctttctcttaatctctgtttctctctacacttttttgttattattcactgtaaacattaattttgaaaagaacgaaaattttataataataattatttctatttattaaaaatactatttacaaggatttagtaaactaggagcagggagtgccagaagttggtccaatgatagggagaaaaactgccctagtgatttagtaaactaggacagtgggataggggaacagtcatccaatgatagttggtccatgttggatcttaaaaggcgtctagacgctaagtacaaaaaaggcaaaaaggcgagaaggcaaggacatgtggtaaggacctcagaaaccacttaaatgacaaattatgtggaagagatctctcagacagtaatagcaaaagaatggaagaacaaattgctaccttgatgaaattggtccggaaacaaagtggggccctcactgatttagaagatgaggacccagaggctccgcttttggagaacttcaaggtgccccaaattgagttgtacgatgggcacactaatcctaagcctcatccagccaaatacaacaagatgatgcaggtgacaagagttagtgagaatgcctagtgcttgtgcttctctctgacccttaccaaatctgctgaagattagtggaagagaccggctcccgaatcaatccactcctggaaggaactacggtcttccttctggaaacaattcattggtgcccataactatgacataaagatgggctccatcactaatgtcaagcaacagacagggagagcttgaagaactttatttagcgcataatggaggcagcaaccaagaaaagagtaacagatgacatgaaacttgtggccttataaccaggacttgtagttggctccctactgtggtgggaaatgcaaagaaaaagggcagagatgttgtctgaattcatggccaaagcccaaagctttattaatttggaagatgcatatcagtaagcatttggagttcttccgacaccaactccaattgcattttcttccaggttcatttaaccagttcctgttctgggaacatagtataccctgacagtctataaaacatctgaatcggtacaagcacctacggaataccatttttttgggtatggagtggcactgactggattcagtattgcttccgaacagttgaaagtagaacttccaaagaagaatataagttagtcccagaataagagaggaggaaaggatccgagacaaagtgagaattcaaagaaagtaaagaaggaatatgaaccaaggtacatcgagtactctaacctagtggatacttgagagaatgtgtacaaagcaacttgcaacatggtccactatataaagcccccatgaaagcctcaagggggggttcagaaaagatccaagtgaaaggtgtgagtatcacaaagaagtaggacaccccacaaatgaatgtaaccacttaaaagatgagatcaaaatgttggtcaaagcaggaaacttgggacaatggatccaaattccaattatccatcctagacaggggtcgatctcggattgttgatcatttcaggatagcagggtaccgtaactcctctacaagcggtaggtcacccttaagctcctagatctcaacttcgtaagtagtgcatgtggtacagtggtcgtaccttagtaaagaacgttcttacttatctaataagccttgtggataggtgtatgggcgcctagatacaagttggtaatatattttatgttatatgtttttttttgctgattctgttgactcacatatattatttctgtgtgtaggtaaagtgtaacgccctaatctatagggacgccacgtgtgtgatttttataaactagtttaatactaatagattaattaattattaaaaactgtgataatattaaaaacttgaccaaagtaaaatactaaaaacggactttataacgtcataaaaagcatgttccgagaatccttgctataaaaagttttgttaaagaaatatatatgacaaaaatacacagcagatatagccagcccaaaacaactcttggcaacttggcacgcagaccggtgaggtcaatatgtacattgttggaga

SEQ ID NO: 50323 - DNA, 989 bp, Cannabis sativa
tctctctccctctctctctctcagttcttgaaaccccaaagaaacccaagcacatatcaaagtctttcaacccaaattttcaaggattttagtaagagttaagcaaggaatttcttagaagaattaaaggtaatcctagttctttttcctctttgaattttaaggtttaagctttattttgattatttgattttgagaacttgggagtttagttctgtttgagtttaaattatgttaaaaactattttaaagcttaattttagttattcatggcaatttttagatgtagtagcagttgtagcaagatttaaggaagtttgacttttatgaactcaagcattcctcatccatggtggattttaaagcatgttgttttagatgcttttgagttgtggattatctttagaatatccaaaattattgttctaaaaattttggtagcttttggttaaggtgggagctagatttagggtcctaaaaatgggaaattttttagcccttccagcctagaaaaatgttccaaatggaagcttctgaacaaaatccttctagacaagggacttttagataagggtcttgaatacgggacttccagaaaaagttcttccagagaaggggcttccagataagggtcttccggacagggggcttctagttagggttttaccaagaaggtcaattttagtattttggccaagatattctactcgggtgtccatataataggttctttatatcattttagagcttgtgaaaagctctataggatagtactttaattagatccaaaataagtagtttattttaggatgttttcaccatatagttcggtaaaaaactctagattctattaaggttttaagaagtgctttagaatagacacttattagttttttgctactgtgacttagggcctctgatcgtctattaggctaaaattagtctaagtttcgggtcatattttcggttagttttcactctttgtttct

SEQ ID NO: 50324 - DNA, 1957 bp, Cannabis sativa
caataggcacgggttctgagtcaatagtaggagcatgatgtagagaatcgggtaagggttgagaattggtattgggaatttgagtggtgttttccttttgtggctgagtgtttgtgggatcaatggttgggagttgtgtgagttcaggtgatggtaaagtagatgtggctggtgcaggagagatagcaggagttacatgaggaatttcagtgtttgtaggtggtgcgggagtagcatggttgggaattgatgtgggtgatggttgctcattgacaccagaaccagtaaacacaggagtaacacgattagaattagtctcagtttgctggtaattaccagtagaaaaaattgcagtaggtaaatgagatgaggattgagaatttacctgctgatgtgcttgatgaatttttgttgcagggaaggaattttcatcaaagacaacatgtctgctgatgaataatctgcctgagggattttcacaaagataacctttgtgcactgaagaatacccgagaaaaacacactcttgagatctaaattccattttgtggttattatatgaccttaaatgaggataacatgaacagccaaaaggcttgagaatggtgtagtcaggagtgtggccaaagagatactcagagggtgatttgttttgtaaaactggtgttggcaatcgattaataagataggcagttgtatgaaaggcatgccaccaataggtgaaatctaacccagattgagctaaaagtgttaatcccatctcagtaacatgtctatgtttacgttcagccctcccattttgttcactggttttaggacaagggtgagtgaaagctattccttggtcacttagaaatctggaaaaaggcctgtactctccccccccagtcagcttggactcgtttaattggcaagttaaactgtttttccaccatgttcttaaactttaaaaacacttcaagggcttgagacttaagggtgagaggatatatccaaacaaatcgactaaagtcatcaagaaaatgaatgtaatagctatagccatctttggatttgatgtgtgaagggccccataggtctgtgtgaataagttctaagggctgtgaggcatgggaaactgatatggggaacggttgtttgtgacttttgcctaattggcaagctttatagaatggaagctgctgtatagtgcctgtgtgaggtatgttgtggagaactttactcaagacagtgtgggagggatgccccagtttgttatgccaattagtaatattggagttatgacatacagtattgacattaggagagtaattggacatatcagaagagtcatttttattcatagtgacattgttacagcagtaagaagatgatacaatatcagaaacaaaatgactagaacaaactaaagctgagggattacacacagaattgagatttgttgtttgagggtgtgggggtcttgagtattcttcaagcacgtacagtccatctttaagtgttcccttgagcagtaccttcccagtgtgcttgtccttgacaaagcaacatgttttatgaaattcaagaaacacataattatcatgagttagttgagacacactgaccaaatttttggtaattgaagggacatgaagtactgaatttaatttgagagggaaagaattgaaagactttaaagaagtggatccaatgtgagaaatggatagtttcttaccatctccaacagctaagccttcatgacccgtgtatgtagcagctgtctcaagattatcagtgccagaggtgacatggttggttgcaccagtgtcaacaaaccaacccgaatcatctccaaaatcaggcaagaatgtcgaggcataggcttggggatcatactcgacttcctgctcagtaagataagcacgcggagtggactgattattagtgcctggcttgggaggcacccaatttctgt

SEQ ID NO: 50325 - DNA, 1018 bp, Cannabis sativa
tattttttttttgtaaaaataatagaaaaattatatttatgtaacattaaaataatatataaataacaaattataaaaaatataatataaatatatattaaaaaatttaattactgtaaataaaatcattcaaaaagtaaaaatattttgaattttgtacaagtatattcttataattttttgttattttattgaaataatccattgtattattagttattggatttaatttttattgaattaaaataagttaatttttttaatattaaattgttctaatagtaaccaatagtaaaatgtattattttataaaatgctctttgtctctttcatattttctttctttcaaattttctttcctttataccaaacatacatagtcagtttacttagaaaataaatgaaattagatgttgaaattgcatatgaaaatattgctatagtagcatatgctttcatgatgcaacatcagcatgaatataaaaggctattagagactcaattgaattttcatttttgttgatttgcatataaaaatgatgcaattttttgtatttatatgcatatatattattatagaaacaaaacaaacaaaactctcactatctaactaaaaggttcttaaggctaaaaaatattattagtacctaaaagtatgttagttgtcgaattaagtattaaattttatataatttaaaaaataacttttaagacagacaaaatctataaaaagtactagatactactgatttttaataacaattctcttcttctcttcatcccaaatacgtctaatctcatttctaccatacgtggtcttttcattatggttagttctaaacaagtatagtacatgtgtttagttaggcaaagtcaaattttttgataaggtcaagatgtaataacatgtttcacaagaaaaagaaatcaaatacaaatagaatacaacagcaaacaaccactctttcaagtcataaaccaatccttttcatttttccactattaaacattaccactt

SEQ ID NO: 50326 - DNA, 2063 bp, Cannabis sativa
aaagaaagaacagagaaaaccagagcaattgtattattacagttctatatctggtttactacagagagatgagcttaaatagctctgttcatacaaaggaaatcagttggagaattaaccaactattaacagaattattagctacacaatcaagattagcaacccaaaactaatcctaactaacttagtccacgtggtctaaaattttatcgtctggttccgccatcgataacaagtctcagaagagtatttgaaaactctgtaataaggtatgatgattttttttttttctgaatatacataatttacaaattacaatgatgtataaaaatatatgtataataaggcatgatgtaataaggtatgatgattcttttctgaatatatatatatatacaaaaattacaatacgtgctaaaatatatgtataataaaatttagtcaccagtattcatcattctgttttgtcgtaatgcatgctcaggtgaaaaaaattgttaattaattagctagctggttcaaatgattattattacaagaataaaaacatgtacaagggtattttatcaattattgcttcattatttattttctacattttgccgatgatagtaagtagtagagcagaaattgttgttgtctaatttattagacacttgttttaattatatcagccagaagtgcataatttattttattaattaatagcaaaataatcatataaatataggggttgcaataagtagttgtaatgaaaaagaaaaggaaaaaaatgcatatgtgtattattatcttttgggaatcaatgattggagagtgaagaatgaagaagaatcaattgggttttcttttcaaaagaagaaattattacctcaaattaaaaagaatccaaaaaggtacataagtacgtgaaacatgagctcaccacacaatatcccattcaatgaaaggaaaaaaaaaataagcatgcatgtttaaaatggagcttaattatatataaatggtttgagagttgaaaaagagtacttagttgctacaagatattttagagtgaccaacgctactataggtagcatgttatgtgtaaattaatttagggtattcatcactatttatttgattataatatataggttataatgaagatatatatactacaaagtgtataacaatatttgtaattaaataacatgctatgtctgcaattattattccgccaatactaatcagtgtgtttggttttaaaaattcaattacatatcatagattcagatactttaaatggcttataacattaattcaataaggaaaactatttttttttttctgaaaaaaaaatcacgtggtgtatattttatccccactttttcggtcgcaattttagaaatcacgtgctagcaataaaggtcttataaggattggccctaggttaaaacgggctaggttcgtccctaagatccactcatattaaagacttaaattaaaaaaaaacttttaataaatattacataattttttaataatttttaaaaatgctatttatttttataaagggtccaaaaaaattatttttttctactatccaaattaactaaggattggccttactttacctcattgtgccttacttaagtcatcgatacttacacatcatgagagttccaatcccaaagatagcccgccacacaacaaggccttcaagagtcaaacataatccttcataattgaggagtcaggtgagagtcgaaccctacccaaacaagaaaggaagctagctttcctactactacatcacacaacaagtagtaataaggaaaactttaaagaaatactaaaagactttagtttaatattattattagtcaattttttttaaaaaaaaaatattattattagtctaactaaatattaaatcttatataatttaatataataacttttaaggaaattatcccaaatgctatttttttaatttttatttcaaatttacggtttgagtttctaaagtggttgcaacactagttgcaataggtatttctatacgcttttttgttacaatttag

SEQ ID NO: 50327 - DNA, 809 bp, Cannabis sativa
tttaaattaaaaagtgaaaatagttttacataatattattattattttgtgaagaatggattcacagtcattttgataatataaagagcaagattttacaaaaacgacacaaaattcaacaatcaataaatgactgagggttcctttaagctagttactaattttgtccaaacactataccaatgtcacattatatatatataacattcctaattagtagtgacctttaaaaattctcttaataattaaataagagaaataaaaaatttattaataaaagaaccattaattataaaatacaatcaataacaatttattactttcaaaatggaaatattgaaaaacagaacatgcatgcatgcatgcacatgtacacagtgcaaccctaattttaatgtcaaattcagtcttttcagttaagataccaagcaaaacattcttgttcctcttattggactctcccaacttctagagaccctttctcgaaaaataggagcatattttcacattctaaaatatttgaacgcagtggcagacttaggattaaattttagggtgggcttagttatacatttaatataaaggtaaatggcggcaaaccaccaatactttcgttttggtttcactaaactctcaaaacctaaatttgtgcgggtaaacccccaaaactcgtattctgttagcaatttactttttccgtccaaatttagctggtaaatgtcaggttggcttgtccacgtggacacaatatacacgtgacacaattttattggtccacataagtaattatattaaaaaaaaataaaaaa

SEQ ID NO: 50328 - DNA, 1971 bp, Cannabis sativa
  modified_base (172)..(190): a, c, t, g, unknown or other
ttaggtattaacattggtagcttaacaacaggattcacctccctaatctctcatcttgattaatcttcgtttattttctttttaatttctaagttgtttacttgaaaattgcaaacttattattttaacaaatagaatcataagtataattcagtagtacttaatccaattnnnnnnnnnnnnnnnnnnnttgcgtgagatactacttgattgtaacaatagtggattaaatgaagttatgagtggcccttgtcgataagcagcgtcactccgtgttggtcgatcatcccttttaaggtcatggtattagtaaaggttaagccaactagcatgttgagagagagagagtagatagtattttttcaaccgagttctctatggatgaatctggcgtgagcggtggagactccaagattccagggtcatcttcttcgacagtgaccaacaacacttgtaagaattttcgttcacccaaatggctaggatggaattttttatcacacttaaagcaaacaccccgatccctcttctctttgtactttgccttcgtgggttgacgtgttgctggtggaggggtttatttggtcacatttgaggtggtggtcagcgccaatgaaaacattcatagagttgtcgtattgttcttgtttcggtacgagcaaaaattaggtcgattggcaatgatagggctcaatatgggcttggaatgagtgtgtttaatgggtgggcccgtttgtgaaatgtaatgcccttctatacttctatatgttgggttgtttccatgatgtgggccaggcccattacttgtaagatgtgtacggtggcctaattaatatcatatcttagccattttataaaacaagtatcccacatgtgctctggtatccttggtatacaggacgccaacatctcccacctcacacggtagcccttcatcgtggtgatctgacgaacggaaagtaattcgtccaataaggatcatagcgacactccccgaaattagaggagcatcatattcttcaaggctgcccatgatgtgatttgctttcgtctgttctcccattggaaccaagtaagagcatctccttccaaacaaagagcatctccaatagagatgtaaatacaaaagatagctcactttataaaaaaaatctactccaatggtgtgtcaaattgtgatgcaaatttttcacataacaaaaagttatttaaatttagatcacaatataacatgatgtaaaatttacatcacaataaatattatgtttttatatttactaatatgttatttttaatattttattattaaagtttagttagcatatatgctcttttgcattaaatgactttgataattttattaatttattattaaattttatattcacctttgtattattattttatatttttaataaattattagatgaacattaaatgacattgaattttgcatcaagatttacatttatgcattgaaatacaatagtaaaagttgatgtaaaaatgtcacaaaattatattttgtgctaaatatagattaacttttgcatcttccattagagatggtctaatgatggatgtttcaagtatgatggaatatgttaattggctcaagagaaaatattgtttagctctgaaaatctagttgttggggttgtctccattaaatagtacaagatccattcttggacatcggaaatccaagttgggcaactgcgcagagaagaacaaggttggctgggatggtggtggtggctggcctgaacgaatttttgacgcagccaggggtgaatctactccttcatccactcggggatggcagttataccatcggtaagtgatcttgctgatctgtgcatcaacaatcatttggcccatcaattcttcaagcttcttgtctagattctgttgaatctccacctacatgaggttcatgttggtgttcgtttttgtttggattcccttaat

SEQ ID NO: 50329 - DNA, 1085 bp, Cannabis sativa
tttttttttttttttttttcaaagcaaaagtaataagaatcttgaccatatatgcaaattctctaatattaataattaatttgactatataaattaattaaaagttcttttttttttaccaatatctattttatataaaatgtggctatataacaaaatttttggtttatgaaaaattattaggtggcttttttttaaataaaaaaaataacaaattattagatgttgccacctaaagtgatgaataataattttttttaattactatatatatatatggtctgttaggtctttcttatttcttttccttttttcaggcttttgtgatttttttaatgagttcttttataaagttacccaatcccaaacactgcccctggaatcagtaacctaaatattaatcaatactatacacttctctatttatcattcttagatttattttttatggttataaaaacttctttaccatagtaacaaaactaatatccctactataaacatatcttgtacatattagtttgaattttattgtattttgaatgtgttttattggaattttaataacatgtatagttttgttgttttgatgaaactttgatatattatttgtttatttgatgatagtataaattgctcatacctcactgtaattttacagtgtgactttaagatcttacaatgtggtcgcagttaaagaaattatgaaaactgcatgtgcgattgtgtagtttcgttcgaaaaaataatcgatactcacaccacaaatatttaaaagccatcagaggtacttagcaccctccaaatatcatatcaattttagtgcaattaataagtatcaggtctcatataacttaatgtaataatttgtacgaatgtcgttaatcaattggaaaatgctacatcttgatgttgttaaacactattggtacccaattataatgctaaaaaaattatgtactttttccaacaatagtggagaaaaaaaaaatttgtgagtagtgctagcgtcagccttctattacaatttcttagtcaacctctgtgtttaaaatacattctagaatatattttttcaatttttt

SEQ ID NO: 50330 - DNA, 1134 bp, Cannabis sativa
tggaatcgaaccaatcgatttcatagaggaagatgaagatgtgtttgaatctgcacctgatgatgaagcttttcaagctttgtctccaagatcatcacttcgagagctgcaacgacaggatgatgttcgagctgacttcacacacttcctggatgcaaataagcaatgtaacagtgatcttagccaaggtaagacctctgttccccctattcttagatcagggtctgttgttcgaagtttaaactcatcttttcagagtgctgggaaacctagtgtgaaaataacattggatgatattgaggaagaggtttccttttggaattctgctattgtttgttatgtcttgggtgctaaccctccattagaagtacttgaaggatttgctaggagagattggaaggaaaaagttgacagggtagggctcatttcatatggaattttcataatcagatttgcatctgttgaagagagagataatgtcctaaatgggggttataccttcttcaataagaggccggttatcatgaaagcatggaaccctgataaagactttcaaaaagaagacatgaggatggtgccaatttggatccaattagagaacttggaactgaaatactgcggtcagaacaccctgtttaaactagttgggcagattggggacccgattttggtggatgaaatcaccaagcagaggcaaaagctcatatttccaagggtgcttatagaagtgtccatgaaacaagcgttgccagagacaatagaatttgaagatgagtatggaggtgttgcaatagtgggaatcaagtatgaatggaaacccacaatttgtaaaaactgtaatggtttaggccacaatacaactaattccaggaaagctcaagggcctcaaaaacaacaacagtgggtagtgaaagataaaaaagaaacatcaaagaaagaggagacagtggcagctgatggttttcaaccaatttagcaaaggttggaaaccaaaggaaaaagtgcagaagggaactaccaacacaggaaatgcattttaccattttgcaagaccacattgatgaaagctctactgatgtacaagaagaaatgcaagctacagaataagtatgtttattaacatcctaatatgaa

SEQ ID NO: 50331 - DNA, 2539 bp, Cannabis sativa
  modified_base (42)..(43): a, c, t, g, unknown or other
gatcatgatacctgacgatcaactactgggtatgtattcaannttggatctggagtagtgtcttggtgtagcaaaaggtaaccaatagtgtctttatcaaccacagaaccaaagtacaaagcagcagtaatggcaactcaagagagtacatggttaatacagctgatgaaagatctacaccaatctacagattatgtagtgccactttattgtgataaccagcctgctattcgcttagcagaaaatctagtgtttcatgctcgaacaaagcatgtggaggtgcattatcattttttaagaaaaaaaaaatactccgagaagagctacagatgtactaaataaaaagtgaagaccaagtagctgacctgttcacaaaaggacttaacacaataaaatttcaaaaattcagagaacaactcaatatgaaaagtctgtgttgagggggagtattagtcttctagatgattctagcatatacactaaaaatgtggtaaaatttcaagaaactttttaagaatataattactagaaaattctagagttagcttacaaaactcattgtaatattgtatctagaaaatctagtaaaaaacatcaaccgacattaccatgtatatatatatggactttaagtctctaaagaatgcaagtattataggtgtgtttaaaagcattcatagaggtgtcttaagtgagtgagtctaatttaagaatttctaagagtgtgtctaagtactttaaataatttaagtgtgagtatctaataaaataatagtgagagcttcgtgtgtagtgtgattaagaaaagtattaaaattttagtgtaattatttttgcaataataaaaataattatgttttcacgtgttgtcctacagaatttacttcttactttggttttgacaggttgtgactttgcttcaaccttgagtttgagagcatcatattcttattggtatatagtttcaaataaatcattaggggctcgtttagaacgccgtattaagtcgtattgttgctgtttaatcatttttttttttgctgtttgatcatatatttttttaaaagttttagtcagctcctccattatttgctttgctcctatgaatctgtgatttcatagtttattcttcatggggtttgtcaaaagatattgaaacatgtccaattattgaagctggatttattacgtgtgtgctagttactgtgtggttaatctgatctagatcttgatataactatggaagtgtgaagtgtcatttgtcaaattcagtactctggtatgttatgttatgtagatgtgctttcaagtttgaacagttttcttctttatcttcttcaatgattcatagttttgtctttctttcaagtctcttagttgtaattgtactctattggcttggatttcacttgctgggtgagcctgtgcgaagaatacttaactagccaaaatatgtggtaatctgatgtcctcattaaattattttctatatgctctgcaccccaaattttcttggctgtgttatgtttctacaggaattttgattatgggcaccaagagtcagtttggtacaactatttcaaagtaatgtaggttgagatattcaaataatatttataatgtcatatttatttacaaattcacatatacttaaatagatttcaatataaacattgtatctatttaattaaaaacaacagtatatgtttttatttgagcctttaggttctctgcttcgggcattagccttaaaaaaattatcaacaaaaatattgtacatattttttttttgttgtcaagaacaaaaatactatattaattgttagtatattattcaaaaaaaaaaaaaattgttagtattgttaagattctaattttaaagttaataatattataatctagcttactataatcacaatatatttttaataaaaaaatattgggtaattaaaaaaaataattttttttagactataatgcatgttaaatggcctgaaggccttcttgaacttcattcaagatggaagttcccaaaagttaccaaacaagagtcaaaccaaacttcacaaaatcagtattaaacaaatgctatctatcattggaaataagatactcaagattctaaaacaaataactatggtttaagcaagttttacagatcaatgtattgctccaaccataattgtaggatacacattgcatctcaaaatgttatgcaattactatctaaagtccaataactggaaaaaatgacaccaatgaagtgaaacaagatgctgtatcaaccttgatctattccatcacaaaacattgtattgaatcttctttactcaaaaatctcaggtataataagtggaggacaccatcttcaataccttatccagggagcttttctttaaacacataatgcttgaaaatcacgctgcgatatgcgacgaaaattgtactatatttagcacaacaaattcactttgtgataaaattgtaagtagttaatttctgttaaagttgttagttggtaacttggtagttggttacc

SEQ ID NO: 50332 - DNA, 957 bp, Cannabis sativa
caagcttaacactgatgcggcctctatgcagtcaactcattcagtaggatttgggggtgtaattcgtaacagcgatggtgaagtgattgcagccattgcctccccttatcaaagaggaggagacgctgcaactctcgaagcaaaatccatcctcaaagcgcttttctggtgcattgaagaatccttccctattagtcaaattgagacggactgcaaaagaatcacagacgccttagctgccaacaaagaggatatctcccttttcggagacattatcaagcaaattcaatcagctttatctcatctccctaatgccacaatccatcatgttaatcactcaacaaacatgtttgctcacaaactggcaaagttaacattgggattagaagaaattgctatctgaattggtgatgacccatgcaatcctgaatctctccttttcgcataaaagcatcccttccctaaaaaaaacattcagggcttagctttcaaatttggtgggtgataaaaaaaatgtatatatttttaagggataaattgaggaatattttttttattcattaattaaaaatattctattctcatattatatttcattaaaatgtactaagttgctcaatatgtcctcacttttcacttaagtctaacatataatttacattagcctaaggggtataatgggaacattatttataaaagtgggtatatcttaaatattataaaaataaagataaaaactaaaatagataaataatgtaattttctctatttttaagctcttattgaagaaaaatgtagtatttctctaaatcaataataaaaaaaaaaaaaattaaaaagggaaaaaactttggatctctcaactaaataaatcctaaacatagatttagtccgcctatatccaaagtcggacctcctaacattctatttctaatatgcaagtgaagtgattcaatg

SEQ ID NO: 50333 - DNA, 1582 bp, Cannabis sativa
tttttgtagtggatcccacaaggttgtcttcctcctacattcatttagtagccttgctagccttcgaatccgtattggtgtccttgtgcttactactttgtttctttgagtaaataagaatttttccttaaaacaatgatctttgtaaaatgttgcctcttaaacatgtttctgttgcgaaaattctctcccacgtataaaaaccataaatatctttcttcagttatattttactatttttaaataatttatttatatagctgtgaattatatttaacaaatttatgccaccctaatttaatttattcacattaaatatgtaaatattagtctgaaaatatatttacatattctcatgatttattattagattgttatttatatctttattttttgtcaagattgttaaactaagttagtttaacttgattttttaaaaaaataagtttgtttaggatagtattagtgttccatcaatacattatttaaagaaacgagccgcatttaattagagaaggatatttacaatagtttaaattcccgaactatttgcagtatagtaaagtagtcttttgtcaaattttttcacatatgataaacacaatgataacttgatagtttagactattgtgatgtcatcgcacgtgcaattaatttgaaaaaaaaaatctaaattttgtaattttattttacttaaatttttagcttaatgatttttttttaaaaaaaatacatatattttttttaattttaaattatatatgtggtattgatgtgacaataatataaatattcatgttatcattctattggtcacatgttggcaaaatttgaaagaataatcactttatacttcttaaaaaatcttaaatacccaaaaagaaaatttaaacaaccaaatcttatttattgttttttctttctgtttgcatgaaggctaaaatagggataaagtagtgaattagtactccattaaataaacttcaacgtaacccttctagaaaagtggaaattctcattcattttggtggccccgttgcgattgctagatcattacaggtaattcccaagaaaataaggccaccatttacacatcgtggtgagccccacaaaatttagctcaactaaaaggcatcacaaattattatcattattattttgttggtataattattattatttagaaaaattattaatactttttttaataagtattccatgtatcgttttattgatggaaagtattccatatattttatttagtttttttaatgtatatatatatatatatttttttttgaaggaatgtatatatatttatagtgggaaactaatataatacaatatttattatttattcaagtttttaaatttcttgtaaatatgactttgtattgtgaagattattagaatttttatctctatatgtttaaactagtaaatatctcgcgttttaggatgaatatataagatattttaaattatatataaaaaataaattgtatattttaattaataataattacttaataaaattatatttaaattttaattttattattaaaaaatttataacataaat

SEQ ID NO: 50334 - DNA, 1203 bp, Cannabis sativa
tttttgttcagataaatcatttggggtttgtacttaattttgaattgagtgagcccaagttgattgtggagatacaaggatcccattttacactagtttaatcaattttgggcccaattatttggtcaactgggccccagcaagtgttgacccgcccacttattgctcaaaccaacattcaaccctacactatcatcatcatcttcacttccctcttctcagacgactgccactcacgaaccttgtagcaccaacatccatctccattcagttcaccagaagccctcaaccaccaaatcgcacctaaccactcaaccaccagtagcaatcactagctcgagccattcccagtcgaccatcactcacctcagtcgctccgtccaacagcagtagcacccccaaagtcgcccaagcacacacatttcgaaccgaccactgttccacttgaaattaccatttcccgagtcgaaccaccaagccgagccattttcagtcgactccgccaccaagttaagcttcaattcaaccacatcacgtcagcaaccctccttcatcacccccagttctcattctcttccatgagatccaaaatcagcaacccagctgctaactcgaaccagtttacaccagcaagcaaccacgagtcactaatagccatcacaagcttcgcaccatcactttgcccacatcgatcaacaaccgagcctccatttgactaacacacatctccaaccgaaccaagggagccaactgaccacttgcaatccatccggtttgtcaaaaaaaaaattatatatatataaataaattgctaaatatgttgttgttgttgattcgggtaatatcatagatgcttggaagttggtttatttggtgtgaatgatttaaattgggtacattgataatttgaaattggtggtgtagcttttcaattgttggtgtgatattggaattttgatgtggttttgattgatgaactgcttggttgaaactatttgatttgaattagaatttggtgtagtattggaagtgttgtgactcttggacggatttttgttagaagctttgttgttgttgtttgagtagttcaacctgaaaaaaaaaaagagaagtaaaagcatggagcatttgttgtggctgccaagttcccacagattcctcaacaggttctcgacccgtgggcagcgctattggcttcgaatc

SEQ ID NO: 50335 - DNA, 1547 bp, Cannabis sativa
  modified_base (515)..(530): a, c, t, g, unknown or other
  modified_base (1090)..(1098): a, c, t, g, unknown or other
atgtgttttaacctttaataatatcaagcaatttcatttagcaacaaagtgacaatatttatctaactacatgttaatatattatttaaataaataataataattaaataatgtagtcatttttaataatatgtgtaaaaatgatgtgtgatttggtatgcctaattagtttattttaatagggcctttaatagattggcttcttatccaaattattataggtttgagtggggacatatattaattatatataaaaaatatataaaattctataaatatattttatatcaaatctgattttttttctttttttattttagtgggatgtcatattattattatatgtcctttagtagtatttatataagtaatcaatttaagcaaaaacaaagcaatagaatgaaagaggaagatctccacatgaataatggtgttggccaaactagctatgcaaataactccactcttcaagtatgtcaatatatatttcctttcattatatatatatatatatnnnnnnnnnnnnnnnnatatatatatatatatggataagtttaaccgtgatgattacaattaggtttaatcatttgattattattgaattattgtaattttttataaattaattaaaaataattaataaattactaataacttaatataacttgattttatttatttattaataaattttatttctttatctaataaaaattaagattaattttattttaaaattaaatttaattataattactttgcaattaattactaaataagagtttcttttttgcaattaattttttagcactcaaactattgtaatatttgcagtaaaactccctaattgaaagtattacacataccttgatttagaaaaaatgagaataatcacaaacactaattatacttttatacaaatgtaccattttagctaagtataatcacataaatatatatatatatgttcatatatttaattaaaaattgacaaaaacaatggacacttattcttgtatttcaacaaaatagaaaaatatttgttggggttgattatttttcaataaattatatatatatacatatatannnnnnnnnatatatatatatatataatctggtttcatgtgtggaattgatatatatgttaatgcttaaatgtaaaagccattagttttggtgatctaaatatgaaaaatcctactttaaaaaaattatgaaaattcttttatatttattttttattttcaaaaattgataaatttaaagggaaaaaagccaattaaaaaaaaaaaatcagccattctttcaaaataaaactaaatcagttgttctaaaagaaaaaataaaatattaactatttataacaaacatgtaaaatgtgacgtaaatttataatagaggatcaaatataaaaattaaaaaaaaaattatttacaaatttaaatgggataattacataaggtattatttttttgtaaaaaaattacatttttacggtttttcatgaaaacaacatcaagaatataaaagtaacatgaaaataa

SEQ ID NO: 50336 - DNA, 1872 bp, Cannabis sativa
cctcccctgttgcggccgacaaggtctcaatggtcttgctcgaagaagcagtagcgggagttgcctcgggacaaggagcgttggcgtcgaaaaaaccttgaggaggaacttgttcttggatctcgttgtcacaaaccttgagatcgatgggctcggccaatgatttcttcttatgggcggtggttttcctttgcctcttaggaggaatcgcttcggcgacagtagggaccccagggttggttgtccttttcttccccttccggtccatgatatcttcataacctatgtctggaaaactagataaggcggtacagttttaaaaaggccgatgaaaaagggaagaatataattttccacctaagggatttaccaaagtcactagaaggcaagttatcactaaatgatggggtagagggaccataatatccactaaaatccctacaccctgtaattttgaatcaaatggttctaaatcccaactcgcatctacgtgacctgccttatcttccatagtaccgtattgctcagctatatcgaagtatgactcgggacagttaacctcgacgtgaaatctaggataccaactatcaaacttatgggcaatgcggtccacaagaagggaattccaaatattaaaattaagatgggattcttggaaggtgactaatgtattacgctaagccttaagtatagtaggagaccaacaacattgattacctcgtgatgcttcttcactggattcccaaggggcagtattttaaagttattgtgcttgagcgaagcgatacctgacctggtcctcgggcgaagtagttatttgctaccaagaagaatactagggaatcttttaatcataagtgtattccttatcagtgagaatgcccaccgatcgtaggttagcctcgctcaaaaaggaagttgcatgaccgaagaccgtagggaagagttaacaggcacctgtgcctactaaccatctcggggataggagtaggcctcgtcaggagagctatccaaatgaacaaaacattggtaataaacttgtaaaacaaagattgatgtaaatgagcaagaagagaaaaatcacttacgaagtttgcaaaacgtggttgtgccgatggggaaagaccagacgtccagaagaagttgttcttgaaggatactttgtttggcaagtctacaataattttaggctcactaggatgagtaccgagatagaaaaagtcccctgcgatgttcttccttgacgaaatggccttaactgagtaaagatactcaatctctactggtgtgggacacccccaattcagaattttgtataagacttccaaactagagaggatcctgtaagagatgggattcaactagaatggggaaactccaatgtgatttatatagtccttgaggtagtctcgaagaagaagcgtggcccctgcactgatatgctcaaggctccaggcgcctatactagttgagccactcgtactagtccccgggttactgattgcaaagcgcataggggggtgacaactaaactcaccctcccgtactaatctaacttggcatgattgcccaagctcgattccccaggtcttcagcatctcacccgtgtagcctgagatagaccgcacgttaaattctctaaactaagcttcaaaggtgacattggggtcctggggagttctttgaggtacgtggtttgggaggcttaatttgaaaatcaaagtcacctggttcaaaagcaatcgtgacattgggtaaaaacaaagggtttgccataggaataaaggacaagctggatggttccgcccaggctgttgggttttatgacctaaataaaactctttacaatttgattagttatcaatataagaa

SEQ ID NO: 50337 - DNA, 1336 bp, Cannabis sativa
ttgagcttaggcatgcattgaagggtgggttagtgaattcagttcacagttgatatttagctgatatttgacattaattgcttattagtattaagagtattaactataaaacttaaagtggtacctaaatattttccttgatccacagaaactatctgatagggatctttatttttgtctatatacccttttagtttttcgttatttggcaattttgtcactgagataaaaaaaatggcaatcaaatctttaaattttaaaaatattagcagtaagttatgaataattttaatttatttttaaacattacacacctgcaaatatttaatacagtatagaaaaaagatagctactaaacaaaaattattgaactgaaggattagattgctaaaagcaatttgtagggactaaattataaagagaagaaatgaatttatttttgtaattaaaatttgttgtggttataagaacagtagttggacgttcttgaatgttggcttgtgctggctgttgttattctactatgatgtaggccattgaaattgaaacctagaattttttatacccaaaatattcccttgtctttttaaagttgttattatagcaagaagttgaagaaaaaaagaaggttcacatgacgattactacacagggattttgtattttgttcctcaaaacaatagtccaacaatgttgttttgattacaagatttttagtgtattaatatatgaagaaatcagttacaagttgatgcagatttactactggatattaggtgtggtttagttataatcaaatagagtatgcttaatgcattttattagataatattaccgaaagtgattagccaacagaggttgttaggttatgaaatatgattatgatcatcgaactaatcatttgtatttaaaatagggtaattcactttggttagttttttttagaaaaagaaattaatggtatattaatataataaaaagaacattattagtgtagtagaagaacatgtatatgttctttagtaaaaggacaacttataaaagacaaaaattacatcatatatttattggttaagatcaatgctaacaataactaggatttgcttaaggcagaagatatcattagtttgataggaaaatgtcatgaaaatttagaaaaaaaataaataaataacaagtagacaagaaggaatatatgtaatcctttaatttagatcacatgaacaaaactaactcgtatatatttataattaagtaacatggatctcacaagcatgatctggaattataaaattcctaaaattgaaactttgattcatgatttgttaaatctatt

SEQ ID NO: 50338 - DNA, 1104 bp, Cannabis sativa
  modified_base (1032)..(1032): a, c, t, g, unknown or other
tcaaattttttgttgcctcgcaatacgttaaaaaatagtagatacttatctgttgattttgaaatgaatctatttagtcctgctattttttcagtcaatgattggacttcttatgattttttagtgaaggcatgatcatcgagcagagattttatatatcttttttggattgggttcaattcctctagcattcatgaagccaagaatttttttagaagaaactctaaatgatcacttttttggatttaacttcattttgtattttcttaggactgaaaaacattctgcgagatcgtgcgactatatatagtcttgactttttactgacttaaccaacgtgttgtccacataaattttgatgtttacactaatttggtgctcgagaacatttcattcacggggtgactttttaacaatacaattccatattagtaataaagtttgtatgctcctgatcaacgacgtgcatttttatctggttgtatctaaaatatacgtccataaaagacatgagttcatatcatgcagtggcactgactaaacaatggaaagtaatatttcggacatactttatagtagttgaaatatataactttgtagatgtgaactgaaaaaaaaaataataatttattattattaattatcaaatatctagaatataaatttggaccacttcatttataaccattaatggagctatatatgttttttttttggaagaacagctagttcattaaacaacgaaacggatgggaaccacagggggggctccctccccatggactacagaagcactatcgccagaaactctagcagattttgctaaaccatcgacaaaattcagatcaccacgtttaacataatgaaaattacaataactaaacatctgaattaaatctaaaactgaaaaggaaagattaaggaaatgccaatccgggatacaccttctaccattcaaggcttgagtagccacctttgaatccgacaccacataacatttgtgccatccttctttgtacgcccaatctaganaaagccaaatagcttttgtttcagcctccaaagcagagtatgccgaagcctttgttaccttgtaagcccaca

SEQ ID NO: 50339 - DNA, 1248 bp, Cannabis sativa
ggctcgaaatgagaagatccatgccaggagtgttttaagggaagtgaccccctgctgtggtcactaggctttgtgctggtattaataaaaacttagactaattatcaaaaacaaaaaaaaaacaggtagaaaatctcttaattcaaaatacaaatagtcgtgttcgcacactactttaaaaatataaccacgacacttagaagtattacttgttttgaaacttcttaatacacaaacataattactaaaataaacaactttataagagaggtattttcaaaatattatctttccgcaatgatcggtccagatgcacatcttcacgaccagacataacaggttaagcttacttttgcttacaacaagattcaattgtgtaagcgaatttgcttaatatgtcaatcagaaaacaacaaacaataacacagttttttagtaattaattcaacttttaagatatatacttggaaaatgccaagacgtaacagttttacttggccatacaaggaaaaccgtgataaaacaaacactactttttatcaattccatttcagaagagcttttaagctcattcctcttatagccatcgaaatcccaacgactacaccatatacgtaccgttcccaatcggtcattatacgttttcataatatacttcactatcaccatttcctagatttccacacaacatacaataattattcaacagtctactcataatctagtgacaattcattatcagatcgaacacttaaatagttctagatacctttaccatgttatacgcatccaagtccaaactctcggtaagagagatatgaccacttcccagagagtagtagtatcctgcaactatctatctcatcgtctattgattgcttttatacgtaactatctcatttattacattgaagtagtatcccataactacttaatgatttaatcttacacattaataatcgatctatactaatactaatacaccccttaactattctaacataacatagcatacaaattaacatgtttcttgttgtaggggtaagattaacttacttggattagcgtgctgcagaatctgaaatctcgattcccatgtttttctcgtattatgtggtattgtaaagcctagagtgtaatctttgctattctaagtctcctattaagacttaaaaattattcatttttacacttcaaaatatttttttttcatttttacggaattctacatagaaacccctattacaa

SEQ ID NO: 50340 - DNA, 1137 bp, Cannabis sativa
ttcctcttgagcaagaagatcatcaaaaatttgttctgaactttgaagagcagaaaagtgatctgaagtcgtagtggatgagttttgtaacacttcaacatgtttatgagcctttttaatttttttcttcatatgaccatacttgtgatgatgccatgactgtaagtgtgaagcacaagattgaatattacttaaagtttgggaaataggattcgaacaactgttatcccaatacttaaaaataatatccaaacaatcttgatcattaagccaaattttctcaaatcggaatcgagacttgaaagtaggtttctgccaattgcacaccagccaaggagaccattgttttaagagccctgtggtccgaatgataatagtccagatgctgaagcaatggtttttgaaaaaagtcacaccaagcatcattgaaaaaaccataatcaagtcgttccttgacattaccctggccttgacttttgttggaccatgtgattaattctccttcaaatgcagcagcttccaaatgacagcagtcaacagccctttggaaagcttcaatttgtccattattacgcagaggaccaccaatcttatcagcttgggtgagaatttcattgaagtcacccaaaaccaaccatggaaaattaggagcaatgtcacaacaccttttaagtaaagtccaagtgtgaatacgttggctactttgaggatgtccataaaatccggtgaaatggaaggaaggtagatcttgaaactcaatgaaacagtctatgtgattggaggaaaaattattaatggtaacctcagcttctgttttccaaagaagcattagaccacccccaagaccattacgaggaacttcaataccattgggaaaatgtaaactattgcgaaacttatcaacactaccagcttgtaactttgtttccataagaaacaaaacacagggggcttgttcagaaatgagcaagcgcaaaaatctgaatgcagtggggttccccaatccccttgcattccaacttaagagattcatggcgagtcgcagtggagcatagcatccaccgcggaagaaccaggctgttgcagggttgaatctgatgaaacaccagaaaaaaccgaagcagaagagagatcagt

SEQ ID NO: 50341 - DNA, 1173 bp, Cannabis sativa
ttaaataacatacttgttagtaaatctaagatcctggtaatatttccaacaaactctggtggtaattttcggagaggagttcaagaatcctgaatttcaatgaactagcaatggaaatgagagaatcattacaaattagtatggtagtttatatcaaggggttgtcagtagaacagagaatgtacgtgaggtacatagatttttctggatgtgtttagaaagattaccaggactactactgaagtgagaaaagactttaagatcaaagtaatgtcaagaacaggggcagttctgaaggcctaagtttactggtaaaggtaagactaaatgaactgtaatcctggatgaaggacgcgtggcataaaatgagaaacacaacctcaaacggtcactaatcaagtcctcttaattagatcaggtcatggagaagctttgcagatccgagaacacatcaggcccaagggctatatagggatttttcctatagcatactgccattcagatccagaggcctcgtcatatctctagaacctcggagaagaccaagctcaacatatgtccaagagacccctggaaggcactcaaagaatctaacacggacgcaattgcataaaggaagtcagacgtcaaccatgaagagagacccatttcaacccagtgatggttatttctttttctgatagagaatcagatcttgtcccctatgtcagaccatggtggtgtgcacgccccacctctgaacataccttttttcctgacagtttgtctaggtgtatcctttttaaggtgaaatttgaatgacacatgtatagtaccaacaatgtttctcattgtccagctacttcttcatacgagaaaatacattcttgggggcccaaatgtgatacattaaggccatggaaacccgaagtccttcaagcatctttcaaagtgatggaagtctttgctcggttgatctaaccacctctaaactttactccttggcctttcaccaagaattttcttcctgaaagtgcatcacataattccaccaccccatcagggtatactctcaccaccaagaaagacccatcataccttgaatctagtcatccatgagtatccttcgttaaagagttggaaaaaattacttgttgcccaacttcaaacatttgagaccaaatttttctacta

SEQ ID NO: 50342 - DNA, 780 bp, Cannabis sativa
ttcaaattgtcctcgaggtcaaccgtggaagcgcttccttccagattaagatcctcaaaatcttcttttggttaactgaagcactagggcgatctttccttccttaggcgttaagtctcagtgcctgtacatgggtcttattgccttgcgagagcctcctttacaaattggtttggggacctttccctcgggtttggttaaccttttaagggttagaaagtaatcattttctattcacccgcaggggcactcgtgtaggcctcgacgaattggttttcttttagggatcatcagctatggctttccctttctcaattgctagtattgacaatccagctacttgatgatcaaactttctcatagccattggcagattgatgttaatttgaactccagtggctaagaaggaacctctaggttgagcccccttgatgcaatcagggtttgcaactgaatgactatttcttgtatttagtgagtaacctcttcttgcactgccatcctagccttttggtctaagactagttgcttttagtgtgttacttctgggtccctagcctcttggtctaagactggttacttttagtgtgttacttctgggaactcagagagatcctccatgttttctaagtcgtactcttcctcctcttcatcatcataatcagcttcttcattttcataatatccgccttgattgtcttatttaccaggactttcttgatgaagttcttcaggctagttgacattttcgagagggtcatcaaccaccactgatgcctc

SEQ ID NO: 50343 - DNA, 1061 bp, Cannabis sativa
  modified_base (55)..(82): a, c, t, g, unknown or other
cgaccgattttcacccctaggtaagacattcacatattagacctaaataaatatnnnnnnnnnnnnnnnnnnnnnnnnnnnngcggtgcggtttgaaccgcacattaaaaattcaaaactgcaaaacgcactgcgtggtataggaaaaatttaaaccgcgaccgcactgtaaagaatttcaaaccgtatttttttgaggtgtgggatttaaacggtttaagcagtttgatgaacaccccttgtgttactgtagtggttcattacaagttttcaacataatagaagaacttcctgcgtagctcaattgatgagatgttttgagatgggcacaattcttttatcatccacaacaaacttgagactcaatctagaaatagaaacgataatgaagttgggagtcgcacctaatcatgaactgtatatatatataagttataaaagtaattaaattgagataaaatagtatagagatagaaggttaaatgaagatgaagatagttatagagtcataaaaagttttatggtgtttgacgtaaaaatgaaaaaaaaaatccagaatagtataaataagaaaactagcgtatcacagtataaatgaaagattttaaaataaaacagtacctttttaatctcatttatttaagaaaacatgtattttttttttttttttgaaaatttcactatactcttttttttttttttgttaattcatttcatttttacctttcctttctatatatttaatttataccttcttttatttattatatccggattatacgtttacgggcgtttggtatgaggtgttcaaaataatttgattatagagaatattatgaaagaaaatatgattatagagaaatacataaactgtgtttggttatgtagggtaatatgtaatcatattcccgttaattgagttatactgtttggtcgagtacaggaatcttatatattattttaaaaaattaaaattaaaatatttttttattgtatttatagaatgttacttatacataaaaataaaataattattcattaaagaaatatattgattaatt

SEQ ID NO: 50344 - DNA, 1952 bp, Cannabis sativa
tggagtcacttgagtatgccaaaatatagatttatgctttggttgatagttcttgaaaagattcgtactagaaccttgttatccatgtttaccttgttatccatgtttaataatagtatcgataagacgtgtttgctttctggggataaagaagagtatgtgcaacatttattctttgagagtgtttatagtgcaaattgccttagtaaattgaaatttgacttggatggattgctcgcactcataggttggatgatcttattcgttagattcgtaaaactaaaagaataataagtcatttcaaaaagcaattttttactgctactttggcgaccttagtttattatttatagagtgtgagaaatgatgttttttaatcttaaaaagtgtgtcaaattgctagtaattttatgagaattctttgggatattaaatatagagttttttatgttatgcctaaaagagttaagatagaagataagaattagtttgatttgatttgtagtagagtttaggagttgagtattcagggcatacggtatacagtatatggggtttagattttgtacataatatttgaaacataaaatttattaaaattaatagattaattatgtttgtatttaaatatttgaatactttttttttgaatttttttttaataaatttgttagtatatataattaaaaacattagaacatatcagatgtgaaaaaaataagcaatctacatattttaatattaagatttaaaaagataatatcttattattcagatgtgcattcagacttagaaatctgaatcatgaaaaacacaaatacactctaaaagttcaataagccaccaacaattaaacattaaaagtatactaggtttccaaaaattaatagaaaagaacatcaaacattaattctatttcaagtatattaatttaaatttaaacattttttttttagaaaaatgcattgtccattaataatagaaatgataagtacaaatacaatctacagagaaattgaacataggcccaaagttcaaccaaaaattctcaactggttctcttgctaaagtctagataaaaactttgctaaaaatctcacaacaatgaggagaaaccaagtttctttgagcaagacgcagacaacctaacaatcaaaatagcataaacacattctttcaaaaaataaagagtgaccaaaatactcgtctagttcgatgcaaaacatcaattgcaatcgtaaagactataacaaaacacaaacaatccctgaaacaaccgaagcaaatcctcaaaacaacacaacctaataaccaacactaaaaaggtcgaccaccacccaagaccaccctttaaccaggattgccaatcacatggctaagactaataacaataactctttaactgagactaaaagaatgttagaaagatacgtcagaaaaccctgaagagaagggggagaaaagagttttagagaaaaatttaaacacttttggtgaggtagcaaaatattataattggtttattttgaaccttattataattgaaccttgttaatatatttttggaatcaccttgtattttacttatactgtataattctaaagtctcccaagtttgggttgccttggtcaccctgatacttaaagccttttttcccttgaaaattggtgacatatttgagatgcattggtgaatactagaattcatagaagctaaatggaaaattatttatatttttccttttataattacaaattatgaaaaaaaaatcatatattatcaataataggaaattttcaatgcctaattaatttaagtcatcaaatttttatttttatttaaatacttataaaaaaaataattggtgaataataacttctcaaccgccaccgccacgtaattacgaaagttctaaaaataaacttacgtatttatatcgcaaattactcta

SEQ ID NO: 50345 - DNA, 899 bp, Cannabis sativa
ataaattattattcttatattgtagattcgtgactaaaacttttagtcaaaaaaattataatttgttatgattaaatatatttttattaacactacttattgtgactaaaattatattagtgacaattttttttaaatactatattttagtcacaagtaactttttattagaactaaaaatcatatttaatcacaaaaattatcactgaatttttttttttaaaatattagtaatgatatgtgtattaaagtaagtattaaaatataacacacaatcatataatattgaatttttaagagataaatgtgattgattaaaaaaaaaagtaatcaaatcatcatatgtaatattttgagatgtaattatgtttgaggaccacattcactatagaattataatgaaatatttcaatggcttataatagtgataatagaacaatcacttttttgtatctaagtttagatcttgtaatggattttgtatttggtgtacatagaaagtcaatgccatatataataatggattcaagacttttcaataaatgattctgaatcattaatggataatacatttccttttccaaaaatacaaattttatgctaataaaattcaaaacaaattctgattgatcacatgtaattaatggcgaactcagaatttaaagtgaaggataattttttttgtaagggtacattatagttatcaatctaatttaacaattatactaaaattaattaatattatgtatataaatatcattttttttattataaatatatgtcgtaactaattaaattgtatttatatttttttcttattttttttttaaacgacaactgttccgtctcgcctatatgtgggtccgcccctggcatgttattactaatttataaataat

SEQ ID NO: 50346 - DNA, 1194 bp, Cannabis sativa
catgatgattcgtgatgggttttatccacaggcaatgactttcactgctctaatgaaggtatctttgatattctgctaagctagtctaatttttcttttttattatttatcagcttggaaaacattatgctcatatgcgtgccatcaaatgtttcttcatgaaaagtttcttcttgtattcttggctataaatttttcagtgtgatgttgtgattccttattagttctgaaattttcatgtcacccaataggggtagctcaaaatggtcaggcatgtgatttgctcccacaacaatgtcgagattcgagtccttactgagtacttacatagcaattgttataatttttcggtctccaaatattgtagggttaggcggagatcctaatttctaaaaaaaaactctgaatttatggtgtttggatctatttatacagcttctagagaattaaattgcttgttactcttgtagcggcatcaactgatatctacatacataaatcacgcacaaacttgacacttactttaagtcttttggaacaagccatctcgaaaatgaattcaacttgatgtgaacaggtactgaatttctgtttgaatttgctcattgataaactattactgcataccatgaatataaatatctgcttatgatgcattgatgcagcttttctttatggaaatcaagttatgattgatgtgattaagtttgttgttgagcaaatgtactgagaaaaaatctcacccgacacatcaacatgtaactacgtgttttctgcataccatgctcgcggttataacaacacacagccatggaagcattgcatgtattgagcatgcgtgtgttatgagaagaattcgcctatcttcaaaaagcgatggtgctcgaacacaattttatccttgctaaagtggcgaaaatcgagtcaagaatattgttgttgtttgaaaatttctaggaggaccgcgctgtggcccttctgagtctgagatgggggtaaattgaaaaatacttcttttatttatcaattaattaaatctacctctcatttatatttaattgaagcatagctctttttatatgtattgtacccaaaataccttaacataagggagtcacatggagagtatattgaagtgacaggggcaaaattgacaaagtattttaaaaagaggtaaaaatgatagactttaaa

SEQ ID NO: 50347 - DNA, 1277 bp, Cannabis sativa
ttaaaaatggaatattactagcttgacttgtagtttattctcttttactttattattattaacaaaaggagatcacatggtgcatattttttctccacttttttggtcttttcaaaaattttgggaaccacacagtgttacattttttatttgagcttatattaacttttattaattttattaaaactataggttgattggataattttttgttgtgctaaaatcaatagttaatgtgcttaagatctatgtgtgtatagtctagttgaagcaaaaatgtgagattttccaattaactaattgcatttgatgagcaagcccaataaaacctagagttatatagctaagtgtcattccctaactctataaatacttattgtatcatcacgattgtattaataatcagataaataaaactgcttctgatttagacatctaggaaggaaaacttagttgatagtattgttgcactatcgaattgcggtattattgctatggatcaatcaggtatgcatactaattcttgtgtcattattattgtgttctagattatatacaaatttgtatcttgggctatttaattttctaacatacattagattgcttattgtatatgatttaggacctatcatttgtgtaactattgccgtgtataggttaattatctctaatttcatattaattttgtaattattatatgttacattttttttaatcttaaaattgtagggattttattcctcataaaatttatttctattgatatattatatgcctaaaatcgtcaagtaaattaagagaattttaagattaaaattttagggtttattgaataaattatgatattaattttgtgatttccgattatattgattatggactaaaattgattgtgcaaatctcattaccgactaatctacaatgtttccaccaaaattaatttttgaattagatgagatataattgtaataatcaaattattttagctctaatttttggattgagtttcgaggaagtgctagagtgggacaatccactttaactcgtttttatagtttacacacttttgtattagctcttcttactgtcatatttatattaatgcacttcctaatgatacctaagtaaggtattttcggccctttataaaggggctatattatactatttgtaatcaattggttatcacatggggtagcccaacagtatttcattgccataaatatggattattgaaaacaataagacatgtatatttagatatttctcttcaactc

SEQ ID NO: 50348 - DNA, 2311 bp, Cannabis sativa
ataatccaaaaaacaatactatagttaaatgtttatcccagtgtatttttgatgttttctagatttctaatagtaaatttgttcatatgaaatcacgaatagacatataaatagagttacgtacgtaaaaatactgttcttatttttaatatttcataacagttgcattacagttacataaatattttgctaactctttaaaatttgacatatcaactattaaaaattaataacgatacaatagattttatcatatttacaagtgtttcatatcgtcaatacaatataaagctctttaaagaaatttttctaacatatttaattttattaataaactaaattagttgatataaagttaatttacagaggtccaacagttgtttctccacatattactattaaggtacaattaattatcgattagtgacgaaaaaaatactgataaatagtttcttatatatacacattcacattttatatttctagttgcaattaaattgcacgttagttgaataataattttgttaccacaatatcatagtactataaaaacaaggctcagaattgtcaaatacgggacctgaacagataaaacacaatttttgtaatattcgtttgtattaaatatgtagaattattcgttgttgtgtggttttatgttagttgactcgcaacagatataaccattacattacaggttcatcacaattgtcctgaagttgacattttcttactgttatggccatcagagttggaattctttcaagcaaagacaccttcgaatttttcttcagtgggcgacgaccacctttagccacggggggagcgacatcgaagtcatcatcatcgatgactggacgtttccctttagccttgttagcaactaatttatgacctatttttgaagattttttttggcaatgaagatggagaagcagagccacaaataatagtcattccctacaacaaaattgggtattgccgggggtattattacaggcagaaattacccgcttctattagtaggggtattaccggcagaataggcattccgtcggtaataactattaaataaataaatattattttattttaaatatattaataccgacgaatgggtattaataccgtcggaatcccacctctaaaaaagagggggagaattttaccgcccaaacatttcaaaagattattagaggaggattaatatcgacgggtcccgccgatattaattgtgattttgactgttgtgcagtaataccgatggaacacagttaatatcgcctgtattaaaaatctataaaaatccatttccatttcagaaaacacatttttcccatttcacttctcaaactctctccgcctccttcaccattttcacctcctcttctctagccattaacttccctggcattgcctcttgcacctttaatgagtcatctccaccattgcatccaccagtacacctccaagtagtgttattgtttatttttttttttttacatattgtcattttattttctcaatatttatttttttctccatctttaaattttgagataaaaaatcggtggggaaaataagtctcagtaaaacgccggtcagagtatcactatcgtgtatctaaaaatttacaggttagttcttataatatttgtgtgtatatgttctcataaaaaatgtattttttttttcattttatatgtaatgatttatatttatatgtattatatgtaatatatatatatatattatatattgatatagagatttaggatttatagttttgcataattttaattgttaatttgtgtatttttgaaaatatatattgatattattagttttgttagaaataatattgttatgctattaatttttataaaaaaatttataactttttaataagtaaaaaattctctcattaactttttaacaaatatagtgttaaaatgaacataaaaatatattaattaatagaaaagttaattaaaatcaaaatataatgaaaaaaaattatgtaaataaattatatattatgttcatttatataaaaaaaaatataaatgagatctctctctaatgaagtaaaaataaaaataaaatatattgaataattaaaaaaaaagttaatatttgaaataataaaatatgttttttgaataaaaaaatataagcaataattaaaaaataaatataaaaataaagttaattaattaataatatagtaacttataaaattaataatgttattttgtaataattaaattcaatacaaaaatggctaattagtaattttttcccccgaact

SEQ ID NO: 50349 - DNA, 1069 bp, Cannabis sativa
  modified_base (1006)..(1022): a, c, t, g, unknown or other
ttaattaatcacgatttccataaacctcgttgattagcaacgagttgcacactatgtttaaaactcacgtaatacgcctatgctagttatggtgttacaagtttaacttgcataataaatagagtgaaagatcttgttcttccgctacccaagaacaactccaatgggaaaatcgctagcatgacacatgagttcaaagggcaacgaccaatcaggtgctacaatcaccggggccgtaacaagagctatcttcaacttcaaaaatgcttcattacattcagttgtaaagtcaaatggcctattttgttccatcaagctacacaagggcttagacaccttagaaaagtctttaatgaagcacctgtaaaaaccagcgtgtccaaggaagctttttattccttttactgtggtagggactggtaacttatcaataacttctagctttgccttgtcaacttctatcccctttctagacacctagtgacccaaaacaataccctcttgcaccatgaaatggaatttcttccaatttagcaccaagttggtttcttcacatcttgctaacacattctctaaattctccaaaaaaaccccaaatgagtccccgtaaatagagaaatcatccatgaatatctccaaaatactctcagacatattcgataaaatcatagctttggaaagtagcgggagcattacataatccaaatggcatcctcctaaaggaaaacctgccatatggacaagtgaaggtggttttttcttggtcttccggtgctatagaaatctgattgtaacctgaatatctgtcaagaaagcaataaaacttttttcccgccaaacgatccaacatttggtcaataaatggcagcgggaaatgatccttccgagtagcattgtttagcttctgatagtccatgcacaccctctaaccattcacggttcgagtaggaatcaactcattgttctcattagccacagctgtgactctgttgggttttgtgccctnnnnnnnnnnnnnnnnnatataatcagatttactaataaaaagatcagaaataatattttatgt

SEQ ID NO: 50350 - DNA, 1291 bp, Cannabis sativa
tccttttgctcataggcaatgcaactagagcagaaagcaatctcaaagggaagattaatcaaaaaagatcaagactttctaaggggccatgcagttgagacattgtctgagattcgagaagcagccacggacgtgatcgaagctttggtggtgagcatcatcgaaaaacaaaaaggtggatcgcatgcctgcaggagcagcagcatggctaggggattagagaaaaggtgtgaagaggaagaactcagtggattgaaaatgataaatagaactgagaaatttcaacaaaacaacttaaacaaacacaaaatccacacaaatattagagtaaaaggaatagataaataaataaaaactctaaaatgcaaatgtaaaataaataaataaataaataaaagataaaactaattaaacattggactagaaacaaaaacatgaaatatgtgtttaaatattagatttacaaaattaaatatgacgtatcaaatgccattaaaaaccataaatgtgaaaaaatactatatatataagattatcatatttttgtaactttcttatcaaatcttatatttcatataattctcacttaatctaacatcataaatcagattatgaaacccgctatgtttctctcatgacggatagtgggagtttgcaagacaacaataattattccttattagttactttaagtattttcattacataaataaattataattttatttgtttttatatgatagtatataatgtagttattttaaatttccaataaactttttgaaattttaaataatttaaaatgttgaaatttggattaaaataactaattgcaagcacgtttgtttgaatatttatacatgtgttcaataagttatttgaatgaattgatgagaaatactttcacgtaactacattatatattaaataaataatgcttaattgtatgctgcgaagatcaaaaatatcaaaaaaataatgattatttttattattattataaataaaatacttttacaaaaaaaaaaaaaaagagcgagtagctttaaagaggtggatttgcaaaaacaatggcaaatatgtcagctgattctcctttttataaattcttcgatcgatcactcttacaattgctagatgatatggcttcagaaatggaggacaacaacaacccatgcactaagaacaagatacatatagaaagggaaaggcagttgttcatggaagttcattattattgttatgatcgatcaagattatcatgaacttgaccaaacatcactacttgagg

SEQ ID NO: 50351 - DNA, 791 bp, Cannabis sativa
aacataggtagtgaactaccataaagtttgtgtgtctgtttaaattatttgcataaattcattattcatctgccaatctagcaagctgatgttgcccactttctcaacctcaatagagtgtgaggaacgtttggtcggaccctataggtccacgaccacgaggctagaaggtattatctccaaactctgttcatctcccaaatgaagcgttcatacctttctccacaaatttggtcagggcaatgatagtggttaatctcaggttctagggaatcacttgagccttcccactcagaaaaacttgatgtatatgaagattcatttgaagaattggacgattttgttgcgcagagtcttggttgacactcaaaaagaacttggagcaagtcatcgtctatcctattatcacctcctcgaattcacctgggcttatctacaaaagaagaacaatagagaggtgaggaatcaaatagggctagaatgtatttctaaagaaaaacacttaagatactccgactaggcaagagaaagagatcaaattaaagaaaacccatcctattagcgggattccagagcaaaaacagagaaacaaggtgtaattttacacagaatgacccatcatacaatgactcaatctcaataatcaggttctgggtttatttcattcaaaataaattcaagaaccctagattctaacaataaggagaaaacatgtatatctagtattgtcatagagaatgtaaaaagaaaaatcagaagaatcaagaagacataactgttgggttttatgc

SEQ ID NO: 50352 - DNA, 897 bp, Cannabis sativa
gttttccaagataacaaaaaaaaaaatctaaaatttaaatataatcttttttcgtttttttttgttgagagagaaaagtaatcttttttctttttaaagaatattttaatctcgtttttattaaacaataaacagaataatttattttgagtcacgttttctagattaatatgttataagcagtttttgatagcagcgatataaggtggttaagatgaggtagcggcccaataacctgaaaaaataggtccaaatttattctggtttctatgtagatttttgtaaatggggtgaaaattagaatcaaggggaacaacatgtggatcgaaacatcataacaaagctttattattgtcccatagtaaaaatcagtctaaaaattctctattttaatcagtagaaaatcagtatgggttgattatggaccatggaacagtcaattttaagctttgatgcaaatttgagatgaacaatttgtacactaaataccgcctgtttctggtttaatgaaagttttgtttagcaaaaaaaaaaaaattgtgcactaaaattgctaaaaaaaaaaaataaaattgtacactaaaatcaataatcttaattgtgttacatgggatagagagtggctaattacataaatgtgttacatgataagcaagtattttcatatattccaaatcaggaaatgtattgcattgtttcatttatataataaacttttactaaataaaaaagcattgatcttaagcaaatatgaatctcaagacaatgataaaagatcacaatcatctacttctgtagtcatattatgatgttggcctaattctatgattaaaattggctagacatcattacatgtacattccttcgtatgatacaaaacaaaaatatagaaaaagt

SEQ ID NO: 50353 - DNA, 2027 bp, Cannabis sativa
  modified_base (1760)..(1770): a, c, t, g, unknown or other
aatctttctcatttttatttttagaggatacgatttaataattgtcaaagggggcaaagttgctaatttacaaacataggtcatcatttaaacggaaaaataggacgaaacctaacagaaatactaatttatataaatgtaaaagtttaggggagattcttaacgaatcatatattttagggacaaaatcaatattatcaaaagtttagagggtaaaattactgattattttttatactaataccaaacatgattatgtgttttttgttgcaaaagtaaaaataataataattaatagtgatgaaatgtattatatgatatttgtttaaaataattataaaaataaaaataaaagaattataaatattttggagtagacacccaataaacggacacatccatatttcgattattgttggattttattagttgaaaatgttcctatgggacgaagtaatggttataatggttgttctagattatacctatgttaaattaagagtgcactgtgtatggtaaatttataactgatgagagcattaaacatatggatgtgactgtcataaaattttccaaataatttttttttaaatggatgaccattttgatgggtatcaactatcaagaaatggatttctagcgtgactgtcataaaaactaatgtataatgtgtttagtttacctacgtaatttttatttgagcttgaagcaaattcattttgagaatagtttaccaagaataatcttttggtgttgttcaaacaatgcttgatttgttactaagatttgatatgaaaaagattttcatatcattagagttccaaaaactgcaggatatgatcaaaacgataatccctcctcaacaccaccaaaattctaatttgtaatttgttcactttttttaattcaaaaaaagacttaaatattatcttgaatattctatgtgattcaccccaccgtaatatcctgagcattaacattttaatctatgaccttttaaaattttagggtgcattattatgtttgttttcagatgcttattgtagaagctcccgtaacaatataatgcaattaaaatttattaatttgatagaaaagtaaagtaatatataaaaaaaaattacgatgcacttgttgaaaatattttaccaggatttaaattaactaacatgtatgttggattataattctataatttaacatcctaaatatgaattttttaaaacaataaaataaacaagtaaattttataggaaaccttgcattgatgacagcagaataatatgactcattctatttagatctctaacctttgatcctttctgttgtagagtatgatcaagatctgaacttggattttccttatgttgacaatttgaaactacaacaagttcttccttcactatgttgagtattgctttgaaatgtgtgagcaggttctcaacacaaaggagcaagaattttgatgaagaaatccaatagaaaatagcctctgaatttttgaaaattaaaaagaagtagtgagctttttagggttttctagcttagaaaatcatcttcagacaaatctctcttttctttctatttataggcttcacttagggttagatttagataagatgggctcaaaataaagttggactaaatcaactctagggtcgaattgtatgtgggctatagagttagatttatgccactttatttcatttaaatgaaacaatatgtttttcctattttaccacttatctcttctaattatnnnnnnnnnnntttgtctttaataattataaataattatcaaataaatataatttaaatatatttattaattagatcctcaaagtatcttaattaataaataaacccctatttttcctttcttctcaaatatgtcattccttagtaaaattcataattaagacatagttattatttagaatcttaattgattaaataaatcaataaattgagactacaaaataatattatcctagttagtgcatggaccatgggcctatgtaaccaag

SEQ ID NO: 50354 - DNA, 744 bp, Cannabis sativa
ctcatatggacacttagaaaaattctaaagatgctcttatagatatttcaagccttatatgcccagtctagtgtctaaagatgagcatattctcacaaggttctaatcacaataaataatttcaactacatctctcacaagtgaataatatgacatctatttatagagtttcacttctatatgaacatgaatgactaccataaaatctttggatgttaccaatcataaattgggcatttatggtattaattgagtaatttggaagaatttggactattagaaagactcccagctttcaaaaacgtattcacttgtatgctaaaaaaaagtaactaagttactattttttttagttttggccaattcttctccaaagtgttccaaactactctcacttgatttggaatcatttatacaccttataagtgaataaatcaagtctccaacaactatatttttaatagctatcatacattcacattcataaacaattagtaacatattttactaatttaaaagtaagaaaaaggtaagagtaacatattcaattcatcatcaaattaaaagattcgcaactcttattttgtgatcattctatacacattttgtaattccataatatatattacaatttgacaaaattaataatctttcaaacttaattatttaatctaacattatattaagtcctactataaaattttatgattagtaaaggagcaaaggtgatatgaaaccaaaggg

SEQ ID NO: 50355 - DNA, 1114 bp, Cannabis sativa
gcctacatccccgaccagaaaacaacctcacaacagtgccttttatagagttttttattcgctggtgttcaatagattacaacagattcagttacaccactcaagaagcttattttctgcaacagaacaactcacttggtgatgatgattgacaatgcatcacaccattacaaatactcaagagcactcttctcttattctttctttccttaaacaactttcttaaattctctcacttaatctattttcccttgatgagttcattcctagccaaatgattgagccttatatagactggtttgtggctcgagcaccatctgtcataacagttagttaattcggttatgtaggttgcatcaggggtaaattagggagtgagtgatatttggccaataggcaacaattatctaccttggccacatatcaagaattgtaacccttattaggagttgtacttgaattggacttaatattatcagagagtaactatgttgagcaagtttagacatagtctaaacttagcttgagtgacatactttgtcaacatatttgctggattttccttggtgccaattttcactactacaaaatgggtctttagcttcccttttttcaactcattttataaaaagggaaggtaaagggtgtaaaaatacccgcttattgaaaattgacctttagaggcgattcttttttttttataaaaactgtaggtatagaattgcattataccatttagagttgattgggaattcaacgacattgagttatatgaaataaccctatataagaatcgacgccatagggttatataaaataaccctatcgcgtcttcatcatcttcttcctcacaaacctagagcccagcgaacccaaaacccttcgccaaccaccacctccgccacccctttctcccccatttctcaaccatttgagcccattttttttaaatcttccattttcgatacttaatcccatacacctaaaaagttttttaattttttgccatctttaagtgtcatccgaacccaatagaaaatagtgggtataactccggccaccattatttgttgagaaaacattgaatcttaacatcctttaaggtataaatata

SEQ ID NO: 50356 - DNA, 2541 bp, Cannabis sativa
ttctatattattttataacaaatactatatattgtgaggatcggtcctatttctatgaacttttacttttttttcttttttttttcttttgaaagaattaattgttcatagtactaagatacaaagatgggagccagaggagggggtccctccctctggataataccaacaaccttgctagaaattcttgcattttttgccagaccatctgcaatgacattgttctcacgactaataaacaaaaaataacataattcaagctcctttaaagcattatagactaaaattgaaacattaaaacaactccaattacttagcctctttgaaaaagtttggaccaccacctgtgcatcagagcacacaacaattctctagagcttgttttttgcagcccactcaaaagccaacaaaactgtctgagcctcagcttcaattgcagaccgagctgggcatctactggaattagagaacaacctactagtggcaatagaccaccacacagttgctaaacccgtgacaccatctttccaggattcatccacatagaagagatcaaatgtatcattagaaagtatctcattctgttgataaaagcaatcccttaggggctttggagatctctcgacaatcaagctgctgaactcagtagctctagcttgaactgctttcacaaggtcgccacaatctacctctctcccctcatagagtcttttattccttagaacccagatttccatacaaagatagccagtaaacactagaagatgctcccgttcctttccctaggtagactgacataggttttcaaaaaaaaatcaataaaatgattacccagaataaagctactctatataggatagacccccgccatcaaaactactttggccaggggacagtccctaaacaaatttaaaactgtttcattggattgaaaacaaagaggacagtcttcttcatcaaaaaatgggagtctgtcacgagttggcaagatattatgacaggccctccaaatcatcatattgattctaggatgcagaaacagcttccaaatccacttccagatatctcttgtagcacagaaccgacccctttggtcttacaaatacgccgccttaactgaatgtgaatttgagttaccatttttccagataacaatgtctttctcatcagaagggagtctagcaatccccacgattttgtttcccatctcctcactaaaaagctctcgtactgtattctggttccgagaattcccgcaagaaatttctgccaccgacttcagataagggttgttaatacggcatgctttcgttacctctcgaaattccacaaaattaagccaagggatccaaggtggtttccaaaggttaatatcctctccattaccaatgatggtacaactattttgctgtatagttcttctcacttccaaaatattcttccagataaaggaattcgaattttttggagccactgtccaaaagttttcctttgaacaatattttgaaatgaaacaattaacccaaggtttacctctttcactgccactgtccaagccaacttggaaaggagggccttatccatgtcctcaaaccttctaaagcctaagccaccatttatctttggttggcaaatttgatcccatgacttaagagtaagaaatctatctttttcaatattaccgcaccaccaatacttcctgatcagtccatctaattctttgcatgtagccaacagtaattttctagagaacatattatacactggtacatttttggcaaccgattgaatcatagtagtatgacctgtatatgagagaagcttcattttgcacccttcaatgcacttcttcattttatccttcaggaataagtaatcttctctttttcttctcttgaaaagaaagggattacccagatgccattccttccccgttgcttgttggacgttcaaaattcttagaatacccttcttcctttcactacgcaggtttgctgagaatagaactttcttttttttccatgctacagagttttcctgaccatattctttcgtacttcctcatgcattcaacaagaacctcggcctccttctcgttagctctagagaataggaatgtaacatccgcaaacatcaaatgcgatatgggaagggcattccgactgaattctataccatgaaagcaccccttctcttcttctctactcagtagttttggcagaacctcctggcacatctagaagagaaagggggatagggggtctccctgtctaagacccctttccggggaaaatttcctaacatggctgccattaagtatcaccgagtaagtgactgtattgatgcaattcataatcattttatttactctcgaattaaacccattttccacgagaactctgtgcatgaacttccactcaatcctaggctttgtgcatatccaatttaattgccatcaaaccgccctttccatgcttctttgaaatggtctctaccaactccttcgttagcactaacgactccgctatccatcttcccgga

SEQ ID NO: 50357 - DNA, 1019 bp, Cannabis sativa
atgtatattaatgtaaaaattcctatttcatactcatacgtagggatgcatatggggtacagggcggtgcacaaaatgcatttttcgtcctcgtccttggttctcattatttattttctctcgtccccatcccgttcatgtataaactctagcaggaaacgggaggggaaatccccgtcggtaatgaacactataacgggaacccgcttattaaaaaagtttgatattacaaataagtttatatatttaattgtaaagtaaaaaatatttaggattaatatttaatactcttcaaaaggactatttatattcatatgaaatagctaataattagcaatagcataatcgtggtacttattcatatttcataacagctagagtatttaatatatatatatatatatatatatatatataggaaatagtataatttgaattaatacattaatgttttcaaactataaatttactctattaattaatatatcaaaaaattagtttaattataattaatattatatatatagaaacggagttaatataattcttaatagtacgagattattatagtagggattgagtattttaccaatcaataggaataataatttatagtcattgatttaatctaatggctcaaattaactcttgaaaactacaccataattaatattttttttatttataattaatcttgaatattattaattgtaggttcaactaagaaactccaaacttattttttttatctttctattttatttatatttaaaatttagttgtaattacatatttttttttttttatttcaaatttacataaaaaatattttaattaaatttatttttaaaacaataattatacttataaaaaattataacatattcaacttataacaattttataataaacacttttaaaataattaaaatgtcatgagttcaatatactttagaagtaatattttcttttcttttctttacttatatttaatttaagatttcaattaatttaatagt

SEQ ID NO: 50358 - DNA, 1161 bp, Cannabis sativa
aaaaagtttagggggcacgatttaatacatgttaaaattcgagagaaaaaaattactaattagcctataatttatagaatatttatccaagaaataaaagaattattggtggacctagcctttatgcttttgatgtacactttataaaggaaaaacaagtacaataattctgaaaaagtgtgatggaatgaatgaagtttataacattataataagtgctattatacatttcaaaaaaaaaaaaaaaactgttatatctgttcatgttactaaaagtctcaatataatttgttttacatgttattgaatagattattataatcctttgtgatgatgtacgttatatatatttatatatatatcaacggtgataacggctccctcacaattttttttagaccggtcactcacttaatataactcacttatttaataaatttagactttcaagaactaacttatatgtatatggagcaatatattcacacagtgtgtaataatttatatccagagtaaatattatatactcacgtgctaatattatattttatagttaagttagacatcgtcttattatatactatcactacaataaaatttatcaataaccgcaatattattagcgatgggcaaaattcacccctaatagtggtagcattagcggcggaaccaaaattcgccgctaattctacttattattattttttttaaactagaaacagtttttaaaaactaataggggccgtttggcaaaattttttaaaaacagttttttaaaattcaaaaaactagaaaacagaaaatatcaaaatgttatttttaattttcaaaaacatttttttttgtctaacatattatattttatatatttttacttgcatactcagatcctagacccaaaaccatacccgaacccaaacccggatgggttcattcatgtcatggtatggtgttaacatattaattttttaagtaagaaaaatctaaaaatagttttaaaaaatttgtgccaaactccattaaatatttaaaatgacaaaaaactgttttttattctcatttttaaaaatacaaccaaacaagctcttattctccaaacaattcttgataatttactctaaagaatattcaaatcgttttattgaaaaagaaaaatagaca

SEQ ID NO: 50359 - DNA, 1983 bp, Cannabis sativa
  modified_base (131)..(131): a, c, t, g, unknown or other
aaatggaagtatgcatgaagcatccgaaaaaatgtgtatatttctgaattcaagactttgtgtatggtgttttctaataaaagtaatttgtgatataaatacttaaatttaatttttagttgtaaataaanatttaagtttaatttttggcggtaacaatacttaagttataattctagaacttctgtaagtatctggctattaagtgttaagtaatttgacacgtgacaatctctaattagccaaattcattaaaattgtatttgaaaaaaaaatagtttaaatataccaataaaaaaataacacgcagataatgacttgacatttaacggctaggtatccacggaattccagaaatataacttaagtattattatcgctaaaaattaaacttaaatatttatttgtaactgggagttaaatttaagtatttgtaccacaaattactctaatattattattatgttattaaaaaaaatattaaaaggtattaatagtatctaacactacgtatgtatcgtatcacttatatattttcatttaataataattataaaaaatatatatatatattaactaagactacaccttatgggtggtgttaatactagaggtcctaatagcaatattcccccattaattacataatattttgggatcaacaaaccaaataagtcaaatgacttttctcttgagttttgtaattcatataaaagaaagagacaaggctttaattaggaaaagaattattgagtacaaagcactctactattcatttcattgtacactctttacaaacactcatctccaacccttttacttctatcatactcttaaaccagtcacataatacattgaaattatcaaatctagtgtaagttattttttgcttattttaactctaattgttatttaaacaattcttccaaaataaggaacaaaagaagagagagacaaaaaactacatatacagtaagagagtcctttcattttcattattgtgaacttaattttagctattatataaatttggtttaaggataatttggttaaattagtgtaaaatagagtaaatactaatgttcataaaataactaatataattcaactcgatcaaatctaatctacacacatttataaaaaaaattatatataattactattttaatataaaaagaattaataatttaaaaatctaatacatataatacaaatatatttgaaaacttattaaatcaaatgtatattctatttttatatatataaatcttttcctttgaatttattatttgttattttatttattttaatttattattgaagttataaaataacaatagttacttttattttattgttagttatataaaaaatattttttaaaaaatattaaataattttttttgaactgttaaattgaatttaaactattatgcaaattgaattgagtctaaaatataaaatctacacttagtagagatcgaatgaactatataaaaaaaaataatacggattagattaaatgaacaccaagtatccctagccttttaatttgaaattttatttaagtttaatatcctaaactcaaatttaagtcttcggtaagacaatgatggtgataaactaatcttaaactaaaaagaaagagtaatatttttaactatgaaaactacaaatgtattaaaaagaaacttaaaccaagaaagttgggacactaaattttattactaaatagtttttgtttttctaaaacaagaaagaaaaataaaactttatgtaattcatctccgtctccatcttcatctccatttatttacagagccgattggaaaatcatctccgccaattcctgcgccaccataacagattggttagttaaacactttaaaatcatgaacaaacttgttccactcgggaacaaataccgttatgtactttagaccaaaagtagacccgaaaagtacattaaaatttttgctgaac

SEQ ID NO: 50360 - DNA, 1192 bp, Cannabis sativa
aaattttatttagagcacatagcccaacaatagggtcctcactaccttctcctcttttggggcatgcactggctggtcagtcaatgattgtagatcctccattgaggaggactccacctccacgctagtctttgggcaagggggccccagaagtctggccgtggagcatgctcaaccagactatttcaggaaagcatggcactaatttctcattatggtcttgtgttatatcaaatggattaaattgttgttatgacaaaagttatgtggttcaaccagaaaactttgtgtctaaagatccaaagaatatgatttgcgtattaggaaaatccatgaatatactcaggtaagcttctcgctaatgataacacaattttcattaagtactctcatttggttttgagatagaaacttttaatgattgtgtacacatcatgaaatcagtaggagtaagaatataatcctagtattataaattggtgaaaaattacttgccattaatgttatacccattttgtattaaggattcaaattatgttgagattgctcttgagatatttttgaattataataaaagagatatatcaataaagtattcaagactgttggcatgaaagatactataccacgtgatagacttgtagctaaagaaaataagttgtctaagttattgccctaaaagcaaccttacaattcaagaaatataggagattttttatttatataatctattatatgctcaagcatgtatacaaatttttatttaacatacatatcaagaatgttggataaatatttaagtaatcttataaataacttttggtatgcagtcaaatgagttataaggaatttatggagaacaaaagactacatgttcactaatcaaaactttcaaaattttggagatcattaagatttttgattccgatcttatgattttagtagtgagatttttgtcacatatggctgcaaaattagaaatggtattgaaaactattaacaatatatgttgtgacaataaatcgatcaagttgcattttagtaacaacataagctctacaaggtcaaagacacattgactttgaactaattgttattaaaagatttttttgcggtaaaatcctcccaattattgtttcacttgcatttaaccctctaaactcaaattttggcggtaaaaccctccaaacta

SEQ ID NO: 50361 - DNA, 1931 bp, Cannabis sativa
agtgaacttgttgccaatgaagtgtagatccacaccgcctgtttcttccaaaaaactattcaaccactttgtgtcatgtgaagaaacatttaattaagagttttttacagtaaaattctcttaactatcatttcatttgtacttaatcatttaagcttaaattttaattgtaaaatcttccaaactgtatacacttttgtaaatgtatcaaatttatatcaattcttctaatattattattttaaaatcataaaattatttcaagatttataatgttttttattttttaaaatattttagttaattttaaaataaacttgaaaataatttttaaataataatattatttgtaccaatataaacgtgataggtgtattagattgaacacataaatagttcatagtaacagttaaccgaataacaccttaaatttgttactagttcaataatttagagaattttactgccaaaaatttgagcttgaagggttaaatgtaactgaaacgataattgggaatatttagtcgcacaaaaaattctttaattaaataaaaatagtcttttttatttttacacttctaaacatttttattttacatttttacacggaattctatatagaaacccatattgcaattaacgctgcaacctaaattacaacaaaaaatcgtataaaaattacctctattgcaactagtgctacaatttctttgaaaattcaaaccgtaaattaacaaaaaaaaaaaaaagttacaaaacaatatatgagataattctccataaaaatatcacaagttatattattattatttgttgaagtatcaccaattcaaaatttctgtcctataataaattaattgtttactactccaaatacaaatttgcagtgtatacaaaattattataaataagaatagatcaaattatttgttaggttcggctttgaagagggaaaagaaatacattgattgagtacaacatctttatcaataacatacatttgcatcattgaaattatctggatataattgaaatgaaattatgctatttttcaaagagggagtgatgctttttgtgaaagattacatgtaaattatacatgggttatgatgattgtataagaatattttgcaggtccacctatattttaataatttgataataactggtagcattgtattcttatacagcatatatcagataaaaatgggttagagtttgttgagctaattacataatattaattgtgaacttcaagttagatagaggtactcaactttttgttctcttatctttaacatctctatatatcaaatgaccaagtgttgatgcaaacgaattggaatagtgagcaatgctcatgataaaattaatatctatggaaataagggggaaatctcttaaaatagaagaacaccatcaactttgctatttataatatgttcaataatttgtctttacattcttctactaggcttatatatagccattatgataaagctataatataataaaaatatataataagcttctagactatatatcattcaaaaaaaaaaaaaaaaccttctacataactattctatataagattatagattagtggatatgtctcctacatggctataataatgaagctcactgctagtataatgtaacacaaaatatcaaatagtttgaaaatatttagaaaattagtcgcaaagaatatctcctctatgtgtatctaaactctctctctctctttaagggttaatagaagaaaaattaagatttctcgttcctaagtttatagttattggaggttgtcttttgtctctagcaaggtctgcagacttttcttgggtttaggtgtggcttggtcggaattgtattttgctactgcaattcaatttttgctaatgtactggttttgagtgttttagtcttct

SEQ ID NO: 50362 - DNA, 1423 bp, Cannabis sativa
tatgcatacactacacttttagcactctattagaaatgcttttagatattctctaatggaagatgtaaatatattgtgctaaatttgacacaaaaaatgtacaaatatatttaacacaacatttgtaattgtgttccaatgcacaataacattttaagatttaaattggtctaaaaaaacaaaatatcattaatggcaatcaataattaaatatttaaaaaattactagtaatattgtaaataaaatatatttattaaagtatgtcattaatgatttgtggcaaaagtgtagtaaaaaagtaatatttattgtgtgttaaattcggcacaatactatatattgtgtcaaatttgacttaatttttagcatgtaccaaatttaacatatgttatagcatattattggagaaactttttattgaaaattactaaaaaaaaaaaataacaatacactacctatttaacactctattagaaatgctcttaagcaccttaaggtgtccaatatcatactaacgagtcacattataattggctaacagttaaattaaattatatgaaattcgatattaaaatacaccgataataataccaccctgttgtgatacttgacataagatgtgctttagtattttcctattataaatggttttgtagggcttatcttgagctaacaatgtcagtatgcataacttgccaatagtttgcaaaagttgatgtctgataatatttgtacatttctaaaattaatgattaaaataaacttgaattacacatatttcttacacataatcacatgtaactatttgagtcacacaattaaaagtgatgtgatcataagccttagaaatttaaatgtatatctaatattactcaatttcaaattagtagagtaacgtaactcatgtttcagctcttcatatttagaaattaactttatattttatatatctagattatttattgatttttacaatgtatcatacattagtttttctgaaaaaaaaaaaaaaatcttcattcatttcaagtatagaaacaattataaacttgaattactattaagttaatgtagaaggaacaatgtagcaaaatgtaaaatgtccataccaaagttagtgagaatgctctaatcgttacttttattaaacaattaatacagcttctttctcaaatttgtgtgggggatatttttggaattttctcatatgtaagcataaaaagtgtcattgaatcaagggctatgagagattggtcatcattttgaatggttgtgatggatagatagatggacagtgtttgagtgaatggggttgtagtagtgggagaaactatttgtaacatggattagaatattggtagtccttccattaaggaaatggtggggtcttcaatgcccaaaaattcaacacaagaaaacaga

SEQ ID NO: 50363 - DNA, 2076 bp, Cannabis sativa
agagttctccatacaccatggctaatagagatgaattttcaagctcattaactgctccttttttagtctctctcacatgtagaaaatctacttcaaataaattagattttctttatgaactttttttatgttccttatgaaaataaaattacttcagattctctttttttcttaaattcataccaaaattttcactaaaaatccttcctcttttgctacatccattaaaatacttattaaactatccttcaaggtttcaaaaagaatatattcaatcatccaaattcagtcaatgccaacttgtatcaacatgagaagtccaatttgttacccttaaaatctcacttgaactctatccacaatggatggcatatagttacacccacatctactttagtgttattcgcattgctcttaattatcacgacaaaaaaacgacttccaatcagtgcttgcattagtcttcttgacattagaataaggaaatatcaacatagtataactactattgaaactacttcaagtacaagaacaatcgtcactctatttctatttcctaatgtcaatgtctcttagagataatcagctgactaatgctcttaaagtagaagtacaaacattgaccaatatcgaacttctcttagtgccacactccattatcagatggcatatcgaatccaagatcatgctattaaactcaacatccctcaaacacgagacgctttaatcatctcagttgattccaaataagttttgaatagtacacatgtcccaaaacaaatgaccactaaagaattcacaaagcttcaagccaaatagtgggtcaccaactatgaaaagcttaacaaaccacagtttatggttcaaactagggatgtacataaatttttgtaaatcactccgaataatctacttaaactaaactgagataacccgacgaaaaaagtaaactgaaaaactcgacgaaatataaaccgcccaatctttatattgggcggattgaaaataataccaacatgtctaattaacccgaactaacccgaccaacgcgattaagagattttttttatatatatatttttattatatataatataattcatatacatatttataaaaaataaaaactacaaactactatattttattcatggtggttgatttgaactttgaattcaatttatatatatttgtctcattattacaactaaaatataacaattgaatgtaaaaaaaaaaaaaaaagatatattagtgctcgatttggacgggttaatccgaccaaaacaaccaattcattgggcaggttaaaattttattttttattatttgggtgggttgcatttagatttttataactcgatctttacgttgggttgaataaaatacaacgtaaaccgaccaaactgaccgacaaacacccctaattcaaactacaactggaccttcttaccacacaaaataaggtggttctattgaaattatttttgacagaagccaaacaaaaccacctagttgttttcgcacccaatatgttatggcactcattcagataacacatgaagagatcatatactttgattcccaagaaaagccaattcatgcttttaaatcctcaaacgggcataaatattaggatgtttgtaactgcaataattgtctataagttgatgaaccttcatgatgtcccactccaggaaaacgactcaagaaaaggctagaaaagggcaacaaaaatattggtcaattaggtcaaccatctgaaaaatttgactataaagtcaagtgctctgtaccaaagggctacaaaacaacctacaccagaacccactggatgggatttagatgattcttcaataacatctcagccataactacttttgccttgttacacaaaacaaacaaactagatgaagaagcatggagaagaatttccaacaccaactgtacagccatcggttcgatcacttctttatacaaatatgataacccccagcacatccattgattatgatgtacatttccctcctttcaagaggttcaaaaaaactgaagagcaaggtaccacctcacatc

SEQ ID NO: 50364 - DNA, 801 bp, Cannabis sativa
catatatgattgagcacccacatacaaacaagaaggtagcgccagttaaaaatgactcaccatcgtgtggaaacatattcagtataagggggcatagatgacacttctctagccagcccaaaatcagcaattttaataagatcatttgtcaccagcaagttctcttttcacaaacaaaagaaagaatagttagtatcttcttaaagtgtgtcacacacacaaaagcaaaagaaaaagggtggtatctaatggatgaatggattcattgacaattacacggtaggctttaccaggtttcagatctctatgaaaatatcgatttctatgtatgtgatcaagtccgtgaagcacttgagcaataaagctacggatctcatcttcagaaaaaggcctttgccgatctctcatcatttggtagagattcaaattctggaaaatcaagcagtaaatgtaataaataattaaattcaattaattgttatccatagctcatattcaaagagttatcaatttatatgaaagagattacttatatattgttgtgtgaaaagtggaggatgtgtctggtacaagaaagtaataattgttctattaatactaaaccataatttaaagaaataataaatttcaaattttttataatttgtcgaactaaactagaacaggactcttatttgcatatttcccttcaagacgggaaaaaagttgtttgtcctttattatatggaaacataagaggaaaaatcaccattaaaagtgaaaaaaagccacgaaacagatgtgtaaacatataaatagtag

SEQ ID NO: 50365 - DNA, 800 bp, Cannabis sativa
ttttaagcctaaatcaagaacaaattgaaagattcccttgctggtcattggatgcaaagataagaacacaaaatggtttatgaaagccctaatccctaatccctaattcctaatacatcaatgactttcatttcacttaattgtcaaaacaacattatgcttctctaagctgatcatatcagacttaacaacagagtaattcacaaatttattattatgaaataaacaagacccaatccaaaactcaaatcaatccgaaaaacaaaacctcaccagtattcatcaaaatcccaaatcaatcaaacaaaccctaaagttgttttctttgataaataaaaatcgcctccaaataatgattcctcaatccaaagcacaatcaacttcaaacacttcaattggaaagcataaataaaagattttatatatattttaattgagaaaagtgtaattgataataatatagaataaaagataaagattagggttagagaagaagaaaaagaacctgaaggaggttgttgagaattagagtccataggaggaaagcactagagtgaaatcgaatcaaagtgtcccctctcgtctcgattttgaaccagaaaaaatagacgaagaagatgaagaaagatattatcaaaacgacgtagtttgaaatttattattatttttttaataaatcatgtaatattatcaatagcaataagttaaaataatagtatccattaccatatcaatatgtagcgatcaaattatgaagaactcgatattaatttgtatcaataataatatgacacttggta

SEQ ID NO: 50366 - DNA, 1552 bp, Cannabis sativa
aacttttctttacaaacactctgtcatgtcattagtgttctgtttctaatacttataaaaaaccctctattatagtggaagaatataggaattcctattacacatgttgagcctgattctcacgtagtggcttacaaagtcaattctcagtttatggattcatcatctttttcagatttgatccaatgtattagatgctcttatcttttttctcatgtttttcttgtgtttgttaacggggaagccaatgacttggctcgttatattgcaaagagtgcattgggcttagataaagagttggtttggaatagcaatatttcaaccattttattgtaactttatactgaattgttaaatctataaaaaaataaaaaaaaaaacattaccagagaggactacttggtcttggctccttgcacaccctttagactagaatataggtcatactctaaagaaaaatacacctttccatgctttcaaaaattcctagcatactagatttgccaaaaagattactcaagaaaactgtaagatagtcagatcttggaatgaatttggacatgtaagtttatagtatcagtagtgctgggaagtccattgagataacaagtttttctacaatcataaattcataatgtgaatgcagagttttcaaccctctcatctcaacaacagtgaattctcaagtttgtttaatttattatagatttttgcttaattaaagagaatcagtgacattctgacacatctattccaatctagcactgtcagtgagaatctagtcaagtaaatgaatttgtttttaaatagagatatctaccaaatctaaagtatcaaagtccaacttgaaaaacaaaaagactatagctgtagcctgtagattgagagacaaaactcgcaacattaattcagaaaatttgttgagtggttaagccatactgatataataatgaaattaatgccaaccctaaattcctattattatatttatgagaaaagaaaaagttttgcaatagtgtgagaacatagtattgaaaatattggaaaaggtagccttcttttacgagatatgtgcatcttttccgtgttgctcggcacatgctttaatgaaaattcatcatcattaattatcatcgtattcgtcttcttctcataatgtctcaacaaacaatacatacaaacaaatcaagtcgtttttatatgtcaaagtttcatacgacaatatggcattttagtaatttcactcacatatattccaaacctgtaaattggtctcacacgacagtacctacttagattttggtcatattattatcctccacaacatcacggattttgcttgcaggtgaataatctctatattttgtagtagacaacaaaaatataatgatggatccaaaaccagaacccgtcttcttgtccttccttgtactttgcttcatctctgtgttgattctcgtcaatgttgaagccgactacgttcgacccccgcctcgtaaagatcttcactttccatggagcctaaagccatcttctcatcctcagcaggtga

SEQ ID NO: 50367 - DNA, 2640 bp, Cannabis sativa
aaagtgcttataatgttgtatgtaaacagggagagaatgatggaatttgggcgtggacacgattcaatcaacttttcaactatcttccacttgctgcactcatcgaaaagaaaattatatgtatgcatggtggcatagggaggtctatacattccgtagaacaaatagagaagctcgagagacctataacaatggatgcaggatctattattctaatggaccttttatggtatgctctttttcatatcaacttttcatttgctgccgatcagtgttttagctattttttcttatggtattcatataaacaggtctgatccaacagagaatgatagcgtggaaggattaagaccaaatgctagagggcctggtcttgttacgtttggggtatgcaatatttttatcaattgaaagtagaattcttgtattcacgattatactgtctttagaaaaaaaaatccatattattgtttgtgtgcaacttttttttttttttctttttatgtagatatagaacaaatatgaattcggtaaaaagggtactagaaacgtctctggatttaaacatagtgatcagcagtataaaaacttacgtcttctggtcaatatttacattaacagagtgcaaggaacagagtctttgtctaaagaaatagtgaatttcaattcccaaatggaatatattcttgtattcacaatcttactgtaacaaaaataaatccatattattgtttgtgtgcaacattttctttttgtggatatagaacaaatatgacttcagtttaaaggataccataaaccactggctttagtaacatagtgatcagcagtatgaaaacatagatcttctgagaaaaatttagcatcccagaagtggaagggaaggaacagagtctttgtttaaagaagacgatgtatagaaatagtgaatttcaattcccaaatggaatatatttagagattaaatgccatgattccttattacgacaggatacaatatctaaatttgatatatttagattttctgcagatctgtagctgatgctaagtatcagtgtaacatcccgacattgtattcatttttcatgatattatgcatagattaaatatatcattctatatctaccatggaattttatgcccattggaattttccttgatcctatttcttcataagtcttcacttcatctttatgttctagtattattatatcggttacaaagtgtttgcctcctacaaactgaaagttctactgttatgtatgctacttgcagccagatcgtgtcacagagttctgtaagaaaaacaaactacagctaattataagggcccatgaatgtgtcatggatggatttgaacggtttgctcagggacagttgatcactcttttctcagcaacaaactactgtggtaagcacacttttctagagtactctagggttgcttgacccgaaatgacctggctcaatagagaaatctcaattaaaaagaaattattatcattactatggcattcacatttagggacggcaaacaatgttgttgggcaaaaaaagtaatttcaattatgtatgacatttgcatttagggacggcgaacaatgctggagctattcttgtagttggcaggggattggttgtggttccaaagttaattcatccattaccacctccgttgcaatcacctgagacatctccagaacgtgttatggaagacacatggatgcaggtgagactttttctcttgtatataaatatataaaattatatatagtattgatgatgatgtcctacattctgcttggcatggaaggagggattaatatttgatactctttacaatctgtgaagtgttgttaaattttttgatactttaatgaataaaagttgaacttactaggcttttatatttgttgctggaaagcaaataataataataatattggaattgtagttcatctgaaatagatcctaaatattggaaagtaaattgtgattggaatcagaagaaatgaatgggtttaaaatataaaataatcggaaacaatattttattattttgtttattaaactaatttgagagaaaatcaaaatcattttattttgtttacataaccaagaaaggtaatcaggatgttttgtttgactaaattgctattgttagaaaatgttattattttttttcataactttttgaaaggcatatttgtctttttactttgagataataaaaaaataaaataagttaggaaagagaatgacattcctaaaaaaatgagggagaattttcttttcttttctccctaaataaatgaatgagaatcaataccatacaattggttctcattcccttcaagtaaacatgccataaatgtaattcccatatccaacagtttgcgtaccacatatgccttttcccggaatttgtttagaacaagaaactgggcaaatttattttgctttacttggtgtttggttggtagtttcagctaggtcatctgtttgtggtatgctgttgtactatactgaaagttatatcaaacttcctaatgctacttaatgatctaggaactaaaggatacctgacaggtgttcatttttaaacatgcatttgtaattcatacatatgtttttgttgtt

SEQ ID NO: 50368 - DNA, 1314 bp, Cannabis sativa
tacaagtagaattagtcgtactttctctttaacacgtttgttgaattagctagattaatgtgtggggatatatataggaaaattattctaatatcaccctaaatagttttatcttttttatctttaattttttattttcttttttattttttattaagtttataaatatttatttattttttatattttttatcattttattattaataattatattaattaaatttttataaaaaaatttacatatatttattttcttatattttttatcattttatattagttaataatttttttgaaaacatattaattaataatttttaaaagttaaacatgattttctctaaattagccgcgttattatatgtcctatttcataacatacttaagtttttattttatccaatatttatttatttgtgattttcaaaatcaaacccatctccagtgaatagggaaatccttaagcttaaacaaatttgaaaaaagaaaaaatcaaatgacaaaatcatataaatgtcctagttaggagtagtgttatacatatgaattgagctttttaacaatcacgtaagggtcatacatgaaaaagatgttggcttgatcggggtattcatgggatcacaattaatatttttaggtctattcagatctgattaaatattaaattttatcgttccatctgatctaattcatttcagtcattcaatcaatttaacatttattggatcgattctattcattgaatgtattttatgtatatttattgcaataattcaggtttatcaaatattttaaacctagtatttttttttacatcggatcagatccatccaatattttagatccaatatttattggatttgattgaaatgaattggatacatttaatctaaaaagaaaagtaaaattttaatgtatacatatattttttcacatataataacataaaatcaagttactcatctaaactaaatgaaaatattaaatagttcgattgaatattggatgtattgaattttcggacatcccatctaatatccgatcttatttaattggatattaaaaaataatatctaattcgatctgatcacaattagacatccaatgtttgacggtcggttgttattgtattggattgattaatgcacactcataggattgggcatgatggtacaacacgaaaaatatgtgcttaagtacgacacgacacgacacgtaagaacaaataaactagttcaaaatacacgacacgataagccttaaaagtacaacacaacacattaaaagagcctataataataaattgattgt

SEQ ID NO: 50369 - DNA, 1297 bp, Cannabis sativa
  modified_base (1236)..(1236): a, c, t, g, unknown or other
aataagttacatttacttactgagtgagaaacataaatagttcattcagagattaatagctaagatagactggaatagctcgccattcacagctaagttccgtcggtttagaggaaaggcctacaagtggaatggatgacctgtgagcattggccaaatgtgccgataataccccgggaaactggtggagttcccctgtttacaagcagttgagcaatgttcagaagggtcagttggattgggtgaaaagtgagcacatgatatacgattactgcaaagatactaaaaggttcaatggtgagatgccacaagaatgttcaaagcagcaattttaagtaaggtgtgacacatgataattatgaagatataacagaaaagtgtatttataactgagagatataacaaggaataaaacattggcatggccagtaatgctacttttacaattacttattttggattaagcttttgatgaaagagcatgttttcagaatataaatatatttatacacagttactccataagcaattaaattgatgttgtttcaagtttcaacaactaagtttcttagcctcaagattgttgttctacttctaattaatgatatggtatgttttaaaattagaattagatgggaataaaacaaagaaacatagaagaaagaatgagttttggttaaatataatggagattaaattgattacaaaaatcccaaattatcatatactaggaatagggccggcctaagcattttggggtgcaaaattttaaaattggactctttaaaaaaaaaaaaaaatggtatacattaaaactacattctattactagcatttttttttaagattcgttcataaattttcaattataagttttttatttatgtatatataataataaaaaaaaaatggcccttaaaaaaatggggtcttgtgcaatggcccaagctgcccaatgcttgggccggccctgtctaggaattatttagactatttgatgaattttttcaatattttatcttcaatgtcataacaaagccaccttataaaaattattcaatccaactcaatattccaaacacgacctaattgttaaaattgtaggtgaagttgagatttaactcatattctgttgtacttgatccgagacaagctgctatagaaaattgatttcaaaagtcaaaaataaatatttatgtaaatattttagctgttttttttaaaaaaaaatatatntatatatatatattttatgtaaataaaggtaatttccctaattgcaaaagaattgcaaaag

SEQ ID NO: 50370 - DNA, 1101 bp, Cannabis sativa
aaaactaatggataacttaaatagtaaaaagactacattacccctttcttcattcttaagtactaacttctcacactagggataaaatagtcataaccagatactccaaaataacatgataaaactaataccaactagaacttctcggcactacaaacacccaaactaataccgccatgacttttctagccattaaattgagtttctactgttgtcagacataaaaaatattttatttcacaaataacatatattttacctacatagtctaataaaatttttcgtaattaataaattacgtctaattttctcattttataaaataagtctattttctcatattaacttagtaagattataatcttattcaatttattctcttaatactcatgttaattcatatttcaaaaaatatactaattataatttattactggaatattatatttggggtgtaagccagaagccctaagagatcatcactgaataattaacaagtgacatatctaaccgagatatgcatatctaactgagacataaaaaatagttaaaatttgaataataaaaaaaaaaagaatctctaaaaatagactaaagataaaaaattgttaatttcaagatctttgaaagattggggaattttttatttttggccaaaatagtttttgtcctcacttgtaaaaatattttctatgtgtgtggatttgttgtaatgtgaaggtacactacacatggttaaggtgacagtattgtaacattgaatcattagaactattttaaacaatgagataatcagttttactttaacggtatgagcatttctttttgatatatagagaaattataaaacaattttgtttatatgatgagtaccttatagttatactaagtaggaaaattttaattaatttaaagtggtgaatataaaattcaaatatttaattacacaccatgataataaattattttaaactattttcaacacggaaaatatttaaaattatataaacatttaaaatttaaatacaactacattatataatatcatttaaaattttttaaaagaaaaatgaaatatggcatgagtttcacctgcccaaa

SEQ ID NO: 50371 - DNA, 1751 bp, Cannabis sativa
ttctgaatttctctaaattttgtaagatattttaaatagctataacatacatgaatatgaataaaaaatagattgaaatttttttctggatgcggaaacaagtagagggtgaatcagtacatccattttaagggggtgcattgtagaatcacccattaatatttgttgtaaacaatttttttttttcttaatataaccaacttaaagataatttctagcacgaatatatacagaaaatataactaagttttatttgataaaaaaaagtttaaagtacctgtcttgtactattttaaaaaatacatagtctaatttgtgatttaacaaaataaaaaattcaatttaaaatttttataaaatacatgatctaaaataatatttaccaaaatttttaattaataatcaattaatcataattattaaaaactgaaaatatttttataccaatatctttgaatattttaaagatatatttctaattttccgtaagaaaaagatatataataacttaattgattgggacatgagaacaaaaatctaacttttctcatttttattcactaataattattaaccatgagagagtaattaattagtacatcattaataggggcttgtaacacattttcttaattcttatagcaattatactcatgaattaacaaccctacaattcttcctaatctctccatcagatccagtaagaggactaatattacccatcttaatcatagctttgacaaaatcaactaagaaaagagtttgattattgttgtagctctccaccaaactcttggtggtgttagctgcagcatcgccggaaaacaggatctggtcagagctgagcagtccttttccggcgatcaagttcttgaagtaatgattatcgaataagtcggtcgaatttcgatctagggctgtggtcttgttgccatctccaccactagagggacatagggtttgtagatcacttaacattgttgtttctaaaaatgggtctggtgagcttgattggttgaagttgaatagtctatcttcaaatgttgcacaccttgccaatccaattgtatgagctcctgaattaattattaattatattgattagtaaatagttaattataattcagtgttttttttttaaagtatatacataaaaatagaacattaaaaaagcatccatgctctgcctaattatcaatgttaaacaatttttttaatagtaaatattttgacctaagctttaaacattagtaaaatatgatagttaaataattagtaattttacctgtttaagtattactagtatcactcaaattttttgacagtgataaaatttaaagagagaaatgtaatatagtaagtaaaatgatcactagttatttaacaaaagtctaataatgaaaatcaacatataatcctataaattacaaaagctcaaagttggagacacaatctaacaaacaaagcttaaaagatcataaaatacttatttaatctaaaatatattattatatgatttattccaacaatctcaatagttttaccagtaaatttttaacgattttaaaaattcaaaaaatacaatttatacatatatcaaaattcaagagtataaatcttaattaacattacttaattatcccaaataataataaaacatgttactttaacatttctaaaagacaaagcaaagtgaggacaggggcggacccacattgtagcgagggggggcagtcgccccccctgaaaaa

SEQ ID NO: 50372 - DNA, 1200 bp, Cannabis sativa
  modified_base (624)..(627): a, c, t, g, unknown or other
attaattaatatacactacaaaatataaagtaactgtttagtaacaattttatatagttacaacaaaacttattattgtaactataaagtaacatttagattcaccttgtaacaaaattcgttttagttatagtaatagaatttgctatgattaaaaattaatagattataatttttatgactaatatttttaaaaaatttatgttcattatgtaccataatttagaagaagaagaaaataacattttaccgcaaaaataattaattaactattacaaatatacaatacctaacttttcctaagagatatttacaaatatgtaaaaattgtttgcaaacttgtaatccataaattttgtaaacaaattatgtatgcttgtaaataaaatttgtaaacttgtaatataccttatttttaatattaggtatttataaaaattctccaatattttagggattatttcacaaatacacaaaaatattaaaaaaaattacaaaaatacggtttcacaaaattttaaatatttttccgattttttttattttatttacagaaaatatagttttttatgttgtactcttgttgattttttgttatttgcatgttattttttgttgttgttnnnntgttatttagatgttatttttcatattacctttatgtagttttcttgttgttttcgtgttttttatggaaaaccgtaaaaaatgtaaaaaaaaattctataaatgtaaaaatgtaatttttttacaaaagatagtgcctcaggtaattatcccaatattttaaccatgaactttttagtaatagcatcaattttttgtagggataaccaagtcttagagctaaatttcatcccattaaagaataaattacctttatcccacactctcatcaataattagattacacaaaacgaaatccaaatcaagaaagattttatcctagtgaaatcatataaaatcctaagcctagtactactcctattatacattacacatatgtattggatttatatattgagtaaatactatgtagacgtgtattttgtaaaatttactggctctattttgataaataacaaattaaattcgatattttttaaaatagtactgaatagcattttgaattatttttttatcaaaataaaacttaataataacttaatctagagttgttacgacaatacatacacacat

SEQ ID NO: 50373 - DNA, 604 bp, Cannabis sativa
cttgtggttgtggctttgtccttcccttgagtcaattctatctaaatggtgccttctgggttggatagtttgataatttttatgaacttttgggtggggtaatggatattttttcaaaaaaatttgttaaagaatttggcatcgtcgtaatacttttatgcataataaaaagcttctacttgatgatatggtaagcaattaggctcttagttacttatggcgttagtgaggtgtattgtggaatttatagtaggaaagtaaagttatattcacaaaaaatattatcaattactttaattactcatcttgaatgaatcaagatgttgtgaaaagctggaaaaaatatctacaatttctaaaaaaatggttgaaacaatgtctaaattgaatgagaagtttcagatttgtgatattgagcttccccacttcaaattctactacaataaacactttgaaatacttccaaataacttaaagtttaattggtttgagatttgaaaataaatttttattttaaaaacaaaaaatatgagagtccacataaaatacttgattagtagagtattttaaaaactaagtgtatgtttggcatcataactaaaaa

SEQ ID NO: 50374 - DNA, 946 bp, Cannabis sativa
  modified_base (33)..(44): a, c, t, g, unknown or other
cattattttgcatttaattaatcacttaattannnnnnnnnnnntgtgaatattaaaatacggaatttcattcccgaaagcattcatttatcatctagctagcttgcttgttgtaggaggttgcaaacttgggacagattagccaattttaatgtcattagcaatgttatttgctttttctgtggtgtacaagagagactcgtggacaattatttatttagtgttattatagcatggaaattgctgaacaaatttttgggtggattggaataggttcaacaagatctgatttggagaatactctgatttaatagaagtaaacaatccaagtgtagaagggagttatatactgttgtttgtaatgctttagcgtatcatttgtggggtgctagaaattatttttttaaaatcacaaagtttatactgtacagaatgtagttaatagaattaaaataaatgtaactttcagttttcttattttaaaagaaagaaaaccaatagagaggatagaagttggtttgaggctttaagttgttctggttgtaattgttctaaagtgtattgttctctattttgcaatgaagcttaccattaccaaaatatatatgtattatattttaattttttattattttatgtatgttgttgtcgtagtattgatatgatacttttctagttttttagaaaaatgatctcgtaaaactatacaaatataaatcattaaaaaaattaaaatttatctttggggccattttattcaaaatatatgtatagggattctctaatatggggcgggttgttttttccccatattataaagaaggtttttgaaccaattatcatgtagggattttaagttttattgtaatacaatgtattttattgtaggaaactattttattaattttattatattaatgaatttcttttgtttttcttttgaagt

SEQ ID NO: 50375 - DNA, 980 bp, Cannabis sativa
ttgttaagttaatcgtttattcacactttagcttatatattataatttatcaagattcactatataggattttgttcataatatctactagatctgggagtcagtttgttcattcaacttgtatttagcttgatgttgtttgcaagatttttaataatttcgtttttacaacaagtactattttcatttttgctaataataagatcttaatatttaattttttgttgtttcgaatcaactttaaccgaatattgttatcttaaatttagtggatataattatgtaccccaagtaattttaagtacattttataattacttgacataaataaaaagactgaaattctatcctaaataaatttaaaattttacatattctcaaaataaattagtgtatacataaatagagcattattattaggtactagtggtgcctaacactttctaaacgtgtcgtataattaattagcgatactccctaaaagttattaaattaaactatatgagactttatatttaattggactaataataatgtatattaacgtagaaaagggtgttaggcaccactgatactcttttaacatttctcatataattatatacaatcattggtaatatcgtctcacatatttgctgttccaatactaatttataaactctggtatattattacaacttcaataacatatgaatcttcccaatttatattaatggatatacataacatataatattaataatagcactttatatatataaggttaatttggcttatatgccgtcttataagtattattagaccaagtctaattcaaatcacgagtttagaggattgagtcatggaaaacatatacatagattacttttaaacggccggcatataatttcattatatatatatatatatatatatataaatattgtcacactcttaaataaagaaagaaccacttcttttatgaatgaaaaacattaata

SEQ ID NO: 50376 - DNA, 2273 bp, Cannabis sativa
tttaaaattgaaaaaactttaaaatatttaaactatgatactaaaaatatgctacaacagatatgttttaaactctttcttcattttaaagtttttttaaaaaatactattcttactctacatttataaaatattactagttgctctacatattttatttatagttttaaattttagtaattatttttgtattgggatatgtttgtatattgatattataaaatataataaaatgtattattcaaaagaaaaatataataaaatgtaaaaaacataatttttgtgatgtattttaaaaaaaactgttatatggtataatgtaaaaatatgttgtaaaatagaaaaagtagatgtttggtgatatattttaaaaaatagagtagaaaaattattcggagtgttctaaaataatatccaacaatatctatttattatatagagtattataagttgcagagtagtctggagatattttttttttggtgaataggactactatacagagattagtagtatattaatttgatcttctagtaattcaactctaatttgagaccttgttgaaacttctttatatgtaaatttatattgataagtaatgttgatttcaaatttgaccaactaacggtggagccatatttattattgatgcttgccacgtattacacaataagaactgaaaagtaaatgatacacaaaattttatagaggttcgacccacttagttagcgagtaatgacctactccccttttggttgtattaatgccagagataatatcacttagatcacaagtgttgtggaatctgaagtggctctcttaagattaattaaaatgtgagaatcaagttggcaaatctcaagtaagagagagagtatgcctatggcgtgtgagagagaagagagagagagagagagagttgagttttaaacctagaacttgagaactttagtgatcttagagacttaggtttttagagaactacggttagactaatacattttatatatgaagataataacctaatatccctaagaaataggagctatataatattatttacatagtaaaagaatagaagtaaataggttaattatccctcaagaataggggaatagatgatatttcttccttgtttttgtggttgttgaagcccgaatcgcagcttggcttgttgtcccagatgaagattgcgcaccaagtgcctaccaagagcaagctggggttatttggccggccatgtgcctgccagggtctagccatccatgcttcagccagggtttaaccggccatatgtttccgccagggtcggtaggtcatattactgccagggtttggtcggcaatgttcctaccagggtcaggcaggttaagtgactaacaactttggcaagtgttggccaatcttagtaggtgttggccacccttagcatgtgttggccagcctttgtacaactttccctgcgaaggacgggcttccttagtcaaacaggcctcttctaggtctgacagtcacctttggctggccaacttatgctcaaaccgtgtccagaaatacaaactcctcctgggcagcctatgtacgccctctaatcagccagacatggttgtccaaattcttgatggctcgcttaacccctctcgcttgttgcttgacgggtttgccataacttgttaagagactttgtccagctattgataaggttgcattccacgtgtcctcagtcttcgcttacatggacatgccatgtcatgtggacaaaatttgagataacatttgccccccaagtccctgttccaacatctggtcagataggtactttccagctctcgtcttgcttgtagtagcctctatcaagcatccttgtctagccaagtatcggcttttcgcatggcatgcttttagtttttggatcttctctctgcatgtatgcgtcatcttcgttgaatcttccattggtaagtttgaacctttttaggcttttagaaattttttgattctcacgttagattgtaatatttttggtattttgatatgatagttttagaatgtataatgtgtaactttctgatgaaaaatattcaattttagccttcattgtgattctttactctttaagtcatgaagagcacgaagaacacgttcaagttttcgaaattaactttgggcatgcggccatagggatcttgctggaaatctggccggccgtagggtttttccatggaagttggctgattctatggtttcatcctataagctggtcgatttattct

SEQ ID NO: 50377 - DNA, 1309 bp, Cannabis sativa
attctttttgtcaacattatcgacagcatagaatgaaaagattcttattggaagagtgtgatagggaaggaaatgatcacctggttggatgggagaagtaaacctaaggaatttgaagatttgagaaattggcaatattgtaaagttgtaataaagccttacttgtgaaatggttatagcaattcttgacggaaaaagacaccttgtggcttaaggtaatcaaaagtaatataactacgaaatggctccaattgggtgaattacataattgtcaattcacataatagttaagggcaaaatagaatcattcccttggaacattaagatccttcataacttaattaatagaaaaatgccaagttttagcattgattacagcattacaaacttatacacgctaaggattatgaggctttctcatccaaatcaacttcgagaagttagccaaagaggatggtttgctgaatttaagtctttccaattcacagtattcattaagttagagctaaggtaaaaaaaaaatggatgggtagcagctttgaacaagatgaataccgtgagaacttacaaaggtgggaactttttcttaaaggtcttgcccaatcagcatgtattgtgtaaaagaaactttccagtgaccacatatttctacattgatgaacgtttataggggaaatttgggttttcctacgacagatgggatttaattaaatgtgaccagaatcttcttgttaggaaataatgcaacatgaagagagtgtagggcgtcgtggattgcgtcgagctgaagaaagacgatattgtggaatgtggttgtctcgctgttctttccgcaacatggctggagatgaacaatacaaccttcaacaatgtagaagagattgtgggatttattttggaaagacttttgagcagtagcttaatggaccctcaataataaaggcttaaggaatactatttgtgactaatatttgtgatggcttttgtgatagtttacagtttatatactatgtgaacttttttttctccgtggctcaaaggactgtaagaaagctgagaaccaatcgtctcatgtgatataatttctgtttcacatctaaaagaaaaaattacaaatccaagggccatgggtattacaattgcacacagatgttgtatttctaaacctctctagtatactatatagatgactttctggctttgttatgggcttctacttatattgattttgaagacagtccttcattcactgcatgaaccactaaaaggattatgttctcacctgatttctttttcttttacctcttat

SEQ ID NO: 50378 - DNA, 2074 bp, Cannabis sativa
ttatatccaaacacaccttacattttaaaatatagtgtaattactaaactgtgtaattactactctagtaattatacagttacttccaaacacactctaatttttgttggtgttgttggtggtgtaattaattatcaaaaaatattactaactaatcgtgaagcgacacctataaaaattgttaagcaccaatattaataacaatactcttaaaatcctttaaaatacaatacaaaaatttatctcaaatttttaaattaaaatatatatcaacttttttattttctacctctatattatttaaataatatactttttattatatatactcttattattaaaatataaataaaatattatttatatattattaaagtattcttaaaaaaaaaaacaaaatattatatgtatatgatattaaaatatgtttagggaatgaataatagagaaagattattatattttttatttatgttatttaaatttctacagagggtgacgtaacatttatttgggtaacacgtggaataaattgtataatctagattagcaatcccacctttgatgagccatgcacagagatttgatacttgaagtcatgaacagaagttaggacattcgaacagagcatgcgaaaacactcgatcggcttccattaagcaggtggctcgcatacaccaaccaagaggtgtgagttagacaatttcagagatatatcttatatatcctcaagcttgaaagatacgacacaatctataaattcatgggatagattcatagaattgaaaaagaaaggaaacttacctagtttcttgttctacttattgtaattatagaaagtaaactaattttccattttattccttgttgaatttggaaaaccaatttgatgtatttactccctataaatagtggactcatctcactattcaagaacacgaatttcattcagatagaaaacacgagagagaaatctaaatttaagagtaaaatacttatagcgatcattgtaagagctttcgatggagatcaatgttttcttgttcatctactcacatctcattgcaacaaaaagggagtaggctattaccatcatcaaggggccgaacttttataattttggtattttctttactttatattacttatatttggtatttcaatcattgttaaattgctttaatttcactcattgtcgttggctaaaagtgaggtcaatattttagtgcttttattgagagcaaagaaacacaagtatttgttttaagtcttttttaggacacgggatggttgtacaaatacagagaggaaataaaattgaaacaactgatctaatgactacggatctaaacgtgtagacacctacaaatcatagagttccagtcaggacggaccccacactgactaatcctcaaccaccaataggctcacaaactgtaggtcaaggagtgactacccctttggctgggttcactctgggcgtgcaataaactagaaccactagtactcggaccgagcaaaatgccccggtactggaatcccatctgctataaattctcaaaggccaactagcgatgacaccaaactacagaatttgcaagctgcattaggaaaaatacaaggccacaataacactcttcattacgatcagcaagatactatagtagctataaattttgcctttgtagaacagagatgccaattcaaagaatggcaggattgagagatagaaatcatgagagcccaataaaaagtgattgataatctatccaggcaagtcgttgtactgatcaggagagcctaccaagtcaccgacaaacagcgagtgggagatacttacattcctcctggggcacaatacaagccagaagaacatccagctgaacacactcagcacacccaagatgatggaccgtcgaatttgaggccaaagagccaaactgtgggccacacggtagactagcaatgtaacgccctaaataattaggcacgctacccaaaatgtttatggaatcctaatcccctaattcgggattactaatcaaaaatagcgcagaatttaaacttttaaatt

SEQ ID NO: 50379 - DNA, 1910 bp, Cannabis sativa
taatgtgctttacacccgaatcatatgacttccaagaaagtgtaattatctactcttcaaagacaaatggttgagcattgggatggacgatttcctgtcaagatctctgaggttgatgatatgtttatgttaacatttggttgtgaaggggacaaacaaagagttttagagaaagagccattccattttcagaaccatcatgttattttattttctcctattattggtgagaatgtctcttcttccaaccttattttcgtacccttctgggttcaagtctataggctaactttcatgagcaaaactaaagggttggctgtagcacttgggaacttaattggtgaattcattgatgtgtttgaagactccctttttgaaggatagggacctttcctacgtattcgtgtcgaaattgatgtaacaaagccactcctaaaagggcgtatgattaccctttcgcaagttcgggacaaattctgggttgaattttgttatgaaagattacctgaatattgcatggaatgtgggagaatgggtcatccttacaataagtgcacaaccttccttgaagaacttgataggggtgaagaacctgaacttgagtataggcctactatcaagggatctccactgcctacatccggttatgataggtacagaactgactttggaaaagggaatgcttggcctttgctcactcgattagcgagaacttcactcattactgttgtcccttctcttaacgggtgtccacaaccacatccaacacttttacaccatggagagtcatcccattaaaggcatgatgtgccaggggttatgcagcattcggtgactttcccatctgcttctactgctgtcacaattcccattacaacacgtatgatttctgtaccagcaacctccacaattccctctccatccaacaacttctcaacaaaatctcaggcctcccattttggactgtcacatgataacaagcaaaattttacacataattctggtatgacacctactgctccattcattgctgtagtgccttctagatctttatcattggcacctacaactttcacaattcacacttcaacacccgaatttactttagcaccacagaccaggcctgttactcatgcacaatctgatgtgcataacacttctctaacctctaaactgggttcctacgatgacttatctggaatatatactccacccacaggtccacattatgaccaaaatattgttgctacctatccaccccatcctcacactgcctcatgcaacaacaccaacatacttcatgcttctactaccaattcattagcctctccttcaactattttgtctaccaacgctgcaattatgggaaaagaaaattgctctccaaatcgaagtttcaagagacaacatgataggaattcaatgagagaaacccttaagagatgcagaggtctgcctcagcctcggttcaccccttctttgtcagctgggatgaccaaaaccatcaagtttccaatgctgatatggattcttctggttctcttgaccttgaagcggtggctgattctcagccacgcaatcaaccatgaaaatcctaagttggaatgcacgtggattggggaatccacgtgcatttcgccatctccatttgcttgtcaaacggcaatccccacatgtactttttcttatggaaactaaattaagtccgaatgttatttccctttttcgtaatgttttacattttagtaatggacttgaagtccctagggtaggattgggggggtggtttgatgttgttacggaaaaatgatgttgatgtatctattttaaattataatgcaaatgtatttgactgttatatttcttttcctaactaaccaagatggcattttactgccttctatggagct

SEQ ID NO: 50380 - DNA, 1333 bp, Cannabis sativa
accgtatttttgttgtttttttttattgtttttgtgcatttgtgaaattaaccccttttaaattgcgttattgagagagaaacttagagagagtggagtaaaagaagattgcatcatcatttattcattattttagttcttttcttctccctaatctctttaatttttagttaagggttatttcaaaatcgtaaaacatgaattcttgattagttataatgaatatcatttttgatttcccttatataaaattgtttctatttttctatttgaatggtacgaatattgtaaattcttgttagatgtacagctaattaagattttacattgttctattatcagcttagaattacttctcacttaatagtttaggattctaaatagagtgataatttacaattaatattgatgtcaaaagtattatttaatttgataaaaaaaatagaacttaggttaaatgaattattttcttcatttatttgttacttagattaacttatctgatccatagaaattaatatttttcctaaattaaatagattgcatgcttcataaatctattacttagtaaataattattgactactttattattttctacagagttaatagtttgattgagaaattagaataatttttattattatcgatcttgaatgattgttgagagtggagattgactcttaactatttcttaatagtttattatctatctttgtttgttttctagtttatgttactcattctttatattaaaaatcccctttttaattcttaattctaattcttgaataaaaaatattaacaatagtcttcgtggatttggcctggatttactattataccgaagtaacttatagtattgaaataaaaaaatagaaatttattgtggtaaacgacacgtatcaccaacttacctattggtctaaccaatacttatattttggaaacttggtagttcaattgattgagaacggtaatcatagatatggatatctatataacttctatgtttgaacctagaagtgaactggtgattttttttgagtttggctaaaggcaataaataatagaacgctcatttcgataattacattagtttactaaaatatcatttacaaggaactaaatgttttaatgataaaatacattgaagggtaaaatagtaaatttttccatcctttatgtaaaccatctatagagaatcactgactatttagattgaaagaatatgtaatttatagtgtatctatatttgatatatagagcgttgtatacaatcaagagaacaattctgaatctacagtggggtcaggaaaaattagtaagttag

SEQ ID NO: 50381 - DNA, 917 bp, Cannabis sativa
taataatacaaaattaaaatggatataaaattataagttaatattaaaattcttaaaaaaaaatagtcgggtcggatcagatccgattcgaataagtcaggtcggatctgatctgatccgatctgagtatttgatctagcggggcggggcggggcagatccttacatgatctggatcaggtcagatcatagccggatcagatccaacccgacccattgacactcctatgttccagttttgctaactgttctaaaattccataattgttgtttatatgaacttggttataatttttgataagagctatgtatattttttttttctctgtaagttgacaaaggcattgggatgatttaggggtttcaaagagctcatgacttgggtcgtggtttctagaacgccgctgatttggtggcactgacttattctatttgctcaaaatgcaagtgttagaatattgtccttatctgtataaaaaaaattctagtcattcttatataaaaaagaataattcattataaaatccacttattatcaaaataaattaatatatgtagtaacattttttttattatgacaattaataaaaattaattgtttgattaataaatttatttattaattgctacaatagtaaatatgtaatataacaataaaacaaaaaaaaaaaaaaaattcaaatgagatggtacacaatatataaaataattatataaataaataaatgaataagtatactgattttttttgtgtgtcactatatctctaaaaatattaataaaaaagaaaaaaaataggatatagtgacacttcaggtgtgtggttgttacctttttaatcagacaaaacttgacactatacgcctatagtgacgcgcagaaaatgagtgcaaaaggtttcagtgacacgtgtggagt

SEQ ID NO: 50382 - DNA, 4555 bp, Cannabis sativa
gatctaagatcctggtaaaaaattcccaacaaagacacgtggcataattagagtcaaagatgtgttaacctcccaaattaatagagatgaccatcaaggtttctcacggagatgcattgctagtgtaggaagggttttatggatacttgatggggagaaccattctcagcccaagtaacgtctccgggacacggaaggaccatattcgtccccaactccaagacatcctagaacacagtttggttgcctgactactgagtgaagacttctacggactggtcgcgaatcttagctactgcactaaggcaaatggccacgtcagcttcttatggaaatcgaactacagaaggttatacctttttttgatccaggatcagatcttgtcccccatgccaggctatggtcgtgcgcctacgtaccttaagacataccttttgcctaacgacttgtctagagagtaaattgtaaaggaaaaacctttgagcaacacctgtccctaattcaaacggtaggaggcattacctttggaaaccgcacgatcaagaaggttctctaaggctgaacggtcaaatctatagttgtattctcttgcccttgcaatgggctgtggtacgaaatcctagatgggtaaagggaatacccttacccacatgtaagcctataaatacccccacttcttatgtacaaagggtgaacaaatttgatactagctgaaccactgcaaaaaattccaacaagctttctttttcttcaagagaaacaaaaggaatgcaaatctagggttcatactgtaaacacttgtattatccaaatacttgcccaaagggccaatacaattgactcatggactagggattattaacgcccgaaccacgtaaaaattatttgtatattatttgttatttctttctttcttaagctctttattattagttttcaaaaatctcgataaatattttggtgcttacattaagagctgaagaaaatttgctagccatcacaccacctcaaccatgttcactcagaagaacgtaggcgaaaaaactcctctagatacagttatgaaggaggcagactctctcgcccctagtctccaaccaggcggcgtaggagaaggtattgtaatgttgaaaactgaggagaagatgttgaaaacttacatgatggcgccaacaatgactaaaaccttgaagatagtgaagacgaggaggacaacgatggttacatgaatgacgggtattaaaaagattgttattattatgaccatgacccaaacctgcttcgagtgactaaagaattagaagctacttagacagagttagcggagtagaaaaactcactgagaaattgaagagaatgatggagcgtcttcaagataagtttcaggacctggcaaagtccgacgatgaccctttagttgaagttatggctgaagagcgtgctcctaggaaaaccgaggtcgaaacctcgaatccttgtaaggataaaggtaaaggtaaggtaggtgaacccagacaaaagtctgctcctaaatctcctcaaaaagacatgaatctggctagccaaccctctaagacgcaaaaggccaccagtgcttttgagcctggatgtccttctgctcctagaggcaaaactgtaccaaaagggcaaaatacaaaagtacctaagcccaaagggcaaaaaaagccccttgtgattctatcaaccaggataaaaggacgactgaagggaattttgaagacagctggtccaccgtagacctttatcagcgattggatgccaagtgcgaaaggtacaaaagtgaaaaaagtgagccacgtggaggtgaactcgaaaatcacttaagtgataaaatgtgaggacgcaatcttcccaaaagtgacacgaaaaggctagaagagtagatagtagctctaatcatgttagtcaagaagcagagtggggccctctcaaatttagaggatgaggacccaaaaccctgcgttaggaggatcgcaaagaccccactcttggaaaactttaaaatgccacacattgagttgtatgaaggaaggatagatccacgaacacacttggcaaaatacaacaagatgatgcaagtggcacgtgtgagcgatgatgccaagtgcttgtgtttttccctgacattgaccaagtccgcagaagactggtggaagcatgtggctcttgaatcgttggatagttggaaagaattacattcagccttccggaaacagttcatttccatgcgtgatctggacatggaggttggctttctcaccaatatcaagaagcaacaaaatgatgagaatgcatgaagcataaggaactcatagaaaatgtatttaagaggggtagaagaaagggaaacgtgtgtgttggtgcagtctcccccacaacgtcccagaatgatgagcttacccatcaccttcacagaggatgatgctagaaatgtacatttcccccacaatgatcccttagtaattgaagcacaaagtgccaataaatgggttttaagagtccgagtggacaacagaagctcagtaaacatcattttcaaatttccattctaggcaataaggctcacagaagttgacttgactccttaccccattcagttgcaaggtttcaacagagacgcctaaatgcctatgggaaaatccagttgtcaataaccctcaaaggagaaaacaatgcaagtgcttttaagaactctacttttgtagtggtggattgcccaacacaatactaggacggccaaccccaatagattttggggcagtaactttcatcaagcatctatgcatgaagttcccctgcaataatggatatattggcacagttaaaggtgataaaaaaagtgcaaggcattgttacaatgtctcgacacgagctgtgttcatagtccgggaagaggcacccattgatcctagaatggaggctcaggtggaaactgaggccatttgggaggattttgaagatgagttagatcccagagacagaaagaacttcagagccaattgaagaggttgaagaggtgagcatcagcgatgtggaccccataaaaaccatcaatctgggaagaaacctactccatccataaaagagaacattgtgaacacattcaaaaagaaccaagatatgcttgcatggagccattctgacatgactggaattgatcgtaatactatttgacaagccttgaacattcgagaggatgccacaccagtctgccagaaatgaaggcccttggatccaataagggcagaagtagtgaaagcgaaagttgataagttggccaccaatgacttcctctgagaagcattgaccatgtctggctcgtgaaccctattttggttcctaaacccaacgacacatggagggtgttcatcgactttatggacctaagcaaggcttgcctaaaagatttctttctgcttccgcgaatagatcaaatggtgcatgccacctctaggtacaagttgttgagcttcatggatgcctactccgaatataaccaaattaagatgcatatcttatatgaggaacacactagcttccaaaccgacaaaggcatttattgttataaggtgatgctgtttgggctaaaaaatgttggagccacttatcaacggatggtccaccgaatgttcaagaaccaactagggagaaacatggaggtttatgtagatgatatgttagttaagatcaacacctccaaggagcatggccttgatcttgaagaagtctttgcatttataagaaagtacgagatgaagctaaactccaaaaaatgtaccttcggggatttcctctgggaagttcctaggttttattgttagctctcatagaattgaggccaatcaagagaaaatcaaggctttccttgacactccttctcccaagaaacataaggatgttcaaagtgttactggtcgaattgctgcactcagtaggttcatttcaaaatcaacaaacaagtgtatcccgttctttaacgtgctacgaggcaacaaaaaatttaaatgggccaaaaggtgcaaagaatttttccaaaagttgaaggagcatttgaccaaagctctacttttgtcaaagcctgtggagggggaggatttatacatgtacttggcagtgtctgatcatgctataagtttcgcactcgtgcgaaaggaaagaaaggtccagtactcggtctactacgtaagcaaaagattactaggtgcagaatcaagatacccaatgattgagaaactaacatttttgtcttactaactgcgtctcaaaagttgagaccatacttccaagctcacgccataaaagtactaacaaaccatcccctccgcctggtacttcagatgccggagtcctctggcaggctattaaaatggtctatggaacttagccactttgacattcagcatcagccgcgggtgttaatcaaaggccaagcccttactgatttcatagtagattccagcatgaatgaccacccagaagaggtagtcttggaattgcccatctggaaggtctatgttgatagagcgtcaaacga

SEQ ID NO: 50383 - DNA, 1010 bp, Cannabis sativa
cgtcgcttaaaaatacaaatttttaaattttacttgatggctctactatagcggacggttgaaaatcgtcgccaataccactaaagttgacggctttcaacggttgggacttctttttgccaactgtttatgttcactgtcatttattttacccaattttatgatggtcaaataggcaacaatattaaggactaacgggaatacatttgccgtctgttttaaactatcaggaaattattagaaaattaatccaaattttgtagtagtaataatgaagtgtcataaatataataaatatgggtatgaaagcatataattaatgtacttatctacaattatacttgtcacattctaattaatatctaggatactattaccttctagtaatcataatcataaagcacttctattcgttaaatcatatggctcataataataataaaaaaaaaactgtgagatgccatttttgtattgtagaagtgctctttgctaacccattcctcatagctaggtcaatggtcatcggtttctccactttgggattcatacatacgtcagaataaaccaaccagaaaaaaaaatcatgatctaccaccaaaagatttaaaacaataataataatttagttaatatactcacatcacagatcataactttttccatagggtcatcatctcttttactctctaatttgttcgatgattaaatttttaaaagttattgaaaaatacctatattgtactcttggaatcaccgcagatcatataataagatgatcccaccaaaagaaaaatctgctaaattactggtttaaatttctccgtattcatatccaaaaaaatgcacacacacatatatagcctattactacaaacatcctaataaaagcacttcgtgagataaagcaagttcctatttggtgcaccttatctactcattttcctctctttaatcatcatcacctattttattagtactctcttaatggtcccttttccatatctgtgata

SEQ ID NO: 50384 - DNA, 2314 bp, Cannabis sativa
ctagagcggtcattacatttatggcaggattatctccgtgttcgtgtgactttgaatgttatgaagccattaaagagacatatgaagcttcacaatactgctgggatcgagttctggactaactttaagtatgaacatctccccactttctgctttatttgtggaattatggggcattctgaaaacttttgtccacgacggttcgaggttggagaggatcagctaatcaagtcatatggggaatggatgcgagtgagacctatacgcagaaaccacatgatttgagctaaatggcttaagaagtttaatgctgccatggatgatgaatatgaagcaaaaaccacggctcgtggtgaggtggctcggtcgacgagggcaatggttgaggggaatcgtggtgtgctggggtcaggtctgatgatagtgcaggaaacttcgggtcaacgtgaggtagggataggcttatcaaaagatgttaatggggatcctataactgttgaagatattttaccagttgctacgaacaaggaaatgtctaatgatatcaatgaggaggcttgtcttttggttcttgatacgaagaggagaagaacgactttggaagatattgatggggtccatgtgagggttgatgtggcaacgggtcaagaggtaaatggttcaaagaacttgagtttggtgggtactggtgtccaggcccaccaatcattatgaatattttatcttagaattgtcattggcttgggaacccatggactttataattccttgaggatcttgtgatccaaaagaagcccagtattgtgtttctctgtgagactctatccaatcgttctcagatggagagagtgcgtgtgacgttgcaatttgatggcaagatagtcgtagatgtcaatggtaggagtagaggtattgtgttgttatggaaagttcaggatgaagtgtctttgcttgggttttctgattcttatatagatgtgagagttgcttctgaaggtgtgcaggaatggcatttcactagtgtgtatggggaaccgaataggagtaggcgtgcttctacttggaacctgttacatactcttgctaatcgttctaatctaccatggtgtgtgatgggtgatcttaacaatgtgttatctcgtgatgacaaaaggggcggtaatcggtaccctaattttttaatctaaggttttcaatagtctttggttgatagaggacttcaagacatggagttatgtggttatttgtttacttgggagcgtgggcggggtactaatcattggatcgaagtgcgcttggatagggggctagctaatcttgcttggttgaacatgttcacttctgctaagctccataatcttgaaatttcaacttcagaccatgctctgattcttatggtcatggttcctgctgctggccacaattttgtgaagcggcttcggtttgaaaatgcgtggttgagggaacctctttgttatcagattgttaaagatagttgggagatttgtggggatgatgacgtgatgaataaaattcagttttgtgaggaaaagccggctgattggagtaaggaggttactgggaactttaaagaaagattaaaaaagtgtaaaaatgagatccaaaggtagaaattgaatcatgatgaagtctctgttgccaattacaaacaagcaaataggaatttggccgaaggttatgtgcaaagggaagttttctgacgtcaaagatcgaagcaactatggttgcaagaaggagacaataatagcaaatattttcatgcttctgcaactacaagacgaagaaatagttttgtggcaaaacttgaagaccgttcttgtgcgtgggttgactgggatagtggtttggacaaacttatggtttcttatttcaacgaactttttttatcttctcaaaccgattggagagaagtcacaagctgtgtgcaaactcgtgtatcattacagcaaaatgtcgagttgttgctaccgatttaagatgaggagcttcgcaaagctttgttccaaatgcatctggataaatccccagggcctgacggtatgacccttggttttttcagaagtgttggctgattgttaaagatgatatcatcaatatggtcaagtaattttttataataggtttcttcctatagatcttaacaaaactattttagtcttaattcctaagaagaagcagcctatggatatgggagatttaagatcaattgttttatgccatccatcatatccgatactcaaagtgtatttttactaggggtgttcactaagtatccaatccaatccaatccgca

SEQ ID NO: 50385 - DNA, 1806 bp, Cannabis sativa
cacattgtataaaatcttggggggccatggccacaccactcctaaactacctctaccctgcccatgttcttatatatgactcaatactttatcatttaattcatgtgggacaatattctccaatatgcagaaatcaatttcatgaatcttcctcttgatcctgtctaggcagtgcttttcgctattaagcaaggtattatggtaggcattattattaggctaaatctaccttacctagaatctggttgtatgaaggctgtccatacaatctctggtcctcttgttgggtgctcttcggctgatgaaaatattgaagatgttaagaggcttagtacaatttcatagtttttattttgtgggaagagttggtaatggccttgctcacattctagcaaatatagctttggctaacaaagcttcttctcgatggaatgggggaggttgtgcccttagttgctcgtccaattatgttgtcggacatgccaattccgttgtaatgtttctttggttcacttcaatgaatgttttccctttcaaaataaaaagtaataaatatttatatatatatatataaatatatatattatatggctaatataataatgcatgtgtgtaatttgaaagtgcatgatctatttttaatagagtattgttattagtattagttgtgtctaacactatctataagtattggagaacattgtcccacatggattaaatgtaaaagtatttagccatatataagaacatgggctactccactcattgccaattggttttgagatggaaccctatgattctcaacaataagtgatattttgtaaattgttagtgatactccataatagttattaaattaaagagtttttttttgtggctaaactcttctaactatcatttcacttgcacttaactttccaatctcaaattttggtggtaaaatcctccaaactatataatcgttatcaaatttaaggtatcatctatttatctcagttaactgttgacatgaactgcctatgtgtactatcatgtacacgtgtcatatattagttcacctaatataattattcaaaaattttaaaaaaattatttcaaaatttattttaaaattataaaaaaatatttcacaattttgaaaaaaatcaaataatgaaaaattatttttgttaattttcttcttgtttacattattttctttcttctttgcgtttctccttgatttcttttccaaatttttatttttttcattcttcatcatattcttcagccaacatcaccaaccattacctatataccacccaccatcaccattgaacccaataaccctccaagcaccaaaaccataaacaaaaatccagaaacccaaagcaaaatccaaaacccatataataatccataataaaatgaaaataatctaaaaccaaaattatatatttgattctcactatatacatctatttaatttataatgacatggttaattcaagaaaaaaattaaatccaaaatgaaacaaaaagaaagaggcatccgagtcacctttaactggctcgccacaaaaaattcaaagtataataccctttttccttcaaccaccccgagtcatcttccactgcctgcaaaagagagcaacgaaggtggtggtctcactctttgtagatcaggctttctcgactccgcttgagagcaaagcgtggctccgaggaagatctggtgacaggagaaaagagggtctgatctaatggtgagcaacatagaccacaaatctgggtttgattctacattggagatcattggagagagag

SEQ ID NO: 50386 - DNA, 1213 bp, Cannabis sativa
tttgcacgttcctgcaagtaatctaccaggaagcacagaatgaatgatgacctcaagcatactgaacagcattaacttcgaagacaaaaatcaaggaataatgataaccaaagatcctcaccaaaaattccagaaatgacattgtgccctccaggtgcctggcctccagacaaaacaacaccaattttcaatttcttctgcgaatcattagagtcagaatcgctaggcactaccaaggcagatggctggccgaaaagatgtggaaaaagctttgcgatttcatctgaaagcatagaaaggaaaacacaatcgtatcaaaacgagaagccacacacataaccaaactaatactaaagttcgtaagagatcgaagtagactgaaccaattaaatcaacgaaaatctgtggatccaatacctggattgccagccgcggaactaggtggtccttcaacaatcttgaaggggtttctgatcacggtagggagagggagggcgtggtcgatacgactcgcctggacctcgctgtaaacggaggcaactcgaccagtagccggggccggaatgtcgccgttagcagccaatgccgtagccatttgtttagacctagtaatacctcggagaaatctttcagtaggagtgagtgagtgttgaatcaaaatccggtgaaacgaggaaatcaggaaagtagcatttatatatttgtagtagaaaagggtaataatgtcttttagacattggactctccgcctctttgggtttggttgcagttaaacaccggggtagtttaggaatagtaaattttttttgatttgcaacgattttttacaacaaagtaacggacaggattagggttttgagatggcgcatagaaagtcagggtattctaatccgcactggatcaaacgagcgttattctacctaaccttgtggtgggtcattcttaatgtaggtgagaactgagaggcatactccaaccaatattttacgtttggtgtgaataatagtttttttttaaaaaaaaataactattgtctaagctaaaatcttggtgagcacgtgggactcacctcccaaaaccattacaattatagtcaggagaggcgaaaaagaaaaaacaaaaacaaaaagcacctcattggcatggaattcggatattctgaccacttgaaattgtttactttttttttttttttggttgatggaacaatttt

SEQ ID NO: 50387 - DNA, 1177 bp, Cannabis sativa
  modified_base (1107)..(1152): a, c, t, g, unknown or other
atcaaatatgtgaatgatagatattatttatttacacatatttttgcatttttcaatttttgcaaaatatttaaaattaaaaaaatcaattttcgacaaataaatcgatatgtatatttatatataaatataaaagaaaacactaaaaaattacactgaattacacaagaaaaccctacacagaactcagacacattacctgaaacttgcattggtagcagctctaaacataatgattacattgaattacacatggaatacaatgaaaattacaaatacaaagctagctatatagacaaattatctaagtcataattgaaacaattgagaaggaagaggaaacaaatttggaaacaaaagtgattacaaatcctgaggtgcatgaaattcctattggataggtttccaaaaacaaagcaactctaaaaactgccctcaacctttactcgataaaaataaatcaaccatataaggtaaaaaatcctcaccagctgattacaagatcgtttgtctggatgacaattaaaaatggagtttgctagcatcaaaacatagaaaaatagatatgttcatcattagaaagattaaacatacacatagctactcattgaatattacttaaggagatcatccttaagctacaaccaatctatttgaaaatgtcataaataagaaatatattaacccaaaaagacactaccaccaattgaaattgttaatgatttggttgatgactatagtgtctctctattatcaaaaagcttgaggagctcgagagaaagtaaaagaatatgtaagaggttgccaacaaaaatcctacaatgaaatctcatccattttgtacatgatggtgttatccgcattttcgtaagggtgacatgtgaaaattaattaggcaaaaatcaagagattattgaggctgcccaagtgccttactctgtgctctaggagagttaaagccctattcttgcaaaataggtttctgtgagataagtcttactggatgcaaactgcaggagagatgcccgtaagctagcgactcactccactctagaagccgagaccgtaagctcccgcaaggaacatagtgttggaatatgttttacnnnnnnnnnnnnnnnnnnnnnnnnnnnnnnnnnnnnnnnnnnnnnntgaatttctaaaataatgtaaataa

SEQ ID NO: 50388 - DNA, 1087 bp, Cannabis sativa
aatacctcttcaataaaaataataaataattttttattgttttataatttatttatagttatattatagttgttatgaggttatttttctgattatttttaattcttttatagtttattattttatagttgtcatgaagttgatttttcgttgtttttttacttttttttttgagcaaaatgtatttttataattttaaaattttataaacttatttttataattaaaaattttgtaccataaattaaaaataaaacataataaaagggcatatttaaaatttctcctaatataaaataataaaaaggcacaaaactgagatatgataacgatttattgataacatatatacaaggatgagaatattggtgtgcttttctttcgaagaaagagtagcagcttctcatggctgatggcccacttaattatttcttatcatgataaaagactcacttagaggcagcatttatcatcaaatcttttagataaaaaacaattatttaattagaaatattaatttactctaagcttttaaaatattcaatattatttgtacatttattcatcatataataataactgtatagtttacaaaacatactttaaataacaccatacttaactattatcaaattaaacctatttcacttttattttattacaattgatataattttatatttaaaactaaaaattattaaattatgaataaaatgaattatagttttactacatacatgaggttttttaatatataaatatatatttatttattagtaaaatgcctctacggttctaattgcatatccttaaagtacctacccccttgatagaatttattattatcttgttctacttttttggtcttttgagggagacaaaatgggaaaataatagttgtatcattgttaaaaatgacaactcgaaatgattccctctatttctgtatgtgtatatatataagtcaaaaaataaaaacaaagttttagaaggactttcctattgttatattgttgtgggaatgcgatcatgtagtttatactacaaaatccaatcaatttgcttttacttttattattatttggca

SEQ ID NO: 50389 - DNA, 1140 bp, Cannabis sativa
tatatggaagaagtgagaaagagtctgccccatcatttatataaaggattttatttttacattttaccaacgaaaaccagtgaaatgatttttcttcttctataaaaacttttcaaaagtgaaaagatattttctttccaattttaggttaacagtgacacttctgactacaacaataatagtcagaataattcttaaaagaaaaaaaaaatattcccaagtccagcccaatccatttaaccgttaccactaaaatgaagataggaataataatatgtgctggtaattttccaatttttttttttcaaactaaaatcaaattattgataagtataaagaaaaaataataataatataaaaaaaagagaatcatatgtaaaaatggcttagaaagagttgcacggatctaagaaaaagaagtcggctaaatgagccaagactcgcagccgccgctgaatagttttccaatgaagctgcgctgcccattcgctgcatcaccacaatcatctaaatagtttacaacgtcgaatctcccctcaccaaaagacacctggcagattttcattggctgtgacgccaataattttgattccatcagatactctagtacctttacattcatttataactgccgttatagagagagagaaaaaagaagggctttcaattggttggttggtccttctcttctgttttttgtcgtctctgcgtacgttttccgccgcgtttcgagtgcgtgtctaattgcgtttttattaatctggacccattttacaacgctaataattaaagaaaatttttttacaaacaacataaaaataataaaaatttaacaccaaattaacaagagtacaacataaaaaaattatattttatgtaaataaaattataaaaatagtaaaaatatttaaaatttcgtataactgtatttttttttataattcttttattatttttgtgtatttgtaaaataatttttttatatgtatttttttttgaaattttttatatgtattattttatgaataaaactattttttttaaaaaaaaacaacgaaaaacattattggtttaatttccattaacattttttttttttgtataaatctctatcaacagttaataatatgctgtgatgaa

SEQ ID NO: 50390 - DNA, 581 bp, Cannabis sativa
ctgattcatcaaaaaaaaaatgtgtaataaaaatagatagttttcaacttattcgattatttactccgacaaagacaaagactgtttaatattttgtatagttttaaataatgttttatattttaatgttatttatgcatttttagtatattactacttttagttttttttaaaacaaaaataataaataatttgtattttgaatgataattagtatgatactttacactgcactcttaaataatatgtgtctttcatatttttaatatctgaataattataatctaatttttttatattataatgtatattgtaattatttaagatattatacaaagtttttaagatatttgaaatagtttacaatgcagaaagtaaggtcaaacactctattttcacacgctcataaaataaaaacaaaaaaacaagtgttgaccttagatttggccaaccgacagcggagtcgtattaatactgatcttgccacgtgttatacaataagaactagaaagtaaaagaacacaggatttttatagaggttcgtcccccttagttaccggttaatgacctactcccctttt

SEQ ID NO: 50391 - DNA, 754 bp, Cannabis sativa
aaaaaataaaacatatcaaaaacttatatatttaagaaacaaccacattaaaaatcaccattaattggtgtgcttaatgtttcgaatggtaaacacaatttttcaaaagaaaattatagatgaagtagttgatgacagttgaaaaatgttaggtaaaatcgttagaatagttgaaatacaatgtttaacttgaataaattgtgaaaacattatacaatatacgtgattttaatcaaacagtcaaacatgcatataggctaatcaaacagtcaaaataggaatatatatatcctttgtaattacctaacaaagtgtttgtccaacttattcaactacaattacaaggattactctcctagcaagtttctagtaattaaattgtaattaatatgattcgatctaaaaagactatattttggtaacttgtcttggtctatataactgagctgcaatattgggataatgagtgttttgattcctctaccaaaattaggataacgactgagtcatcattgcatgttgcgaattgaatagaaaaatctatgtgtgaaacaaaaattaaaatcaatatgcatgatattaatatatctatatatttatataaaaaatgtttatgatcgagacattagttttatctttatagtagaaatatttttttaagaataattacataagacactattttttataaaatatttatatttttacgttcaaaaaatattttttttttatatttttacggttttccaaaaaa

SEQ ID NO: 50392 - DNA, 823 bp, Cannabis sativa
ccgaatcctgattcacagtgcactaactattattatgttgtgtgatcattggatgttttttaatacttgaaacatctacagtaactgtttaatctcagccttgcatgtatattcagtttcaagcacatttattattagtacatatttataaaaaccagcttctgtgttctgacttgagtaaatggtcaaaatgagtaacagatctgggagaaattgcaagagccaaattcgattttgacgtggttggacactatgcaagacctgaagtgctgagcttgattgtgagagaccatccaacagacccagttacgttcacatcatcatcaccatcatcttccacaaaaacagagatttctcagaagttgtagttggtttttcactgatttgagttataataacaggacaggttgttggttcattgtgttgtattttatcttgtataaacatttaaaaaaccaaaattgttatatagaaaaaacaaaaggaatggatgtacaaaatatgaacttgagtgtggatgtgaatgtgaattaattgactccagattttatctaggaaattttcttgctattttctactcaattccaccaccacacaaccaatccaaccttcaaatttatgacatttgggatagcatctattagatgatttttaacctctatttatccatacataaactatagcacaagcttccaagagtaggactccaaatccaaattggaaactccactttgtactcatgtctttcttatcataattttgttaagatgatctggtgtcttgaaaatagttaacgacactttataataattattaaattaaa

SEQ ID NO: 50393 - DNA, 2151 bp, Cannabis sativa
ttttatttattttattttgcaaatttataataatttcactttttgacacatgagcacaaaaaatttcattccgaatttaataatttttttttaaaattttgtaatattaaattgaattctttcttttccttatactttttttttaaagaaacatagcattgcaactaaataaaaccaactacagaaaaggaaaagacatctgcaagcaaagcataaatatggaacaacgtttccatcttaaatacaagatgattccaaattgtttctcattttttttttctatttatttgttttcagtactctttagtacagaatgttcatccaattcaatctgtactattttgttcatagtgcattcgatttgcactaagtgcagattttatattttaaatctaatctaatcagcactataacttaaatccaatctaatctgcaaaaaagtagatttgatcggttattttagattgattattttttaatattgaattgtttaatattttatataatgaccgagaggtctaaccgtttatcatttatataatacgcttttcttcaaaaaaaaaaaaaaaagaattgtccaatatttataaaaaaaatattatttttgatatcattaacaacaaaataaaataaattattgttgttatatctcttcaacaacataataaaataaataaaataaaaatatgaaattcaaaggaagaaaaataaatttaatatagaaagaaattatttaattttattttaaattaaatttttcatatataagaataaaatatatatttaatttatcaaatttttaaatatatttgtatcatatctattaaatttttaaataactattttttacattaaaatattagttgtaaatattttttttaaaaatatgtatatgcgtaaattgtattgaactgattatttttacatgtcaatcaacatctagcacaagcagtgacggacccaaaaattttactttgtgggggcttatttatcattaaaaaatatttatacttacattataatcactctcaataaatttatttaattttgtggagatttttctactatcttagtctataattatcaaattaaaaaaaatacatttaattttttaaaatacaatatttttattagtgggggctatagcccccacataattagtagtgggtccgtccctaagcacaagtatggattttgaattttctaatctaatccgatctgcacgagtacggatattctcactttgtagattagattagattaaatagtacaaattgggtattttatgaacacctctattctctagctaaacacacttttattttaacaaatgcaatatcaaacgtaaactttctacgacactgtatatatttctttaattttaatttgtttagggagcataggagtaaacatgtgtcgccttgacctatattttaaaaagtctacaataatatggttcgtgtcgtgttgacccataaaagtatgtgaattgtgttgtgtcgtactaatattttaaagagtaagtctggcacgatctatgagcctatatttttgtgcccaactaggacttgtgtcgtggtttactcgaaaagtttgtttttcataaataagtaaatttgttttcttatacgggcttgaattcgggtttcacttttctactattttttttttttttatgattaatgagttaatgaataaagtaatatgtattttttaagtttcaattatttttatataattttttatctataacaaattaatattagtaaatacatatgtattattattactactgttattataagaatttttaatgtggtgcgtttgggctatccatttatgcttacatgttgtgtttttgagcttgtcatgtcgtgttgtacttgaattcattttttttttttatatcgtgttgtgccaatttaccgtatcgtgtccaaactcttattttttcatactaggtcgtgcccgtgcctcttaggctcatattagttttgtgtcatgtcaagagatctgaccggtatttacaatactattactaactataataaaatatttatgatgaaaataagtgtagtattttttttttttttgaacaaaaagtatagtaaaatgttaaatacctttaattactctttttttttttttttt

SEQ ID NO: 50394 - DNA, 1489 bp, Cannabis sativa
aagcgttttggacaaaaacgttctgaatggcctatgatcccacatacaaaacaaaaagtagggagatgttcgtatttgaaattggcccaaatccattcaccattttccttgcaaatcttcattcttcgtttcaaaggtttattaacatcaatggttgctctcacccggagataatctctccataatccattaaagtttttcgggtcagacttgacatatccacccacataatcaccagcactcttaaccactttctccatcataaaaccagactttagatcatgaagctgaacccaaaattccattctatgtagctgtaccaccttcggatcctctcccttccttaaacgatggaaaacaagaggacatttgttaaacgtccagggactcccatccacaaccgattggatatccaattcatgatagaattgaaaaagatatctattagtatccagttccctgatatacacaccctttcccggttgccacagcgacgccatcatgtgcctcatggcatcgaaatccaatgtcctacccgtgataaacttccccaccaaacaccaccgatcatcaaacgctagctcctctccttcctcctctcctccaatcagaatgccttcttcctcatcctccaaactgatctgggcgtattgttcattcagatcaggggccggttgactacttgatgccatagaaacgaaaacaacaactagaattgacttagaacgttgagaaaaaaactttcaaaacatgtcatacgacaagacctttttaaccaagtttttagtttttttaacatattaaaagcattagataaggagacacaaatcctcaatcatagcaaagacagctattggaggaactcttttatccccaaaacttgaagttttataactcaaaccataaaatttacacctataataccacataactttccattttatcccaacaaggcaactgccaaactacaatccgacaagattatacaacactctaatatgataaaagtccaaccatctcaattccatgttttatagctaataactcagcaacaataggagaaaatggcctattcaagaacataccttgtgttgtaagatatagatatatgtgtatatttataatattacatatatatatatttcaaaagaaacaaggacatagctcattcttttatttgacttggtaatatattgaactactgcatttcctataaactagcaatcacacccactatcttctcaaaaatatgagcaacgtcttttttgacgttagtactcttcatgcatgtatatatatagatttatatatatatatagatacttaagggtatcgcaagaggcagtatcatatatatacagtatcgtatatacaccgtatcacacatatattatatacaacatatacaatttatttatatagtacatattatatatataattgttcttggctgggtattatattgtttttgctgtttctgttttcctgg

SEQ ID NO: 50395 - DNA, 2218 bp, Cannabis sativa
  modified_base (1206)..(1210): a, c, t, g, unknown or other
aagtttttttttagtaaatgaaaatcgggtcagatcagatccgatccagaaaaaaattaggtggggcgaagcggttctgatccaagatccattaagtattcgaatgttttggatcagaggtgatccgtcgagtcggagctccaacccgctccaactaaaatggatcttttgaacatacctacctgagatcgaacagtatatttgaatagatgtgcaagaagtatgtcaatgacatggagggcatgtaaagctttacgaaatcaaaatggattttttcgcaggaaagctcaaagtttttgttttgaatgtaaaactagtggaaaaatggttcctttttagttttataccttgagatcgattaccgtcagcttaaaggaacagagatccaacagataaatgctaatgatgtacctcaaaaccatgaaccgccaaattcaaaagcatgcaatttttcaaattgggttaagatgaatataccctttataatcatttaaaaagtactttttattaaaaaaaaaaaagaaattttaaggggcaattgttatacccaaaattagactgtacgtcggagagtgacacatgtcaatctcgtagaatatgaaccaactgatgtaataacaattatatcattaaatgcaagatggaataactcattaaatgtagaattaatagagtatactcataactcgctaactgtatagttttaggcgagacaaggatacgcaaactatcaattcctttattgacgagaaaccatcttacctcggagggcacaatcctgaggaaactataggtaatgtatagcgagacatccatctcgctatttataaggaaatattaaggagacaaatcagttagtgaaacacttagcgtatattccacattataataactaagtgtagcaacttggaaacatgcaagacatgattttccagtctgcgaggccttatggtcaaagagcagttcttaagtttgctcagtacactggagctcatgccattgttggaaagcatataattaaaccaagtaattatttggtggtcatctatatgtaaagtgagatggctctacccacgtcagcgttaaccgccttgaagataggaatgataagcggtagtgcggttatcaattgttatctacacgtgtttaaataaaatgtgatcaaagcctatgttttatgataaacggttatgtaattcaaatttnnnnntaaataactgccaatctatattcctataaataggggtagattctacaaaaaaagagacaataaaaaactaggagagaaattgtaatattgtatccaatatccagaaatatcttaaataagatagactcgtggagtatgcaaatttaactgcaaaaccacgtaaaatacctggtgtcattattattattatacttatcaatttttatatatatatgttaaatttattacgaaaaaggctcaatattggttcacgaaaatctacgttaacacttgtcttagtggttgatccgttaggactttaattggatgttcctggaaatatggtcgtaatttgcgagatatatgaatgaggcataatgcacgtttttcaagaggggaatatctcgattttgctcccagtaaccttttactaacatagtaaacaggttgctggtattttccctcttctcgcactaaggctgcactaatggcatgctccgagacagctaaataaaggtctaaaatttctccagttattggtttggccaaaactggaggtgttgataaatgtttctttattgctttaaaatcttcctcacattcttctgtccattcaaatatcttattgcttcgtaaaacattaaaaatggatggcatttatctgttgattttgagatgaatctgtttaatgctgccattcttcttgtcaaagctttaacttctttcgtctttgttggagatggcatcttgattagggccttgatttttttgggttagtttcaattcctctcgcatttactatgaagccaagaaattttcctgaggaaatcccaaaagagcattgcttcagattaagcttcatatatattttctaagtatctcaaagcattctacaaagtccttagtgtgatctttaccttttattgaattcaccaacatatcatcaacgtagacttccatattttgtctgatttggttctcaaacatgccattcaccagtcgttgatactgttggaatatcttttacca

SEQ ID NO: 50396 - DNA, 1649 bp, Cannabis sativa
tagtgggttacgttttgtaattcgaaaagccaatatgatggcctattatgctttgaaaaacaaagtttgtaataggtagagtggagtgtcacccccttgtgctcatcatgtaattgtgacttgttatttctttgtaatcttttagttgttcaatgaatttcatttctccaataaaaaaaaagtaatgtttccttacattcggaccaaatccacagcttatatatatgattatccaggtcgatatccacgtcgatattctgaccaaatccacagcttatatacatgactcatgtttttttatttttttttttgatttgtttacacaagctagctaggtggggtagtttaatttgaagccatcgattattgactcgagaaatattatatgtgatagtatataccaataacatttcgaacattgttaattgtttaatcaacgtcgtataagatggccaaaatagttttatttataagaattagtcaatttctaagaatgtgtaataagtaatatatataattaatttcattatttaagtggcctttagttatgagaaataaaaatataaaaatagtaatatgaatgagaatgagaataataatagtatggaataaaatttaaaatgcataaaaacattattaaatattttctcatgttacaacatggaatgatcttttcctttattttaaaatagaataggttttctagtaaaatagtagaaaaagtattttattagaatattattccaatccattaagatgcaattaaacaaaataataaaataaaaattatttccttctatttcattttattttattactttcaaacaaatatcacctattacattatttgatgcacagtgatacatgtgcatatacgtctctttttaaattcttttttgccattccatgtatattttatttttgtaaaaagcacatgcatatagatttttatttatttattgaaatggatgcacatatgaatgtagtatatatatatatatatataaatataaattataaattatggttcattaaacatatactttgttttgttttttttttatttattaaacgtcatttgtcgtagccaagatagatcggtgacgaatctattcatcagaaaactttttagtttggatagaagaaataatactttattttctagaaaatgatagatagaaaagttgacaaaatcagttaacttgtgacttcttgattgttcattaaaaataattaaaaataaatcaatatgttttttctcagccacatacattactttattattaatccattactattttgcttaaaaaaattgaaaaaaaatacatacattagtatgatttaataatctttttgactgtcatctcaaaaaaaaaaaaaaaaaaaaaccttgttgactgtcaaaccataaaaaataatgtcaacacaagcctactcaaatttgacgcaaattgatttaaaataaaagataattattttttgaacagaattattatgatttttttggttttcacttttgttttttaagggtttacagaattattattgattactaatatttatataatgtcagattttatataaattgtaatacaatcctaaaacaacttctctttcaaaataagaattatattaacactgcatttttt

SEQ ID NO: 50397 - DNA, 1541 bp, Cannabis sativa
ttagtagatcttatgaagtagatcttatgatttttattttatgatttttattttttttttaaaaaaaataactatcaaaatttcaaatgagaaaatttattaattaattattcaccaagaacaatagtataaaacagagaaaaaaaatattttgttcatgcgataaaaatagaatgtttctattaataatttagtggtgattaggaataaaataagcttctatcaataaaccttttctatcatcatatttagcataacatatatagggatatgattttgtcccgtactttcacagaatgtatttcgtggaacattagattggtctcagggtacattaaatgagtgtcgtttctactttttaaccctaattactcctagatcaatctcagttgtcagatcaaataactccctcatctgacgactgtcgtacatcacggattacaatccgtgaaagtacaataacgggacaaatgtaatccgtgaaagtacaataacaggacaaaatcatatcccaacatatatatgcatataaataaaagaagaaacagtataaaataaagatagaaaaaatacattaatatattagaaggcttctatcgataacttattgacggtaagagtcgtaagaatagaagatttatgcaataaacctattctatcaccatatcttcaaccttacatcataatattgtgactttttccttcaaccttctatatcacaatattgtgacttttttcttctgagacattaagcctattcaaatcatgaaacaataattttatgagtgagataaataatgatttagagtttgcatattaaaaagaaaaaaaatgaagaagaaaaagaggagtgtgactaagagaaaaaaagaaaaagaaatatttttttaggtttaggtcaaatattttaggctaatttatagcaatatataataatatatgataggtttgtttagatttagacatttagttattttttataaaaaataataaaaaagagaaatctttagtttaccgttaatatattatacatatataaaaaaagttattttaaaagttattgaatacatatacaatcattatttttttttatatataatttagatagagatattttgttttaaatataattgttatttttttttatgtatttattatgtagcttagatagagatattttgtgttaacgcaaatttttgtttacctgatatgagcttaaacggtaataaacttgcacaggaaaataaaaacagtaaagaaaagagggtgaacacaaagatattttttacgtagttttgcaatcaaaattttgcatagtccacgaatcaattttattagatttttgatagcctttttctcttatgaatttttcgtccctttttcagtctagacttgtctctatttataatttcatagcccgaaagttaattacagagttgactgatatctttacgacaattatcccttgaaatcgtgggatttgattaccatatcacgaaaaataaatcctcttttttttagtggtgggtacctcaattgtg

SEQ ID NO: 50398 - DNA, 917 bp, Cannabis sativa
accttggattaaacttcttgaattcagctaaattacccttgaaaattggaagaagttgggatgaattcttgctggtcctcttgtggcccaatggttaaaaagaaagcaagagatggttcttctctttacactaggttttgtttaatcacttgattttcccttgattttctagctaaagatgattaaaaatctaaaatgagaccttgtctccttagggttcacgaaagaatgagagagtaaggaaaagagaacttgattttcatgcttatccactaaaatattactattcctaattaataaaaacaaaatcaaattatacttaacaatcctcacttaaaacactaaaaacaaaataagaaccttaaattaaatagaattcccatttttcccttcactttacacccaagcaaacttaaggcttaggggtaaaatggtcatatatcatcaccttgcctaaactcgatactccacatagtgacatgtttatctcattaaataaaggttttaaactcactcatgtgactctaatgaccatccatcacatttttcatcgttaccgaacaaaagtcatgaaaattgtaaatgtcatacatatcaagaataatacacttagagtttaataaaatctccaaaattgagaaattataattctaatgctcatttctaaaaatggggcccacaacataattattcatatatagttataaaagaaagataattaatgctaattgccctactaatctatattttaatcatgtggtcattacaattatcctcctgttaaaagaatttcgtcctcaaaatttaacttgaacaactctggatattgagccctcataccggactctagctcctaggtggtttcctccaccttactgttcttccagagtaccttgaccaacgatatggtcttattc

SEQ ID NO: 50399 - DNA, 1246 bp, Cannabis sativa
cacacaagcagagaaatcttcaaacctcaaattatactaaaataggaaaaatctatatatcacatgctggcttactcataagttgaaacatatagctcgcaaaaaatataaacacaaaacaaagattttattggagtgattctgtcatgatagataaattcatattttagttttgaattaccatgcaaaaaaaatcgttatgagtcgttagatttaataagtttattttttttctatatatatacaaaaaaagtttcatcttcttttttccatataagggaaatcattaggctgactatgaaagaattaaggcgtacgttatttatttatttgtatagttttagtattttgagccagttgtgaatcgtaattaaagcacagttacccttaacaagctcaatcaatgtatgcaagaacgatgctaacaatagtaactttaggacacaatcaagcagagcccataagtttactctcttaaaaaacacggcaattcagatcaatccagccttcaaattgacaaattgggtacctttctttacagcctataaatcttaatgcttctattttctaattatagtataaaaaatcaaccctttaatttcccattaaaaaaaaaaagaaaaagaaaaaacagtgcccaggaaaaaaggtgacagtaacaataaagagatatgcaaatacgaaccaccatggataccgaacggcccggtggagcttgaggacgagcaaaatggagaaggtgaagagtaaaccatgggctaccaaagcgtgcagagacttacccacccgcctccacgtcatcactctcctctgacccaacattttcagaaccagcttcaaagaaaaagcgaaactctctctgtatatctataaatatatatatatatatatatctatatatgtacaaacgcacaaactaaattggtgcaatttcgcgaaagagtatgacaaagaaggaaaaaagtgaaaaaaaaaaaaaaaaaaaggtcttcggtgatttcaataagggaaaaacaaaagtgagccgttcgatgagcagaagggagttccttccgaacgatcaaaatttcgctttcaaataccttttacaagaaatcaagtttcttaatttgatggataaagggacgttttggaccaaaataccctcggaaaagatcaaaggaatagtatttcttttttctgaaagaggaatagtattattgggggtgtgttctgtgttgtttatagagatggaaattggtcggtt

SEQ ID NO: 50400 - DNA, 1998 bp, Cannabis sativa
aaaataaaaataacaaatttaaagaaaaaaaaatgtatataaagaaacatataattttattttagattgtaattttcttatattaaaaatagaatatacatttaacttattaaattttgaaatatatttatatcatatgtgttagatttttaaattcatatcttttacactaagatattaaaatatgtgtggattgaatttgatcggttacttttacatatcaatcaacatccaatctacacaagtttgaatattagatttttcaatcaaatcaaatctgcacaagtatgaatatctgcactttgcgaattagattgaattgcgtatcttatgaacactcctagaattatgattagtcactatagaattatagattgacttcgaggactccagaatgggtatttgaaaagggtccctagccctgctccaagttgacttcgaggactccgaaatgggtatttggatgctgtagcaagttgtttccaagtcaacatcctttaatattttgaataaagaagaatccaagtctgaagcctagaaactgaaaggagtcgaaatgaacccctagaagctaacttaggcacctagggtttcacccagcggccaggttgacaacctggctaagctttcgattttcaagactgtcttagtatagatgacccaaaatttgcacttagacatgaattggacatgttatgaacatatttgaggcatcgaaatctgatttggagcaacttccaaaattcacttaagtgctcaaggtgcctagggcaccaggtgcacccaacgcccaggttaacattttgtcaacttgggcgcctcttatcaccaaactgaaagatgtttttcgagcattttcttcgccttcatccaaaacgagaaaacaagttcttttagggaaaaaaccaatcaacctagagggaaaaatagggaccagcgggccaagttcacataggtgttaggaacctgcgcttaggttgatattttgtcaacatgggccacttacatctagaattatgacgaaatcttccgaggatattctctattttcataaataattaagatacaagtgctcacattagtcaaacgaagccatcttgtggtaaaaacaaggaccaagtgcccagggtgatcttgtgttgggcccctgtgcccaggttggtattttgtcagtcaacctggctgggtcattcatttccaaccaaggagttttttttttttttttcaaaaagtctcccggtcattttttttcgtcatcataaataatgaggatacaagtaaactcggggagaaaacaagaatcttgacgggccaagaactgacccaacgccaggctgataatcaacttagtgcgttggaatctgtcactcaaatgcaaattctactctgggcattctctcagcatggtataaaataggataagagacctcttcctcaattttgaagactttggaatcatcaaaatgacatcttggaggacccaaaagcttcgaaaagggcacccatcgcctaagttgaaaagtatgatgacctggtgcgattgtttctatttatatgattctgattccgtcttgagcgttcgtctagtattccataacaaacgagagctataaactcagacaagtcaaattcacaacttcataattttactttttcagcaaagtgacttagtcgcaaatcgggtagtttcgaatcacccgattctgcgaaacagcaacatctttgaaaattggtgaagggcttcaccagaacaaagaaattaactaagttatgtaaaaatatcatttagacatcaaaaaatacattgccaacacgtttttccattcaccgagcgtctacgttgacgtcatatgtcaatttgggcattagtatcagaacaacttttaataaaacaagcattactcattcaatattaattcgattgacatgattcaacttgtattttaaaattattttaataaacaaaacattacagataatatttgattcaattaatac

SEQ ID NO: 50401 - DNA, 2324 bp, Cannabis sativa
aatgaagaatcaatatatatatatgtatattttttttttcttttcaaaaaaaaaaatatatatatatatatattgattcttcattttatatttatctccatgtggacttaagtgtagaggtggctacaaactctaaaaacttgagtgtttgaattgtcattggtgtatttgttgaatttgtgtatgtggggtgttactacttacaggattatttgcttggaaagtataaatagccattaagaaagtacttttaatgtaaatcgaccatttatttttcttgcgggagtattattgctttgtttccctcatgctactaaaaagttttagtttgtctatctcttgtttgtctatagatccaacaacagtttgaaagtacatgtaagaccacatattttcaaaaaattgtattgtagtttctttaatagatttgagtgttatatgagtaaattgagtctcatcagttcagtttgaataagagattataagagcactcttcagttaaaggactaaggttgttcacctttaaagaacttaagaaatacaattgtttttcagttgcgaatgacaatattggattctgaggatatggagaaggttaattgtttctttggttattagtgtatgttaggtaagaggaagaagtaagttaatatatattagaatgggttgggatgaggtgattgttttagtataaaatcttttataagacgaaagtgcttagataattaatttcaagacattattatgaaaccaattgcatttgataaaattatattgtattcatggaattgtgagaagaaaatattagttatattattatttggatgaaaatatggataaattaacttattcaatcacacttactctttgacacgaaactatacgtcttactgcttattttcatttttctaataattactaccaattgtataggagcactctgaacatgaagccacaaaacaaattatatgtttgattcaaatatggaacaggtagcagtacacactataatgatgatgatgatatctatattctatgaatattcactccacatatatgtctgtattctgaaaccgtttttcagtttgtagtaatcctataatatgaatcgagtaatatcactaacctaagacaaacaaagaacaagttgttgaactcaaaaattatacacacaaaaatcgagtaacatcactaacctaagtataaaatggtgcaagaagcagagctcaaaacaacaatggtatggctgttgtttttgcagctgggtttttgcatactgatttacacatttttttgtgttcttttatttttctcgctctccatatatagatggctctctcttcttaatgattagatataatgaactttagtgtagtttttggaaatgaaatcatagtggagttggttgtacatgaagtctaccttatttgcttcatcaaatggtgataccataatagaagttcatgctcatacagttaaagtcataataaatggcaaaatatattgtattatgatgactcaattgcaactaatggaaccaaaaaatttcttattggataatttttttattttaatttctcaataacgtaatttaatatatttataatttttagtttactttcttatgactttgagtagtcagtgtatagtttgaatgaagttaacatgtctaccaaaaagaaaattaaagattaaagtctattgtctttgcttaaatttaattgtctggactatgttatttttagtaacatgaattctttcataatttttagcaacatgagtggatcatcgtcaaacatgagaaaacgtaattggtatgcaaatatttcaaaggagcaacgagaggcaatacaaaaaaaaaaagacgtgatgcttatacttccaagaaactttgtacggttagtttatttttctcttgtttagtgctcctttccatattaattttatatcaatttcttttaggttccagttctagttttgtgtcatcaaatttaccttcaaatatcatttctccttctgtagaaacattaaaagatattgttactgttgataaatctgtggcatcaagtttaccttcaaaaattatatctccttctgtagtagcattaaaagatattgttactactgttgacatattaccatcagcgcctaactgttatttctgtcacgcaaaaaaggtttcatcgtgaaccaaaaggtttttgttgtagcaatggagaagtttccttaactcctaatggttcatgtcaaaaactatacactttattcacatcttcatctgtagaggcaaaatatttccaaatatattctcgaacgtataataa

SEQ ID NO: 50402 - DNA, 1344 bp, Cannabis sativa
ggtaaaataattcccaacataaacttgcttggaaccttgccactcatgaggataggccttgggtgaattgtttgctcaaaaagtactgcaaccatgaaagtttctggagtgtcaagaagaaaagcaatgattctttccaatggaaatgtattctggacagtagagaaacgattcttaaaggcaccatcagagttgcggcctcaggacattccatcagcttttggcaccaaccgtggatcccttatttggaataccctgagtttgtagaattgatgaacagtctaaggggtagaggattcactataaagaccctgtgagatgtttctattggcaacaagtggaatgaggaattgattgagcaggtttttggccctgaattggggattcagatcactaatattcctagaattccttccccttttcctgatcaggtctattggaagagcaatcaaagtggaaaattctctgtcaaagatgattatcgtgtggacaatgcatcaaggtttgacataggaaaaaagatatggaaatggatttggggaagtgagttcatccgagagtatcagtgatgttatggcgagttttgaatgaagcaatccccaccaagaaccggttaccctttctaaatgacaaagcctgcaatttgtgtgatactgaagtggagagtgccttccatctattctggcactgtagtttttctagagcaatctggtttggtgggattttttccattcgaactgagtgtattagtgctgataaattgatcactttgtttgaaaaagtgttagatttacaaggtgatgttcacagaactgatctgctcaactactttgggtgtgtttttactgaaatctagcatcaaaggaatgctctttgtattcgaaattaagcagttaatgttgcagtgactctgcacagaattgggaagaggtttctcgagcttcagaacatctccaacagtcttaaaaggagtgagtttacaatgccaggtccatctactttgaagacaacaacgattaccttcagtgcagagcacaggcgcttttccaatgtcattttttctgatgcttcatggacaaatgatgatgcaggcatatcagttgtatgtgttgatattcataatgggagctggtctattcagtcccagaagattcaggctcaatcggctttagaagcagaatttcgagctatttttcttgctctctccagagctactgaactgggatggcaagaagttcatatcctctctgactcaagcattgctatcaaagctctttctactccagggggatgtccagattggaagtttgttaatgttttctactcaattataaacttgtcaaa

SEQ ID NO: 50403 - DNA, 1276 bp, Cannabis sativa
gatcataagtcgagaaatctgatctgatccgagtatctgatctagcgggacggggcgggacagatccttacatgatctggaccaggtcggatcatagtcggatcaaatccgatccaatccatttacactcctaatttaggggacattcatacctttgatgttagaatatcgggtttaagcacatttatgatattaggccattttacctttaagtcatttaattactaaagtttgagctaaggttaattttgttattttattttggtgatataatggattatttaactaagcttgcagctgaccattattggctaagagatacatttaaaattaaatatattttcatcagtttagttgatcgatctataattattcaataattagattaatttataattttaattatataccatgatttgtaaatattatttgcttactatctataattttttttttaattggatacacaaaattccaaaatttattcaatcatcatgaaatcctggagcaacattaacaacaaaactaaataaagacactattctgtagaagctaataatcattacaaattaaaaataattacttttagtgacaatatattagtatatattagtgataatataattttttttatgacaaaatataatttttattcacaacaaaaagttattatgactaaaacataatatttagatacaagttgtcaataatttagttttagccacaaattgtgactaaaaatacatttaatcacaacaaattgtaattttggtgacaaataccttttagccagagacattttagtaacaatataagaaaaatattttataattagtcacaattttttttacaatcataaattaattttattgtgactaaaagtaaaaaattttgtagtgtattataaagtagcttttttttttttaagatgaattaaaagtagcttaaaccacaatcaaactatctatttctaaaactacttgattccaagctctttatttgtcttactccaagcgttaattactatacttattttcatttaacactttagcgcaattattttgagaaattgtttttagccattaaatatactaatgaattcagtccatatataataaataaatatttctattccaatatttatagaaaggacaacagttctgattcatacaatttaaaaaaaataaaaaataaataaaaaaattatggatgtgatgatgaatatcatgatgtggatgatctgtacatggtagtactggacgaaagtataacagct

SEQ ID NO: 50404 - DNA, 1303 bp, Cannabis sativa
catggaattttaggcaatgcaatattcaactataaaattactaacatgcttcatgtgatacattttctaattaaaatgaattactaaacaagtaaaggcttattgaaccgtgagttgagcttgtctctgatgttgattatacatatcttgatggtcttcggtaaataacctggcagctctaataccaaattgtaacacccattttacttaaacatgctacactgatattctaattgatgtgcataccttttctaatcaaacgtgttgacctcatatttagccaactgagagcgaagtcatatttatgactaaaattaccgcgtgtaaacaatgagaacaagtaaataaaaaggacataacaattctatagaggtttggctccctttgttagcaagtaatgacctactccccttttggttgcattgatattagtgataacacaactcagatcataagtgttgtggattctaaaatggctctcttaagattacaatagtgagaataagaggctaatctcaagtggatgagatgtgggagacttagtctctactacactgctaatggcatgtagaatagaaggtgagctagggttttcagtgcttgaactctatgacttaagagttagagcttcaaagcttaagacttagaacttagagcatagaacttaaagattttagatttagttaaatgctctatatataggagagagcataaaagagatagtaggttgatatcccttaaaatgaggagatatcacctattttttactcataaaattagtaacaaaaaatatgttaattaatcctcaagaataggtaaataactgaagttaatctcctatttgtgtggggtttaaagcccaatttgtaattggaagtctcatacaggctgaaagctgtagaggcacaaaaagtgcctgcgagaagagagactggtcggccttcccattgctggacgctagctcacctatgttagaaatagggccagccaggggtggtctagtcagacccccttagttaactagttcgttgcctctttttcatgcttaagtatttggactccccatcaagtggtacgttggccatggttacttggccttcttgctgacaagttgtactccacatgtcatcaatcttgtctatgtggacataccccctatgtccctatgtggacgtctgtacagattaggactttccagcttcagttttaagtgttgaagtcttaaccaggcaggttttatataacaacttcagttatgaaatattttctcttttcggctgctcacgttccccaatagggaact

SEQ ID NO: 50405 - DNA, 737 bp, Cannabis sativa
gtacaacctaaaagcaccaataccaaacgtcttaaatccctcctctatacatgtatataaagaattacaaagagttaaaccaactcttatctttttgattgaccctttttggctaaaccaatacaattctttggctaacagtttctttgactcttccaataatatgtgccatctcttcttttttttccatgcatgccatagcagctcatttggagctctccatatatgatacactataagttggccaagacatacatagttaagttaaggaaataatattttgtggttagaagcacggtcaatatgtaccaagaattattcgaaattatacaaccatcgatcaatagtaccttttattatttttttagttaaaaagttaaaataaaaaaactatttttattgttcttgctcgaattataaaaaattattttataaaataataaaagagtaataatatttttgattaaaatactattataaatgttgacaaaaaaatagggagcttcaagagagttttttttttattattattatagaaaactattttttgtatggatagaactctttttttgagtctaactttttattttaactaatgagcgtgttaagagagcatggttgaaagtgctcttaaaaaaaaaaaaatcaacgactaaagattgctttagtgagttccattttggtgaactattggtagattgcactcgacaagagtgtgagcaggacaaccatacata

SEQ ID NO: 50406 - DNA, 697 bp, Cannabis sativa
atctctttcccaacccttttagctataacaatcttagaaattacatgcgagccatagttaattaatatacttattaatgataattgatttaatattaaaatcaatttgtagttaattgattgcaacaaaaaaaaaaaattgtagttgaatgttgattgttcaaaaaacaattgtagttaattgacaaaatattaattatttaatttcacaaagtcacctaatttaattttttattaacataattttattttctaattaattgtgaaatattacaataattaattgtggtgattattttaataaaaacgcaattggaaaactatggtgcaattagatttgagtataattatagtttattacataatttaacataattttgtataattgaaagtaattaaaaaaatatcattttcttgtataattattaattattttactaaattaaatatttaaaatacattcatctcatatctaaacacattgtattttataatacagtgtaattagtatgtgtaaaaggcaccctaaaaaatatcacatatatattgaatatattattggtctggcaactcatattcatctttctcttttattttgatatttacaaaattatgcccccttaactttaatttatatcgatttgtgtctcttaaaatttcatccaagttagattttttttttttaataaaattagaca

SEQ ID NO: 50407 - DNA, 962 bp, Cannabis sativa
gacaatttttcttggcatttaacagcaattcactaacagaaatgaggcttggataattttactgccaaaaaatcagttgtggctgtcagaaattatatagttcaggtagttttgctactaatatatccctactatttatataaaaagtattcagtttatttggaccggaggtcttgaatgatataggttttgataaattttaattatatagattttgataaattaatttatatttttttagtaatttggtccttaaaatatataatttttgacaaatttatcctcaaatattatttttttcacaaattattccccaattttttttttgacaaaattaatttctactcttaaataatagtatttttgttgattttttttttttttttgtgttactttaaatatttttatatcaatatatattgtcaaatattaaaaatatattttttttattatacatatattttttaaaaagaactaaaaaaagcttaaataaataaataaataaagtgttttaattacttaaagtaaattatgttttaagattagctgttaacttatgctcaataagaaatacatatgcaaaatttaaataattaacaaatataatatgtaaaattaaaaaaattattcaaattataatataaatattcataaataactgataacatataaatacttttaatatcaaaataaataatattaatagaagcttaagaatttatatagggctaatatataaaataattacataatttttatttttcataaaaaaaaagtgatggggctaatgtcccctttacgtattatgagatttaccaatgtttatgctctttttttcttttttatccgagtttatattctgtttttcataatgataaatatatctatcctatataaagtgtgcctatataactaaattcttggtttatgagaaattaatgggtaactttttatttatattt

SEQ ID NO: 50408 - DNA, 1143 bp, Cannabis sativa
ataatttatttttgtttaatagatatatttttaaaaaaatatgaattggaagaaaaaaaactaaaaaaacctaatataattaaagatatatatagtttatttaaaataaaaaattaataaaagagggtatatttataaatttttaaggtccaaatataccccgaatttttataaattttttaagaattaaccaagaaagttaaaatattacaaagatacgaactatggtttctaaatattttttcacaaaatatttataatatgttgttttcatattgctttctaagaatcataaaaaaaaatgtaactagaaattataaaagaaaatgtaaaataattaagtaaaaatatttaaatatccaaaaatatgtcatgttgagcaccttatgaaaaatcactattagctccttagaaacatgtgaggtactacactactactaccccttcaattcttaattttaatataatttttaatatataattattatttatttataactaaataaatttataatttttttgctgaaaataaatgttttccttttgtttgttatgattttcttttgtttacattgctcttttgttttttttttcttaggagttaaggaatcttaccaaatggaatttctattatttcttgtttttattttttcttcttaatttatatatctctgacacgtttattacacagtattcagaattagaataaattaattaaataaaaaataataaaaattaatatttgtaatatattatttactaaaattatttagaaataaaataataataatttattttatttattttatctagaaacataattaaaatacttaaattgattaaatttctcttttaaattaaactataatacataataattattttataaacatattttaaaagataaaattattattatatttaatattatcaaataaaataaaaaaaatacaatacctaatgattaagaaatccttttaagaaaaagcttatatagacagctagccacttatttcattttgttaacataataaacctttttctcttttttttgaaattcattcatatcataaacaaactattaataaattgcattaattcaagcttttaaattgaaccaagtaataatacaggcaagataca

SEQ ID NO: 50409 - DNA, 1286 bp, Cannabis sativa
  modified_base (795)..(812): a, c, t, g, unknown or other
aacttttgcaaaacagagggtccaaaatggtatttaccctataaaataatcgaaaataatattttattatgctgtttactaaactattcggaaagaaaactacaattatattattttgtttagataactagaaatagtaatcggaatgttttaatttgataaaattgtcattattagaacatgtaattatttttagtttataaatttttaaagggcatatttatttttttcatttttaaaattaaaattaaattaaattaagttaaaaaaggaaaggtattccttataaaaataggaagataactttttcttttattttctacctgacctctactacttttcccctttccaaaatttaataagtaattgtataggaatcaatacatactattcttctcattccctttaataaaataatatttctaattttaataatatatgggagccttaacaaacttttttgtttcaagttatattccacctaatattaatatacgtaaaaatacaattatgtcactaattattgaacaatacagtttagccacactaataaaaattatttttacaattagttacactgccaatgcgtctcatgattaaccacaaattggctattttttttttttccagagttaaatatgatataaatatttaagtttaatttacaattataaataaatatttaaatttaattttttatagtaataagaaatctcgttacctgactgttaagcgttaagtaatttactactaaacaatttttaattagttcacatcattaaatttttatttttnnnnnnnnnnnnnnnnnntaaatataccaataaaaaataaatatttaatggtgagatatctacagagttctacaaatataatttaggtataccactaaaaattaaatttaaatatttatttacaattaaaaattaaacaatctttatcctgcaaattattttttttaatacatttctatccatttttatattttgaaagtatccctatcaatatttagtttacgcacattgacatgattcatcatatttttgaacctttatatattcttttcttatcttttttttttaaaaaaatccttgtcattataatgatcattcatcatcctaacatattatatgcattttcataagaagactaaattgcacaagtggtggcatgcttcatttatcacaaaatgttttatccccatctacatattataattatacatatatatagagatagatgaccatacatatcatttcaatagttaactatgagattatctaatt

SEQ ID NO: 50410 - DNA, 1659 bp, Cannabis sativa
caagctatcccaagctacttcatgagttgcttctgtcttccaaaaaaaattggtcaagagtctccactccttggcggccaatttttggtggggtgatacaaaagaaaataaaaagatacattgaagtacttgggataaactttgtagaccgaaagaagaggggggtttaggattccgaagtctaatggagttcaaccaagccttgctagccaaacaagggtggcggctaatacacaaactgaatactctcttaactaaggtgttaaaaaattgctactacccggagtcaaatttcctcacggccaaatgccctcaaggagcttctagcatatggaaaggaataatttggggaagacaaataattcaagagggggctcgttggagaattggaaatggtcgacacactcgcatttgggaagataaatggattcctaggcacaatggaacaattttatatcggcatctgaggttggctcctaactctacaatcaacaagttgttaaatgaagatggtgaatgggataaagaggctatacatacatactttcattacaaggatgtcccttggattttgggcacccccgtgaacatatatatggaggattctctcatatggccgttcacatcaaacggtgagtatgtggttagaagtggatatagagtagctcgggaattacacctcagtcctacccgttgttcgaacatggaacaaacacatgagtggtggaaaaaatggtggcaacttaaccttccccctcggatcaagttgtttggttggaagctatgtcataattggctcccagctaaacttaatttgactcacaggggaatgaagattgacactacttgtgatatgtgtggtaggtatatagaatccttaactcatgctttgtggtcttgtaataaggcgaaacaggtgtggaagctgctgcctttctaaaaacacatcaaagatagcaaaggtcagtccatgtttgatattctaatggaattcaacaacaagttatcaaaagtcgagtttgaggaagtaattacgattctttgggccatttgggaaaacagaaatcgaaaatggaataagaagcaagtcatgaatggagcaaggctaatagattgggttttcaatagctattccccgcaaatcactaatccgaagcaaggggatatcactccagaaatccacaaagatggcacctggttatctcctcccgaaggtatggtttgtgttcattgtgatgctgctgtcattccaggtcaggtgggcgttggtttggggttcgtttggagagattggaatggcaacactctctcggctgggatgagttttctccctgctatttgcccggcgattatggctgaagcagaagcaattgctgctgctttgaaggcgtccccaataggtcagaatcaggcctttgaaataagaactgattgcaaattgctggtggaaagtttcaaggtcaaggaaaatacattaagtgatgttaatatagttatcaacaagataaagaggcaccagatttttcccctttgtacaaagctcatttttgttacgagaaagaataatgaagtagcccataggctagcaaagaaaagtcttgtgtaacatccccgcttcaagcctccattgggccattacacccacggactaatggctct

SEQ ID NO: 50411 - DNA, 1111 bp, Cannabis sativa
gattttcttaatgtggattccaatttcttattttatttttggaaaagttttgatgtataacattaattgatttaagtttcttatgaatttgtgttttatttgcacgtataaactttactattgctgagcctgactaatctttcatttatattttaacaggaagttcgtggtagtaccaaagtccctgagtcagatatagttcaagcatgcagaaaatttagtatttgagatttttcttaataaataaaatataaagatcaagcacttttcatatgcgttcttggaattttattcactttttttttatatgcataccacacaattatcattccagtggatggtttttgaaggaataattcttgtctaattcccattatatctttgttggttcagcttctggaagagaggcagagcataaacgttttccgatttctgcaagcaattaacaggtaatatacttttttaagagttgttatctttttcttggactggcaattggtatatcgaattaacattatctttcttttaggagatctgacattacggaagtctgtgtggatggaatacatcactttcttaaagtcattgctggttcgttcttatctctctgatttctgactttaattatagacctcacaagattgaacatgatacatatcttgcttctattaatcagttttgttgttcgaatgagacgattgcaggcatcacatccataggaagagtcattacgaatgattgatgtatcaaaaagccattgtcactcctgtgcatcacattaaacaaatttggagggactatgagaattttgaaaattcggttagtcgacaactggtaatttgttggtttctattggttggtacttttgtttagcattggttggcaaatggcatctttaattagacatatgatttatatcttggtagttttagctgtataatggaggcaagtacaatatttaaggttcgatcttatgcccaaagcctagatctgatatttacctaagtattcattgtgtaaacatattggaggatattataataaaatcctataatctttagagatttggagagtatatggcatgaatgtatactggaatttcacaaggtgt

SEQ ID NO: 50412 - DNA, 1294 bp, Cannabis sativa
  modified_base (1230)..(1236): a, c, t, g, unknown or other
aagtgggaagcttgaacacagacatggcataggaaggtatggactgaatgacaacttttaaaagaatttctctagcccccttggagaaaagtttacccttccacttgtcaagataggtccaaattccatccttaatcagatttatggtagaccaaggtacttatccaaactgttggtggctggaatttttaagtaatcttgaatgagtgtttcgcaagtgagggaggtgttgggagagaagaaaataaagaattttttgaacttcacaagttgcatcgagcctaattcataggtctctaaggattcttttatagcattacaggcttgaatgttggacctgcaaaaaaggatgctatcatcagcaaagagaagataggagattcttggggcagttctggcaattttaattcctactgcattttcaatcaattcagcttgccttaggagcatggataggccttcagagcaaaggagaaagaaataaggggacattgggtctccttgccttatgccccaagtgggaacaacattgtcaagggcttggccattgatgttgaatttgaaggtgacagtggtgagacagttcatgaccaaggaagtaaacttggcagggaatccaagtttcaacataattttattaaggaaaggccactccactctgtcaaacgctttggccatatcaagcttgactgccatccaattagtttttcctatttttcttcccttgatggaatgcgaaagttcttgggctataagaatgagccttcctttaaggaaggcgctttgatttggatagaaaggggttgaggacatgtttcagtctattagccggaatcttagaaacaattttgtaaattgtggtgcaaaggctaataggcctaatatcacggagagttgagggagttctaacctttgggataagggtgataatagttgtattaaaacctgagaaatcagctccatgattaaggatactcaacactgtatcagtcacgatactgctcataatatcccagttctttaataaaactgattattgaatccattaactccaggggctttttcaggggccatgtggaacagggcatccctaacttcattaggggagaaggtttgattaaggaattgacattgttcagaaaaaagctgactagtaattccagtgatggcatgatccatggcactgtcgtttgggcttttagatgtgaagagattgttgggttttatgcnnnnnnnaaaactctatttcaatgtaatccagactattcaatatcaataaagaaacataagtatt

SEQ ID NO: 50413 - DNA, 1586 bp, Cannabis sativa
  modified_base (468)..(475): a, c, t, g, unknown or other
cacctaaacaaacttcattccataaggctgcaaaaagagaaggacaaacagtgagtgaggtgcaatttgtccccatacctttgtagggccacctctatataaccataagcactactatacattatatgaatatttatatatatatggtgttactgttagatgttaatatttttaaataatttatggtatcaaaaatggagttcaaaataaccatttgcatgtgcacaaataaaaataaggcatttcagtacactttttttttttttttttttttttttttaatcataataaaatttgtagttattaaaagtaaaaaagttataactaattataaatcattatttatatgttgtgaataaaaagttcgtgtcacaaaaattacaatttatcgtgattaaatgtatttttagttacaatatatgcttgtaactaaaattaaattaatgacaacttgtatctaaatactannnnnnnntcacaaataattttttgttgtgattaaaaagataatgttttttttttttatagtgttgtacaattaaactttttaataaaattatttttagtactataaattgtttaatattattctacatattataactataatatgagatttgtgatataaaaaaaattgagttataattaaaaacagaaaaaggcatgttgggcaaatatatgatatggttttaatggtccaatattaaaaaaagttgaaaattggcttgtttttaaattgttcttcttccaccaatggcaacttggttttgattatatgattaagtaacgcacgctttcatgtgggctttgtctctcttactagctaataccctttttgagctttattcttgtttatatttatatatataagaatcatatataataatgataagaagcaaattgtggttgtagtagtgttagaatacataatgggctaagcattatcccttttgtttcttggacttattaaggaaagttagatctagtctttgctttagggccactctcccaagtctcaatcaactatacaaaatgggccattttcctaatctttacaaaagttctcttatatcatatttttcatgtgttagtatatatgatgttgattactaaatgatctattacaatatttgttctagcttggaatttattataagtaattaattatatatttgatcaaacatgggctaattgagttggttgttatgggtcccttgtaagtgtgtcacaacttgcgtatagattagatataaaatatatatatatatatataaaaaaagagagagatatatataccaaattaaagggaaaactgttactatagccctagatgatgccatatgagtcatgagtgggggaaggatatgtctttctctttaagaaagaaactaattaaagaagtgaaattttcaagggcaacccatgtgacaacacaaatggaggaaaaaagagcatatagtttatattatatttttatatatctattctatataaagtgtgcttatataacagaatttcttggtttatgagaaattcatgggtaactttttatttatatttactaaaataataaaatattatttata

SEQ ID NO: 50414 - DNA, 1594 bp, Cannabis sativa
tttagatctatgaatgttatgaccgcataattttacaagtatatttttcattatgttggatattccgttagaaattaaatctacaaatacacattaatcttaaactcatgttaaataatcaagattattttatgaatcaataagataaaaaacacctgactacatgatattagatacgaaatgagattgtggatatatgatcttccataaactaatcttctctctatgaattctcactcaattgataagaatatagaaaaaaaaaaaaaagtggttgagattagtcttgggaccaaacctttatgttcgagtctcataaactataattaggtttactattaagtactacacattatgaagctcataccaaataagatgtttattggactaatttatttagaccacttatttagcccaatttagaatattaacttaaataaattatcttaatttgtaaaccagcatattgaattattaaaaaataatacaataatctcccacttgggctacaaattaataccaatatgataattacatttgataaccttatgtgtccacaaacttcctaattattctcaaaacatctcctttagacaatccagtccatctcctatacaaatatgagaccaaagcagccttcgttacatttatcgtaactagacccatcaacgatcaccatgtcaaatatattcaatgacataaatcaaatatggatgtgtaactggaaattatatgcaatgtgatcttaatcatgtctatttccaattggtcctttattccttagtgagatcaatacttagtctttcaaattttatgtcaaccacaattgaaagataacacattcagagcaataaagataataaaactatcaactttattttgtagaagactgaatctacttaaagtagtgtaactagtcaatcaataaaataactaatattgaaaataaactcccactaaaacaaaacattatcaaataaaataatacctctgtaagcaatatgctcatgaaagatcttgggtgtcaaaagtttagttagtgggtctgctagcaataagtttgatcttatgtactcaatagacattatcttactctgaactatatctttaacaactataaactttaatgcctatgtgtttagactttgataagcttctattgtcatctaaatataaaaatgctaatagattattcttatatacctttagcgatcttttaattctttacacaacctgtagtcaagtgataaaatgtcgcaccatattgtattattggttgcatcataacaagctatgaattctgttgccatgataggatgagctatgaatgtctacttagtactttttcatgatatagctcctccagacaacaagtagacataaccagaagtgaatctcttagttttttggcaacccacaacattagtgtcagaatactaaatgatctccaaattttctaacctccgataagtgagcatataatcatttattctttataattacttcatgacccatttggttgcctaagtatccattgtaacgccctaaataattaggcacgctacccaagtacttacgaaaccctaatccccta

SEQ ID NO: 50415 - DNA, 1102 bp, Cannabis sativa
ttctttgctgaatttactattgtatttagctattttatgtttgtgattttctgggtttgaatcgatttgacggattatttctcgggatatatttgttgctaggttgtgttcttcgtgttcttcatagaagaaccacgaagaaggtggctcgggttaaagggggtttagtttaatctgggctagagtttgttttctaagttgtatcttggcagttgctcttcatgttcttcagtgaagaacaacgaagaagggaggttcacggctagggtttcttttggtagctgttgtttatatgttttgagaagataaagatgcttatatatgtcaaatacattttagggtttctagtgtttaattaaaaacgacttgtagccctagggaaatggctgtcgtttggggagtttaaaccaggggtcaaactgtgggtttcattaggtaagaaaagtctaaattggccttggtttttttattcttcctttgttgtgtgtagggttattttaggaataaattcctacaattaagttttgtataatcaaaggacacttgctttgtatataaatgagtgatccaatatgaaatggaacatggcagaattccttgcaatagtggactaagcagtctgtgatctgactaaacctctataattctcttgtgttcattatatatttcagtacgtctgagtgtctattctttgaatactcaccattctaggtggacgtactcacacattttaattaataattatattttaatttgtttttggtgttgtcaaaattcctccaataataattttgatgtatattctcatctaaaattcttttgagggaagttaaagtcacgatgaataggtccatttgtggtcacgaagactttttcttatggtgcggtggaggttgtgaatccaagtactaggaaggcattcaaagtaaattgtcaaaattaaagtcgagttaacggtcgaagaacaaactgctgtgatctattttgttgatccgatgtatgtagaagaatgacgagatggagtcaagctatcgacgataaatttagcaaacttataagttattagttttatactactttgcaagacaattaatttttaagg

SEQ ID NO: 50416 - DNA, 778 bp, Cannabis sativa
tagggcataaaacccaacactaaggtcaagacttgaataccatgacctgagatatattctgaaccatattctatgagaagtattataatgaatttacctgtgctactaaggctgtgctgtaactcataagggcgccacatgtgtacttttataaattagtttttaataataaactactaatttaagagaaattgtggtttaattaaaaatttacaaaattacttattaaaatatatgttaaatccttctcaaaactttactgagtcgaggatcccctttcctatccagtgagctcaaaagacagtggggttgatatgtacatttgctgacaaacctctgatttgtgtctgatccacttttctcttttccttacctacaccaaaaagcactcgtgagtcacaaagactcagcacaaaaagtaggaaatacaaattcatgaatttaatgaaataataaccattaacaaccatacatttagatatatgattatataaaacattacgctatagaacaatttaattatttgtctaataagacaagctattcctgatacttcataaattatccatcaaccctcgtttctaacgagtcaactaatgtcactatcgttgcctaatgagacaatcgataaataaaaaatccaacaatggtttcagattagagttataattcttttgtgttaacatttattgttgggttttgtgccctaaataaaataaatttcaatataatcagattttctaattaataaagatcagaaactgcattttatgttgca

SEQ ID NO: 50417 - DNA, 1468 bp, Cannabis sativa
gcgttcgttgcagagaaatacaactggcagtagagttatgaagtgacaactctttaatatgcatggggcctgaggtgaatgatgattagatgccttgattcttccaatgagcattaaatgtagtctttccaactccccaatcgttcgatcattttgtgcttttgggctaacttgatctaggcctttaattttaaatttcatgagttggctttctctctataaataggtgccttttgtttttcttttttccatttatgaacttttcaaataaccctgcattcaaactttttggtaccctagttttccttaagacatagggtatttaattgcttaggtttctttccttcttttcttttccagtggttgacttgaacgacgagtttgacttggggggagtcaacattaaggaggtaagggttgaggtacctgcagaggggcctcaacaagaccctgccctcgaagctgtttcgaaagggaaaacaattaaaactaaagcaaatgagaaggaaaaagcctcaacttcatctccattgtttataatgatggaatctgagaaatggaccaaaacattaacaagttcatgtcatacgggatgatggagaacttattgacggaatcaggagtttgtaacatccctggatgaatatggaaaaggttatcatttgcgaaggagtttgcctcccggagcaccgacgggttcagcgcttggagttgggcccacattatgagtggggcacacttgcccttaaaaacttacttcctagagctctacgtaaaaactgggattgcttcgttccagttaatccctccatcttacaagcttttatctaggtggtatatcctgtgcaagatgcataagcttgaggttcccaattctgaggagatactatatttttatgttatgaaaccccaacctatgcatacaaataagaagaagattgggttttacaagctgtagaagtatctggaagcacatttccctaccaacttcacactgcgatctcctgaactctgagagtttggttcttctctacaggcttcctagtgaagagggtgtcaaacctctctctgcatttcaaaatacgaggtatagaattcttgcatcttcctttatttaatactcttcttcccctttttgcacttgtaactgatgagacctcttcttacccatggcagagcctgtgcctcggactccagagagtgaagagttaaagaaaaaattagccctgtacgactctatgacaaatcaagatctaaaagtggaaggcttagtcaccaccaaattgcttcgagagcacagactcattgccaggttccaaagtgttgatagcatctgcagtaggggcctcagttacgctaattggagattaaggaataaattatcgtcgagatctccaaaatcatgaagggggcccttgaagaggacaaacacttactggcgattgggcactctgccatctcaacccct

SEQ ID NO: 50418 - DNA, 1533 bp, Cannabis sativa
  modified_base (834)..(839): a, c, t, g, unknown or other
  modified_base (1065)..(1072): a, c, t, g, unknown or other
  modified_base (1318)..(1343): a, c, t, g, unknown or other
taatataaaactaaaagtgaatttcaattaatctcaacaccttaatatccatatcaagtgtagtatgtagtattatctttgtaataggatttgacatattatattcagtatcaaccttcttctccattaaattcttcttagtcacaaaatccaccactttgtgaaattcctatttatatgtttactcttctttgggttgtggattccttattgtttggtaataaaatatgtgttatcacaaagtaacactatcaattaatcgaagtcaagaataataccaaactgtggattctgaataattgtctagtaacctttagggctactttaatattcagtctgactagtagggttagatattctaaattggcttttacatttctctaaaaccactgctccatcccgaaagtaatcatcatctcagatgtagattttctagcattaatagaaatttaaaaatctgggttggtgctacctgaagggtttcataagcaccattcttatagactaacacagattctcttttattcttaaaatttatttgattgtcttctaatattcctatcttggattagactgatgcatgctcacgactctcattaaacaacaagtgtctggtctagtgcgtactaactcttacataagacctctttattgggctttgtgtcctaaataaaactctatttcaatttaatcttctatattcatttatcaataaagaaacagatttattttcattacttatttaatttgttatttggttcatgtgatcatttagttatttatttgattcataaattcatccaaatccagatcacattgatattcttgtttatnnnnnngtcaacacagtggaaagtaatcaaaattgtgtgattaaatgtattcctatgatttatcaatacacagggtttaactgatacgagaatctacaatgtagtttacttgcaccttaaataagtgacatttcctttctagggcattcgttaaagtaagcttgggttggatgtatggagtatgcatcgaaagtgatcgatattgagcttagataagatataataaacttannnnnnnntctattcaattcaatatcacccagttgatctattagatcaaatgatctcaatcctgaggtgggtaggttctagttcagttgcattatttgtgttcttcaatctattcgttaaagtcgaccaatggatacggaatttatagtttttatctggacatagaagtgaaacgataatttccttcgagcttggcttaagatagataaatggttgactactcattcgattgattatattagttcactgaaatnnnnnnnnnnnnnnnnnnnnnnnnnnaaggataaaatacattgaagtgtgtaacgataaatttgaccctactcagtgtagatcatctatagaggatcattgattataatgattataacaaacggataattcagagcgtatctatatcgtggaacatatagagtgatctatataatttagagtgcaattctaaatctatagtggtgcaatgaggaat

SEQ ID NO: 50419 - DNA, 922 bp, Cannabis sativa
acacgggtcgggttttcgggttttcgggcgatcgggttcgggttttcgggcttcgggttttggaaatgcttaaccgaacccggttttcgggtgttcgggtggctcggttacgggtcgggtgtggtcgggttagggtggtcgggttcgggtcttattgggcttagcccgaaatgataatttatggctaatttttaaaaataccatttttttaacattatagaatacatacatagataatgtatccattgtccgtattccaatgagatatgtatccaattatccaatatttcaatgaagtaatattgttactgtatagtgtatactgtatgttacgtacaaaaaaaaataaataactaaataaagaagttaacagttaaggaagaaaaaaagaatgcacagacacagccatcgtcgtcactcgtcaacgttaacaattgaaggaagaaaataagaacgcacgaaacatattccctcaccagtcgccaggccagtcggtgaagtcaccacctcggactccgagactcggagaagaagaagttttcatagacgagtttggacttggatgttagggacgccggactgcccatcgcttggatgcgatcccgccggagaagagaagcagtcgtcgtccgtccgtcgtcgcccgttcgtcgccgcccttggagaagaagaagcttaagggaggtgactcttggtgtactgacttataactagtgacttcgtaaggcaagacaagaattcgaataggcattttgttttgaataataaagtctgaaggtaaatattatagtaaatattaatatattattaagtttttaataaaataaaaaaaagtttctttattttctaaagttgttcgggtttacgggttacaacccgaattaaaaagaaccaatttactatacccgaacccgaaacccgt

SEQ ID NO: 50420 - DNA, 1141 bp, Cannabis sativa
ttaactcagaggaaatatattcatgatcttcttgtcaagaccaacatgcttgatgccaaaccaatgccaacaccaatgtgtgcctcagccaagctctcgtcgacatcaggcacacctcttactgatgctacacaatatcgaagtgttatcggtgcacttcagtacttactcatgacacggccagatatttcatttgctgtaaacaagttgagtcaataccttcaagctcccacaaccgatcactggggtgcctgtaaacgcatccttcgttacctggctagtacttccaacattggtttatcctttactgcctcctccaatttcagtcttcacggatattcagatgctgactgggctggatgtagtgatgacagaaaatccacaccgggctattgcatgttcttaggctctaatctaataagctgttgttccaaaaagcaatctgtagtagctcgatccagtactgagtccgaatatcgcgctcttgctcttgccacatctgagttaatttggctggaatccatactccaagaactgtccattggcactgtcactactcctattctatggtgtgataatttaggagctggctcctattctgtggttatctgtttcaggcatagtcagttagttaggattgaggtttatctgtaactttttgttatacctgttgtaactaactgtgtgtataaatatcagcttcttactctgtttcaaacagagcttcacaattcattctttcattcccctttctccacttcatttcataacaagtgtcatacaaattcataaatcaaaatcattaatatattgcattcagtatttacttttaataatttgtagcatacgtatattcattaattgaatatacgtaaaaataatttcaaacaataattaaaaatattttttcaattatttattgtattatttttaaataaagtaaaaaatacctaacataaaactgtgtcttgcacgtagctttcttctagtctatatatatatatatacatataattctaaataaacctaaacctaattatatttgacaaaactctcatttttttaccgccacctctccctctcacgttttttttttttttgtgtgtgtttgacaaaactcccactcacttatttggtgctc

SEQ ID NO: 50421 - DNA, 1779 bp, Cannabis sativa
tcaaaaaaaaaaaaaaaaatgagtgtatgtatttcacctttgaaataacgatgtttaagaactaattaagcttccacttcacgaaagaacatgaattatcaattaaaaaaaataagaagaaaaagtgggatttgaaaaatattttgaccttttctcctacttgtatattttctcaattttgggttgggttgtatgttgtatgtctctgttgcttttcgttccagtctctctgggtcaaaccaattattgttagaagttctatcacatcggccacgtcaccacacatcttgttttctcgatttacctggacttgtcctaatataggtaggcatgcttatgaacatgggcctgtgagcccataacaagcatctacagcccaagaaacaattacaaaattaacacattaaattctttttgtttttttgaagcaaagaaaagataatttttattccaactaccaccaagctatactaacaagcttcaaagaaacaccagaaactcaaaaggaatttaccaaagtaattacataagtctctcttctactaagcttggagaacaaaactcctttcactcttatcttaaatggccaaattaaaattaataataatgctcctcaccacactacaagttagatcaaaaacacaactatttcggttacaccacacaaaatacaacaagaccattccgaagcaaagcacaccatgctatccaatcttcaaaatcggcaggccgaaaaaagagaccaaactaactttaaatttcctgaaccaactactcgttacaaaaaactgttatttttagttacaacataattttttttataactaaatgtcattattagttactagtgacaaaaatattatttttagatacaaattgtttctaatttaactttactcacaacaagtattgggactaaatatacatttagtcacaacaaattataatttttgtaactattacctttcgctatggaccttttagtcacaacataaaaataataatttataattagtcataatttttttatgaatttgtagtacctttagaaatatgcaatcaaaaaacagatactaatgggttttaatctcagcctcatacacaaagccgtaggtggaaggaatcaagaggattttgccaagataaccaacacattaaaattattacactctttttataccggttgtgtaatataaattgataattaacaatgcatatctctaattctaaaactcacattttcctaatatttggaaaagtcgttcctatctttatgtactattcaagatagtctctctctttttggactatgcttaatgttaagactatagttctaaatatgtacgtgtcataccgtgttcgggcataaacaagttatattatattataccataaaaaatagataagttgtattgtgtcgtgtactaatttttacaactatatagtcttgactgtaagcatagtctaaaaatatgggtcatatcaccaattctaatttttttttaaaattttaatatattttatttattttaaacatataatattaatatttgtacatatttttgtattaaatgtaaaattaaaatcctaaataattattaataatatatttagagtaataaatagtattctataaatatagagcatgaatagtgaatttaaagaatagctttaacatagaataaatttagagcatctaatgtagtatatatttttagtttagtttttaaaatattttaaagattctttatttaaaaaaaatagtgtgagtgctcttaa

SEQ ID NO: 50422 - DNA, 1047 bp, Cannabis sativa
gttgttttcgggttggtttgaagatgggttaagtagatggagtttaggcaaaactattaaggcagccatgacctgttggtcgatttggcatcattggaatcagctggtgtggaatgaaaaactgccgagtactatagatgtggttctattagctaaactaaactttaaagagtggagtaatgcttaaaaaatgtccacagttaccaaccttgagttttgccgggttgcggttgagcattggacgaaatcgactgattttaaaatcaaagttaatgttgatggaattgtgtttgttgagagtaggcagtttggctatggttgtgtggctcgtgattctaagagtgtggttttagaagcaaagtgtggtagcaaagatggtattcatgaaccacatgtagttgaagctctgggaattaaagaagcgttaggttggattatgaatcatgaatggtctaatgtgattctaaattctgatagtcttaacgtggttgaagatttgaagaataacaaacacatggtctctccatatggctgtgtgatttcttattgtaaggttattattaatagtttatgttctttttctttgaattttgtcaagcaatctcctaataaggtggcgcatatgttggcgcaatcttctcgttatggggcaatcgtagttatttggataatcttcctgtttttgtttcatctttagttttggatgatagtttttaatgaagcgattgttttactcaaaaaaaaaatatatattcaaaattaattattaaaaaaaatatatattaattatggtatagtttttaagaattaatttgcactattaaattaaatgaaagcaaattatattatatataccaagtccatattatcaaaaaaaaaaagaaagcaaaatacaactcttgctctacattctacacattatgacactaatataaattttcccatttaaacaagaaaaatacagaaaagagggacgtatatagttgaaagagcatagttggattttagaatactacgtgtgattgtgaatttaacgaattgaaaaac

SEQ ID NO: 50423 - DNA, 1854 bp, Cannabis sativa
atatgatatatcaaatattgttgtgtatacaacataaaaatttaatgatatagtatatatttgttgtaataacaataaattaatatgtaatactaacaaatttatataatataattttgttattatatctatttttttttaaaaaaaaattagataaaatatatatatattttttataattttcatttaatttattatatttgactattttgctattttttatttattttaaaatgatattgacctaactaatctatctatttggggtcattttcaactttaactcaatatctttacatataaagtgtgactatctaataaatttttttttgtacaaaaatttagttaggtttccattaaagttaatggtataaacaaacaccattacataattaattagttatcttttttaaaaagaaatattgaatatttgtttagcataactaaattatattgtatattttattgttttttaaaagataattcatataattaattatttaaaagagttattttttaaaaaaatataatcgatatatttttatatatgtttaaaagtatttttttttttaaattgtttaaaaactgaatttagtatattatttaaaacatatgatagaattaaattagatataatttttatattaattattttttttgaaggaattaattggttattttgtttaaaatatctcatataattaaccatactttctagtatagttggtatttgattattttaatagtattttataatttaaatttatcacatataaattaattttgtaaaatagtgaaaaaaatattattataaaagattagtaaaaaaatagggatttccaaacatttagacagctccctatttatttttgccatatttgtttatataattggattttttttttaagatttactccctattttaactaaggaatttgtttaaaagcatggttagagatgctcttatactgctgagaaaatggaaatataaaaataagaacaaaaatagaataaatatcatatgtattaaaaattctaataaaatgttataattttttaaggaaattacttcatttattatttttaattttttttaaaaaaaatttatggttttgtttgttctagtggtttctccggtagtttctatatgaattactataagaattttagttgtcatttagattgctccgttagttaatatataagagtttaaatttaaaaaaaaaaaacaaaaaaacaaaactgttttaagatataacactaaaaataaaaaacccttttactttatcttgaatgcaaataatctaaccttcttctggaaggtcattccacttttcaaaatacaacaaaatatagaattagatttcattactaataacacacaattaatttgttttaatgaacataaatttcattaaaatataagatccacaagtacagcaataatagaaaagaatccatctagctagtcaagtttataaatttataatccacgttgaatattgtaaacaaactaaaccgtgagatgtcatagtgaggaatacttttagaaaattggaaaccaaacacaatcttagaaaaacatgttggtgtcgagacttcgaattacaaacacaacaaatatcagtgataactcatgtaacagctagcataatttctaagaaactcataaatcaacctagtctatataaacactgccagagacgcaaaatttgcgtacgtgtgagaaaatcagaaaaaactatggtccatgaaaatgaaagaaacttttagaaagggatagatcatacctgggtatatttgtaaaagccagaaaaagaatgtcctctgagaaaaagagaaaaaaaaagagaa

SEQ ID NO: 50424 - DNA, 774 bp, Cannabis sativa
ttcatgtcagaaatttcattttttccatcatccaattaaagcttttgatcatctttttcaagcttcaggtcttcttttgtagacaaggcattgtcccgtttcttggaaagggcttggatatttgtccctccaagagtcagacttactcaatctttaagttgaggtccatttgaagtgcctcaaaattctccacaatggcctgtaacttgctctctgcctcattatacttggcttcatatgcgatgagttgtcatggggcttgggtataactgagctatttgaagtcttcagctgccttaatcgatttggttttttcctccaaataggtctatcttgtggattcaattttggcgcccactttcttcttccgaaccttcgtaaggttgtctttcatggcacagttttcttgattgtcttggtacatggccttcttggctttctctagagttgccttggtactctccaagtcctttttaacagtgtccaactctgtcttattcttctccaggtccgctagggccacaatccttttcatctcggtggcatctcactcaaccccgaacattttccagctccagagccaattttgttgttgtgttttcacaacgctcaacatcctaaaaagatgaagggaagatacttagcaaaaaaaaatatcaaaccatcaacaatttgaaagcaagtgctacagaactagaacacacttaccccaatgacatgatgacagagagtttcattgaggaacataacatcctcgctcgcggccatgaccca

SEQ ID NO: 50425 - DNA, 735 bp, Cannabis sativa
ttcttcccaacttccccacgtccttttctgccaccgtcaatgatatttccggccaccggacagcctcagggaacggaagccgaatattatcggcgattacgaccggtacgcaacctaatacgaccgattccacaagcctcgggctccacggggcccaccccaaagggcacaagcagaacactgaccgtacaatctctgactggtaaccggcaaaacgttgcctttgcaagtaaaacctcgggtcattaccgaattttctccaaatcgctgtccttacctttctgaaaataaacgatactcaagggtcaaaattaaagggcaaaaatagcttaggggtttaatagcaaaatcaatgagataataaattaagggctcgagattaattatggtgataacttacttgctgtaataacgcccactaacgtttttggggttaatctccatttttcctctgaaaaacgcaaagatgtcgcggcggccgttagccggggctttctcgagtgttctccgtacactttccggcgaaacaaacggcggaataaccacattctccacgtcttgacaagggtggttgttcttcactccaaatgtctgtaaaattatggagctttttaagaacgacggtactccatccgcaatcgccacgttctcctaagaaaaagaaaaaaagattgaaaagttaggtctttaattggatgggattgtgttaatatgtaaaaaaaaaaaaaaattttt

SEQ ID NO: 50426 - DNA, 1043 bp, Cannabis sativa
aattagctaattcagtttctccaaagatatggataattaaatattagttaagtatatttactaaatccaccaaagaaacaaacttagagaaatatcttaatgggagtagagctatatatagattatgcatgggtgtaacatacatagactcattaattaacttcacgtatcaatctctttttaacttattttagcttccacagttttaaacaatatctccaaaaaaattatttattagtaaaaaaatcacttcctatccaatactataaatatttcatcttttcatttacaaatcccataaatccaatatccaatatattcctcatgatggcaaactataacaaaattaatttctcattttttctagccataattggtttcttttgtatgttacttaatgtcaaagctcgagaaccatttgcatgtgaccccaaaaacaaattgacgaatgagctgaccttctgtaaaacaacattggctattgatgtgagagcaaaagacttggtaggacgactgacattagaagagaagatcaagttgttggtgaattccgccaccgaggtgcctcgacttgggattaaggcttacgagtggtggtcggaggcccttcatggggtggccaacaccggccccgggactaagtttgccggggccttccctggggccactagcttccctcaagtcattactactgctgcttcttttaatgagtcattatggcaagaaattggccgggtacgtattaacaaatattaatttggaaaatttattatgtttgtgtaacattattcatacaaaaaaatataatagtaattatacacatgttttaacaagttgaacctatcttaaatgaatataatagtagacaatccccgcgctttcaaaaacatttagaataatacttatgccaaaagcatgattataacattcatttgcttgtctattgattttattaattaatttttttttcagtattataaattagggtaaatactattttggaccttctgttttacaaaagttatcaattggaccctgtattt

SEQ ID NO: 50427 - DNA, 892 bp, Cannabis sativa
agtatttttgaaaaaaattctgacccatagtaaaaaaaattaaaaattttatggtgtaaaaatcccaaaaatcaatcaacatgaaattctttttctattatgctataaaaataatatttctccatataaaagtatcattcattttatatgaaataaatgattaaatggttggagtactcactccacctgatttttcatttcatacaaaatttttttaaaaaaagaacgaagtttgaaaatggtgtttatcgatttatatacttctagtagtcttaatatcaatatatatgtatattttagaaaacatcactttgtttgaagttctttttcttgtagggaaatttacatggtattattatttttttacgcagtattttttatttttttactgtgttttttttataagtttcatactgcagtatactgtgataagtttttactattgttctacttgtgttttttagtttttctattgctgttttgagttgttcttttttgtaatctactgatgttttataaaaacacagtatttttaaaaaaaattctgtgtgataatatttttataaaaattaactcaaattttaatatttttgtaagtttaccatctcataacccgttaaattaaagatgatttccatgatttaaattccatgtttaaatgatcatatactacgtaagtatttgttatgatcaattttttttctttatatatattatcctatttttgataaatatgttttaaatttgggagttgtaaggtcgaaatttaaaccatgttatgtgagataaatacatatctttgtagaatatatttgtaaacatatcagttaaaagagttacttacttaaaacaatgaaagacgattagacaaatcaatatgacaatataggta

SEQ ID NO: 50428 - DNA, 2510 bp, Cannabis sativa
tcttcttgaaatgccaatgacacttaatccaagtactactatagatgaggatggctatgaatttaaaacttatcgtgggggtttgcattcattgctcaacaatattgtgggacctaatttgttggaaagaatatcaattcaacacgaaaggtaaatatcatattttctttccatagacttctatagttaaaaaaaactaatcatttgtttgaataagagtaaatggttgaggattctaatctttgtttagtttttggtcagacggatgtgttgttggagccgctgtaattgagctcgctgtgatcgtggatgaaggtgaggatcatttgtgaatattgggtgtttgaaactttttttggactctaaatttgtttttctcaatttgaatagatattgttttattatttcaataaatttttgtttagattttaggttttttgtctctgaatttgtatgaataaatgggtcagaacactttgaataagctttttctttttctttctcctcctgtaatttgggtgtttttataaatttttgttcttgagtttcttgttttaataattttaacttgtgatcttgaatattttaattgatcttaatgagtttttagttggagattttacagttataacatttgagtattaaactgttcttacacttcaaaaattgtggttatatccctgagtttattactatttttcctgtcaccaaaaatattaacaactacctttgctttctttacttcttttctttctttccaagtcaaaatctcgcccaaacctcaaaactttctcaactttctttctttctataaattcaacactctataatctatagtgtaagcgaacataacacattaatggtttttggccgaatctaaggttttctctgttttaagatgtattttttctttctttaatttactatcacactttatattttaaagaatttcattttttgaattgggtatgcttttgaattgctagttttaataaagacaggttcttttcaatcatttatagtctttggttccttatcaaatgagttttgggtttaaaagtgtgttcatataagcttatgtttcttagaatcctcaatttatttattgtttttgctccattggtatgctaatgttgccttaaattaaacttgactaatttaattttttgtatcaaatgttcaattttttttattatcttatcattgtgaattattgttattatctttaattgctaaagagtggagtagggattaataattttctttttgaaaattttattagctctgggagataccatggattgcatagagcctaggaagaagatgtgagaacgacttgtactgtagtactgtagataaagatggttacgagttcaaaactcattgttctacacttacttaatccgttggaaagaatatgaatttgtatattatatatataaagactaatgactacgctaagaattcactaccccatatacgaaggtaaatatcatattttatttttctataaacttaaaccaatcatttgaattgagatggattgtggtgattgtagtataccacaattcatctcaattaaaatgattggtttatgtctatagaaaaaaaaatatgatatttaccttcgtatatgggataatgaattcttagcgtagtcattagtctttgtatatagaatatacaaatttatattctttttaacggattaggtaagtgttgaacaatgagttttgaactcgtaaccatcctcatctatagtactacagtacaagtcgttcccacatcttcttcttaggctctatgcaatccatggtatctctcagagcttacaaattttttaaaaagaaaattattaatgactactcaactctttagcaattaaagataataacaataattcatagtgataagataataaaaaaaataaacatttgatacaaaaaattaaattaaccaagtttaatctaaggcaaaattagcatatagtaaaagcaatagataaatttggggttctaagaaacataagtttatatgtacacacttttaaacccaaaactcatttgataaggaaccaaagactataaatgattgaaaaaaaactgtctttattgaaactagaaattcaaaagtatacccaattcaaaaaatagaatcacagaaaatataaagtgggatagtaaattaaataaaggaaaaatacctcttaaatcagagaaaaccttagattcagccaaaaactatcaatgtattatttttgcttacacaatagattatagagtgttgaatttagagaaagaaaggaagatgggaaagttctgaggtttggacgagattttgacttggaaagaaagaagggaagtaaaggaagcaaaggtagttgtgaacatttttggtgacagaaaaaatagtaataaattcagggatacaatcgcaattttggaagtgtaggaacaatttaatactcaaatgttataactgtaaaatctctagctaaaaactcattaaga

SEQ ID NO: 50429 - DNA, 1179 bp, Cannabis sativa
  modified_base (1116)..(1120): a, c, t, g, unknown or other
tttggccaactaaaagtggattcctgtttattactgatgcttgcaacctgttacacaataagaatagaaaaagtaaatatgacataaaattttatagaggttcaacccctttagttagcgggtaatgacctactccccttttagctgtaataatgtcagagataatactacacaagtcacaagtgtagtggaatttgtagtcgctctctaagattgcaaaatatgaatcaagtaggcaaatctcaagttagagagagagagagagagagagccctagggaagagaagagaagagagagttagggtttcagacttagagcttgagagctttagtgaggcttagagagttagggttagactattgctctttatatagtagagcttacatgtagattaacaaccaatatcccttaaaaacaaattaataaagctacatttatataattaaataataaaccctaaatgactaaattatctcttaaaaatagggaagttgctgagattttctcccaattttcttaggttgtcaaggcataatttgttcttaacttgctatccatggatgaaggctatgcaccaaaggcctttcaggttaaagttggccaaccatgcaccagccaggtgcaggctaattggccacataatgtatgtaggttggggtcgggctagccatgttcatgctagggattggctgaccgtgttcttgccagggtctggcaggtcatgttcttctagttggcagtgttggccagccttcgtaggtggtggccagccattgtaggtggtggctagcatttacaagtgttggccagccattgtacaacttttctgtccagaggtcacatttccttggtcgagcgggccccttcttggtctaaaagtcacctttggctagccagcttgtgcccaatctttgcccgaccatataagctcatccttgtcggcctatatactccctttggctggccaaacatggttgtgtagcttcttaacgattttcttaactcctctcgcttgttgcttgatggttctgccatgccttgcaaggaaatgttgtcttgctattggcaaggctgtattccacgtctcctcagtcttggcttacgtggacatgccnnnnnaggtggacaaaatttgggataataatgacttttttgggttgtgttggaaattattttac

SEQ ID NO: 50430 - DNA, 918 bp, Cannabis sativa
  modified_base (879)..(892): a, c, t, g, unknown or other
tatagttttttggaaaaacaaacgatgtttctgtaaaatttaattttaatattacttttattgaaataaattttagtgtgtaaatatattacatacatataaatataaatatatgatattttaaatgtgaaaatatacctcattatttgaatatgactttaattgaatcccatgattacaaatttaacaattcgaaaccacaatttaaataagcatgctacatgagcactgagacagtatgagatataaaaaaaatgaataatcttagagataagcttggctcagaaatatgttctcactgttaatagcatgtaacaataaaaatcatcacttcataccagagtgaccacaaccaatgtgaactgataaaaaaagatggattcgtctcaattagcgcctctggatactcttctataaacttggccttaacagcgtcattaagctcttgaagaaatgcacagtcactttttgcctttgattgtccaacgcacgattcatcaactaacaagacccaactaaaatgaggacaaactcaacagtaaccaaatgcaacacgacaccatgaaatacatacccataaacttatttccaaggtcactaacttcaacattagaaccatccactacagtgatgctaccaaccccaccacggataagatttttagtgtttaagagctcgcggggccacaattaagcacacatatactggctttctcaagagcagtctgcccctgttcaacccatattctacaatttttagttttagatggaaaatttacataacgaaaaaagatatataaatctcattttgcttaagaaaaaccaactgtatcacacattgtagtatatatatacataatgttggaattattttaccagnnnnnnnnnnnnnnaccaagtatgtttgattaacatccta

SEQ ID NO: 50431 - DNA, 2044 bp, Cannabis sativa
taatcctatttatttttttttcttttttcttttatttgctttgagtttaagtaattattaatttttgatgtatgcatcgcacttcgacagccatccatatatagtatcaagacctcaattttcaatatctatatatatatatataaaggagaagtataaggcggtgatgtgacactctaaaattcttctaaacacctttatctattttcttattttttttttaattttttattcatttttttaaattactaattaataataataaaaaaaaaataaaaaatctatacttttaaaactatcaattaataataataataataataaaaacttaaaaatttatctattcataaccaatttaaaaaatatctacctaatatttctatatatttattcataatacataccacacaccataccacacacaccacacgaccactctcacttatatgttattattttattattattattattgctattattattatttttaatacatatttatgtatttctatttagcttttctctttcaattttatattctctattaattaaaaaatttcttttttacttcatcctataattcctaatagattgttattttttttttcttttcttacttttcatcatataatttattttagtggacaattatagatttattttacctttttattgataatggaagtacatgattcatatttcttttcttttcttttaatttttttacaagttagcttaattgatggattttgcactttattttgataataatttttgcatacagtacagaaaaaacaatatatagcacgtatcaagtctttataattttttttttcttatatataatataattatgatgtatattgtattaatcataattatgtatgtacccaatttatgttctctaaatatacatataattttattataattgttatatgttgagatttgtattttaataaaacaaacgattaaagaaaatatcaaaaatcttggtatccatttagttattaattaaactattacatctagcagactcaacacaattttatctacaagcagctcgcatatattaatccaaaagacttcgagagctaagattttttctttcttttttatcgaacaaagttcttgctatgtagatatggttttatgtatgagtacatttttcttctctctcaatcattatcttaaaattttcttaattaatttttatatatacaaatatgctttatcatatagattcatctccagtaatatatataaatatgtatttttataaaaaattctatcatataattataatattttttagaatttattttttgtaataataaatttatagaaagattcaaattaagtgattttttgattaagttagtataaaatttttatatttttttgtttacaaatatgtgcatcaacttttgtatttcaaatttcatacggcttcaagtacttaaagttgtagagttccattaattttatagtaaattatttgcattgagtactagagttatacgaacatttgagaaacaaaacgaaaaaattataaaaagataaaatgtgaatatactataaagttttaaaatatttatttttaattatcttatattagttaaaatatatagtaatacataaatatgtaagttggctacaaaaatttttaattcacgattctttttaatatattttatattcacaaacaaaatatctatttatatattcatcttctaacaacttttaaaattatatacattattttatatatataactactatttatattttctaattattccattatactttatttaattagagatcattattattaaaaaatactacataaataactaataaatatatatgtactaaagagaaaatcttaatctacctacaccaaatctataaaaactctaaattcaattattttttattatcatccctctcttcacatataatagaatatgatttactatgtataaaagtgaaattatcaatatatatatattgttataaaataatataaagtagatga

SEQ ID NO: 50432 - DNA, 923 bp, Cannabis sativa
ctttgctcagcaaaatatataaaaacaaccaaaaatcaatctcatgacaaccaatggcaaacctaaaatttaaattgaggggagtgtaatttttttttttttttcgtaaggtagggagcaaaagtaaatttaaaaagaaaaaaaattgctcttgggatttgaaccattcacatttgcaatatatcttaaccattacaccaaaattaatattatgtatataaattttaatttttattacaaatatatgtcgtaactaactaaaatgcacatatattttttttttccaattttgttagagacgactaccccctcggttctatgtgagtccgcccctagcataaactataaattaataaccataaataaactataaactaaatagaaaaataattttatgacaactataataaaattataaaaaaaatgattatttttactaaatatgcatttttgaaaattaaaaggttcaaaaagtaaaaataatttttttttgtgttaaagtatttttgtaattttttttaaaattatagtctattttgtaaatttttcaaaattatacactatttttgcatactaagtatgatgtgtatttattttattttatttgtagtagggatgtcaaattatttataactaaaattaaaataagattattttaaaaatacacaaaaacaacaactaaaaattacaaaaatacagttgaatggtattttaaacattctttttggattttaagattttacttacataaattaagttgatgtagttttatgttatactcttgttattttattattggctttttgtatttgtacatcatttttttttatgttattttgatgttgtttgaatgttattttttttgttattttcatgtgatttttttttatgaacactccaaaaatattaaaaaaaattaaaaa

SEQ ID NO: 50433 - DNA, 913 bp, Cannabis sativa
ctctctctctctctctccaaaccataacaaagaaaacccacaaaaccccatcaccagcgtgactccggcgatccatctctagccaccgtccaaccccatgcgccagactaatcaaaacccccggtgccggcgacctcaacccccaagcggcaccactcctttcgccaccattagcccaagatcgccaaagtttggaggctcaaattttgaacggatttttcgagcacctccggtgtccgtttgatgagtcgtcttcaccactagacttagctcctcgaggagaacaacttacaccaaaccattttgcccaactcactactttttctggtgaaactttgtagcttcgcccctttctggtaactttctgacgatatcgtgtaccgttttatcaaatagttatctactcgtcgaggtggtcgttttgatataaactactcctatttttggcaacgtttccggtacaccaatttttactgccaccgataattaatgtgcactgcttaggtgatgttttggaactccaaattttaagtataggcatattatatgtcgttagactcgattttgaatgtagaatgcaatgatgataattatttggccatttgatggtataggtgagagtaatatctaagattggaccaaacaattggagctcgggacttgagagcttaagatcatcttttggacaaagtttaacgactaaggagaggtatggactcaacttgattattggacttgatttttatgtgttgtatatattagacatattctaaatttttatgatttgtaaattgtttgaaaaattgaaaacttaatctgcatatttttctggactgttttggagcattgagtgcaaaatatatttttgtacaaatatttatgcaggttatgatttttgagtttattcaaaata

SEQ ID NO: 50434 - DNA, 723 bp, Cannabis sativa
ggcatttaatggacaatttacggaattatgtgtgttttcattgagagagggacacactcttattacatctccatattttgctggataattattattatttaaaaagcataaactaagttagtagtcgaaaattcagagggatgaatattaactcacaacattaattttttatatgaatatacctatttcaagtcgactttttttggcagttggttgtaagtgtctattattcactccttcattcagttgtagaagattgaaaactgaaatatagtataaaaatattgttatttcataataaaaattaattattttgattgatatataaatatgagtaacaattataatattgatgatgttattaccatttgattgaagtaattcaatgtgatgtaaaatattctctaacttcatggattatgtgaaatagatcacaatttctagcatcaaagtaattctttttcttaaatcatatttgtatcgattgtaggtaagtagtcacttttcgcttgaatcttgcatacttgcatatctttctttggagaacagctaagttattgtttgttgttggagatcggacccttaaggaatattttttgacttacaattttattttcctatcttgtcgatttaaagctgacacttgatgatgcaagtaagaaaattgagtggtgtttaatgtttatccccttaatattagaagtatccccttattaatcttaa

SEQ ID NO: 50435 - DNA, 1486 bp, Cannabis sativa
caaattattcaacgcagtcattttattcctggtttttttctaattataaatcaagacaagatgggtatatataaaaacaaattctttagttaagcaaataaaaagaaaaaaaacaaattctttaaataataaatttgaggttttggagatttttttttttttttttgtcgtaaagcaaacaagtttaatatctaaaatttaacatttattagtcgattatcaattttcaaataaggggttcatacatataacattattatatttaacatacaaattttaacccattatcaattatgataaaaagtttgggaccgatcctggactaaggtagaccagggtccactcaaactcaaacccaagacgaaaaagagagatatcgctatacatattaattcaatagaaaaatgtatttttacaagttactaaaatttgtcctttttctatttatgtatttttttttcttttcttaaattttattacaattttttttacttctttgtttttctttttataattatatttatataaattctatatatacgtaataatctagattttttttcttttacaattttgtttttaagttatctctctctctctctcaaattggattatttccttcctttctttttaatttttttttaaataatttttcaatatttttttaaaggaaatattcctttcttattatgttgtttttcccatagctaaatttcttcagttatttctaattattgtgattagctaattttttttagttctacttttcttattatgttattttaaagaaaattactttatatattattattattttttttttaatttacggtttggtttgctccggtaatttctccgatcatttctatgtggattgctatacggattttggttgcgatttaagttacttaattagttgctatagatattttgaagtgtaaaaataaaaaataaaaaaaaattatttttaattatatcattatttttatcctaaaaaaacagttatataattatttttaaacataagtaagacaaattaatatatgtaattagctgttaatatttttaaattactattttatattagataaaaaaattcattaaataattttatttgtagaacttttataaaattaaattaattaagagtttttaattttttttttattttgataaaaataaagcatataaaatgattgcaaagtgcccaaggcacattatcaagtttaatatatttggcataaacattacattactgacttaatatttagtccattggcatatttatagagtatgaatacacccattacccaatactgatttaaagtaaatgattttatataccattattatattgacgtgttggaagagcaacaaatgtgtgaaacaatattaaaaaaaaaacattgttgacaaaaataattacaaataagaagaaccgattagaattaagaagtagaggctgagcatttatttggtgcgggta

SEQ ID NO: 50436 - DNA, 914 bp, Cannabis sativa
aggtatttttaccgccaaaaatagaacttaggtatttatctgctactcgacataaaacttatgtatttatgtcgcaaattactcttattagagtgcacgaatttctcataaatatatatatccacattttaacatatatataaaaatcgattaaagaaaaaaataattaattaatactcaagtagggaaaataaaaattcttaccgatattacaatcttaatcttaattaagagcactcttatgagtttctctactttatcctttaaaatatattaccaaactctattttctctattttactttaattttttacattacaccatataatttttttaaaatacatcaccaaaattttacttctgtgatatatttatttatttcaaatatataatattaatatttacacatatagtaaaactaaaatctcaaataattaataaaatatgtttaaaatttataaatgtagagcataaacaataaattttaaagaagctttaaaaagatattagctatcctgatttgaagaggatcttgtacagctattctgatttgaagaggatcttgtgctgattgctgatacatgcattgtcgattcacgaccgattcttattattatgtcaaaaaaataaaaataaaaaatgagtttaaagcatttgatatatgttttaaatttagttttttaaatatttttgaaattttttattttaaaaatgtgatttgagtgctcaaaatattaaactcttacaaataatcttaatcttaattaaataaataattaatatttgtttttttaaaataaataattaatatttgtttgtccaaaaaagtaaaaataaaaaatagaagttatattccatagcatgagattgaccatcataataaatccgtacgagtgattcgggtagaaaagggg

SEQ ID NO: 50437 - DNA, 2163 bp, Cannabis sativa
  modified_base (697)..(703): a, c, t, g, unknown or other
aacacgaacccagaaatttctagctcacaaaacaaaacccaaaaaatttcttgcaaactctcgggcgaacttaccacaccaaatcagcagtagttccaagctcgttcttctacgccgcccacccgaatcgttggatctgcaactttggatctgagatgtggggttttgtttggatctgaaaaagaagtttcggtgatggttgtggtgtgtagatgtggttttggtggtggtgggtagttcggttgtggtggtctgggcagtggtctgggcggaggaagggtggtctgggcggaggaagggtggttgtggtgtgggaggtggtctgggcttgcctctggcctctgcatattagagagagagagagagagacagagagagaatgatacagacgagaagaagaaagaaaagaaagaaaaaaaaaagaaagaaaaagaaaaaaaaaacaaaggaaaaaaaaaagaaaaattatttaattttttatttatgattttttttaaaattttaaattaattttttttaaatttttttttaaatatttttttttacgtggaccaataaaattgtgccacgtgtatattgtgtccacgtggacaagccaacttggcacttaacagttaaatttggacagagagggtaaattgctaacagaatagtggttttgggggtttacccgcaaaaatttgggttgtgggggttnnnnnnnaccaaaacgaaagtattgggggttcgccaaatgaggttattactattaggaagataaatgtctttaaatcgcaaattgggtatatatatatatttatgaaacatttttaatgggtattattggaaactaaataaatttaattacaaaaattaattttaaaattttatactattagattttgatccaataacgaataataaaagagaaattttaatttctatgcttaatttagttacttaattaaaaaaatacttttttttttacattatatcaaaaatatatttatgcataaaatacttaagtcaaatcaacattttttttatttaatttttttgctaaaaaacttttttcttaattttttctttcagatgattgaataatcaaagtccatataatatgtaaatgagagatttttttaatgaaataaaaagattaagtaaaaaagcttgaatttttttaatattactcatttatgtgtaatacttattatgagtgcaccatatctatatatatttatattaatatctgtttatttatttattttagattagagcaccttttaaaaaaccttactatttttttttattttaccgcacacatttacattacattatacatcagtttctttatattttttttatatcatttaaatattaattttttgtttggttacattttaaagtattaaaatgtcactctaatgaaatgatttttccatcattttagtagaatgaccattccattttgacatagaagggatgttcaaattatttgtaaaatagaaagaatgatcatttcaatgcaagatgagaaaaattttgataatttttttatgtagtttaaatttgattccattctattcttattgtcattcctattcctatgtatttattcctcttaactaaatgtcacctaaggattcttttcaaaaaaaaaaaaaatgtcacctaagggtttaaagtatttgttggagttcaattttaagctcttagctattttttttagcttttatctattattgctcatttgttgtgagtgctcttagtttattgaaaaattatttaaatgactttttcataatgaaaatactaaataagcttactggggtcttagagcattcccaaacgtttctctactctatcatttaaaatacattattaaaactctactttctctattttacaatatacttttacattacatcatacatcaatttttttaaaatacattaccaaaatcttatttttttaagaactaaatttacaaatatagatcgtgtggattgaattggattggttaaaatactcaattcaatccaatctacacgatccaatcaaattcaattcgtaaagtactgtgtggatatccgcacttgtgcggattaaatgttgattgacatgtaaaagtaaccgattcaatctaatctaatatatatatatatggaggaggtttcaatggtt

SEQ ID NO: 50438 - DNA, 718 bp, Cannabis sativa
tctaaaaataacataaataataagttaaaaatatcctaatattaagacattttatttttttggaatttaatattttaagttattctaattttttttaaacaatttgaaatgtcttctgtaattacaacaataaacactttaatataataatatattgagtgtgacatcataaaaggaaacttttcatatttggatattggtaattaatttggtagaggagggcacatgggtagtactaaagcaaatgcactactaaatggttggtgattggatggggtagctaggtaggtctatatatataaattataatactactaatcacactaaaatgatgtgccatcagctagccatgacttctgaaccctaaaataaattaacaaattaacgtcacattctgattattctacaatcatttcatctttctttccttttttgtaagaatcaatctaacaccaagccatttttgacctacacacatagacactttaccttttttatcatatttttctggacaggctttcccccccatgaggaaataaatcaattaataacctcaattaattttcttcctccactttcatgttatgatagtaattttcattaagtttattattttttttttaagaatattgtttttttttttatttaagcatttatatattacaacatgttttacctggaactcgaacccaggacctccaacactcacacacccacc

SEQ ID NO: 50439 - DNA, 732 bp, Cannabis sativa
cataaatttctcaaaaaccaagaattttagttatataggcacactttatataaaatagatatattgagatatttaagatatcattgttcatagataaacctcgataggattataacaaatacatttgtcagtgtgtataaattgatccaatttaataataattgaccaatttattacaactgactgtcaaatataaaatattcaattataatcagatctaattgaacattatttttgaatatctaatcagatcaaatgaaatgttgttagatgtatgtctaaaagtctaatacatctaatatttaatcaaattaattaatattttttatttagtttaaatgagtaattaaattttaagtggttataatgtaaaaaataaatatatgtatatatgaaaatttacattaaaattttacgtttttcttttaaattagatagatccaatttaatccaataaatattggatctataataatattagatggatccaatttgattcagtatactaggtctaaaatattaaataaactcaaattaaatagatatacatggaatacgatcaaatctaaatctattaaatgttggatcgctatattagatgctaaaattaattaaatccaattgatcatagttaaatttattatctaatatataactaaatcggaacttggtctaatccattaaacacccctaatttcacaagctatcttattattatgttcttatcttata

SEQ ID NO: 50440 - DNA, 799 bp, Cannabis sativa
cagaaagtagacatcacggcttgccgccaccaaacttggagtttctctgcctcaagataccctttcagggccctgttcgcttccttctccctctgcatctccagagggttgaagtggatgaccttcctggggaaggccaaccccacggttggcatccaggatgaggcaggtgtaaggaggccgagggtgatcccccgatcctcccatgccaaaatcagtcaccacgagtttttgcttttttctagcaaaagaactacctctcgcagtgttagagagcccaacttgctctgaagaagaagacatggtgaacctacccataaatcgacaaaataagaagagaagggtcactatttgacccagaaattctcaagaacgacgtcaccagaagttggtgccctggaggcaaacacgtcgttataattccctcaaaaactattaaataaacgtaaaacttaccaattgatgaggcagaagggttttggtgtggcatccttggtacaaaaaataatgttcgatgacagtagcgttccaatgtgactgggaagaagaaaacgagaaaggatatggcttaacaggtaagaagagttaaaaacaaagtggctgctgtaaatatttaacttccaaatcattattcttggctgctttaaattttttcttaaacatcacttgtagatctctctagttgtggatcgatcccggagacaacctcctccaccagtcctccacgaacatacttaatgttaatgaaaaacataaacatttagcatcatcgttggccttggttacttgcatgatgcga

SEQ ID NO: 50441 - DNA, 1035 bp, Cannabis sativa
aagcacgttgggtgcacttcagtacttgtctttaacaagacccgatgtggctttcatcaccaacaagttaagtcaatttttgcatgctcctaccacaattcattgggaggcttgcaaaaaattactacggtatttgaaaggcacggttaaagatggactatacataaaaccttcctcggacataactcttcatgcttattctgacgctgattgggccagctgtgttgatgaccggcggtctactggtggatacttggtgtttcttggagacaacttgatcagctggtctgcgaagaaacaacaagtagttgctcgttccagcactgaaagcgagttccgagcgcttgccaacactgctgctgaaattaagtggattcggtctctcttacaagaacttcaagtcccaattgttcaagtccctgtcatatgggtggataatcaaagtgcctcggcccttgccgctaatcctgtgtttcacgcacgttcaaaacatatcgagatagaccttcatttcgttcgtgatcaaattttagacaaacaactctcggttcgctatgtaccctcggtcgatcaagctgccgatgttttaacaaaagcactgtccactgacaggtttctctacttgaaatccaaactaaaaatggtttccacaccatttagtttgaggggggatgttaatatagttacataaattctgttttaaaatattagctctcctatttttgtgtaactgttttccacctatttcgtgtaaaccaattctgttattactataataatgcagtgtataaataagaccaattaatgaaataaagattagttctggttttacattttcttgcttcttctctgttctttcagctccattcttttactctgttttcatctaatctcatattctgagattcaacatggtatcagtcgcctctgactagcgtcgtcaatggagtcttccgtctccgatcctgttcccagaactccgtccaccgcgaccacaacccagatgcactccaactggaacccgttttctcactc

SEQ ID NO: 50442 - DNA, 1459 bp, Cannabis sativa
aaaaaaaaaactgttttgaagtgtaaaaatgaaaaaaccccccaaaaaaaaaactattataatttttaacaatggtaatttagttaaattttagcattctaattatatgaacaaaataaaataattgtattttttttctgataatttagtaaaaaaaattattatttttgattattttatattttgaacttatttatttctatcatttattattttgatttcggtttagtaaacgtactattaaaatactatcaaataaagaaataaaataaaaattgtttccttctcaccttaatatttttcaatctaatgttaaaagcgaagtctcttatgcttttaaggtataaaaacatagtataagggctcatttggtacgttgtattaagtcgtattgtattatattaaattggattatatatcatatttttatataatactatattaaattttaatttatactaaaatattatatatttaggtacccataaaagtcaatattacatatagttttatataaaaatattgcatgaaatataatttaatataatactatataatacaatacgatataatacggcgtactaaacaaaccctaagagaaaatattagtagatgataattttgtaaattagaaaaaataatcaagaaaatggcattgagttgaatatgttgaaatgggcctccataacaaaaaatattagggcctctatctaacaattgctcaatcaagtttgtttatttatttatttttaataaattcaagtttgttttttagttagtttcttgtctttagtgatattttagaataaattaaagaggaacaataatatttcaagtgcattttttttttttttttgaaagaatatttcaagtgcatttgtttgagatatttcttggggaagttccaagaaacctcagaagatatgattttgaaccacttgaaggtgtgggcctaagtgttacaaaattaggggttattgggctatgggtaaactagatgtgggcctggctcaccttaatttaggatacccttttatatatattttataaaattagagattgtttcatatttaaatgttgattttattatattttttcaaattaaagatttgtatcttaatacatgtcaattttaaccattaattttaaccattaactttaacagacaataataaaaaaccattaaacgacaacttttgttagatacccaacacaaaagcttaaaatttagactaaataaaatccaaaattaggacaaagctgtaatttttcagattatttgtcttttttttgcttaatttagtaatagttaaattttcacattcttccagctgtactaaatttacactattatttatcatatttgtgacagtcaatagtcccgtgatccgtaaggagaaatatcgggtaagctgtacaatctcacaccgcctcaggatggtcaagtgggatgattctg

SEQ ID NO: 50443 - DNA, 761 bp, Cannabis sativa
atatatagagagagagagagatcaaaagagagtgcgcgatagagagagatcaaaagagtgagagaagaaaataacttactgtcatcgtcaaagctgtaaggtagatcacgtgactgggagcttgacgaacggaggaggagcctttgatatcgtcacgagtgaagattagatcctttgaggtagctcgctcgtgattataacgaatggaggagtcttcaatctcgggatcacaagcagagattagaacgaagcagagatggaaaagagatgagaggaacatagaaagaggaatgaacgagggcgatgagagccttctgtctcgccattcggtatataaacagagatcaaagctcttgagagaatgtttgagagagagagagagagagagaggggggggaagagagcaaatgtgatgtgaaatattggggtatatacataaaatgcaaggctattacaacagtcattaacgaataactggctgttataaattatcttttattttttaccaaattaggacccagtgacgtatataaacaacaaaacacacacatataactattttaaatagacaagaatatattgtgagtgttaaaactgacataaattctaaactatagctgttaattttaaatagttacataatttttttacccttgatcaattctcggaaaaaattaattttctaatcttttcaaaaaataagagttagctatttatttcttttcaaaaaataatgtatggatcgttatatgtatattttt

SEQ ID NO: 50444 - DNA, 937 bp, Cannabis sativa
ccactagaaacaacatttggagactatctatcctcatgaagtaccaaacatacaattacaatttcttacatagaaaaagatcttgatattgttatgtacctggttttatgtacttttcagtaatatgtcttgccatgtaaatccttctaacagggtcctaccagatgacacaaggcctacaagatgggaccgcaatacaaccaattcaagcaaaaaggctataacacaatttgatttcttacattcagtagtgtgtgcaccagcacactacctttaacgaaaataattaacagcctaattacattgtttaatcaattcttaacaccaaccctgctgttgccatttataaattatataaacggcagtaataacaaaataaaataaaggacttgtgagaaatcctcatgattcaatctctacacacataaatacagtacacaacaatatggcttcttccacagaacaagagttgaggtaatatgaataaaaaccaatgacagatatattacacaaaatctataacacccaattaatgttcttactccaacaactaaagcttcaaactaaactatctttaaccccccagacccacaaatacagtccagttaaataaagatgagcctataagaacaaagcaaagaaaataaacaaaacaaaatttgatgaacccgatatgatgcaaaagaccatctcccacagacccaccagtgagtttgaaaataataaggtttattccttcaaaacaaaatgtattttcactgagtttgaaaatcaatattttatttccacttagacctgaaaattatattgattaataaaaattaagtaattttcacatacccaaaatcatgaatcaaatgtgtctatcactgagtttttacattcccaaattcataacaacattttcattcacattcaatattgaatttacacacaa

SEQ ID NO: 50445 - DNA, 1266 bp, Cannabis sativa
attaattgtagcaacaatttcaataagtgtaatgaataaaagaagtgaaaccaatcctacgacaacagatcaaagaaataggaaatagaagaattatgagaattatgagtgatggattaatttttacttacttgtttgtttcaagtgtaactaattctcttgttaattacattgtattatgtcactatataaaccatgtacgatcaacactaatatgagatatataccgattgtattcttaattgtcatctaatttaattagttataaatatcataaaatatttcactttattttctaactaaatgaaaaaaaaaaaaaaagtaatacaataaataattgaagaaaaaatatattaccaaatgaacttctaacatattccaaaaataatagatagcaaataataagtttaaaataaagatttgaaatggttacctctaaaggaccaaccaaaatgagagacttcatggtgtcatatattccaaagtacatgtctcggtatagtgtaatctccattattgaagctccaaatcttcgatatagacctactattcatgtaaaaaacatactaacaattcataatcaatgaataaaaaacatattaaagaggagaaactacataaataaaacaatagaccaaaaagacgtacctgagtaggaaaatatcgtatgacattagcctggtttcctctccagaaagaaaaaaaaccttcttctctgaaaaaccctttgaaagcaatcatcaactcccatgtacggtgtcctcagctgtcctcttttgaccatctccccttgattttgcaacaaaagcttcaccctttcaatgggtgccgctgcactctttgatatcacagcggcaactttgccgttgccataactaacactgccaattatttataattactattagtattattattaaaaaaaattcgtctgcatacacattgtaaatcatggaacatataatgctcccagataataaaataccattgaaatgaattaaatttaaaaattaatattacctacaaaagaaaagagcaatgaaaggaaaaatgactgtaacaaattagtgtccaattacctgatatttaatttattgaatagctgagaatggatctgagggtataacaagtcagtgcgcagatggagataaaggaacttttgagtaacttcttctacttaaagtaggtgtgtcacctaaaaaaaatatcatgttaaatgttacttagttttcgctttcagtaaaaaaaagatgatatcaaatatat

SEQ ID NO: 50446 - DNA, 1030 bp, Cannabis sativa
aaaatcacgtaatacgcctatgctagttagggtgttacatcaacagtcaccctcctttcttggtggaactcagaccatcgtcccttgattcttagctccaacaatgttcagaatctctctaacacggtgcccaaatggaatcaacgcattttccaaaataagaatacttctttggaaagctggactccttgggctcttgatcacattgataacgctctgctgaaggccaccgcgaacagagaagtgaagaaagcgaaggggattagtagattactggctcctccaaccggcacttatatgatgaattgtgatgcagcgttatgcaaagatcagcagggaagtggagtggctgctgttataagggacaattttggccgtttagtagctgcagaagcttgctttcaaaccgggtgtgtctcgattttactggctgaagtcttggctatcagattgggtttgaacctggtgcaaagattgaaggctagacctttttttgtcaactctgataaccttactgctataaatcatctgcagtcaaaggaagctcctcaggtagattgaggggtgcctttgttggaaattttttctactaatcttttagatgggtgtgtgggaatcaaatttgttaatagagattgtaataatgttgctcactctttagctaagtgggcttttactcacagatgtaattctttttagtcagaggttttaccctcttgtgctactgccattttaaatgcagagaagcctgaccatttgtagttctttgtttgctgaataaagtgttttccttccccccccaaaaaaaaaaacagtggccggaggtataattactacaaccactacctctaccttcgatttaccctaaaaaatgagaaaaaaatgtgatcttttcaggtatatagttttaggtatgaaaaatagaagatttagaaacaaaaatgagctaaaatagtaaaaaaatggtgaaatggggtgactttctatggtggttggcggagagggtttggggtttctctgatttggggat

SEQ ID NO: 50447 - DNA, 902 bp, Cannabis sativa
acacagagagagagagagagtgatccattactgtatatccgtacgtgaagaaattgatcacaagctctatgtgattcaaaataagaacttgggtttcctacacttgaccatttaagttaggtgaactctacagtatttccattaacttttttatagcaacagcactgtacctgtgatttgacaagtgttcatttattgattgagccttatataattcgatctagctagctcctcttccttctaaatttttaatgccttgcctgcctgccttttatttattactcacttttcttttaactcatagcttctattccatgtaagagtaattaattatggatcaattcaagacttttctcttttgctgaatcagacaagattacattagaagagttttttttggcttttaccatagtttacaaaaacaatgaataaggctggctaatcacgcattatctcatatatatgcagattcaaacaaatttttagaagataaagtttacttttctgggatattgttcctctttttcctattattattcttatccacttctcaaaagtgacctcatatattacactctagtgctttcatactttatttctatttttaataattatttcaattatatacatttatatgggacaatcacttggtgattgtgacgacttttctatttgcctaacctatctatatgccaattatcccatttttattaaagcctagcttccaataccataataacgtacacaacataagataaggaaattaataacctactaatcctcatattttccaaatattaaaaaagattgtgacaatcttaatttagattagttggtctaatatttctgccttgttcaatcttgtcttcataggccaactgcccacctctgtgtgtggacca

SEQ ID NO: 50448 - DNA, 1258 bp, Cannabis sativa
aaaaaaaaaaaaaatgcacaattcataattaaaaaaaaaaaaaaaaaacagtgacaacaatattaaataaatatactgtttcaaaaacattgacatttttctgttttctcatacattaatgaggagttgatatagaatatttagattttcagactaatatttatggactataaaatggccacgtaacacgttatcaaacagtcagaacaatttatatatacatgttattcacagaattacaattatataagttgatttaagaagatgatcagcaatagtatgtgcaccaacttttgtttttggttttaacaatggccaattctttctaaaaaagaaataataaattctatttcaaataaataattaattgaagaaacaaccatatgttacctactagttgtaatattaaaagtggaaaaatttaattgcctgccaaaaatatatttccaggactaaattaccaaatagtgtaaaacatagtaggccggacaaatatatatttaacacctcaaacatagaaataatttttatatgtcattaatttttgttctcctattgttaaaaagaaatatggatatgaatatatatacatatataaattaaatatatatatatatatataaccatatataggaatgaaactcatccttataccatctatattagtaaagccagtttttcatggatggtgagtcataatacatatatttatcacagaacagttattctggtactgagattaatcggggagaaaaaaaaataatgataaaatgtatcaaataataataatagcactgaaactacgtacgatacataataatacttagcatatatatatataaatactttacgtaccataatagagaaggcaaggtctttttttttctgacaaaaatagagaagggtcttgaaaaagcagaatccagaatggtttttgtgaagagaaaggaaagagtgagacgagtttttagattagatgaatgtaatttaatgttgtggactggtataggtataagtctatctttctaataattaagaatacggacagaataatatacatttaataaatatcttcaattttcatgtcaaaaaaaaaaaaatatcttcaattttagtcctacaaaagtaaaacctaataacattgacagttaaaatttatcttgtgtcaaaaaagaaaattataacgatcaatactcatagggcccgtttggtacgcagaactggattgaattagataaactaaggtgccgtttggtaa

SEQ ID NO: 50449 - DNA, 1469 bp, Cannabis sativa
attctatacatattctctactattttatgctaattaaagttttgagaaattattttatatattatttttttaatttatttttatgatttaagttagtttggtggttactttgatttaagtttgatttagattacaatttagagtgttctgttagttgacatgtagatttttataaaaatacaaaaaaaaaaaattgctttaaagtgaaaaaataaaaaaactcccaggattttttatccttgaactttaacatgtacttaatcatgtctctaaatctttttggccattaaaattttttcataaactattgaaattgttagatttaaagatatttgtctaattttattctattttactaattttatgattattcatgtactaaattatccaaaccgactaatttattgagcggattgaaattttatactttcttaattgagtgggttacacttagatttttgtatcccatctttacgttgggttgaataaaatgtaacgtaaactgatccaactatttaacgtacacccaaccacaagttgatgtataaagatatataaagatatttaaacaaatgaagtagagttgacgagaatgctctaagttttaaaaaaaattaaaataatttaacgttctaaaaataaaatttaaatattctatttttttattattttatatgtccattaaataaattgtttaaattttagtttaatactaaattagttcaatttttaaaaattgcatcttaaatagttataattacaaaaatatgtataactatttagatacccaaaatgtattattaaaaaatccatcactactatttaaaatactttagaaatcgaattaaatagatattaggctaaagaaagtttgtttgagaagaaaatgagacactaatttttacgtggttcagacattaataaaccttaatccacaagacactgctgctaaactctttagctatgaagtttacaatgtatttatggttctttgaacactaaaattcctaactctttgtatgaaggattaatggcatatatataagtaatttgttggtgggtcggtgcggacacgttctcattaaggttctattttgtataagaaagtctacttataggataaatacaatataatataggctattagactgggtacgtgagacctaatttggagatagtcatccttacacgaagatacagttgacaatgacagatgtgcgtaatgtgtcgttgggaataatgaatgttgaaatagtgggtgtttgcccaaaaatgtgattttcttttttgttatgagcctttccaacttgtgacacaggtgacaagtcgcctgatttcttcggatcgtgtcgtaagtgtgccacatgggtccactttcaggacactaactgatcttggacgccattttgtattccattcccgaatggcccctaggggcatccttctttggttcacatctttctacttgc

SEQ ID NO: 50450 - DNA, 780 bp, Cannabis sativa
cacaaggaagggaagagagattctttgccaaatttactttttctacaccaagacatcaaaattaagtgagaaaagtctcaaagtggtatagaaaccacctggccgacttgtgccgtctttggacacaatagagtggcacaggtcgacgacatgagatggtgaagtttttttttttttttggccaagtatatttccaacatcaagataccaaaaataagtgagaaaagtcatcaagaggtgtagaacacctatggccgacctgtgccatctttgtgacccaaaagatggcacatgtctctcccaccaatagaccaataattatgtgactaaagtatttttctagcatctacatgattaaactaagcaagaaataccatcataggcttctcacaaaccctagtcgacttgtgccatctcctggtaccaaaagattgcacaggtctcctattagagttcagacgtcgagatgaagtttcgggaccccgaaacctacaaaatatgactcaacataaacaaaagtcaaaatacaccctgaggtgtccaaaagcttgcaagacatttactaaattttgtaatggactggacaaagcatcaataacatatcgatttaccatcgttaaattttaaaaattacaatgacaacatctagagccttcacatgaaatattatcgaaaactcatcgagaacacaataatttcttatcaagaaaccatcaaaaaacacatttcagctaaaattttaaaagcataaaaaaaaaaaacatcgagaatatatcaaaa

SEQ ID NO: 50451 - DNA, 2639 bp, Cannabis sativa
tcttagttttgctgatgatgttctgcttttctgtaatggagactacaaaagcatctattatatgttgcaggggctgaatctattctctcaaacaccaggtctattccctaacccttcaaagacttttgtttattgcaataacatgagtgacacagacattcaaagaatccttgatgcttctggattcaagagacatgaggtgccttttaggtatttgggagtgccaatttgcccaaagaaaatatcttcatcagaatgctctttgctagtggagaaaatggtagctagaatctgaacatggagtactaggcatttgacttttacaggaatagtggggctcattaactcggttttgatggccattcacttgtattggagtcaaataacggtgcatccaaagaaaattgttgttgagattgaggccatttgcaggagtttcttgtggagtggcagccaccaacacaaaggggttgttgccgtagcttggaggactatttgtaaggagaaatcaatagggggtttgggcctcaaacaggtaactgaatggcatattgctgctatgtttaaatatgtttgggtcattgataaaaaagaaggtaatttgtgagtgaaatgggtgcattgtgtatacataaaagagcaatcttggtgggattataaagctaaaagcagtgatagttgttattggaaaaagattgtggcaataaaagataaagtaaaagagatctatgatttagaagaaagggagcatttgactaacaagtatgtcattactcaaggctatcgaaagctcatcatagctgagtcaaaggaatattggtcgagtattgtgtcggctgaactatccaaagcatagttttattatgtggatggccatgcttaactgactcaagagaaaggataggattgccaaacaccaaccagaaattgataaaatctgtctattgtgcagcaatgaagaagaatcaatggaacacttgttttttaactactcttttgggcaggcttgcttgaatcaagttcaggtgtggctgaactggaacatgtgcaaaaggtcgctgccaggagtaataaaatggcttggaaaggccaaaattagcaagttcgaagaggtgtaatggctgctgcacttgcagctttcgtgtatacattgtggtgctcccgaaattcaattttttgggaaaacaaagttgtaagaagtgatgtaatcacagcacaagtaaagaatattacaaagtgtcgaatctcttgtatttggccaaaaaaactgaccaatagggatagaatatggtttgaaaccttgtaaatattagagattatttagattctcttattagagaatgctatagtgttgtaaaaaactttttggagtgatgaaattcacttgattcataaaaaaaaaaaaagatatggctctaatacaataatacaaaatataagataaatcttattgaatgagtatcataagatacttgtatgttgtatattgtgaatttaagataatgagagtgggctccttatatagggaaagcccttgataaggaataccaacacaacattctccagatgtaactgaacacctagttgttacaagaagaaaaggaataacaaaactaactaacacctagattctcacttctaatagattgggaattaactgcaggccttggggattcagtagccaaggactatcatggtatggtatatttcaatcattgtgaccgaagagcaatggcacgaggccctgtgctctcagtttgtcgaagagagaaagaaagagtgagctaaagagaaaatgggaagggtagggggaggaacaagagtgagcaaggattttgccttgaggttatttgaggacaagaaaggccatgatggcctttaattaggtcacccatggctaggaaaggctcacttggtcttcggtaccgccccaacagaccatgtgtaagggagaaagagcgagtgattgaaagagagaaaggatttgtttagggatttttaattttagggcttttatcacttcttttgacacccccattctatttttaataataataataattgctgacactaaaaaatgttcaacactcgctcactagattggtgagatgaaataaaaaattgagtagagtaaatagacacataaaatttatagtaatttagtccccttatcccgatggtaatggatctacgtttactttgagtctttatttctcacgagaatttaaagaaaattagctaagtctaaaagctccaatttttggagagggaaactagagaaaaattctctgaccttatggatacttttttaaatgtcaaaaatgagttagaggaactctccttttatagggaatgaggccctattaaaataataataaaatatggaaaatacatttaggctatttttgattgtcgatgatgatttaacggtgaaatttactctagaggtcagtcgttgattttcaaaattggggttgcgtcctcgggacccacttcgggtaagttttagcttaaatttgcaactctcttgaggaggatatttggaggtcataacttcagaattgtgattggagtgtgatgttagacatttatatgtataaactgaaatatatgtatgtatatataaaatgcggaataaa

SEQ ID NO: 50452 - DNA, 853 bp, Cannabis sativa
gttcctagacattttctccatgctacattaaatgcaaagtgactgttcaactatagccttcctcgcatggagacgcctaagcgtgcgtcgactctcaaaggggaagataggcctcttggtcatgtctgggagctagcatcacaaaatattgttgtgatttcttaaggaggtttagattagcttttaactcatcttcgggtgacgtgcccatgtcacccactacagctatcacgtatataaactagggcaatatttactccctaagtgttatttagtcatagataaagaagacttgtgagtcgatgacacgcgagtcaggtgcgtgggcaatatttacgatcgtcatcattggcttttgtttcttttgcacgcaacgatttgcttccttcctattgacacacccttccatcaatgccggatggatcatggaatttaaaccgttgtgaaccctcaccgtacgatggtatttgatcgacactacctcataccccaagtggtctataaaagccaacactttccccaactgggtcatctctactaccctttagtttccagatgttcaaacccacatgaaaaaattctagacgcccctgattttcttctgctcttcctccaccgttgtcaagcaaagtattaccaccaccaggagacatcggcctcttccgtgctatcttcgtgtaagttctctttttatatatttctttcatctgttagggcaaataatgatgataaaatgtgttttcgtctgatttgcttggtttccttgaagtggcggccatggtcgtcgtttgtgtgatgccccctttgataggcgtccgatgacctgtgtcttttctcattatacatttcattt

SEQ ID NO: 50453 - DNA, 2489 bp, Cannabis sativa
  modified_base (1030)..(1031): a, c, t, g, unknown or other
ataggaatatttcatttaccttacataacttaagaactgatgcttaattagtgttctgcaatctggtttgatataggaatatgtgaatctagatggtagaactttaattgtgaattttgaaaaattctcataaacacataaaaattttgttgtcactgtgcaggaatgctgaggtaatgctatagcaactgggaaaaacctaactaggagggattagttattcaagccactttttaccatattacacttcttgaaagcatttttcttgcagcagtaatattaattttagcaaatttaattacagtcattttaattttgaatcatagctcaatcattctcatattttttatttttgatttaagttgtaattagttggttttacattgtattttgtttgcaatccctgtcgagaaaatcttacttatcactttattacttgtgtgactgcgtatacttgcgtatataatttttacaacatgtgcgtacgtgcccctgtagtgcttattgtccaacggcttgtctgggatattacttttaaaggagaaacctttgagcgacacatgtccatatcctcacgtggtaacctgcgtccattaagcactacacgattgaagagctaactaccaaatcaatggatagatgatcttgtagtattgtacaactccatttgcgtgctgagtaaggaaccctagtggggtaagagggtatgccctcacccacccatgggcctataaatacctccattttttatgaacaaatggggaacaatttttcacttacaaaaactctgctgaatttcctagagagctttcttcttagagagaaataatgggaatacagagattaccattgtaaacacttgtaatactcaaacatttgccaaagaaggctaatactactgactcatggattaaggatcattaatgcctgaaccacataaaaaatctatttatctattatttagtactttgcaattccttaagctcttattaattagtttctaaaaatcttggtaaatattttggtgctnncattgagagctgaggaaagctagtagttgttgcctcacttcagctatggtgaacacgcgaaagaataccagtaagaaagtgccattggacacaatcatggaggacgctgactcccacacctctgacctccaggcaagtggcatcagagaagaaggtacggttcatgccaagaaccaaggggaggatactgagaacgtgtttgacgaccttgatgatggccaaaacctcaaaggaggagatgaagaaggtgaagatgatgactacgttagagatgggtattgcaaggatggatatcactatgatcatgacccgaacctactgcgagtgacaaaagacttagaggaaactcaaatatagttggatgaacagaaaaggctcaccatgaaaatgaagaagatgatggagaatctgcagagtaagtttggggatctggaagaatctgatggtgaaccctcagtggaactagtggccgaggaacgtgccaacttcacctaggcctcctcaaaaggatacaatcgccccggtcaaccctcaagggcacaaaaggccaccgatgcttttgagcccggatgcccttctgaccctaaaggcaaagtcgcgccatgaggacaaggtgcaatggcacccacacataaaaggcaaaggaatcaccccagcaactcggttaaccaaggtggtagaaccaccgtgggacagtccagggacagtccgtggaatttttgttcctagctaaagtctgactttttgctttcctaaatggtcctttttacagtaccaaagtgctctccaaaatgataatttttctgctttaataagtggggaaagtggcacaaaaatgagggaaaatggccattatgggccactttttgcattgaaatttgagagaattaagctgatgtgattgattgggagacacacacagaattccatgtgaattagagtgaatggctgatgagaataggggacacgatgtgagaaggaagggtttagcattgggagttcgtgcgcatgggagtttgcatgcatgtggaccgagaaatggcagctggtctagcagctagcggctggcttgagaatggcatggcgtctaggagacaaagctaacacgcgtcagctgatgtgggctcgcctggaagagaaaaagaaagagagagaaaaagaaaaaaagaaaaagaaaaagaaaaaaacatttttatttttatttgggctttttcaaattgagcctttttttcttttcttttcaccactttgcctaaatttaaaaaataacacaaaaattaaaataaattgaatgtttccaagtagaataaatttatcattaaaaataaggaatttttaatatatattaatatatgtgcacaaataaaagcttaaaatttataaatttgagcctttatcaacaggacatgacaaaaataacaggtgtctccaagacacgaaaggaagaagaaggataaa

SEQ ID NO: 50454 - DNA, 1100 bp, Cannabis sativa
tttttggcaaaccaatttacttactgtaagttgggctcttaagtgggtgatcatatcatcaatgaaagaatctgggctttgtgaaattcttgctccaatggagagtactggtagtaaataattattcaagaaatcatttgacccaacagtaatggaaaagaatgacttcttcattatgaaatcttttgccttagttggacccaatagtttatcaaactgttttcttgtggtggtgaaatagtcaatctgtatatccattcctaatctattaacctgaaaaaaaaaattatcataaacataaacatatttttaagctcacataaaaattagagtagattttaaaatacaaaagaagtaaataattaataataaaaactcacaaatattcttccagttgcattcaaaattcccccaccaccagatgcataattcactccatataatattgcttttccagttgtgtttggtgccaaatatgggacagcaaagtgtgattgtcccaattcttcacctgaaaaaaaaaaggcataactaattaaaagtgcttcatttaagattaaaagatcaaatatatattgttgtattgtgttgtgttatttatatataccaactatatcaccaatggttctcccattggtatatcgaccagtggggttgcctccagaagctttgaaatcaatcccattaggaggaatatttgccttagacaaagtttgcaaataattattatttccagcatcaactagtgaatctccaaaaataaatgaagctcctaatcctttgctatcatcatcactaccagctttagccaaaaaaacccaattcataaacagcacaaaacaacaaaccaaagagctagttttcatgcccataatttcttctctactagattgtctttgctacaataaatatatataagtatagttaagaatagtgtgtcttggtctttatgcattaaaagagagtaccacttgggtgaaacttgtggtcttgtttatattaagttacatttggtttgactctgagtgaaactaaaataaataaattaaatggtttaattaagaaaattgggtattgtgtttgacaaatgttttcaattg

SEQ ID NO: 50455 - DNA, 1084 bp, Cannabis sativa
aagaagaagaagaagaagacattgtttgatttctaccaacactgatcagtttcccatcttcgagttgaactcgtaaacccatacgaagaagaagaagacaacggtgatctctgaaaatggttacccaaagacaaatcatacatagccctagccgaaggatcagaaagcgtagcgtaagcgttatgaatttcgatgaaatcaagcccatcagagatcgaatcatcttcgtcttcagcaacatctggatgatatagcttggctagattccggtaagccattttgatttcagtctgagaagcgttatgctttactctgaggacgtcgtagaagcttccggtaatggtggatttaactctgggtctttccgttaccgtgaaagccttgacggcggagcttcgtctgcttcgattggaggaggaagaagacgacggagatgatgggaattttatgaaaggggcggaattgagtcgattttccggtgagagaaagagggttgggagaactagggttagggtttgggacataattggggattttgggggaaaattgagaagtgggttttttttgtatatggaaaaaatggggtttgaggagagagagtatatataagagtcaaagatgaggagagagaaagttgtttggagggtacgaaaatcgatgggaaaatggggaggaaagtggaaaccgtgtgttgtgttggttttgtaattaaagattggatttttattgttttttcagtgggtagtgatgatgacctggcatttttatttaaaataataaataaataaatataaatattttttgttcttctagaagatctatctgtcgtttaataaaataatatcctatactaaatatcaatgcaagtagttttgttctttgccatttgtttagtttgtgaggtgttcaaccatgtatgaaattaaattcataattataagggaaatgctaattaagttattggtgtagtattgttaattgttattgatataattgaatgttgataattgttaaaatgtattattgttgtttagtactattcttggtgttatattaatatttgtgtaattaagtattgagtctc

SEQ ID NO: 50456 - DNA, 830 bp, Cannabis sativa
agtttaccaatggaataaacccaatccattggatactagaaagattgcgagtatacttttatggatggacatcaaaattcttatcaagggaagctagctgtccagccctaataaggtttcttccagcagagaaataggccacaacaacaatctcaacaactaagttctagtggagatttgaatattcaaactaatttattaatccaattcatgatggaaactagattctccattaaaacttttgaaaatcaaatgggacagttggctgcccaaatggttaatcgtactcaaggtgatttacctagcattacagaggtaaacccaaaagagacttgtaaggcaatagcattgaggagtgagaagaatatgaggggccaagagtagagcagcaagtgtttgaaaagtatcatgatcaacaggtacaagcacatgcaccagtgaagaagagggctaggggtgagcaggttactgaagatctggaagaagaatagaagccaccacttgtgagaattgaccaccacatcaaaatctcgtatcctcaaagactctacaagtataatcttaacaagcagttttcaaaattccttgaaatattcaagaaactgcacattaacattccatttgcggaggccttggagcaaatgcaacttacctgaagttcatgaaagatattttagtaaaaaaatgaagttggaagaatataagacaatggcacttacttagtgtgatcctcaaaaaaaaaaaaaaatgccaccacagcttaaagatttgagtagtttcaatatttgatgctcgatagggggtttgttggaatcaaaagctctatgtgg

SEQ ID NO: 50457 - DNA, 1103 bp, Cannabis sativa
taaagaaattgagtttttttttttcaactttgtaaacttttaggggcgacaaaagtcgcccctaataactttaggggcgactttagtgtattaggggcgacatttgtcgcctctaaaaatattgaaaattttcattgaaaaagaagcgggatttttcccacccatagtattaggggcgacttttgtcgcccctaaaagtcttaccagttttcattaaaagctccaccccaacccccttctccttcttcattcatttttcattttttttctattctcaaacaaaaaaaaatccttacaaaaacaaggctcagctcccacgcctttcccaccggcagctccgactccatctcgccgaacccctgtctcgaccgcctcccccttctttcttcacagtcgaaccaccccaatttattccgaccggccaatatcgtctaaaccgaatctatcccactttttttgttggtaagttttgtttctctttttagatttttagaagaaaatatttgtgtatttttgtatgttctctttaagtatttagttttttttttgccttgttgaaaaatttaatttatgtgagtgtgtttttaatgcagaaatcatagaggaatataaaggtaaattttatatttttatcttttttggtcattatgtattatattgaaatgaaatttgattatgtaaatatatttatagtattttgtatgaatttgtataaattaggttaataatatcaatttttttttaagaaaaattgatttaatgttgtgaaagtgtgatgaaaaatatgatttttttttttattgttgttgttggtgtttatatgtgtgtgagtgttttttttttttttttttgagagaaatgtgtgttagtgtgtatatatatatatgtatttgtgtattattttaacaatagtatatatgtatatgtgtgtatgattatatatgtatatgttatatatatatgtatgtatgttatatattgtatatttttgtgtgtatatatatgtacaaatttaggttaataattttatttttcttttaagaaaaattaatttaaaaattgtgaaaaattgttcataggtgtgtgagtgtgtatatatatat

SEQ ID NO: 50458 - DNA, 1042 bp, Cannabis sativa
ttataatattttattagttgtcgaaaatctcggtcaacaccagcaaacacataaatcaaaaaaatataacaacagatgaatctaatagagggctgtcaaacacaataatacaagagaattattgcttccgatcctaagttcatgctacaaaaactgcaattcccgtaagtttttaggtgtcacttaaacaatttgtgtcggtttagaaaattgacgtacataccatagtcacaaatagttttttattagcgttttttaaatgacacaaaaaataattctcgtcatttaaaaactgacacaaaatatacactgttcttttttatcttttgcgtcaatttggaaatgatgcaaacttgtttgtgccatttcaaaactgatactaaaaacatatattgtcggttataaaataacacataaattgttgaaatatttttcttagatctattgcgccagttataaaatgaagcatagatgtaagtaagaaaaaattgcaaattttaatactattttccctacctgcatttttcaaattttagaatgattttacatgatagtaattcataatacaaagtgaattaaaataacgtttataaaacttatacaaaattagtaattaattctatgataaataacaataaaactaactattaactaattacattatactaaaattgttactacttaatcaatataaataattagatatacacataatttgcaactcaaacaatcaaaaattagcaattaattctatgataaataacaataaaactaactattaactaactagataacactcaaatgtatcgagaaaaaataggaagagaattattcattaattagattgaaatttatactttgcaactcaaacaatcaaaaatttacaaatgataggaagagaacattaatacattggtataggcttttacagttcaaatctgtttcagattgattatatctacaccttagcagcaaacatttcttgcaaagcatgcataccaaattccagaaactctaagaccaatacccaaaacgaaaatag

SEQ ID NO: 50459 - DNA, 1960 bp, Cannabis sativa
  modified_base (647)..(650): a, c, t, g, unknown or other
  modified_base (910)..(916): a, c, t, g, unknown or other
ttactcggatgtggtgtttgtccaagttgatattttaatatatatttatttattcccatagataaaaagttggaaagagaaaagattaggagaccaaaaaaaatcgaatctattagccattcaaaaatagaattgctaaaatattttattggtgcttactattagggacggatctagtctaagaaaagaaattattacatggaatatttaaattttgacactttatttataaaaatatattcataaggtatggataatatttctatattttatgttcttttaattatcaaaatacatcttagagaatcagacaatagttgaagggtggtgggcccaaagttacatcagacgaaggtttcaattagacaaaataactgttaggaaaatgtttatgcaactgttatgaaacactaaaaatcagaacagtattttcacgtaactctatctacatgtctcttcatgatttaatatgaacaaattcattattagaaatttggaaaaacaacgaaaatacactaggataaacattttactatagtattgatgtaatttctttttattatacttgagttagattgtttgggaactccagtttaactttttgagatctatatttcatagatctgaaaattgaagtcaggacattnnnnttatgcaaattaaactggatttccagttgaattttagtttcgtagtagtttttttacactttttttttcatgaatttgaaacagatcatgttttgattgatgctggttgtcttctcatgtgaactcgccagaattaatagtggttctctttctaattgaattttcgtttcggttgcgttgggttgttgcgtggttgcgcgatggttgcccaggaagcatgtatcctgagtcgaaagtgtgtgtaagtggtatttgtgtannnnnnnttatttgggttgtatatttatttatttgttcagcttgaagtgtttttgtaaagtcattgaggccattggaaattaagaggttctgagttgggttaagagcaacaagtggcaacatgtcgagattgagattgacaacttggttttggtacaagccattcaaggccatcaacccatgagctcctcttcggcctactcatcaaggactgttagattttattatctactctgtctaatgttaatttatttttcataagacgatcaacaaactgagtagcacactatgttactagacattctcagtatcaatttggttgtagcatttctaatatttctatttttgtttatcttcaacatcttttgtattcaaagtggtatttcatttcaaaacaaaattaatagtgatcaaacattaacaagatgataattaacacaaaatttcataaacaagtaacaagaacaaatatagaaataatgtataaactttaattcataatttaaaatagtttcattaacactttgttagggtttatgtcttaaaagcaagtatttattggataatgtatgcaatacaagttactgactggatttttagtcagttgacgcggaaatgaaataaatgagatttaaaccaaaacatgagtaataaatgtaaataatgacaccaaaatttgaagaggttggccccaagtaggagtgtgtatcggtcggtttacgttacattttattcaacccaacgtaaagattgggtcacaaaaatttaagtgcaatccgcccaattaagaaaaaaaatttaactcgcccaatgaattggtcgatttggtcgggttaacccacccaaactgagcaccagtattttttttcacattcaattattatattttaattaattgatataatgagacaaatatatagattgaattcaaagttcaaatctaacaccatgaaaaaaaaaatatagtagtttaaacttttttttaaatgtgtatataaattatagtatatgtaaactatatataataaaaatatatatacaaaaaaaaaaaa

SEQ ID NO: 50460 - DNA, 1620 bp, Cannabis sativa
tgtatgttattttttgttgtaattttgatgttatttttatgttacttttatgtagttttcttgttgattttatggtgttttatgtaattattccaataaacaatatccataagagcgctcctactctcaatagaaagaaaatacctctttctttttcgataaagaaaaatacctcaatttataccttcaacaatagagaatagaacatgcatttttttattagttgtttagtgatttaaaactaataattaatttttttaagaaaacaataataataatttatttgtttagtgaacagagacaaaacatacacaagtttatatttctcgatagatttaataacactaaatacattacattttttaagaaattacaaattctatgaatttttatactttttgtgctaaaatatgatttttttttttcaaaaaaattattttactaacaaattgaagaaaaaattaaaaagtatagaaaaattaagggtaaagagataaccaaataccttatgctattctttttctatatattttttaatttttttttatataataacttcattgaaaaaaaatcatatttttacaaatttatattttaaaaatcgttttttttttttgggtgatagtacattgcatacttttgattcaacaaaaaaaaaaaactttacatacttttgacttttgaggtggtagttgtcatttttattgctccggacattgttccttttatcttgatctgattcctatttcacaatatttttcatatccttcttttgtcgtcgtttactgtaaaaatagtcgttttcattgtcgttcttaccaccgcattaaaaaaaaaaaaacttgcgtctttgacaaaagggccggcgttgtgtagaaattaagaaaggatggagaacgatgtattaacaactaagtaaagtgttttcttcatcaaaagtaaaattgaaggtagaaaaaagtatgaacaagaaagggttggccattttgatgcgaaccaggatgaggcctacgcctaacaactcaacaaacctctctcactctaaccctcctatcaatgtaggccttacctttttaatctttactctaattatttttatgcttttttttttattaattttaaaatactgattccatgaacagagcttggtgaatcagaatctctccaattcggaagaaaatcgatcaaatggacgtgatcaacagggaaactataatcccgatgcttctctcaataatcagaggttcttaatcttatttcattcgaatttcgatttggttttgctctacagttgaaagtgcttattttgtatttgtttcttctgataggaatttggaacatgttcgggaatcgatgcattctgcaatatcaatgaacaaaactgaagttttagaccctgtactcaatgatttcgctgacgtaaatttcttcttcttctttttctttgtttgtttgttcgtttttcaaatttcatatcatatttttggtaatgtagggctattttagtctttctcatgaaaatcgccggaaattacttcttgtgcttgccaaggagtatgatctcaataggacacaagttcgtgaattgatcaagcaatatcttggacttcagcttccaac

SEQ ID NO: 50461 - DNA, 709 bp, Cannabis sativa
atttggtgaaacgttgtttctcaagtctgttttccataaacaagaggaactatgcagcattttcaagtaaaatcacaacttgtcattgcttatattaactttgattaattaatcgatttgttagtataatttaataagtttttgttaatttgtattgcaggcttttgggtacactcactgagaaactgaaaaagtaccaaaaactttccccaaaggtaacatatttcaagatttttctctgtttcttctccttctttcaatacaaacatattatcttattaattatacaatgtaaaaacttcttccaggacctatcagaacagttcatctatgttgaaccacctataattgatcttctttgtttgagtttgtttttattagttatgaatataattaagcttattaaaatcttagtttttgtgtatttttttatccttcttttttttttttttttttttgtgttgtagtttacttatgccgtaattatgatttatctttgttttttttttcttctataatatgttattattattattattaggataaaatttacacgtttagcacggctcatcctccaacttcatcagctctacctccaacttcatcatcagctccaagctcatcttcccctcaaaaaaggtttatctttattaattaattaatttatttaaatttttatgttatctattgactttttttttctttaaaa

SEQ ID NO: 50462 - DNA, 2377 bp, Cannabis sativa
  modified_base (227)..(233): a, c, t, g, unknown or other
ttaagatatcctacaaaattttgagaaattcagaataatttacaatatagaaaatagtattcaaacagtcgactttacacgcgtataaaataaaatagtcacgcgtagaacacattatttgaatgcaattttcgacgtgttaaacatttccaaatttcttaaaattttgcaggatattttaaataattataatttacatgatcataagaaaaaatttgactaaaaannnnnnncggatactaaaacagatagagatgtattggtatatccgttttaaggggatatattatagaatttccctaaagttcattacccttaatagcattacatacaaatttagtaggaaaatatttttttctttcatctcttatttaatcaggctctttcttttgtaataatgtaagtactattgatttctattacacattacattagtaaacataataagcaaaaaaaacacatttacattttttttctcaacgaatattttctgattctcctccaattccatcaatcatagaaatcatcgcccaaaaaaaataaaaaacaaatacaaaaatcataagaatagacatatttatttagaaagaaaaatacagaaacataaatgtggtatttagtaacacttttttaatacgttttttaattagaaaagtgaagatattttttgaaaacaaattctttaaaattgttttcactttctttattttttaatcgataatcaaaattttaaaaataaaaaagtcactttcaaaaaaaaataataaagagtttttttttttcttaataaatattttagactccaattaagcccatagccaagctcaaacctggacctcgctcggacgcgaaccccaaccctagatttgaaccccaaatggctgcgaaccacgaaccatactcggatctcaaaccctgacctcgaacacgaacccagacataaacccgaacctaaaccccaaacttggactgagacccagacccgaacctagaccccaaacccagacctgaccttggaccccatacccaacctcggacctcggccccagagtcggacaccaaccctatacccaaacccgaccctaaaccccaaacccagcccagccacagatctggaccacgccccgaaccctaactaagacccggacctagacacaaatccgatcccgtattcgacttaaataaaacaaaaaaatgaaaacaaactttacaaaacttatttttgttttttgtttataaaattttaaaaataaaaatagctatagaacacatttttatttttcaaaaacaaaattttaaaaaacaaatactctattttcatttttgtgattaaaaaattaaaaaaacaaaagtatttccaaacactaccaaaataaataaaaactctctttcaaaccatcttttgctaaaaaaaaaaagtcaatttattttcttctcattctctctaagtaataatttcactaataatcaaaatacttaactaatttattatctacaaaatgatttaaaataatgaagtagtgaaagaaaacaccttaatagtagaaaattttcaataaccatgcttaaaaagacatctaaataactaataaatttatgctactatattataccatttaatgccaatattaataaccttataccaaaagtacccctacccttagaaatctctcaaactctcttttctctctctattgtatctctctcctctgctgtcgaagaaacgacccacaccgaaaataccatgacgatcacaaacgtcgtaggaccacacgaccatctcacgaacactgagcctgctgctccaccgtcgtggacgacatgaagatgatatttagaaaattatatagttcattttttgtagatatgtatggttgttatttgtattagtttttactatttttttaaacagtgagatctcattttatggtgtaatatgagtattttatttaaattttgatgcatttttgatatggtatcgatggcttctcaatatatagcgtactaaggtcaataatggccattttcgacactttctcgattatttttagataggtttttgatggtctgcttatttttctaaatatttttacttgattttcgattgtaatttttgtaatattttcaatggtttctcgatagttaactaaaaattgtgttgtgaaagatttttgataagttcttgatagtttcctgaaaattgtgttgcaatagaattttgataggttctcgatagtttttcaatagactctcgatgggtgggtcttctctggatcatcttcttgtggacgacgcaagtaggggtttctcgtttaggctccgatagatcttcgctcgtcaagcttctatgactgagcgaaaattgattttgtgggtt

SEQ ID NO: 50463 - DNA, 1955 bp, Cannabis sativa
atgtttttgaaaaatatttttattttttcaattttaaaaataaaaaattaattaaaaaagtattaccaaacgacacctaactaaataaaattaaagcaaaagcatgcatcataattaatttattttctcacattattggtgtccatcatactcctatcactaatagtgaataataaataaagaaattagagagttacaaatagatcaaaaaatatatataggtctcatttatataaagatatatatctattctatataaaatgtgtctatataactcttggtttatgagaaattaacctttttttttttaagttttctattcaaagataacacttttatttattaagatgtgttttaatattaattttttaaataaattaatattacttttaaagtctaaatcaccgatatttttgatttaaccaggatatactataacttaacagaatattcctaattaatttatattattttaaaaaacgatccaccttgtatattattaattaaaaacgattactttcatcttagtttgcatttttcttgttagttttcgtttatgagtttatctaattacttgtgtaatatattttctgagttcagtatatgagatttttgtaagtgtaaggacattgttagcaattaataaaagttatattaagttatttgatgaatatatcaccactctcattattataagtcaatatgtgtagtacttttctagaagactaaatttattgattttaattaatcaaataaattctttatcatagtggtagcttatttctggatcaattgtttgagtattagtggttcgtttttgccttattttttttacaaaaaatttcagctttgtagactaaataaatagtcgtcataatatccaaatatggcttttgggccatttcttccttcaaatttctatgattactctttaagatataattattttactttgattgttttctatcaaaatcagaggagatggatagtcttcagctattttattttatttaagaaaagacaaggtttgtaatcgtacttattgttaccagtttataatgtacggtacttattgtttgtaatcatttgataatttaaaaataaagagacgtgaagaaagtttctctatttaaaatgtatatgtgtattatatattatattataatctcacataataattaataatatattttttcttcaattatttttttttttaatttttttgaaatttttttcttcaattattaatagtatcacttctaaataaaataaaataaaaaatatctaacataaaatttagtatattgcacgtatgtttttactagtatttatatatattgtcaagaacaccgaataccagcaattgttaaaagacttatactaatagagatataggtgggattttaattgcacacctaatatataaatattagacattgttaaaaccaaaatcccataaaatgccaatatcatcaaaatttgtttgatccatttttgaactcatgttcaagcaaaaataaataaataaaatagggaagtaaaaatgttattagtatgtatatatgtaatgtacccaacggctgttggcgaggacattgagtttgagtgcgtgaaggaattggtcaacggatggagaaggcatgcagagtctttctgcgcccaacttcatgcgcaaagcattctgctctgccctaaatacctgaataccaccatcttctcttctgtatgccttcaaaccttcgaataatccctacacaccacccaactacttaattaattatcattaactaaatcgcccggaatttttcaatttatttatttgttttaagaattagggaaatcctacaatgcactcccttaaaatagatacattgatgcacccttctctgtcttagtacccgaaataattttttagtcaaattttttttcatagtcatgtacgttatagttattta

SEQ ID NO: 50464 - DNA, 1325 bp, Cannabis sativa
atgtgtcagtctgccgctattactgattaataccgactaggtattatcggtgggtcaataccgagaccccgccaataatcacttataccaaccgaaaacgctcctattgctagcagatcctttcgcctctaattgttgtaattgttgtagtgtttgtttaactaaaaatgatttggttagttgtaattgttaataatatttgtatttggcaagaattagtgttactactggtattcatataagaacaaccaatgagtcacttatacatgttacatgttgattattatttataactcaaaataagtgtattacataaatacatatcatataggcatatactttaaaatatatatattgtataggtatattttttataaataaaatatatattgtatttctataatgtggtggtaagcatatttctatatcataaataaaatacttatcacactctttggctgatagttataacaataacagtcattgtacaaaataataatgagaataaattacttaaataattttaaataatttaaaattcggtttattaatattaaacataatattaagagggtttattaaataattttaaattacttaaaattcgatttattaatattaaacataaaaaaaaataaaaactctaagaatgcacatatatgttgatattatttattattagattgttatttatgtatttatttttttattttgaagattaatgttatgttagtattatattaacaaattatttaaataattaagcagaatacaactgaaagggtatttccaatgatttttataattcaggaaacctttccagaagagaaaattttaaaggcaaaactaccataatcgtatatgttaagatgtagtattaatttagtgattaattctggtgtaattatgtttagttactctgtttatatcgagttagttattctttattgggtgtaaatatcctttctgtattcttttctctttggtccccactaacacgtggtgtactcttgtggccttaagtcattttcttgtaatcagtcacctataaatagaacagtacaatgcagcctcttttgagctgacatttccttttaccaaattttctgcatttttaatgtataagtcctatttattctaataataataataaaaaaaaattaacaatataactctggcagaaaaaagaaaaaaagaagatatttttgttttaaaaaataattattattccatataatattttaataattaaatacgatccaaaataatccattagttatatagcgtaacaaaaagatcaaatatttcaaaaaatatattataat

SEQ ID NO: 50465 - DNA, 806 bp, Cannabis sativa
tatgtatgattcatcactcttcctcctcacacttgaaagaatttgttatcattgtttagcaacagaatgtctatacatgtatgatttcatttcaagctttttactgttatatatgtctcattcgctgttactatttcgtccagatggagatggtgtggcatgatgctgctgataattcgggttcatcaaatatgagaagatctgattcaatcaaatggcctgagtggaagtgatcaccacttataattcttagttcagagattctggctgtgaatacaagaagctgtttttttccaaagactaacttaatcatggctcgaaggtggttatcaaaagaaactttgccctgactatcagaagcaaaatcggtacaacaggtgcgtaaactatactctttggtctttgctgtcattcatatcaatctcgaggctgctcgagattcataacactatctaaaactatatgttattgatatatgtaatgaggttcaatgacattcaaaccaattgtcagtggtagaaccaagtaggaaaaaacacggcggcaatctacagtacagaagaagtgagagagaagaagaatagtccagttgtgttcagtcatcttgtacgtgtttgatgttctataatgctgattttgatgatgatgaaaagcattctaattgcttgggagatgttttcttccatggatttatggttggggatgggaggcccagccatgtagtcagtggcatacatagctaaacaatggtttggcaaaaatgtaaaatgaggtattatgcaacatttttggtgataaactaaaaa

SEQ ID NO: 50466 - DNA, 1372 bp, Cannabis sativa
  modified_base (1272)..(1279): a, c, t, g, unknown or other
gtaccaactcgcccgagctatgtttcgtcttcaccgcttccttcctacaatccgtttgctcatgtccaaagtgaccacaagtaaagcataatagtgggaggctttcaaacttgaactggatccaagtttggccaccattgtgaggaatgtatctaccaacaaaggctcctttagaagtaggaaattttatctttactctcactgaatccctcattaacataacattggtattcaaccattgtatatccatcacctctcctgccatattgcccagccttttaacattattcagagtcaaggcatttgggggaaaacccttcatcttaatccaacactccaccatatttaaactagcctctttccagttaccatttggaggccatttctcagtgattagtattctcccatgaaatatccatgttgattttttgtataccttttcagccaacactttatcatcaaaggagagcccaagtatcgtacaccccttttcttttgctaatatatccacaaaccaacctccctctttctcccatatcctactgaaaacggttttaaagaatttgacagtacaatgtcttcttgctaatactctacccaccaaagaaccttccttgaacttcaaggccacttgttcatttgattcccactcctcctccccttcgacattcatgcccccagttaaggagataatgttttctatcctctttcactcatctttatcatgcaaaactcaccagccacactcactagacaccaacccacagcctccagcacagaaccaatgaaccacggctacactacgagccacccagggtcacactcctcagagagaaccaaaaaagttttcaacaattcaattgagataatatctatggatgcaattaataccactaattcctcatatgaagcaaaacatttatggcataaggaagtgaagaaaacacacacacaccactaaagttgagactttgaagacttgtatccataatacatatttactcgatcaatatatggacgatgtttaaaaataattatatcaaaaaattattaggttccttaattcatgttaatataatgatgaataaaatacacaattcaaaatttattgtaaaggtaattaataataaaatcacggaaaattgttcattataagatttttttttatttattattcataaaaagaaaatacttttttttattgactttataaatatagatcgcctgttgagttttgtgcactaaacaaaacattttatgttgcatggttcnnnnnnnntatttcatgattatacttaatgtataaattctattaagtccaaaatatacataaatgtatatttattcataattatagtgtcgtcagcacagt

SEQ ID NO: 50467 - DNA, 565 bp, Cannabis sativa
caggtttctttaaaattttaggttggacgggtcgggtctaggcgggttggctgtgttcaggtcaaactcggtaaagatgtccagccctaatggagactctctctcccactttctattacattctctctttaaattgatgacaaatatcacattccagaatccctaattttatcaaataaatagtcgtgacatattaattatgtcattataattaaattacttaaccttttattttacttaacatatttttttttctttcatttagacgaaattaaatttaaaacaataaagtttcctgttatatttgaaaacgtgacgagaatttatgtggtttggatgttaatgaactctaatctacgagtcaatattatttggctagaaaagtcttcgagtattatacaagtatttttgtctagtttatgaatcctagttgtttgccttggtttgtaaaaaattcacccctcttgtgtgaaagtatcatgttatatttataggctacagtcgggtataattgtacctagacctgctaggaacctaacctactgatggggtaaatacaagtaat

SEQ ID NO: 50468 - DNA, 1065 bp, Cannabis sativa
ggcataaaacccaacaaagagaccccctccaatcaagaaagatatgagcaagagggatatcattaaatacttgtaatttcacaaaaggttttgtccatgatacccatgattccaacaacctgtaggaggaaattgaattcctcatcaagaaaaataatccacacatacatctatttattaagaccgaccaaacctaacaagccacccatcaatacaataatcaaaattacctaatgcctccaccagttgacgaaaacttgtaagtgattatttggggcctacacattgttagagatatgagcaaggtgttgtggtatttttcaatgcaagtatatgtatcgttaacaagtaatagactcacaagagtgaggtcgatcccccaagaattgtagttaagtacgttaaaattaaacttttgtttctatttggctatatcaaatattttagagaaaattaaaactagaaaaacaaaccaatacaaacaaaaagcaagaaaagtaatgtgtgaattaacaatgattagaatttagggttattaatttcaattgtatcaatctattatggcctaatataattcaattcttagtaccaatttctatgcaatatgaggtttactcaagtagtttatagtcttctcagatatataaacctcgataacatgcaaattttctactttcatgataaattaaaacatgtaaaaggcaattaaacacaaaaactatataagctatccaaagcacatattatatcaaaatttatccttatttcactatagcataattgacactcacatcttagatctcgtatcgaaataaaaaacaattaattgatggtcaggaaattaaaagaattaagaacgaatgaaatagaacacatagaaaattgggagaagaatcaaatcatattaaaaccataaaaagatgtcaaataatatccatcaatacccaaataattgtctagctactcataatcattgtaaacaattgaaatacattaaataagagattaagaagaaaatagaagagaagaaattggtcaaagactccattgaaaagccttctaggt

SEQ ID NO: 50469 - DNA, 895 bp, Cannabis sativa
  modified_base (341)..(343): a, c, t, g, unknown or other
gtagcactgctcaagattgtacaatatggcatagaaaaatcatgtcatccttaggataaaattctgtctcgaactcccactctacagtagaagatcgagatacaaaaacccaaatataataccactgatggttgatcgaaaatggttttatagaaatctatctttgtttatataagagatatgtttctcttgttagtgagttgcactatatactgaatggacttagaaaatataaatgggaagaaatacattttaatcggacatgtccttaaaatatgtaattgtaattagtttaattaaacacgttttcataatttaaataaataaaattattattattnnnattattattttattaaataatttttttgtaaacttgcatcggacggacgacaaagctcatgtgataggtcaagtatgtatcttgaccaattcacacaaaactaagtacccgttaggaccccaacccgggccaaaagtttctctttatgtaccttgtaaataaaggctcatattcatgagtaactgctatctacatacaacatactaagatacttttttttaaaaaaaaattcactaaccttataaaaagtttgaacaagaacaaaagaaaaacataatttttaatttaacccattcaagcatgtggtatgaaatcatcaccaagacataattcaagtcaaccctaatagttctcccctataagtattattaggggcgacaaaaacaatcatccctaattaaagggcacaaaagctcccgtcattttctaatttttacttttagggttgaaaaatatgcaagttggaattttacgaaactcaatttgggtcaaaattgagaaagttgcacttttttaaaaaaaatgggagtcatggatggtcgagatagggcg

SEQ ID NO: 50470 - DNA, 1011 bp, Cannabis sativa
tttagcttccctttttataaattagattgaaaaaagggaagctaaaggcttagattgtagtagtgtagagtctcttattcaagtttgacatttgagtatagtttaaaacctcttgctacattttaatgtatcagcaaagttaattatattcctcactctttttctatgcacgactagagttatatccctaactcttatagatgtacgagcagagttatgtcccttgcttgaggttgtgttttaattttattgcttatattatccaagtactttacacactctatttttcaaagtttcattagttaaatagatgatatatatatagtgagtttgctctttgagctctcttgagtaacacgtttcactcactagttgttttttggagttaatactcacattttaggttgagtgcttaacatgtgatcactataattaaatccattctttatccattacaatttttagtacaagtgtttgtgaatttcaaaaattcaccactttttcaaaaatcgttatatatggcatttataggatttttattcgagaatagttatatccatactcttcttccctcaaagtaatcaggtttgcttagtacatttggttactttttttttttttgagtttgacaattcaaatacaactatttttgaataaataattgttttcattgactaaaaagaaaataacaagctaatgaaaaggaaaaatgctaaactgaatattgactaaacattttctttactctagtctcttcttctttccttgcgttatggataaagccactattaactagtgtgccactagcgcctataagggttcctctaagtgagttgtccacctagcgcctcatctccctcctcatgtagaggtaaccccaagttatgacccagtcgacctccttgtggttgcactaggggattcagagcattgtccttttgatggttattctgtcggttccttgcataattagcaagaggtccattatatatgattgtctctatttcgtcc

SEQ ID NO: 50471 - DNA, 895 bp, Cannabis sativa
ccaagtacaaaatgcgagtacccgtgtaccgctgagtttgataactaaggaaataaaaacttagataaattaagcagttggagcagtagagccatccgcaaccttgctggcagcttcatcagtgacttcctcagcatctgtagtctcttcctcctcaagaaaaatatttcctccgcaccccaatttttgagtaggtaacatagcacgaaaagcctcggccatctcagctgcttctgctccaagaatggagaagtcgaagtctggcaccttggataaagtcgtgtagatatagtcaaaaacagcttgatcatactgcttctttccatttttccttctcagtctccaagtcgtgagccaattcctcgaccttcgactgagagagcttggcctaaagttccacctgctctttggacatttggagtttctcgaggtctttatcctcagaatttacgtcctgctttttcaggagatcaacttctttagaacctacaacgaagaacctcgacaatacagtcatgaaatgcatagccaattctgctcccagcgacatcatttcctcagtaggaattgcctccaccctcgacatgaactcgtcgttcacaaatttatcctgaagagtcacaaaattgcgagctctgacagccgggtcaatcatgaccttctttcccttgtcctcagcagacctaacctagttcttcgacgagtcagcagcaagagtcgtgacaacatcactcttcctcttctgaggaatgatgggagaagtcgatgcagttccagtcttaggcttgcggttaagaactagagcttgcttcaagaaagtcatttctacgaagacaagaaaagataagttaaaatataaacaatgactcatatatatataccgcatatatgcgat

SEQ ID NO: 50472 - DNA, 596 bp, Cannabis sativa
aactgaatcacaaatacaacaagctttctcacagcttaacttaatagacatgaaaagccagccaccacactaactttttccctttttaatagatatgtttattcaaaacaatgatactttaaagtaagttgtcaaaaaaataacaaacaaattagctgaaaataagctgcctatcttgtctctatttgacttttatgattgtaaactttacaatctgtctaggtgatagaaacattttgcgtgtttgtataatgaagaaacacatcaaatataacagtcaaataaaaagaatgggaacgccaaaaacatagtcagtgcatgctaatctggtcatgtttgtcattattttatttttccctaagaaacaagaacattttgtctctttgaagacgttcaacaacctcacaagatagaattgaatgaatacatcaactacataagagtctatcccaaacaaaaaataaggctgtgcaataaaatatgcaaacacaaacaccaaaaggaaatgggtgaccttgtgcatattcacataccttaacattaaggtaatcacaaatggcatccagaataaactgaatctcatcttcatgtggttc

SEQ ID NO: 50473 - DNA, 861 bp, Cannabis sativa
actactttttaatttatatttatgctatttcaattattttattatcaaatttagctatagcattaaattataaacaatttacattttttttaattattttacttaataaaattaaaggattaatttagaaatatacaaaaataataaaaaaattataaaaatatggttgtacaaaattttaatattttttatatttattaatattttatttatagaaaatacaataactgtccttcgcctaccgttatatttcttttgtgataaataactcataaactatataaaatttcaaatgttaatattttttatgtagtttgttttaagagtatgtatgtgtagtgactattctactcaacttttttctttttcactcttgataaaaaataaattttgtagtctcaattttttaattattatgatattttttttagataattattatgatattaataaatgatattttaattaattaatttattaaagatatatattattatatagttaattttaaatattacttttaaaaatattaaatcattaaattttaatacaataacaaataatatataaaaaattaacataaatatatcataaaattatattttataagctaaatataacacaatttttatagatggtcttattgtatcttttttttttttgaaaataagcgtcaagttgcattagataaaggaaatataattagacctcacggtcattagaaagcgtgttctccggcaaagaagagaccggaatacaaccaaacctacggtgggtaaaagcccacttagccacattatgggcaacatagttacaacgtctactaacattcataaaattacaactagtaaaagaaggagt

SEQ ID NO: 50474 - DNA, 1217 bp, Cannabis sativa
cacttggatatacctactcaaaaataagtctgaagccctaagaacctttcaaaattttaaagctgagacagaacttcaaataggtaagaagattaaaactctgcacacagattggggggagagtttggatctttcacagaaccattaagacaaataggcatacttcatagccatccatgtcctgccactcatgacaaaattgccttgttgagagaaaatataggtaaattgttgaacatggcctaagtctccttgctcatgcctcaatgcctttgaaattttgggataaggctttcagagctgctgtttaaatccataatagattaccaacacctgtcttacagcaacaatctcccattgagttgttgtacaatataaaacatgaatacaccaatctaagaacctttagatgcctatgttatcccaacatcaggccttataacaaacataagcttaattttagatcagctccatgtacctttgttgggtatagcttaaatcataaaggttataagtgtttagatgcttctggtagaatgtacatctctagggatgtaatttttgatgagtctaagtttccttacaagcctactatctctaatacctcatctgcaccgattcacagtcatgaatctttaccttctgccaccattcccaaatcaacgcccatatacatagctgagtttctattccctgatgataactcagaaccttctacacatatcctgtgttttatcctgctgcaacagctattcaacctacccctgtcccaaatcctatcatctcaacacaagagccaaatagcccatctgtttccacctctgatgaacatatggcaccaattcctagcatacctgtcaccactcccacttcaacattgcatgtgcctcaaccatctgttcctactcatgatcctacagcaaataagcattcaatgaaaacaagagccaaatctaccatctacaaacctaaggtttatctggccattcatgaaccaactagtgtcaaaatggctatgaaactagaaaaatggctaaatgcaatgaataatgaaatggcagctttaaaaaggaatgtcacctggacatatgttcctctacctgatgtaggacccctattgggtgcaagtgggtttacaagattaaactaaaccctaacgggactgttaataagcttaaaactcgacttgttgccaggggatttcatgagcaactaag

SEQ ID NO: 50475 - DNA, 901 bp, Cannabis sativa
ccataaatacccgacaaagaagactaaagaaagcttttaagaatcaaaaacaaactaaccaactgaaactaccaaccccacctaaacacctgacaaaaccacctcagaatcaaagaaagaaaaaaacgaggtccacgagccaacagacagaaaaaaaaaaacacaaaaaacactgaaagacaagagaaaggcacacaaaaaaccaacaaaacaccccactaaaagtcaactaaagcacacagagggagaaggtgatgaaaatattataatggagaaaccaaagaacaggacacacacacacacgaaatgaacgggtatactcacgctagagagatagtagaagaccatctctctcttgatataccacgaacttaattctacattagttaacgttgaagagaaaataatgagttttagcttgctatattggaaggattcaaaattcaatattgaattattaattaaaaaaaaaattgagtttctataactttctaatttataaaagtctcacttaatatcattatttcaattttatgtttttctttcttcttaacctaaaatcactatcttattttcagacactatctacatttttttttctttattctgttcactttttaatttgcgccacctgtactatgattttctatctaagagtggggcaggttgggcctatgctcaaagtccccaccatgaccccccaaaattccaacaaaaaaaagctctcaatttcattttttaaaatatcatattttatatttttattattatttattaaaaaatataaggggaatgactttatatactgtttttttttttttcaaatttacagtttggacttctaaagtggttgcagcgctagttgcaatagggtttttatacgatattttgttgcaattta

SEQ ID NO: 50476 - DNA, 1417 bp, Cannabis sativa
tatttaaaataaataatttatcatacaattaaaatatataaaaataataattaaataaatgtagcatgctaataaaataatatacctacattaaaatatttgtattatgttgataaaattatataccactattatacataaaaaataaaaaaaatatcatctaaaaataataatataccatacaacaaaacagaaatatactgtacaacaaaatatatatatatgaacaacccacaataatttatgaaaaataaaaaaaaaaatgacataattttaaataatttttttttaacaaaactaatgtatataccacaatctttaagtaatttatttctaattctaaaaaaatattgatttttttatgtggtaaaagataatatagatagtaattagtgtaaaaaggtcatttctctacaagttttgaattgatgatatttactaacatagtgctatgatttggggtcatttgttataattttctttataaatagtcttagggcccttttgacacacaattgaaatacattggattgagcctttcaaaaaaaaaagaaaaatagattggattgagaagaatttaattggattaaactggattgaattatgctgaatgtaatactgtgtttgattttagaataaggtgaactatttttttttttttttttttaaaaaaagaactaaaaaaagataaataaagaccaataaaatttaaaatatattttaataatttataataataagaaaaaagttaaatttaaattataaatttgaaccatataataaaatgataagttttgtaaaaaatattaatgtatcatttttatatatatatatgataataaaatgaaattgtaaaaaagagaaataataaaataaaaatattttgataataaaatgaaatatttatgtcaagtaacatgtttatatattttttttgaatagaataaaattctcattgttaaaagtcaaagttaatctcaagaactcaaagattatcagataaatctaccacaacactcttgcctcatccaaaaacaaagtgagctaagcaagattgtgagctaacgagttagcacaatgattacaaaagaaaagcttagagacattaatacaattacttcaatagaaattacacaatatatgagaaaattataagagtttacttttttatggcacaaatatataatatcatggggttatgtgttttttctttttttaactttttacatttatatgggcttttttatgtcatatttttataaaaaagataaaaatatcatatttgtaaaataataataaatttctccaaaaaagtcaccagcgccaaaaaagttgcaggtgccgaaaaagtcgcaagtatcgaaaaaatcactgaaaaagttagtgtcaccgaaaaagtcactgaaaagtcaccgtc

SEQ ID NO: 50477 - DNA, 1241 bp, Cannabis sativa
attatattgaaatgagttttatctaggacacaaaatcaaacaattatatcaaatggacattaacaatacttttctccatagagatctaaatgaggaagtttatatggctctaaccctaggctacaaacatcaaggagaactccctcctaatgttgtatgtaaactacataaaagcatttatggccttaaacatgtatctcaacaatggtatgctaaactaagttccaccttgattaatgatgggttcaaataattttcttcggatcaatctttgttaatacggtcttctaataacatttttcttgttattttggtttatgttgatgaaattttaattgctagtaataactttgatgatgctgaatcttttaaaaggtagcttgactctaagttcaaactcaaagatctttgtcccttgagattcttccttagactagaggtcggcaggtccaccaatggtattttggtctctcaaagaccctttattttgcaacttctaattgatacatgttatattggtgccaaactgacctctaccccaatagaacccaacactcaactaagcaaggatacatgagagttactttatgaccttacaagctatataagtttgattggagaacttatttacttaaccttaacaagacctgatatttcttatactgttaatagattaagtcaatttcttttggctccgcgacaacctcatgttcatgctgcccaacgcatccttcagtacctaaagggctctccgggtcaaggactgttcttccactccacttcttctacccaactcaaggcctatgcagaaagcaatctttctgtgaatgaggtacaacttaaagttgtttctgatgttaactggggcacatgtcctgatacccgacgttccgtcacatgttattgtataatcttgggagactccttaatttcttgaaagtccaagaaacaaaacactgtctctcgatcttctgccaaagcagaataccgaacaatggccaacatcacttgcgaattgctatggctgcttgctttacttaaagactttagggtcaatcactcacattcagcccttatgtattgtgacaacaaagctgccatccatattgccgaaaattcggtcttacatagctgaccactttgaacccattcacaaactatgtggaacaatgtctttatgtaaaacttctccacatcaacaccaaacacaatcttactgatctccttaccaagcctctttt

SEQ ID NO: 50478 - DNA, 531 bp, Cannabis sativa
tagatcactagcttttctgttacgacagtctaattccacctgatgagatcgaaagatgtactcttgttcatccatccatctcaaaaatttgtgtctctgttatgtgaaagcatcagagccaacaaagtgtgtttcttaagtttagccgacttgacaaatggtttctctatgtctggctgactcgagatcttatcccaagtctacatgaggttccccaatggctggcttgccaattctttgccctatctctccaccataatatcggggaccaaatctagtcgtggcactcatgggttactctatgttggccattccttctgtgtcaggcgctagtggagggtcctctttgggtggggtcctctttcattatgaccaactggaatggtggtgggacctggccagttgcggtggccatgtttgtggtgcctgctgagatggtacgtgcggccacatccgccgggttcgtggagattacaactgtgactggaacttgaacatcaagatcaaccaccataggatcttgaggaagac

SEQ ID NO: 50479 - DNA, 1052 bp, Cannabis sativa
attatagaaatggaaacgaacctgaaaacaagtaacagtctgaaaacacctaagctcctgagaaaaatcaggtaagccaatagtatgatgaaggattcgattagttccataatcgttagagttaggacctccaacgatacagatcagaggcaaattctcactataagcaccggcaatggcgttaagaacgctgagtcctccaacagtgaaagtgacaacacaagcgccaacgccacggcacctggcgtagccatcagcagcgtatccggcattgagctcgttacagcagccaacgttgttaagccccggctcagctatgagatgatcgagaagagtgaggttaaagtcaccggggacggtgaagacatcggtgaccccaatttgaacgagtcgacgagccaggtgacgaccgagagtggcatcgacggagttgaagacggtggtggaaggaagatggttttggagagaagaaacggtgccgtttggaggacaacccacgtcgccagtgggtggtttacaggtgtcgagagctccaattttggtgtccattggaagaagttggtggtggaaaatgattgggtttggagaaatggttatggtggtgagaagggttttataggtggaaaaagagtgagcttttgtttctgtgattattctatgggcggtttcttgagagaggggctttcacaacaagccttgggcgtctatggattctcatttattttttattttttattttttataaaatctcatactaattattattactgatttttttttttttgagaaattaattattagtgataatggttaatttttgaacatcgttattggatatcaaattatcaatggtactcggtgtttttttagagatgacacttacaattagttagctatatattaatttcaagatttttatttttagttttttttttttttttggttttgatatagttagtttttagtttcgtgatatttttattaggatgatttttaagagttaaaatatatattttttattattaattgaaataatttgaatttgtattgat

SEQ ID NO: 50480 - DNA, 871 bp, Cannabis sativa
ttgagtataatagaccttgcccagggcttcctttgaggtatcgaagtagatgatgtgcggcttgtaagtgaggtgtacgagatgaagacatgaattggcttaataggttgacgtcataagttatatcaagttgagacagtgttaagtagagtaatttaccaacaatttgtcggtatgaggatggatcagtgagggcctctccttgttgatcatctagctttagccgtgggtccatgtgagtctttgttggcttgctgccagaatacccagtttcttcaaggagttgcatagtatattttctttgagagaggaccaatccttctgtagcacgagcaatttcaaaaccaataaaatatttgagagtaccaagaattttgagagagaacttgctgtgcaaagtggattgaagttgattcagcaaggatagatttggccccgtgatgataatgtcgtcaacatatactaatagagtaatgaaattgttgtcaaatcctctggtgaacaatgtatagtcagcttgagattgaacgaagccttctcggattaaggcatccggaagttagcgataccattgtcttgaagattatttgagcccgtaaatagatttatttaatttgcaaatgatatctatttggccagcgagttcagtgggtaaatcaaggcccttggggattttcatatacacctcctcatgaagatccacattcaaaaatgcgttgttgacatcgagttgtaatgtatgccattgtttgatagtgggaatggcaagaagtaatttgaaggtcaccatttttgcaactggagagaaagtatcgaggaaatccaatccttcttgttaagtgtagccttgtgcaacgagccgtgctttatg

SEQ ID NO: 50481 - DNA, 1761 bp, Cannabis sativa
tgggctagcactctggaaagactcatcagtccagaaaagaagcgtgcttggtctgtagggccaattaattgtgaaagcagctagagtgatggactcgtgtataaaaagcatcattcgtgtaagggctcaatagatggttctcataaaacaaattagagattttggttcactctttaaaaattgatttttcagctataacttcaaggtttgttatttaagtaatgacattttggagtacttttagctctcttgatcagtcatatataagctgggtacgagtgtacagttttggaaaacagattgagtgaaattttaaggatagtgagattgggtttataaaattatttggttcatgaatttgtgtaaaatgtttatgcccttgctttgttatattcatctgtgaaattttgtgcttgatctgttgtttcatcaagttgtaacagatattgattacagtaatacttgaatggttgacccagtaaaatatctggtggagttcatttctttgttttatttttatataaataaatagacaaaaaaaatggagcaaagcaaatctatttatataaataatttttaatcaatcctgaatgtatatatacctaattcatgagaggatataagagtagggatacttaagaaatttgaatagtaaacttaattatcaaattattataaaaatccatgaacactcttaatgctcggccaaagaaagattcaatgatattacaatcaaaggcttcaagataaaaatggtgaacaagcagtaaacaaggactccaacaaaactttcctccaatttcaacattaagcatcatcatcttccaaattgtagcttcctaatcaaaacttttttttttttgaataagggtaaggattaaactttttatgattctgcatgctttaagttttagtgttgtgtgtgtgtgtgtttacaaattaaagaatccaataattttatgaaaaagtatccagtaaattgtttttacaaaaacaatatatatcaataataaataatactgtgcaatatcaatgatattttggttttctctattcaggtttatttgagttagtctacaccacaaaaaaaaaaagtagtgtacagaattgtattattaatgatgatgttgggtcactcagcttcaacaattaagattgctgattttgaattagattaagtcgtttttgctaaaaattatctaaattaccatgatgttaattaaccattttgttagaatttgataggatacatgggttacgtctcaaaattaattagtaaaaaggagtagttcatgcatgcattttacgtatagtatgtagtttttacatattattaattttttctcaccaatcttgcacgactcgatatcatgttagaatttaataagatgcatggagttttatcttaaaattaattgacaatgagagaagtagcttgtgcatcttatgtatggtatctaattttcaagtattatcaatgagagacttgtaacaaatttgtgtatctttttttggcattggagtaacatttttatagttgaagggttgcttcttcattttttaactaatcataatttagaacgaaattacaatcaatctattcacattgatattggaagaccaccgaaaatttcttccaatgtatcatttttaaaaattcttataacaacacttttatagcgtttgttactgatggtttgataataaatttgtattggtttagatttggaataggtggatatgtggttaatggtttgttgt

SEQ ID NO: 50482 - DNA, 1152 bp, Cannabis sativa
ttttatactagtcttacctcattttttgattcaagcgtgtttgtcaacctgaatgaaaattcacgtgctgaacggaggccatatgccacaatcacgtaaatcaagtaaacaacttgctaaaacctttgcgaggacctaaattcaaaactacaagttttcctatcgatagatagcattacaatactctaaatattgaggaaacacaaaaactagggttctaaaactgctaaaagtagtaaactggatttccaaaacagtagaccattttctggggtcctacttggaaaaatggttagctattttttgcaaaaaaccccaagaactttgaatctctcttaattttaccctaaatttggtcaaactctccagaatgcctaactaaacatcaatgaacataatccaagaaatagcagtagctcacacacaaagaaatgaaatttatcattgttgagctaagtttgagttcttgaactcaaacttgctcaacaactcaactaaccaccaaaaccaactcaaataaacatcaaacaacttaaaactaacccaaaaaaccaattccaaagttacctaactcagacagaacgtattttaaagatttacatgcttaacccaataaaacttaccaaaacttagagagaacaaatgtcagggctttaccttataggttttggcttttaactccccttcaaaacttgctgaaaattgcttggattagtagctaagcttctagtctttctttggttcaaggagggttacgagagagagaaaaagaagactaaggtttcatagatttttttttccttttttttttttttaaatacttatctaaaacctaacttatccttatgcaaaagaatatcaatcaaggaattctaaaatttcagaggttttttagcattcttttcttctttattttcttctcttttctcaagttaatatttgtgattttgcttccatgaacatgagtagctaaacacttaatcagggtttagatggatattgttgacatttttttatagttttaatataatttattttccatcagtttgtattctatttgattcgtacttaattacttttaattgtctgattaccaattaactgtctatgattttgatgtgagatctaagaagtgagtgtcaattatgctat

SEQ ID NO: 50483 - DNA, 621 bp, Cannabis sativa
tccatcccacccaatccttcatctgttgtaagaagttccctgttgtgctgcactgaaaaagcagatgggcaacactttcgttttgattgctgcagaaacaacaggcttcatctgctgctattttcattttctttaatttgtcctttgtctggagtctgtccagcacaaccatccaaataataaaactatgcttgggatgattgagcttagcccaaacctgcttacaccagtaaactctttctagaggctgctgcaactttttgtagccaatcgtgtagtcaacagccacaatctgcctggaatcccgattccttaacatttcatcttttatttccacaagcttcctccaatatcagctgctatgaatggaagccttgtggctccaacaatctccactcttcaaataaacactatggatccatttgactcataagttgtctttctttgtagctagtgtccatatattcttcatcaatactgctttattccaaatgctgatgtttagaaatccaattctaccttcagctttagaatgacagactttctcccatgctactgatcctgctcctgtcatgttgttgcaacctttccagagaaagcttctacatattctttcaatct

SEQ ID NO: 50484 - DNA, 1408 bp, Cannabis sativa
  modified_base (1382)..(1383): a, c, t, g, unknown or other
cactattcttcttttctttgtcatggaagagagaaaacagagagaacgaagctttttttgttttaactttgtattttgattactatttattatgttgtttgttttaaattttaaaattttgcaatggctattatacattatatattattacattataaaactaatgtaaatatacattgttagaaaatacttcttttgtccttcttttttttttacctttatttacattttaaatattaaaaataataaaactaaggatatttttgtcactataccacttattttatttgtttgattataatgtccattatagagttaaaccaaacattataatactattttcattacaatttttattccattatatttttattcatattacaattaccatttctattatgttgcattacatcaaagcaaacatcaccttattatagttacaatggatctcctaaaaagaatattttagtatactctctatttgtctcaatatttaaagatttttttttataatttatatataattgtgtgtgttgtagttgtacttaaaactacgtataaaatttcaaaaaatcgtaaataatttaaactacaaaaaataagatttaaacaattatttactatacatattagagaaaatagttacacttgtaataattacttaaatcatatttttgcattgtaaatttagaattataaaaatttataagtgattttaaataattatagcatactagaaaacaaaaaaaaggctaaaaaactcttagatactaaatatcaaaacaacctttttaaaaggtgtacttgacacttaccgaaacatattatgaaatcacaattttcttcatttatatttaaacttttatttatattatgcacaataatatattgttgggttttttattttttttttatttttacattttaaagtaggtgttttttttttttttgtatttttatagaaatctacatagaatacacataacaactaatgaagcaaaataaatcgcaaccaaaattcacatatcaacttacatttaaatcaccggagtaactcaaactgtaaatttaaaaataatgtaaaaaatagtatatgaagtaatttttaaatattattttgtaaaaatatttatcttaaatgtgttgaaaggtggtgtatttaatgatttcaaattaattatatattgagatgtttatatcaatttacaataggaaaatagtatatggcaatagatttcttttaaaataaaatttacatttcagtatctataagtacaatttaagtaaacatttcataatgttattgtgcatatgtataatattgagtttgttttgctttagcatacatataactaacaaaggtggcgtttggtaacactttnntaatcagttttctatttttaaaagt

SEQ ID NO: 50485 - DNA, 642 bp, Cannabis sativa
tacattctaacatttacaaactagaattagttacttcttgcttgtgttcttttgagctcttttgtttgatcatcacaacttgagtggggatgtctttattctatatttttccttgacagccacactgaagaaccttcttttcggttctgaaatctgaagaaggaagatatattgttagtggcttgaaagaaattaaggagtataatctcaactttggaatttcgaagacggaagaaaagccattaaagaagttattactttttctcttgtgaatatgaaaaaactaaaatatttaagtcttgtagttataattaaaagttaataaggttatgtatagtgagtactgagtaaagtatttattgttaagaatgagagaatccatttttaccaattaaatacgactttagttggccattttttgaaaattttacaatgcaccttttaatctatttttgtatttaaaataattttttttatggttatttaagacattttgtataatttatatatataattacaatacaaagttccaaacacacttgtagaaaaactaataacaaaaatatgtaataatgttttaatatttttttagtactttaaattaatttgaatttctaaattctttataaaatattcttaata

SEQ ID NO: 50486 - DNA, 1638 bp, Cannabis sativa
tgaaagtttaagatttcgttctcgtctcgtcactgtcttgtactcgatcttctccgccgtaagattcatcagaaatggtagtctttggtgttcactgaagtttgtcttcttgattcatatgctcttgttttgttttgaaggctctaattgcagaaatagagaatgtttgaaacagaactcttcaaataaacgatacaaattacactaaagcactacacatagaaatgtgaggttggggtttgaactcgaaactagatttttaagagtaatttacggcataaatatcaaaatttaactattagatataaataaatacttaaatttttggaatttttaaagatatttaatcgtttagcgtcaagttattatttacattaatttttaaataaaaaataaaatttaatgatctgcactaatcaaggactgtcacatggttaagttacctacgaaagattaagaaatatagcttaagtttattaccatcaaaaattaaacttgagtatttatttgcaactgagagttaaattaaatatttacactttaaattattctattttttaaaaaataaaaaataaaaagtgtcacattttatttatctaaattagaatccactatattaataagacaattgtcaaaaataaactcaaaatttggtcacgaattagaaccctctctcaaaaaaatatctaataaaactaaaactagaagatgagcactaggtataccaagtaggtcaactcaaactagaattgcatgtaagattcgtaaggtaaaattatatattttgatattggttaatagttgatattttattttatatctacaacataataattactaaactcaactgaatgtgattttaattagttatggctgatcaaatgaatcaaaatattttagtgttgttcacaatgggatgttgaatgtggacttttcttgaaagttatcagtgcttctaatgttgctaataatctttgcaactgtaaatttttttgtttttttttatatatttttgtttggtttatttattttagttcttttagctctttcagtgttgtgcatcttatgtctggtgttggtgttaagcctattatggtaagtttgttcctctttatgctcccgtgtgagtcttgaatttattgcttctttcaaattagtgtggttgaccaacaattatcacctcttagtgagattttggttttttcgctagaggtgtaagtagggtctgaaaaaagggtagatacgatagcacaactagaaatttataccaaagttaatgggtttaggtttggtttaaatgggcttgggttgacttgtctaactcatttaataaacgagtcgtgttcgagttgacatggctaacacgaaactaatttgttaatgacatatctaaagttatttttagtactttaacaagtcataaacatgttgaatatgtcataaatgtgttattggttgacatatttaaataaaacatgcttataaacggattacactactcatgtcgtgtcaacccatttatatatacagatcgtgttcaaattttatttttttgattaataaacgggtcgtgttcaggtcgacggttgagtatattcttgttatacataagtctcgacacaacacgacacgaatatg

SEQ ID NO: 50487 - DNA, 765 bp, Cannabis sativa
acattaattgatatacatatatatgtaagggtggttgttgataggtaagctagccgtgtgaaaggttccaaaaatgaatatgagaggttgaaaagagatcaacatggaatgtctaagatagaatatgtatgtatatagcgccgggacccaagaaaagatgcacataatgatgtatatatatatggttgtcttgattgtatatatttcgatcaatatataagtgtgtcgatccactaagtcatgtatttctattagtattatcattatacgtacacatatatgataataagtactatttttactcttccaaaaaaaacgtactatttttatttccttgtttttttaaaagaaaagtactatctttatttatatgtgtgtgtgagggctatatataaaaatggaatataattaaattaactttagcacattcaatcctctcggccaaattatcttaattacgaaaaaaaattaaataaatatttttccaaaaagtttatttcaaataagttagaatatataaataaataaaagttagttctcttggataaagtttacaatattatatatagtaactagtgactcgcatgtttctcataataaaagttcgtgtaaataataattaaatatgagaataaagaaaaagaaatttgtgattatatataacattattgcggaggaggtttccatagtgacattaaatatgtaactatcatggttacatttttttaagccattagattactatttaatagttgtgattaattt

SEQ ID NO: 50488 - DNA, 650 bp, Cannabis sativa
gccccattgccaaggcccgccaataatgagtttttttgaaattcactagctccatgcgccacatcatcactctctttcctattttgactttgcactttcctttttttttattatctataacaaccaaggtgtcacttaaatctgatacatatccttccatgcccccttgatgacaaatgaccatatctctaccaattacgggattacttcccaattcagagctactgttcacaggacaacacaccactgcagcgccactattcttaggaccaccttccaacgaaacaccaccattcacggagaagcctccctcctccacgccacccttcacaggattttttcccatcacacttccaccatgcacgggataattccccaccgtaacaccaccattcacgggatattttcccagcacaactccacgattcactggatttttccccgtggtagctccaccatgtacaggattttttcccaatgcagctccactaggcacgggcctccttcccatcgcatctccactgtccaccgaattgtccattgcagctccactattcacagctccagcaacaccagaggagccgcccgtatcttccataccacaagttccagcaccagctgccatcggcggattccaccccctggaacaa

SEQ ID NO: 50489 - DNA, 1315 bp, Cannabis sativa
taataaatttaattaacttgcttataactagcgtttcaaatttgtaattagtgaaaattgggggaaaaggatctttatttttttctcagaattaagattttttttggtgttgttgtccaataattccaataatattcataaaccaattaatgcatgtcccacatagaccccaaacatattattatcatctgaccaatttggtaatgattttggacatgtttgatataatttcataggtagccatcaagatgtagaaggctacacctaactatattatatatatactaaaagaaataaaaagagtataaaagatatttgacttttcctttttgcatgtctgaatgtgatataatgaagaagttagcaaggttggggagaaagaatggtacttcttttgcataagaggaagaaaatacaggaacagtataagaccaaacagagtgactgggtctggattttggaaagccactggaatagacaagcccatatataattcctccttagtcaaagaaggtgatcataataatcataataataatgatgagtccttaattattggtctgaaaaagtcattggtttactatcgaggcagtgctggcaaagggactaaaactgattggatgatgcatgagtttcgtctccctccaaataatcccaccaacactactacgtctactctaaattattataataataacaacaacaatgctgctgctgctctagaagctgtaagtttatttatatctattattttctctcctaaaataatcattttctttttatttatacagttctttagtccttgcaacttttagctctatatatatagtcacattactaaaaagtaatatttatagatgcaaattgtcattcatttttaataaaattaggcacaataaattataattttagtgacaaaattagttttagctattgattttaggttaattaaaatttttgtcccccaaactttgacatataccaaatgatcatgctccctgaacttttaagctaggccgttaaaaattactcctgaattattaagaattttggatttaagggcttttgtccaattttagtaagagaagtctaacataaattaaagttcatgagctagctattgataatttaatacatgtcaaagtttgaggggcataatttaatagatactaaaatttggagagcataatttagtacatagacaatcactgaattagtaaaattaaataaaattaaacaaaaatcctcaaattcaacaatatttattattcaaggaagatttttagtgcgcaaaaaaaaaattcaaaaaacataa

SEQ ID NO: 50490 - DNA, 1490 bp, Cannabis sativa
aaaatatgctaaaatccctccaaaagactctaaatgcatgaatagtctttaaaataacctaaaaaattaaaatcacactaatcaataatttaaaaaattgatttcagaatattaatacgcaaattaatcatatttataagacaaatatggactcatcaggtaccctggcgaaatagtaaggtggaagaagccacctaagagttggagttcgacatgagggctcaatatctagagttattcaggttagatatcgatgacgaaatccttttaacaggggataattgtaatgactgcttaactgatagcaaaaaacccaaatagaaaaaataattatatatatttttttagtacatatatatataacttataaattatttaggattcatcatggatgttttttttaacaaccaactaaacttttattgaaaatactagagtacaacaaaaaataatgacggaaaaatatccatccaaactagttaaccactaccttatgtgcgttgaaaactaattcattataagacaaatttgtaatatgttaaaagaatgaatactgctaaatttgcatataaatagccagacgtaggggtgtgcagaaagttatctgatctaattacaattgacgatctaatcccaaccgatctaatagaatcaaatattcaaccataattggatcagatcagatgtaaattttaaaaacccaatcgaatcggatcggttattggatgggacatctgatccaatgaataacaaaccgaatcgatctaattatcatccaattatatttatatatttttaaaatacaattataattttatatatttaatatattttatttgaaaagtatattaattaactttattcttattgtgcacctgcacacatgagtttaaagaaaaaaactttagatttaatatattaattctcatatttttaaagactaataaaattgtcaatgcatattgaataagttttagtttttagcgaatttattatgggatcatgagaattaggttggactaaactaatgtttattatgtatgttgaattagtaggttttaaattatgtttttttttttttttacatatatattttaatgaaatcatcttaaatggtagttaaaatattggatggattcaacccaatccaatctaataaaaaaccagctaatgcatctaatggttagaatcaatccaatctaatatattcattatatcggatcagatgactcaatccgactggattggatcgaatgacaaaatctaatattcaataaataagggctgagatgtaaaatggccttaaatttaaaaattaagttagtaaatgtctcttttttaaaaaaattaagaaaatagccaaatataataaattagctaatataaactataaaattcatttactacatttttttaaaaaaatatttaataattaaattaagttatataatttttttagtattagattgtaacaaaaatgaataaatata

SEQ ID NO: 50491 - DNA, 626 bp, Cannabis sativa
atatatttacaagcttcgtttgcattagaaattttttttaatagattagtggttggattctccaaaattagggtaaataacttttactaagaatcaaaatcaaattacaaaaactaattatatatgaattcaacagatcgcgaagaggaaatctttgaaagaaagataaaatgtattgaattaagaattgactgaatgaattacatagtgtagagtactaattatacagaaagaaaaagagaaaaagcctaacaaactaacgataaacaggtaaataaagaaccaactaatctactacgaaccaattgtatattaatcaacataaaaaccaagaagataagatatattagcctctctataattcgattaccccttcaaggtagactacacatatcctatatatagacatctcggaaatatgagaagaaagagtgctggaaggcaaaggcttcgtgaaagcatcagctagttggggagaactagctactggaatgaggtgtatggtgaaatttttaatctctttcaaatgaagtgacagtcgagttcaatgtatttggtgcgtttatggaaggtaaaattattggcaatgtgaataacatattgattgtcatagtagatgaaggcgc

SEQ ID NO: 50492 - DNA, 1584 bp, Cannabis sativa
ttttttttttttttttggaacgaaaaaaggttccttgatcatcattttcttagcttgtagagaataatatttatagctaatttcataataattaagggaaggaataaatgcattcatctgtatatatagattattaatcatgtattattccttgcatatatataatgtatgctatattgtattatatagctcaattttcaacatgaattcattgtctactatatactgagtagtttcaccaaagaaaattgcatatatagttcttttttttttctttttacaatatgataatttattgtatatttaatcctgaaagtattgaaagcttgtaatccatataatatacatatatacactacaagtgatcatattatatgtggtttgtttcatttgattctgagtatgatataaagaaaatcttccattgttgtacttagtgcttagcttgcctattagatttggtcaatcataatttccacttttttacacaacaaacaagatctttctttggctttaccttaattattctttggatttgctttgttttttttttttttacttttctctttcttatttttgtatattataatttatttcaaaaattagaagaagagagagaggaaaagaggcatgaatataaaatcaaactaaggtaattaataataaagtgaatgttttgagccttaaagataattcagctttttgtcttgtataaactcttttctacttgctatttagatttaattaataaaaatattttaattgttaatgttcacacgagaaaacataataatattaatattattattgttttcgaaaaaaaataataaaaacaagtgttacttatttttctaaattatattgaagagattttttattaatgaattccgcaagagcagtgaatagtttaaaagtaattagccaaaagtctcttaatatagtgtgttttttctcttctaagcttgtcaataaattaatattaatactttttttttttgtaataatttaattatagtaccaaacatactatttacttaattatcaaaattttatcataaaattaagacttagtacgtacaatctcacacaagagacaagacaaatgaacaaagaagaattcttctttttacaaaacccatagaagaaaagagtaatctgtatcaaatttagttaaagtgtgaaatagctttattatatgtaaagtgtgagaacatgtagtattaccaaaatgaggacattttgaaataaaaaaaaaaaaattaataaattcacaatattaaactatataacagaattaattgagtcatcagtcatctgataaatatacatagccaaatttgtagaagtcttttaataattaatccttaccaaatatctttcatagcaataataaagagaatcttacacaatcaaatgtaaatttttgtggccaattttcaaaagagtttgtcacacatatactaacaaaaaatcatactatcatgactaattttgttacctaggccaaaaaaaaaaaacataatatatatttattcaaacttgtattgtttaaacattacataatatagagataaattcctcgtt

SEQ ID NO: 50493 - DNA, 592 bp, Cannabis sativa
tactaccttgaggctgtgttggtaaatattgttatgggtcatacaaatcaaaagtgtcgtgttctggtggaaagtgtttacacattctattccacatcttagccataataccaacatcttgggaagcagttgaccctgcttgaaattgactttggctttgacttgaagagtcaaatgttaattttttcccttctttccgaagctataaccaactccgcgtatatagtcactcctatctcctaatacattatccataaccttgtaatggatgtcaggcaacaactctgaggatccagaatcattaccagattagcttttaagtatgcttctggtcatctcttcctccatctcatgggtcaatttgtccaaactatagatgaaattcgtttaaaatataacaatgtcataattttaagaaaaaataaaataaaatattagtggaactcacccatttttcttcagcaatgtcattgacctaagctttgtccttttttctagaatgactatctttccaagaatggaggacatatttatgtggctccttctctattcatatcagtattagtgtgtttaaaaatataattttattaaa

SEQ ID NO: 50494 - DNA, 1516 bp, Cannabis sativa
aaatatattaatatgtgtatgcatgtatgaactttatatagtatactgtagttttaaattaataaattgtaggattttcttgatttccaagaatgtctccctacaccaactcaatatcaatcaaaatgacagggttaattttgaccaagaattaaaaaaaacaaattaaccaaacgagaagagatatcaagtcgtttcttcttgcacgacaaatcgtttggaccaaaacgatttgtcgttctcccagaaacaaaacaaaaaacaaatgagctaaccctagctcagaattatccttagaaccttcaagagtttgaggccaaactctctctccctattcttctcctcgaaagaaccttagaacccagatccccttctcgatcaaaccagatcgatataaccagtaaccttccttagaaatctaccccaaactcatacatgcataagatcaagcattaaacagtaaagagatataagaaaaccaaatacagggtttatagaggttcgccctaaatccaagggtacgtcctcttttgagctcgccttgaagaacgatctcagatctacactatatttgagaaattttacatcaggtgagaaatccgagtcacaaaaatcgactggtatttcagttcattctctcttctctctcttctgtgtatttttcttttgttctcactaactctctctttcttttccttgcatgtacactctgaaacaatcaacacgagagctcctctctcataacctgggtcttcacacttgggttctctcaactgagagctttgtaagtagttctgctccccttttataggttcagttctattagtagatgagtaacagaatttttattgcaaaatagaaattcagttaggtctagttgcagtttgttgtgtttggtgagtgagtaaagtcacgagccttttatttgtattttatctttcctgtaaaactgtaaaacaagtgattcaagggggatctaattttaacaatttccaccttagattcctctcgggtcacttgttcttatagtgcatcattcttcaagggtatagtggtgatggtcatccgccatcaccaacccttaacaggtccatgcagtgcttgaacttagttaggggtacgtagcaccttagtaccaatatcttatgggttctcttcagttgggaccttctctatctctacaactccttatgtcactttatctcgtataaagtgatacttaatttccacatgttttgtcctgtcattaaagacaagattttttcataggtgaatatagctttggctatctgagtagattataggttcttcatttagtagctttacttcttctagtaatcccttgatccatataacttctttaattgcttcagtaacatttacatactcagattctcttgtagttaatgctaccacaggctgcagttgtactttccagctgatacaattcccccataaagtaaagaaatatgcagaggtagatttcctactatctctgtccccagcatagtctgca

SEQ ID NO: 50495 - DNA, 2080 bp, Cannabis sativa
cctctagtacagtttctgattaagctgcatgaaagttgacatgataccgactaaaatattcaaccattcccatcctcagcttcatataatttttttagtagagcgtatggattttgttttcaactaatattctgttgtgaagtaactataaaatactaacttgcaggatgttttctaggatatacattgttaggcctcctatccatttcacatactctagaagggccaagggtacttaggggggaattactttgtatggattgttgtgacttgtattgagtgaggggcttttttgtaattatgagtagtagggaaaggtttataatggttggtagtgatagagtgtgcgccatgcatgtattgagatttctcactgtatcaaggtccgaaaagaccactatccttttctgctattactttcccctttgagaaatacaatgaaaacccatggataaaatggcctagacttctcactgttctgttctgtgtctttattctaatgtgtactattctattgcttcttgtgtttgtagctactaattttgtattagttttgagtgatgtcgagaaagcttgcttggatatctctgttatttattttagcaggcattatcctgggctggtcaactccgtatctcactcaactaaacttgctttatcagtggaacaagctaaggtgtggtggctggagctgccccatgcgtttggcctcagtggccctggtatggttgtttatggttgttgccttctttaatggaatcctttccctttcaaaaaataaatgcttaagataaataagtgaaaatatttgcatgcatccttttctttttaaccctcagctaattttcacttgtgaaaaatatttccaacaagaatataattcaattgatcaggtgttttaataaataataatacaaagacatgttatatatatatatatatatattctttttcttgctgaatagggaagacatgttagttaattcagctatccatgtattggtgttgattatttaggtttggtgtaatctttcttgcataacttcttgtttttccatctctataactaaagcttatgttctcacttttcattcaagagaattgaggcatagttctaagttattctctcactttcaaactcttacgtggtatcaagagcccacaagatcttgaatcctctttttttttttatgctttccgttcttgcttctctcttcactgctcacatggctaccatattgacacaagccaatctatgtttctgcgcaaagtgctcaaacaataaaaaaacgcaggtagctatccttgctcaagctctcaattaatcattatgtgctttttaaagcaccaattgagaatgtcattcttgccagttgcatagaagactttctagatggcaataatccagcccttcctcaacacgaagaaggaactgatgccctccttgattttcgtcacaaggacaggttcatcctcaatttgattatcctcatccttcaaatcatgtcacaaataatagagttcagcaattgcttctccagtttccactatagttaattttttttcgatttctttttgtatgatttcactgtcattgtagcattataaatattattgtctcttctctcagaataaatctgacattttcctctgctcttgagatatcttgagaactgaaggtctttattagtagcgacgaccgacgaatgcccttcttcgcaaatactggtgcatccaaacctcggataatgcaaattttcgcgacaacttcgaactgtcaaaaagagatcctttatccatgatagaagatgttatttaagtcaagacatgtagatagtcttgctctctgcattcaaaatttatatcttcttgcaggtcttgatttggaatacaacttctctattgtctcaattacttctaaccaggcaagatcagacagtctcatcgtggctcatgaaagtttcctaaacgtgttcaaaacaaaagtggttgcaccatattatgggatgagactgaaaagaattaagaatacagaaaatgtgtaatagatatattctgttgtgtttcatatggtatccaa

SEQ ID NO: 50496 - DNA, 1948 bp, Cannabis sativa
  modified_base (1397)..(1411): a, c, t, g, unknown or other
  modified_base (1646)..(1647): a, c, t, g, unknown or other
tttttgttggttgtttatttttaatactgttaagatatgtaattttttggcccataatataacataataaatgttttctcgactagtatgattgtttggatatttcttccatacttaaaaccttttttgtaatgattataatgtctaatttagtttaatgtacgaacacattatttatttttttaaaaaaaaaaattcaacaattaatgttatatagtcctaaactataattacaaaaatcttcattgcctaagttgtaatcttctcataaaatattttttcctttaaaagctattattattatcaaattgtgctactaaatgattcaaataaaaatttctcccaacttttcattttattgaaaattaatgtttcttctttctattagatcatgtctaatgatacatgtaacataattagaaattttacccaccaacttttacagctactcaatcacatttctttatactttttctatttaaaaaataaaatatactgcacactcaaattacacacttgttacacacaataataaataataaatattagccacttataattttaagtgagaccatattttttgagtaaaaaataggaaaattgttgtcaagaaaataaactaaaccttacaaaaaaaaaattatttcaaaatattatgaaaataaaaaaaataataaaattcatattaattaaataaattttatgaatattaaaaaataaaaaatataagtagcaaaaaattacactatatgagtttgtttggtaggttgtatcaaagtcgtattatattatattatgttaaataacaagtaatattatgtttggataatacattatatattatattaatcattacgacaataaatctgaattatattatttaatatataacaaagtatctttattagcttgtattataatatttataaaaagtctggggttggggaccctgacccaaactcgacttcaatttcaaaccccaaacccagacccaagccccaaccccgaacccaaacctgaaccggccccagacccgaacctggaccccaactttggaccccaacccgacccagactcgagcccgcacccaagacccaaaagcgaccctaacacgaaccctggcccgactttggattcagatccagcaccaaacccaagaccctagaccctgatcccaacccgtccccttacccaaacctcgtaccttggacccgaataagggtcagagttagagttgagtttatggtaaatatagtataaatttaaacaaattattaatacaagacaatatcaaacataatactacattaagtaatattaatataatacaatacaacctaacacaatataatatagtttactaaatgagtttttttatgggaaatttacatggtatnnnnnnnnnnnnnnnttttttacaaaaatactgccaaacggtattttttacttttttactgtgtttttttataagttttatactacagtatactgtattaagttttcactggtgttctactagtgttttactggtgttctactgttgttttgaattgttctgctttgtgttttactggtgttttaaaaaacacagtatttttgaaaagatttccgtgtgacagtatttttgtaaaagttaacaaaattcnngtatttttgtaaatttcccaatattttggtgtgaaataggacttgctcctataactcctccaagttaagatctatgggagtctgttaatgaaagtgttgacaatgttgttatgagtaattgaaagtagcaattcaaacaagttatgggaaaagctttaagatcccaactattaccttttgccaaagtcaagtattcaaaactaaaaaatatacacgagtaatttgcagtgtaaatatttaaatttaatttgtgttgcagattaatatttaaatttaattttttatagtaataatacctaag

SEQ ID NO: 50497 - DNA, 1071 bp, Cannabis sativa
aatgttatttctaatctttattaaaaagtaaatcatctttattaaaaagtaaatctgaattaaaaagtaaatctgattatattgaaatgggttttatttagggaacaaaacccaacatttgggtggtttgtttttaaattcaggggttaggttgttatgatttaggttgtttagagctgagtttgttgttaattgaggggtgtgggtgaagttgaagttttagagctcaagctttgagctctaatggtgatttcatattttgagttgtttgttgtgttttaatgcttgaattgagtttgttggaacataagcaggtattctggagagtattgagaagttcgggtgtattttgagttgtgggaaacatttttgagtttcccagtgttgaactggtcaaccggttggtccccaaggaaccggacttctgattgggaaccggtttgccagttggcccatttttcacaaccctagttttccccatttttgtgttatttggggtattaccatcttattcatcgatagggttattcttagttttaactttaagtccccaagaagtgttttagtgtgtctctcaccagagttacaaatgatgtgatttagggtcctgtgaaatgtcgagctgcaattccacttagattgaccagcagacttgagcacggaaacgaggtaagatagcataaagtagatatatgtgaatgaatgtatgttattatcaatttacactactaacactgttaaatgtatagttataagggtgttggtacagtgtaggatttaagggaagttacagtgataccaacacgaataccaaggggtacgtcgtgcatttggtacaatacttagtaactcccgaaagtacaataattgccctaccaacacaagtacggagttggtactttagtgcatatggtacaatggtcgtacttccgttgagaacgttcttaaccacttggtgagcttggtaattgggctcaggaaaacttaagcataaagcaggtatagcattgcttatatatatgttatgcatatcttactaggtttgccatctcatcagtttgctaccttgtg

SEQ ID NO: 50498 - DNA, 807 bp, Cannabis sativa
tatatttttttttaattattataaacgatttagttaacttatttttgttgatctactcgatacacactatttacagaaatttagactttctaatattaatgactttctcattatttgtcatggattcgcctcattattccaattccctactttggttaattgtattagtgtgactcacacttctagattttgtaatatgagcgcacatgcttttgctagttagtgattggattctttaatattgacttgtaaagaagaatttgcctccttcttctaagtttgtttcctagtgttggtgcccgatgatgaaatgttttcccctagaaaacaaaaactcatacagccaattaattaaactgcaatcaatttatttatttatttataaattaatttgtttttatttataccatgggaaattgaactccttttatttccttcttacacacctaatctcatgagctagcaccaagtggcaactgcaattaatttattaatgttagtggtattttctttctttcttatctctttgacttgaacatgtattgaaattagctacatcaaagtattgaaatgctaaaagtttaattacaaccgacgtatatataggaaatgatcatcacaattcacaagagatatatatattatatttaaatagatatgctctcatgaattattactgttctagttctcgtaatttaatcaattatttgttagtctaacatgtatatgctcatgaattaatatagtgaataaatgtcctaaattcatgggtgatcatatcaccggtccttctataaaaatcttttt

SEQ ID NO: 50499 - DNA, 901 bp, Cannabis sativa
caccgaccgatctcatctgtattagtatatgtatgcaaataattcgtttataaatagttaatcagttggtagagaattgtttttcatgtgcactgccttgttttcattctactcattctacaatttgctcgacaaaataaaatttaaatgtgcatatttcatggaagttctagaggttttgccgtagttaccaaatgtaacaataatttggacaaagcaccatacgccatgaaaaaagtattaattcttgagggtgttgaagattttgacttgaaatactgtataaattaataaagttacacactcttaaattaaattaaattaaattaatgtatactataacatttttattattattaaatattaatatttatttgtagggaagcaaaatttttagtttcgttggaccatcccaacataatcagatattactcggtacataactaaatagttcaatttttttaatttataattaataagttaagtgttttattttttttttcctaattatgcttttctttttttctcagttttgggttgagaagaagatgaaaggattgagagcaagagactcaaccccatatcttccttgtctctatatacagttgcagctctgtaaagagacactcggagatgtcataagtagtaatcatagaggtaacatggtcaagctttttgaaggacggctaaaagctcttcatcacatccatgtgaggggcataattcatatgaatgttagccaaataatatatttttagactatgatggcaatatccgtttggctgattttaatgtaggtaaagtttatttttttttaattttttttttgcatatgaagaaacatacaagatttctaccaactccgatacgttttcagttggtgtaatattgtatgagtgtg

SEQ ID NO: 50500 - DNA, 1104 bp, Cannabis sativa
agataaatcagccttggaattctcgaagccccactaaataaatgttgttcttaattgttcataccaaacccttggattctgttttaaaccatagatggacttgtgcaatttgcacacatgatgtggtttttgagtgtcttcaaagctaggggttgcaccataaaaatatcttcatcaagcactcatcgagcaagtgatggcagatttcatggcagaattcacctatcgtccaaatgggaaggattgagagcaaaaaaccaatggacagttagaagagaatggagaaagagaggccacttgtgagtttcatgtagacagagccttgaatgataacggggcaggagccggggttgtgatgacagcccttggaggaactaaaatgtattatgcgataagttttggcttcaaggcttccaacaacgaagctgagtatgaagcaatgttggttggattgaaactcgccaaggaattagaagttatgcggctgtagattttagctactcgcaattggtggttttccaagtaaggagaatatcaagcgaaagggccaaggatggtggcatacctagcctaggttaggagttacctggaatagctacaatacttcacggttgacccaaaaggttgatattctagagtctgtgctagtagatttcttagcctaaccaactattgagtgtgatcaagtgttgcaagtggaaggggaagaaccctcctagatgatgtcgtacattaagtacatccaagaagggaagtttcccttggataagaaggaggcttgaagaatccaatataaaatcattagatatggcttgatggatggaaatctgtgaaagagaggcttctccaccccgctcatgcattgtataaaagaaagtgaagtgcagcaagtgttattaaaaatacatgaaggagaatgtgggagccatgcaggaggttattcaatgtcaaggaaagtattgaaagacggatactactggcctagtttagagaaagatgcaacggcattcacaaaaaaaaaaatgtgacaaatgccagaggcaggctagctatagcaggcgccctcttgccaaactcataagcatgacaagcctatggccattc

SEQ ID NO: 50501 - DNA, 1219 bp, Cannabis sativa
aagtttagggggagaaggaaactggaaaagagtgttacttttgtggaaggtccaaacacttgcaatgattttacaagaagtacaaggagcaacaaggtttcatcaaatctcacaatggagataggaagcgaaatcggcatcatcaccaccaaaaggatttagctgcagtcacggaagatagtgacgattgctcaacggatggagaattgttatccatattggaatctttaataaatagggagtggattcttggctttagatgcacgtatgacatgtgtatgagtcaagaatcatttttttttttattataaatcaattgatatagaggtaaagttctaataggaaattatcattcatgtagggtcattggaactacaaaggttaccatcaaaagtatgatggtggaaccaaggtgctgacgaacataaggcacattccagagttaagatgaaatctcataaccctgggtgtgcttgaagatgaagattatggaaacaagtccatgcacggaagcttaaggatcaccaaaactttgttgataatgatgatagttaagaagatcaattgtttatttgttctccaaggagaaactattccagtcggtgaagcgagtttagtgaaagggctacaattagatatgcagctgtggcatcacaaacatggacatatcagtgaagaaggcctcaaagaacagcacacacaaggtataaatgaaaatttaaatttttgtgccttaacattttaggcagcttgtgttttagggaaataacattagttgaaattcactccagtaaggcatagaactaagaagatacttgaatatgtgtatgttgatctttgggggccatacaaagtgcctactcattacgataagcaatattttctttctatagatgcttatagtagtcgtgtttggacctatttggtgacaactaaggatgagtgtctggaacagtttaaaattcttaaaacttaggtggaaaacaaaatagatcataaagtgaagaaccttagagcgaataatggattggagtttgttaattctgagtttgacaagtagtgtcaggaagttataatcactaggcatacaactgtagtgaagatcccggagcaaaatgatgttgctaaaaggaaaggatgaaatgaaccgaaccgaaccctattgaacaaagtgagatgtctactgttctatttcgaattagggaaaccatttgggggg

SEQ ID NO: 50502 - DNA, 800 bp, Cannabis sativa
ccatcggtcattcccatccccgaccagtaaaccagtctgtgatgtctccaagtaaggagcttgtgattccattgctcaagataataaacagcgaatgcaaaaataaaagaggcaatctttgttcttccacactttgtcatttcttgctccccaaattgcccaacataagatacaaaacatcctgcaatgttctgtgctggcattgctgaaaaccgagacacaccagtccaagaaactggtttcctgctgtgttggcgtgctaatagcagccttctcccaacattgagctgcaataggacaataagcaagcacatgcatggttgtttcattatgcaaaccacaaacaggacataggctattaacatccacccttttagtaatcaattggacttttgttggaagacaattggttcccctctccaaatcaagttcttaaccttgggaggtatttttaatatccaaagttcattccaaaacttcgaagcttcaacagtattccatgctccttttgctttttgaagcaaattaaatgcacttttcactgagtatacaccacttaactcatggtgccatataaaactatcggttgttgtatgttgcaggatcgggacagcagcaacagctgcaacatctctgttgttaaacacatcctggagtagctccatatcccaccttcttgttccaatctccatcaaattaccaaccacagccgagtctaaaactggatgcgtggaagtgataaaagggttctctttcattgaaagccacagctcccttttgacagccacttgactatcaat

SEQ ID NO: 50503 - DNA, 1006 bp, Cannabis sativa
tagcagctgctgaagggctacttgtagaaaagtgcaagtcaaaaactagagaagaagcttcactcgaaaaaacaggggaaggagcggctcgaaatcggcgtggacgtacgaaacccggctggttgaaggagtatgtgttgaagcttggtcactaagagagagtgagatacttgtaactaatttctgttaaagtgaatcaaaattagtagaatatataaagaaataattgtaattactggaaattatcataaatgaatttggcatttgaattgttttgggagattggccttgtctcgaagaaagctcttagctaacataatatcatctcatgaactttagacttttagtattgagaatgttaatttaataaagttgctattttatttaaaatatatatatatatatatatatatattactcaatatcgttttaaaaaaatatatattgtttgatacaaaaataatttactttcaatatgatgagtgccttaaataaataaattcttaatggagttgtgtctcctataaaaaaaattaatggagttgtgtcaaaaataaaataatggagatgtcacaattttcatatggacctgtccacacctaagttctattcagctcatctcacgcgtgcaacgaataaatgtagacgaacaacacaaactattaaaataatacagataaatatatttttttagaaaaaaaaaaagattatgtactccatcaataataataaaagaaatcaattgttattatttgacaactttcatatgtatcaaaattgtgtctttgaatttaagagtttttgtctaattttagtaaaagaattttaacattaatgaaaatttaagggatgatttagtacttatgaacgtaagagacatgatttggagtgtatgatttattgaatgaaattagacaaaaaattttaaatctaacaatctcaataattcaagagaatttttaaaaaattataattttagcataaatattcttaattagccttatta

SEQ ID NO: 50504 - DNA, 864 bp, Cannabis sativa
ttggggaggaactagtaataagcaacatatataattttgaagtgataaaacatacataatatataattaaagtaacaataataataataataataataaaaaggactaaattcaaaaattaattaattgcttgatatataagtaagctaattttcaatattggtagctttaattacggtggaaatcacgtactggcaaaggatgggtatgttctctgtattttgcatgtgacaccgtttttattttttattttttaatattatcatttcaaattgttttgttattaaatatatatatcttcgattatatatatatatatatatatatatatataattaataagccgagttcatgagctactcagctacctaggctttgatatgtttcagttgaggctatcacccgtagaaatagttgctgtaagcatcttctacacatgggttttggttcgcacttcaacatcagctctattcatatatattaaaaaatttagtttgatgttaattttaaaaaaaatcacagtaataattcttgatcatcattttcgtaagttcattagttttttttttaataaatccgtttactaattcaaaaggttaaaaatataatttaaattaatttaatatttataattaaaacaaataaatacattataattttttttttcttcttcctcttttttttggctccccataaatctttaatcaatagttactagtacggtttactaatgcatgccctcttggttaagtgaatgtactgtgtatataatagatattatatatgacaaaggacctatatgaataaaactgtctttattaacatgtcgtttatcataaggacctaattcatatcataatgatg

SEQ ID NO: 50505 - DNA, 735 bp, Cannabis sativa
tagtgtatataattgtataaaattggtttatatgatgaacgattggtatgtgtgttgttatgaataattgtgtttgttggtatttgataatagagtaaaaatatgtatttatgtatatagaagatgtgagactatagtggagtagtcacgtaaaagatttgtatagtattaatgatcttgtatgtttttcataatttctaacttaatatatatttgattcaactaaatgatatgcatagtagtaaagtgtatcgaagatgtgagactagtggagtagctactaattaaattcctactacctctcattttcattcaaaacaaatatatataaaatacaaacacacaaaatacacaaataatatatacacaatatatatacacacaacatatatataaacacatattcaataataaaatacaaaatacatacatatatattatatatcaagtaaataaatatttaccttataaacgcaatccgacgacaaattgcgaccaaaaatttagccacctataacacacaatataatattaataaaatgaaaaaatctcaaaaaaaatatacaaaaacgaaataataccaatgtacattaataaaatgaatagaaatcatatttatatcgtaatgaaccttgagattaaacgatttctccgctaaaatcggtggtcggagttaaaccaccacctttttttaaaataggttcgggtacagtgtaaatgggtgaaaaaataaaa

SEQ ID NO: 50506 - DNA, 922 bp, Cannabis sativa
acataataaatgaataaaacacaacagaacaagctactggtaataagaccttacgtacttgctgatctaggtgttttttctccacgagccattgagccatgctaatttgtacaatcctgtttccacaaaaacttctacaatgcaaggtccttcccagttagggttaaatactcctgctacagaatctcgtgtattagtaaacaaatgtcttaacactaattatcctactttaaagtctttttcaaactcttttgttaaagtgtcttgtgattcaatgttgatgagcagcatttgtaatttgtgacttggtgtatttttcatcgagcagatccaatgacattttgagtagttcttggttttgttgctagtcctaaaattcacacctttttgtcacaatgttaacttctactagaagcatttcctctgagccaaattccagtgaaaatggagtatgtcccgttgcaattttttctgttgttcgatgggcccagaacacttaacgtagctcctcaacccatcttcccttaggtgcgtcaagctttttctttatagtgtcttttaaggttttattaacaacctcaacttgaccattagcctgaggccttgatactgacgagaagctcttattaattttgtttcttttgcagaactcgctgaatacatctccatcaaactgagtcccattctcaggcacaatttttatgggtatcgtgaacgtacaaatgatgttcttaatcataatatgaaggacttcttttcgaagtgattgataccaaaggttcaacttcaatccatttggtgaagaaattgactgcgaccactgcatattttatgcctcctctccttattggtaaagacccaatcagatcaatccccatatgaaaaatgggtggggcgtggtcatcatacaaagttcaatagg

SEQ ID NO: 50507 - DNA, 677 bp, Cannabis sativa
agtaaaggcaacttggataacattcttaataattttttattgccctttaaatagtgttctacaagcatattcttatcctgcttgtattaaaaaatatcagacttgatgtgacaatctagaccagttactaatgcaaattactcaacactaaatctaagaaactttccagcaacagaaacccataattctaactcatttgattgttgaactttcctcaatatcagaccatgtaagaagagttggaaatgaataatgcactcatgaatacaaaggaagcgaccaaaaacagttcggaaaaatattttcaattggattggagtgagaatatttttaatatctttaataactgaataatacccagaggttattaatttagaatgataatgctgagaacacctatatttacaagaccaatcttgggaaaatcaacatgcaaaatgttttaaaaataactctaaaataacacaaaaataaacaaaaaacaataaaagaaataattaaaaaaatcacatacctcaacaaccatttcacaagaaatctcctccatacagactcattcaataactgtaatttttctttagttttgtcagtacaaactccgttttaaatttattaaaggaacatttgtaagtaactaatactacatgtttctgacggatgaaattagagaaaaatta

SEQ ID NO: 50508 - DNA, 2252 bp, Cannabis sativa
aacactcactatagaaataggtgatagttttaagttcaaacgtagcattttagtcggggtgatagccgacgatttaaacaaaatcctagggtataaatatctcgcattcttttcttcctcatttcagttacctctctctctctctctctctctctcatctcgatctccctctctctcgtctctcttgcctccacccacccacccatcgtctccctctctctctcatctcacttcatctctccctctctctcttgccgtccacctcctcttcctccactggctaccgtaggtggtgtctccaaaaatatatattaataataatttatatatttatatttttattacgtatatataccgtatatataatattaatttttatatatttaatatatattgaatatatataattacaagatatatatatatttatacctatttatttaattaatagatagttagatgaattatttaattatttttagattgggtattaaaaaatatttcgtttagattaatttagtttttgatttagatctttggaaaaatatttagtttagattatttgttgttacgtaatacaaaaaatgatttgaattatttgttgttaggtaataaaaaatattttttttagattatattaattgtttaattattaaaaaaattagtttttattaattatttagctattattttaattttcttttttaagttttattaaattgtgaaggaaacttttttgtttttttatttatttttatttaaattgttattgacactatttttatgtacatatatattattgattgtgctagtcattgttaaacttcgttgagcttctcttccttttttggcaaactttcaagagtggctccttattattattattattattagtaatatatatttatttttaattagtacatacatatttatatataaatgttgatagtagttgtaaaatttagaattcaatcaatattactatttttattattttttagacattaggttcttgatgttgattgaagagtgtaaaaataactagctttattagagaaatgtataatcattgaaatcttaaaattctttatatagtggagtttgaatatcttagatattcatctgtagtaaagtaggttctgcgattaattatattgcggtcggatgggtggataatttttgtattgttaatattattttgtttcttttgtattgttttgttttttatttttttgcatgtttaaaatattcgggaatgtccatttatagttgttatattgtcgaaattttgatagaattaggataaattttactaaaaatattagattggggtaaaaatacataaatattttttcttttagatgtaaagttgatatatttgtaaatattttaatttgaataaaggtatatttgttagttaaattaaatatgccaagtattcaaattttattttgataaatatagctaatgtttatgtttttaaaaatataaactctctatattttgatttttttgtgaaatttattttattttaagtgatattgtaagctaattttttagaaaatatctttagtatatttagaattaaaattttgatttaaaaagatttataaattttttatagcattttaattttaatgttaatgtttaatttattactagaaaaaataaatgtaatgtagtttaagtaaataaaagttttagtgtaagtttaattgtttagggaaaaaaattagtatagtttattataacttttgcatagtttaagtaatgtttagttttaaattttaattttactaagtttatttgatatattagaacaattaatttttttttttttttttgtgttgatgtgtttgcaagtctaaaatgcttattcattaatgttattttttttttagaatgtactgatgatatattgttaagcctttctttgaagcaatactagacgatatttgaagttgagattttaagatttaaaaaatgtattttattttgtaaacacttttatatatgcttgatagttgatgctaataggattgaaattaagtgtagtattagctagacacatttataaaccgttgcgtatataccttattataggtgatagttttaaacatttgagaaagagaaaatggcgacggtttcgaattgtcgctagtttttctcattttgcgaggatcgaataggcaacgattataaaaaccaacaaaaaaaaaatactttacccaattatttaaaatctttgtgat

SEQ ID NO: 50509 - DNA, 1534 bp, Cannabis sativa
atgtggcaattgttgcaacatctcttggtgtgagttcaaactagaactttttagcatgcttccttcttccctgttttgttgagagcattctccttgaaacaaaattgttcgttgtggctgagatctttcactgagtgatggaattgccgaggttagtgatgttcttgccagtcgaggaagaagtggccaggcatccccttttgcaaagtttgttctatatcgatcatagttagatgtttgaagagcagcacctttaatcgtaggcctatattcaagttcaggctcgactccattatcaagtttttcaaggaaaatgctgcatttgttgaatgaatggcccaatctaccacactctatgcaatattcaggtagcctttcatatctaaattccacccagaatttgtctttaacttgagacaacgtgatcattcttacttgcataagaggtttagtgatatctatcttcactcgaatacgcaagaaaggaccctatccttctaaaagtgaatcttgaaaaacttccatgaattctcctattatgtttccaagggcctcaaccaactatttggttctactcataacaggaagcctataggcttggacccaaaaaggcgaaaaaatcaaatttgaagaggagacattttgacaaacactaggcgtgtagagcacaatgtgatgattctgaaaatggaatggttcgcgatttagtacgctttgcttatctccttcacacccaaaagtgagcataaacatatcttcatcctcgaaaattttcacagaaaatcttccatcccaatgttcagccatttgtcgctgcaatgttgaaagccatacttttttagaagttaagatacgtgcatacaaaactcgatcttccaccaagtgtgtgtcaattggttcgccaaaaattaaatgcaaataccgtctgttcctcttcagcgagtatgatcttatctttcattttgttgttgaaactagtttaggatcaaaggtagcagttaaaaatggaagttaatggaatgaagaagatgtcatgaagaactgcatttacgaactgctagaaaacttgaagatacagttaaaagaaaaaaagaaacgtttccgccagagagcactaagggagggtagatgctctttgtggcatgtatatttatgtatacatacatattaagtggtaaagaaagggccaaagacgcgtaattctcgtcaaaattaataaattaattatattttatatttttattaattatatttaaataaaaacagataaaatatctaattaaattaataaattagatgtaaaaaaaattaaaattctaattgaaattattaaagatatgtacatattaataacaaaaatattaaggtaggatactgttattggtgcatttcaatatcagcttctacactatcataaactattgaattataataaactaaattataacattatcattatcattataatagatcttaacaaactcacaatacttcaaaatttataatttatcaaacattcagctcagcttttttt

SEQ ID NO: 50510 - DNA, 1941 bp, Cannabis sativa
  modified_base (1880)..(1882): a, c, t, g, unknown or other
aattttaattttttcggggcctccaaaattatggggcctggggccgaggccccggctgccccaccctctggccggccctgtgtttcatcttcattcaatgaaaataacaattactctatttcgcaattctctaaacgaatgtggtatcaaactacaagtactctgttctacaattctctcaactaatatggtatcattttaaaaataagcttccatttctttcttcttcgatcatctcaagatcgaattcttcttcttcacgcaacaatggccaagcatcatactcggagctctataaatgatgagaatggtgatacttcttttaatcccattctgaatcctaaaattacatctactcccagtcaatctactcatgaggacttgtccagtccctacttcttgagcacaggagatcatctatgtcttatgcttgtcttcgctcctctaacaggaccaaactttcagtcctggcgtcaagctattagtatggcttttaatttgctgccaaaaataagattgtatttcttgatggcagtcttctaaaaccacttccctacgatcttgaattatgttcttggaccagatgcaactacatggtgatgtcatggcttttgcactatgtttcttcagaaattccacaaagtatcatgttcttcaatattgcatttaaaatgtggaatgatctaatcgatcgatttaattaagggaatggacctcaaattttccagttgaaggcagagcttcatagcattcaacaaggagatcaatccatcaactcatacttcatcaaactcaaatctctttgggacgaattgaaggagttccaacctacatcaaattgcacttgtggtgctcttcaacgtctacaggaattctacaacatggactaggtgctacgactagagaaacatcaagattgtctagttacaaaatgagctactcaatttacttgtcgtctaataaaatacaaattaacattattcaaagataataaaacttgatagtcttaaacaattaaatcaaactcataccacattggttgattatggcgaatggcctgaacaaaaagcttgttgtcagttttgatctcaacgtgttgctatcttaggcttttgacccaactgagagtctctttgtttcccatgacttcgactatctcgttagcataacaaccccccatgtgctgatgatctagcttccataagagtgaccgttccccatatgccaccgatctagcttcaataagagtgctagtactatctcttgctaccaaactgaaattatacattgaatttgactaaaaaataactatatcaatcttgattgcgttatcaactaattttattcaatacttagaaccatcacccttattgccaaagcataacaatgataacgaaattttgtcctgagataatactctcataacactaataatattaaaaattactaataactaaacaacaacataaacataaatcatgaaactataatacattccttctctagtacactttatatctgtttcagtatctagcagagctttttaattttttttataatcgtatatgttgtacttatttaagattacatgtaaatattcaaaaaaaaattaacaaatttctatgctaaaatacgtcaaacagttgcttactacgcgtacaaaagaaatcacacgcatttaacgaaatatttaaattttattttcagttatgaattatttaaaaaattttgaaatttaacaagtaactacaactacagaattgtaaataaaattagaataaaaaactcttctaaatactatgaaataaataaaaagtatagcaaaagaaccctactaggggtattttataatagggaaatttacacccactactgatttnnnccattttattacatttatactgttccacggcaaaaacaacatttatactgttttttttt

SEQ ID NO: 50511 - DNA, 681 bp, Cannabis sativa
aaatttcctaatccccaaaaattccatagaaggaccttcacgaggccttggggggcatgacaatgctcgcttcctcggtcgtatgaaaatctaactttcccttgctgtgagttccatgttcgtgcacctgagtaggatctctagcgtctaaacacactgagaaaacttttgtcgagtgagcttaaggattactcaaatcaagcacccccacctctaaagcagttgagttctctttccctcaaaactagtaacatcattagtgtccctctacatttttgcagacgtatcacactttgaattattgcccagaaaaattttcttccggtttgtatccctaggatcaggagatttttgcgttctatcaatattgaaaggattcaaactaacctccccaaagacctcctgaagagcattccctagtttcttcgctatgactgtctcgatatttttagcagagaaagttctgtcaactttttcattaggcttcttccttttggccccaagcaatgggcaacatagtgtttgttacttcacacgaatattaattataaagtgcctcatgtcccctagtatgcatgtaaaaaagatccatttagttggatcgagtcattgctctgacccgacggatcatctttgatttgaaacatttggatacttattggatctcggattagatttgtt

SEQ ID NO: 50512 - DNA, 1110 bp, Cannabis sativa
aataaaaaattccgctacattttaatctttttacatatatccatgacctggtcgcatgtattttttgaagaagcccaactcagtataatcataagcccaaacccattttattattagggtttcatatcttcctatttctttagggtttatagtcttactctcaaaccctttctctttctcagggttaccataacccccgtctccaacttaatcaaatctctctctaaatcggagaagaggaattccgtttagattggtttgataaacaatctttacttcactcgcaggtatgaatctggggcgctgataatgaggatttgtttcggaacaatgggtctttgattcgttgcatcttttcttcatttctgattgtttttttgctatatataattttttttggtttgatttgaggaatctaaggagtcgacatgaaacgaagggtctatatttcgttgtaattatgtagagatttctttttcccgattcataattgtgtggtttctctcattcgatttctgttttcttttatttattttttgaacagtaatggttagtactggtttttcaattattcccacgccatgatataatattgctttgttcgtttcagaaatatactttgtatttcgaatggtattgtttatcttcatctgattagttagtctgaagatgatgtattcttaatttcaataaagtgtatatgaagatgcgtgttcgtatgagcatagctttgtataatcccatctatttgatttttttttttgttttgttaaagtctgtaagctcacatttttaattgtttgtttatgggtactgatatatttggatggttacttgtggaagttggttgagtttggttttgtttatatgataactaagatttcagaaatttgttataaatgaaatttgttattcatattgcactatgcttcttattgttttcagaagaagataagcattggtgatgaatgttctttatttttttattggttcaactcttatgatttttatttttatttcagattagacagcaaaaatggtgcaatataacttcaagaagattactgtggtgccgactgggaaggacttcattgacattatcctttctcg

SEQ ID NO: 50513 - DNA, 1760 bp, Cannabis sativa
gacaatattttgctcaaagaagaaattttttggaagcagcaatccagagcaaattggctcaaggctggtgataagaatactcgttatttccacaatcgagccacttccagaaaacgaaccaacttcattaaaaccctcaccttggacgacaattctcaaatcactactcttaatgacatcacgacctctttcgttaatttttattctaatctcttcgcttcccaaggctctaatgctgaggcgatggctttcgctatgaggggtcttcctaaacacctttctccccaacagcatgtttttctttcttccccctacactttagccgaagtcaaagctgcccttttccaacttgctggacacaaagcccccggtcctgacggtttgaaccccacttttttccaaaaaaattgggattcagctggaaatgatctttgccaggctgtcttatcggccatctctactaacaccgacttggctccggtcaatgaaacctttctggttctcatacctaaaataaaaaatgcgtctagagttaaggattttcgcccgatcagtctttgtaccactttttataaggtcttttccaaaactcttgctaatcgtcttaaattcgtcctccctgatcttatctcccacaatcaaggcgcttttcttagtgatcgcataatctttgacaacatcttcattgccaatgagattgttcacgcgatcaatcatcgcaagactggcaaagtgggatgggcggccctcaagcttgatatggagaaggcttttgataaagttgaatgggcttacatccagcacattcttcagcatttcggtttccctgtttctttcatttctctcattctcaattgtctctcctctatttctttccgtcttcgcattaataactgtctttctcatactattttcccttctcgtggaattcgtcagggtgatcctctatcgccatatcttttcctccttgttgctgaaggtctttcggggatcattaatgcgaactccactgccaactcttttcatggcctatccatctctcgctctgctccttctatttcccacctcctgtttgctgatgacagtctttttttcaccaaagtgtcctcttcgtcttgctccgcaatcaaagacattcttttgctctataacaaggccactggacaatccgtgaatttccacaaatcgtcaattcttttctcccccaatacccccccccctctgatcgtcaaatgtttagggattcccttaacatggatgacaaaccgttcatagacaaatacctcggtgtccctcaatgtttctccagatcgaagacctctttccttttccttttgcaaaaagcgagctccaagctgtctgtttggaaccaaaatcttttttccaaagccggtaaagaggttctcctaaagtccgtcatccaggctattccctcttacgctatgtcttgcttccgcctacctatttctctttgcaaacactacagccgtcttatgtctaaattctggtggggatctcttggccagaaccacaaaattcattggaaaaagtgggacaacctttgttcttcgaaattcttcggagggttgggtttccgcaacattgtgcaccataaccaagctatgctggctaagcaagcttggcgtcttctaacttccccggattctctggttggccaacttttaaaagccaaatattttaagcgaaacgatttcttacatgcggccatcggccattccccatctttctgttggcgtagt

SEQ ID NO: 50514 - DNA, 920 bp, Cannabis sativa
tatttttattatgttggtggcctttggtcttgttgtatatgtgtttattggaaatattaaagtatagtaatttcaagcttgtggaagctacttagtaattatagtaagagcttgacttgagatattgtaactaattaaaaaaaaaagtgtatatatttggatatttgactttaattaattcaagtccaaattaaaataaagtttggtctaatgttttactattgaccaattaacacacacctgcctaaatcaacaggctgcacctacaataatattataatattattaaatatattatatatatttttttatatataatatcattatatttaattattatagacaagctcccctaattgtaagctatgatacaatttaataaattaaaatataaatctaaggttgctgtatgagtggcacaatacgataaatatatagtgtgataattaatatttattataaatgatgatctggaccaaaagttgccatgtatgcaattagttaatattgatggaatgtaaagaaataataaataaatatagttttttcaaacaaaaggattttcaaataaaatttacttatgttagaactagttaaggtgggtcttgaaatttagtgggttataaaaaaaataaatttaaatcctaataaaatatggtattttttaaaatcagtacaaaaatatgtaattttaaaaagaatttttttttttggcccttttaattggactaaatgagccttaagcacatacctaacccgtttatgtccaaagccgaatctaaacctaaaccatagattattaaaaatttcataaaagtcaaattaattaagtaataaagtacctcatattttaaatacggttgtacggttatacggaattttaaatatttttacgatataattttatttatagaaaatac

SEQ ID NO: 50515 - DNA, 1543 bp, Cannabis sativa
ataataattattatgtaattttttttaatttttatgtaatttaatattttacatatttaaatttttattataaacattttattaagagatttctcatccataagattctccactccatgttcgctcctattaggagatatctcgccctattttcgatgagaaataagcagagatagaattaaaacttttaatggagataggaacaagggaacactcctcgccaattcccgacccgtttgattccctactaaaaaatgttgtttggaaacctaaaaaaaaagtgaattttagtgtatgggacatgtgaaatccaaaattaggattgtgggctaaatcatataaactaaaataaacgacttttataagactttaagcctcaaaaagttcctacttataagagacaacttccaccacttcacacgttcactctctccactccaacaaaatggagcaagagcaagacctctttcaagtctcactctccactacctcctcctccgccgctccacaaccgggccgaaggcccatatgcgagaactgcacaaggcccaatccagtttgcatctgccacaaacttccagcccagcccattgaaataacaacccaaatcataatcctccaccacccacacgaggcccaacacaagctctccaccacaccaatcctcaccaaatgcttaaccaacacaacagccctcgtcggccgccgtctccgccgcggcaactcaccgctcctcgaccaatcgccgccttccgccatctacctcttcccctcgacccaaacctcgcccgccgtcaacttatcccaattgagggacaaggacacccctaaggtcttgatcgtgttcgatgccacgtggaagcacgccaaggagatggtcagcgccagcgaagggtatttgggtaaattcgcgaagagggtttgcttggatttcgatgagaatgagattggtgggagtatttacgattctgatctgattctgaggaaggagccgtttggtgggtgtgtgagtaccatggaagctgtggccaggactctcagggttcttgagcccaatgggcctgagattgaagctgggcttattggggttttgagggaaatggttagattacaggctagttttcttaagcccatgaagcccaggcccaagttgttgaagaaacaaaagaagaaaaaagtagagaacgagtgtggaagttagtcaattttttttttatttttcactccttggattactatgtagcttaaattatagtgagcaacaataaaattcatttttcaaataatattgtttttttgatgaccaaatttgagatgtaaaatttttccaatttacaaataaatagttatatctatatacactaatttggtattatattcaaaaaaataaaaataaaaacagattctcatttgagatcgattcgagactaaacttattgaggttttgaaggaaatggtgagactacagcctagttttcataagaggaaattatattctataccctttttatattattctcttttatttttaccctctttttta

SEQ ID NO: 50516 - DNA, 2598 bp, Cannabis sativa
ccattgtgaaaaataatggtctcaaccatcatacgagggcactagtctagatagtttcttgaatggttctaagacattaccaccaaagtttcttataattgtcgaagaaaagaccccatcttaaatccagaatatgaagcttggataacacacggccaactcctaatgggtttgctctacgactccatgacagaaggtatagcctctaaattcatgggctataggtcacctgctagtgtttggatgctctcaaagccttgtatggagctcactcaaaataattaactttataattaaataatatgtaaatttaaaaaaaattataaatttttaaaatttaaccataatttaaaattaaaataaccaatttttaaatttaagcttcaaaatatctcaaattaataataatctattgaaaaaaattaaatattattaatttgaaaattagatatttacgtttaaatgttaaaaattatattttatttagatatgtagggtttgaaattcaaaaaattcaaaattggtggaaaaatccccaaaaaatcaaattatattttatttacgtattaaatatgtcatagaaataaaaaatgtatatataacactagatatttttacgtagttttgcagttaattctgcatactccactagtctattttattatgatagttttctgtataattgatacaagatacaatcgttgatcttttttctctctcaaaatccgtccatttttttgtggaatctcccctatttattatattataggttggtagttattcacacttgggatcgatttaagatataattgttcatgaaatgtggacaattcccacgtttcatttaaatgcatgtgggataatacaaaataacttcttaactgctttttattcttatccttatagatggttaatgctgatttagacaattgtatctcgcttatctacgagttgttatccttgtctatcataatgtgaaaaaaatgctaagtgttagtagatggttcgcctcgtcaagtttctttagttagaattgcgaggtagctgtcttgctatccataattcgaggtttctttgtacgacagtattcactcctttgaataaatgaattatcttctttgactgtgtactccgaggcaggtgtgtgtctcgtcaatataaattttaatagtcttttatccttatctcgcttaaaactatgtagtcaggaagttatgaatattttttattaatcctttattaacgagttattcttttttgcattaaatgatataattttattatatcaggtggtttatattccagaacaagacacgtgtcactctttgaagtacgggtataacagtatgagattgtaaaattcactacaaagatagaagtccatttttacttttggctggtacttagcgattgcctttttttattattcttagtggggaggttgcatcttgtttgttggcgttggaacttgcagtgaagaaatacttgtaatttgttattgtggaatgtgattctaacttagtttttaaagttatcaagggattaaacctaaggtaaaaaattaataattatgtagctcactgtagaaatcttatgaacttattctatataattatgcttatttttttttataaaagaaacattctttttctttttattttccttattaaaaagtttaaaataatacaactccattaattaattgcttatttgtactgcaagtccttaaattttataatttttggcaagttggtccccaaattttattttttagcaaattagtccccaaactatataagttttggaaagttggttcctaaactttattttttagtaaattggtaccccaaacttttatttctttagcaacattaagtccccactattagatattgatattttatttgttttacatacattaatttattttttgtactaaatttaaataatttatattttttttaaatattaacactttgataaaaataatagtattaattaatattttttatttttattttttaagtactcatataatatattctgtataattataatatttacttttttaaaaaatatttaaaatatactttattcatatatattattaataacaaaaaaaagtataaacactagctatattttattattgatttatgaatatgtagtattacaattttaataattttttaattgtataaatatttattgattatttaaattttacttcaatgtgtaaaacttcatgggttcacatcgtaaaacataagtcaaaaataaattttaaaatataatttacttagtagtttatgaaaaatttattattatttaaatcttttcaattgttctcttctttttcttattttgacataattgaaaaaaaatacatataaacaaaaattatatctttatttaatttgataatatattaatataaaactatttaaaattaatagaataataattaaataaaaaaataaaataccatcatttaaaagtgaggaatttatgtttccaagtgttaggctatttttaacctaagtttcaggtcatattttatagttgtttttcttctttattattatttttggaatagaa

SEQ ID NO: 50517 - DNA, 1033 bp, Cannabis sativa
caactaaagaaaagatgctgctgagaatcatctgtcaaaccgcacacatgacactctttagtatctaactcaatgtaaaattgctcgagcttatcacgagtcaagagttgaatgttcacaacttgccaaagcatgaaccgatgcttgggcacgttcaaagaactccacatgctactgttgtagtggaactgctgctgaggaattaagctgttatacaaccagtttgttctaaacttcccacctgctccagctaccattatgtccttgttcgagaacttatccttcaagcgacataatttgttccaataccaacttgaatcaagcttaagatcataggaccaaatgaaagtattctttaaatacacattattgatccattcacccatagaatatttcttttggctaaaatggcccaaatgtatttagcaagaatagcttgattctatttgattccatctttgaatcccaaactcccatatatttttgggagacacactttttccaagaagccacatgtatcttgcttctatatatttccatttagaccccaaagaaaacctctgcaaagcttttcaatctcatttgtaatacggtgcaaaagtatgaatatgctcatccagtaattacgaagtccaagtaatactgaatgaatcaattgagctctacctgcaaaggatagatgtctacttccccaagtgaaaagtctctacttaatattctttatgattcctccacaatcttcagctttccatttggtaggccttaaaggaaccccatggtgctttagagggaaagtgccctccgtgagagccatctcccttaaaatcttttgtttctcttctcccccaacccctccaaaatagatttgggatttgttggtgttaacaaagagaccaattgtagaactgaattcatcaagaatctctttaagcacctgaacatattgcttgttgtctttgctaaacaacatgagatcatcagaaaaacaaagacttatgaaaaaccgtgtttttgcaaatgtcagttgtatata

SEQ ID NO: 50518 - DNA, 1226 bp, Cannabis sativa
gagaatcttcacccattagcggcggatccccgcgggattcatccccatagataaaatgtgcatccctagttactagcaagatgaaattagagaaatcatggcaaatgtcttattcacgttcatacatcttcagagtcaatctcagagaaattggttctcaacaagccaacaaatccattttcccttcaatcgcagatcccatcgcgggatttgaaaccaactctgcatcttctcgcacatcctcttcctccgagaaatcaatgggtttaacctctaagatctcaaccatcgattttgtttgctgaacattcactgtagaggacggtccttgcttcttctttttctttgcagccgattttggttttccctgaatcttcactttcgttttcgccatggcaccaacgttcaagctgagagaaaagctagagagagaaatttttttatattatttattatatattcaatatttagttattttcctttcctgatttctttttatttattttttttctcaaaataattattttcaagatcaatggcaacagatgcattctaaatcgtcagaatttgaagtaactagatatatgaattcgatataagtaatttgtttattctcctcttgccttaatccgcaggtcttccatcgtagtactgtttaattgcccctactgtatcttttctttttttttttttaagtcaaagtcttttttagtttctaaattcacacgtcttggttagaaattatgaatcacgagaccaaaaatttacttgacttactaaacttttgtttctagttccccgttcaatgaattgaattatttacaaaaaaaattgtcggatttgaagagatgacaaaagacaaatgtattaggcttcaaatagaaaacttaaaacaatgcattagctagctttatatatttatttaatatatacagttaaatatatacttttgaaagataatacatattaatttctgtcgtatgtgcacttaaaaaagttaaaaagaaaagcatgtaatatacatctaatattactatgaaaattttaattattagctctccagacataaagatatgaaacaggtttaagttatccttcactaagacatgttaatatgtttggtagaggggagaaaaggagggagggagaggaataaagggatggctaattaggattttttttttccaaattttaacatgtaataaattatgtcttttgaatttttt

SEQ ID NO: 50519 - DNA, 586 bp, Cannabis sativa
agatggtctgatattgtaaaggttggtacacataaataaatacatacaaaaattatattatttgcagccattgtttttactgcatgcatgtaaaaatattttcatacataaacaagtggtaacttttatttttgctacataatatagttacatgggagtggtacttttatagatttttataaaattttaaataatttaaaatgtcagaacttatatatgattcaaaatttcaaacctacacgtataaatgctgaaataaatatatttgaaatattggaaattatttaaaattttcttaaaatatatttatatatacactgtttttttttttaaaaaaaaatcatattatatataatacactgtcatatgaacagtatatgaaaaaaaatgttaatttatatctatactaaaatgtaattaaagatgttatcatatatatatatataacttagtgagttacatttctcctcaaataatttcgaattaccctccccaaaataaaaaatatgtatatatataactgttagaatttgtataagctaaatatttattttcaatgtgagactaattcttttttttttttttt

SEQ ID NO: 50520 - DNA, 1687 bp, Cannabis sativa
agaccagaatgtttccatctacaattcaacacactaaaaaattaccctcaaaatgattactttattgatattagtggccaacattacacctagctttcaaaaggctagtctctctaattcaactattcgagacagttttctctcccaattaagtcataactcatctaaatcccagtcgtcccaagttagattctcagctttctatttataggatttggccaataattgaattacaacccctgcccccccttattacagccaccactaaaacaaattaagaaaattaaaggataaaaatactaaaagacccttacatacttaacaagccattttaacaaattaaaatttggacttatactcatcacgtggcctcctagtatatactaagtgtaccaaaggtttatcaataccccccaaaataccttcaccttgttctcaaggtgaaacaaagggaattgatcatggatggtagcaaccggctcccatgtagcttcaaaggctggtaggtccttccatttaatgaggactttagagggagtagtagcagcagcaatagggaagcggatgtccaaaatagtttcgggttgcactttaagttccaaattagctgttaattgagggggaatagtaggtgtgacttgtgaggacgtgatggctcgacgaagttgagatgtgggagacaggatgaagacgagcctggtccaaaatttggagcttgtaagtgacatgaccaactcgttgaatgatgggaaaaggtccatagtaccttactgaaattttttcattggagcattgggcaagggaccgttgacgatagggtcttaacttgagatatacttgctctccaacagcaaactcatctagtaagtgctttaaatcaacttgtagcttcattatgtgttgagatcgaaggagatgcatttggagatcatcgaggatggcatcacgagattcaagtaactcgtcaactgatgatactatggtggtacctttttgcaagataggagaggtagggggtcaagcccatataatgctcaaaaaggggtactctttagtgaagaatggtaagaagtattgtaagagtactcagccacaaaccatttagaccattgttttggttgttggcaagaaaaacactataaaaatgtctcaaggtagcaatttaacacctcgacttgtccatccgcttgagggtggtaagcagtactcttttttaagatagttccttgcaacttaaaaagacgactccaaaataggctaaggaagatctggtctctatcaaaaactatggattagggaagtccatgtaatctaaccaccgctctcatgttcgaatcagctactattggagcagaaaaatggtgctttagcttgataaaatgggcatattttgagagacgatctaatacaccattattgtattccaacctttagattttggaagaccctctacaaaatctattgtaacctcatcccatacttgggctggaagggctaggggttgcaagagacccgctagtgaggttgtgagcaatttattttgttaacaaacggagcagcgttgcacaaacttatgaatatcctcccataaaccctaccaaaacaactcagcagccactcgcttatatgttttaagctcaccagaatgctcattaaatagggcagtatgaaattcttctaatattcg

SEQ ID NO: 50521 - DNA, 2750 bp, Cannabis sativa
  modified_base (2648)..(2652): a, c, t, g, unknown or other
aggtcagtccgcctataatggtttcgtttttattttcttaatgcaaattaatatctatttttcttgtgaataacaatagaaattaatattaaatatattaaaaatattatttttataaacgatttaagaatattgtttagtaactaatcaacaacactcaaatgctatgtaaaaattaaaatatttctcactgaatattcatattttcaaacattcaaacattacataaatatatacaaaataaataatgaataaattaacattcacattcacataactaaataaattatcatgagattttgttttcttagaaaaagattatttctctaattctctacaaatatatataaggtgtataaatacaaaattttctattcaaattcactatccactgcatgatatcttctaaatcatctccaggcaaagtaagaatttggatcgaattagatttagtataaatattgaagagaacattagaaaccaataatacaagtttgacactaaagaaaaaagaaatctagaatatatacttctttttcactaaataaaaattgtcattggaagcacccaaatttcatcacttcaaccctttttttctgagcaaacaattagataactagaagaagaaaaatgaaaatacaaaaattattacaacatagtgaatgaacatatgaaaataaacttttatcatatagttggtgttcacttaatttaaatattccaaatcgtaattgaattataaataaccataataaaaataaaactaaaattattaaacctaaaattaaaatgaaaaacttagaaataaatcaaaactaaaaaattaatcaaatacaaagaatctaacagtgagctaaaaataataatgaaataccaaattctaatacaacatatatcacacacatatacatatatacacggtaattacaataaaaaatattcgtgtaaaaatatatacatatacttttatccatatatatatatcaaaaatatctaatcacacagtctgaaatttatacatacatatatacacataaatatatacctaaaaatatagaaatcaaaatttaaaattttagggtgtacctaaaattaataacggggtaataaggaagtagaaatctcagttgccaaagttattttttatatatataatatatctatatgattgagagagagagtgaggagagagtggtggggagggtgacggggcagagcagccagggatgagggcagaaatggcggagggtggtggacagcaagagacactgtagagagagagagagagaggaagaggcaaaatggggaagaagaagccctatttcatgtcttattaaaaaacttttatcggtgcaatttgttgcgccagtaaaaatgtcttaatgcaccggtaatataaatcttagaggccctaaagtaaaacacacttttttacgaaacctttactggtgcaaatatgcgctgacaaagctgtttcccccaaaataaaacacatgtgggaaaattcctacttatttttttaagactttttttggcgcacatttgcgttgctaaaatcttttcacacatggttattcactcgccaattctcttacatcttttgttggtggatgactgcaccaaaaaaggtaataaatagcataaacaaaaaaaggtttcatttaagccttttttccggtgcatttcatgaaagccaccagtaaaggccacttattccggcacatatcaaaacccttggctaaaactggcactagattgtgtgatcttttgctggcaatttttgttggcgtcgttgccgaaatgtgctgaaaaaagtatcatttcttgtagtgaaccaaaaagtttcaaaccattattttgtaaagaatacacagtgaagacagacaatgatcaaactcaccttttgggaagaaggtgacctttgcacccaaataattgtcaagccacttcttattcggtgtcattcgatcaagctttgtaaaaaactttggtggtaacatcttgtttgttggtccaaatgtaaaaggaacctgcatcttcaacataacttttcaaaacatcataatttttagctatcttcttagcacttattctctcttcaggcatcattactgaattgaaacctcctatgtgaagccaaaggaacttttgataagttgttaagctcaaatatttcagcccatttttccttacttaataaggaatgtcaggctcatacagatcaccgattggagagaagcatgagcttagctttgctgatgtcttcgattagtcgaagcaaaaaatttatgaggctgatgtcatcaatctatgtgatcaactagttaggtcataagcggaaaattcaggttcaatttcaaatggctttaaagtctgttacatttagcctactcagtttattttcacgccttccacccatgtatctataaaatggaagaactaagtaacactacaaaaaaataccatttttagtgacaactttttagtcacaacaaaaattttttatgattgaatgtgacttttaggcatgcacaacaaaaaagttacttctgactaaacataatatttagttacaagttgtcgctaatatatttagttttagttgcaacacgtattgtgacttaaaatatatttagtcacaacaaatnnnnntttttgtgactaatacttttagccgcggacttttaattcacaacataggaatgctaatttataattggtcacagctttcttacttttagtcacaaatt

SEQ ID NO: 50522 - DNA, 1018 bp, Cannabis sativa
  modified_base (946)..(950): a, c, t, g, unknown or other
tttagagagtatcgctaaccaatcgcaacgcgacatgtcgagaaggtgctaggcaccactggtacctaatatcaatactcaatattaataaatgataaaagatatcaatgctaagaaaattgctaaaaattataataggtgtttaagtatttttttggtatcatactattatttgtataattaagtataggatctcatataattttaaaaaatatcgttaatcaattatcaggcatcacttatagaaggtgttaggcattactgttacctaatatcaatagtttaatgctaactatcgctattagtatacttaaatattgagaattactaaaaaaacgtctagtattttcttttgtatcataatattatagggctacagctctcactaaacaaaatattacacttaaaaaaaattacacatatataatttttttattttgataattataaactaaaatatagtaaatcgcctcacaaaataaaataagtaggagtgattataatataaaaaatggggttggtcattacttagttataaattcaataagttgatttctaattctttattatcaaacatcatcacagcacaatttttttaaaagtagcttttaattttttcatatgagcatctggtatgtcaaaaagttatgtaaatttggcacatagtaaattttatattaaatttagcacaaaatttacatcacaataaattaataattttattatttattttatttatgtcacttttactattttattagtatatttagctataacattaattatgagctatttatatttatttattattattttacataataaaacaataataaaattattattttttatactttgaataaaaatattaaattttgcactaagttttataattgagaaatttgcggccaaacttctttatgtttcatttatttaacacttaacnnnnntttctttatttttggtgggaaaacccccttaagtcccattccgcttataattcactgttttgtgcatt

SEQ ID NO: 50523 - DNA, 1732 bp, Cannabis sativa
tccttaactccacactacagaacagtagagatttcatgaatgcaagacacttgaacgaccacacataccacacagctgacggctgagccttctatagaggctttgactcaagccccaacatttctatctgacttgtactgaagaatgttcaatacagatgactcatttgataatcgatctgtgcatgagatcatctacaccataaatgatatcaggatttgttgggacccaactttcagtatgtatgtactttaaatctacaaagtgcaaattaaaataaaattgaatcaaacatctaatgaaaaaagacaatcaaatatcaactcaattaccccaaaataaagaattgaagtttttcatgaacataaattccaaagaactaaagtatttcagcttacctcaaaagcaaaaagaaaaatctggtcaagaattccttcccaactctatgatcgacgacaaaagcactaaatatctccccaaagcacagtaaaatagtttaatccttatcaaagttccaagaattaaaattcaaagaaggcgcgcaagaacgaagactgtaaaactaagcttaaagagtgaaaccctacaaatcttcggatggttaagatgagcaatttagttgaagagagtttatgacaatggttgttatgaaagagagctcaatcaatttaagtttacacagaaaacaaatatcactcacttattttctttccatattccaaactagttcaaattaatttacaaacggcatcgaattttaaaaaccatagttcaaaatgctaagaagaatatcatccctaccttttttaaaaaatttaaaatttgaaattccttcctcactcttttcctaacttagacaatccaagggagcatttactagctcttagacaatccaagggagcatttacaagctataaaagccttaatactaaggtcggcaaaacgggtcagaaacgataacacgacttgaaacctgcacgagagttagcgggtttggatttgccttaaatagattagggtcgtgttcgagttaactcatctaacctgtttaataaatgggtcgtgttcgagttaacacgactaacacgaaattgacctgttaatgacctatttaaagttattttagtactttaacatgtcattaatgagttataaacgtattattggttgacatgtttaaacaaaatatacttataaatgggttacacgagtcatgtcgtgtcaacccgtttataaacggatcttgtttgggttttatattttgatacaattattaaactgatcatatctgagtcgagcatatacttgttatacataaatttcgacacgacacgacacgacacgaacaagaccacgaacaagaattaccaccctacttaatacctatccttacttaatttggtaaataagtaatgacacctagtcttccaaaaagttaaacataaattttctcatgagaagctttagtggattcaaacctaccactacactatacaacaaagtggttatactaaaaatgcaattgtataatagaaagaaaattgagtaagaaaaaaaaattaaataaaattcaaaacacctaattttctattatgtattgaacatgttagtatcttgtattgaatgcttatgacttgttttttgaacatgcataatgatattgaagtcaattctaattattgttgtcatgcatacatgtgttgtttactgaagtgacaggtacaaaaggaga

SEQ ID NO: 50524 - DNA, 1111 bp, Cannabis sativa
agcattaattaatatggtatctatctttgaaaaaaaaaatgttattgtgaatgttggagaacacaaaaacacataccaaatattgttgtgtccattatactatatatttaaattagatctaaatttatgagaaaaatgatataacaagttggattttttttttttttgtcaaacactttttaaacaagtagctagcaaattaatggggaattctatataaatacaagatcttgttctccttaactaaataatattaattttataataaaccattaattatattaaagcccccaaaaacttcatatatgcaaataataataataataataataatacaagcatagatttcatcataaaagcttaattccctaaaagaaaagggaaaaaaatctagtagttattgtaaaaaaatatccaccatatatttaacacattgtgtggtcatcaaatatttaagtttattttttttagatagaaattaaactatgatgcttagcaaatagcaaagaaaaaaaaaacaaaagatatgattttttgttttttaatttttttatatctatacataaatagtgtggagtacttcctatatgtatatatatatatatatgattcccacaatctaattatattactttctttatttttttatacataaaaaagaaagttatattattactttcttcacctcactctactaattaaataaacgcacctactactcatcatactatctctctctatatagaaataaataaataaatataaaattaaaactgaaaatagtggtcaatattatataaagatgttaaactatttatatatatcataagtaaatgaataatgaaattatacacataaaaaatcacttaaatattttacactatttttatgtgaaatagattaattacacatcattatgtgtaaaaatggtgtataatttaagtgtgtctcaattattttcatattattattgatgtaattcaataataaatattaacattttagtaattaaataaatattatatttggtatatataaaaaaaaaaaaaaactaaatataaaatccttatgtgtaccaaaaaggtgtgcactatatttctctttatatata

SEQ ID NO: 50525 - DNA, 692 bp, Cannabis sativa
ggaacttctcttgagttttgacagtaaagtggagcttcttcactcactcaatgagaattcgaaatcttctgttgctcccactgcgaacttggccaacagatctgacaactcaagccgaggtcgaggttccaacacctctcacaatcccaatactgggcgctcaaatccatctggaaacagccgtggaacaggctatcgaggaagaggcagaggacgttcaaacaacaactccaaaaccacttgtcaagtgtgtgggaagttcggacattcagctgttgtgtgctataacagatacaatgaatcattcatgggttcagatcctaaccacaatcagtcccagccaaagaaccctccatttgccttcactgtttctccggaagttgttgacagtgacatgtggtatgtcgacagtggagctagtagccatgtgacatctgatggaaacaatttgagccaaaaatctgactatggtggtaaggataagcttgttgtgggagatggtcatcaaattactatctctcacattggctcaaatcaattatttgttgctgattgttctaaatccctaactctaaaagatgttttgcttgaacctgatattgcaaaaaatcttataagtgtgtcaaaacttgtcacagataatgatattgttattgagtttgactctgattcttgttttgtgaaggacaaag

SEQ ID NO: 50526 - DNA, 678 bp, Cannabis sativa
gttttcatattcatcataatcatgtgcttgaattgatgattatgatgatgatgatccgatggtgatgtcgtttctggttgtgggatggcgtacttaagctcgttttcttcgttgatggttgatgatattattgaagacatgagctcaggctggttggacgacgacatattaatattctgtcgttgaagagtattagttgtcgttttgttgttttcttcagctatggcatcgcagaaagctctatgtgttataaagctatctctcctgtaagtacatttaattttccattaaataaaaactagaatattttactcccaatatatatatatatatttaattaattatatgaataacattgttttgtttagtaagcaagtgttttttatatttttatccaaactttagtgatagagacgaaacaacaatcttctatatattgtatttaagttgaatagtcaaagttcctgctaagccaaatatttaattaaatattttaatttaacaacgcctaataacaaggaacgacaatgctacctgatcaataattatcattattaatattatatcacatggaagaagaaaaagaaaaaaagtcttgtgattaattataatctaagagctgttaaccaatattttacatcttttcattaatttattgctaattattaacagtataat

SEQ ID NO: 50527 - DNA, 799 bp, Cannabis sativa
  modified_base (44)..(71): a, c, t, g, unknown or other
ttatatgtgtttatttcataatagttttagaagttcatatttannnnnnnnnnnnnnnnnnnnnnnnnnnnatctaagatcctggtaaaattaaaatccaacagtatcatcatgttcaatgtagacgaaaaaagttcccaaaaaacatctttagaattagggttagaagtgccccatgatgaaaataaatgtgaacttgggcgttagggacaactctaggtcgacctgggcgccaggtgctcagatgctgcaaacttgaatgaagcttctagcatgcttgtggcaagtcttactcgtgtctaagtagaaagtttgagcgatttgcacgacgggaccaaatactgaaatcctaaggtcagatgtcaacttgggggatgggtaaaacttaggcacccatgtgaacttttgagatgccaaattgacatttatcagtttctaggtttatgactcggagtcatcttgacttgttggtttggaacattgaaggatggttatttagaaacaacttcgtgggatccaaatacattctggaatcgccaatgtaaaccttggcgcagggctaaagactcttcccagggttgaccgttatgactaagaactctcaactctcagaatatttttctttttatcacgtgtcaaaaatcatatccacatcatcaaagccaattttcgagtaaccaattaataaaaagaaacatattatttaataaaaggaaatattttttttgacaaagtaatcaggatcaaaataagacaaacttcaaagagaaggatcatcctgccaacaaatttttattgt

SEQ ID NO: 50528 - DNA, 2291 bp, Cannabis sativa
ccgctactgaaaaagaaactttatgagttgcattaagaaaagtaaatgattaaaaggtcatgaatacaatgaatattcaagataagtgtgccatttcttgtccaccaaaatattggaccatattctatagcctccattttggtcaaacacgtcaataagacacgggacttgggttgtatttaagcagtagtcatgtactcaaaagtatttgtagaaaagaaaaataaaaaacaaaaacaaaaggtgattagaaggtaaagaatggaggatgttattatagtgggagcaggaatagcggggttaggcgtagcggtggcactgaagagagtaggggttaaggcattggtgttggagagagctgatgagcttagaaccacaggcgcagccttgaccctctctcaaaacgcttggcgtgcccttgatgctctcggcatttctcaaaagttgacctctgtttacgcccccttagagaggtaatttacatatttataatattctacatattattatcatctctattacttaaagagcattgctaatttgcaacaccaagatggagtgtcactttataattaattaattatttttataatatttgttaaaataaatattaaagtatactaatcacgatattatacctaaagattcatatggccctcctataaatatttcatataaaactgaacaatgagtctattaagcgtaataatatgagaaatgctaaacggcatgtctagtatttttataaattgtaatattattagtataatttaattttgagttttatttattttagtttaataaatattataaagaatctttaattacttataagataacatgttatagagtgttaagtactttaatattccgtaacaatattataataatatatggtacgcttatatatccgactgttattaatcaaatttgtgtcacttatttggcattttataacaggatatacgtaaccaatgtgagtactggagcaattcaaatgatccctttaatgacgagcaataggtaagcaccgtcctatattatactactctgtttaataacgtgtactagatgtaaggcaatgacgacttacaacgaattttgtgttaaatagataaaaaattttgttgatttacactatgttctcaatctcatgatattgttttcttttttcaatgaatggaagtagacctataacactacacaggaaagccttgctcaaggctctcgcagaggaactcccaaccgattctattcgcttcaattgtaagatcactgctattgaaacccaagaacatgaaggctcatctatcgttgttgtccacttagaagatgaaactgtcatcaaagcaaaggtagtttcattaaagttacaaaaacataaaatcgtcatttgttgacctctctcatagtcatagctctgcaaatataggttctgataggctgtgatggggtgcactcaatggtggcaaggtgtttgggactcgctgaaccgacatattctggtcgatctgcggttcgtggattggctgtgtatcctcaaggccatggactaaagaaagaagttcaacagtttgttggtgatggaaaaagagctggttttgttcccattagtgataaagagatttattggtttttaacttatagtgtgtctccacaagaaggttcaactttttaaccaagaaatttgtcatttaacatgatcaatggaaacaagaaacttttatatatgtatatattaatttgctaatataaattgcagggacaaagctgagaggagaccctgaagcaatacagagagaagtactggagaattatgccaaggatttccctgaaccatatctagatgtggtaaagcatgtcgacctttcaacaatttcatgggcaccattagttttgaggaaaccatggagtgttgcatttggaaacttaagcaaacaaaacattacggtggctggggatgccatgcaccctacgacaccggacctagcacagggcggttgcttggcacttgaggatgctgtggtgttgggaaggcacgttggggcatatgtcgcacgaaatgaaggagctgtcccgagagacatagctaaagcactatctgattatgtagaggaaagaaggtggcgagccacttgggttatcgctggctctttcttatctgggtggattcaaaatggtggttctatgtgggggttgaagttcattagggacgccattttttacacattcattttcccaaagcttgttaatgttgcaaattatgattgtggaaaacttgcctagttttc

SEQ ID NO: 50529 - DNA, 841 bp, Cannabis sativa
tttttgtaattggattggattggattggttcggttcaattggattggattggatgatgcccacccctagtagacgtcgttgtctgtgcgaagaagcttggcctgagtcacctaacatagcaaatattcccttaccaaagccattatttttaccacaagtcattgtttcttttcctccaagtgatttggattttgacattatggctattaaagctcgtaaatctaaaatgccccaaaatccttctgttacattcgaggcagaattgaggtcagataaattgccccttatttaggggatgttttaatgtcttgcaaattaggaaccagaaaggatgtcatattttctcagtcacacctagcgaatttagttgttttcctccaaaacatgtttgaaaagatgagggttacagggtcaatgagtcttcaaatataggagcttagagttttgaacaaattagaacagggattgtactctcccttagagactattttgaagatttcaataactaccacggggttgcaccctttcaactcgcccccaactcctatagaatcctcggttgcttgaagttgttatatcacatcttaggatgagtgtgtccaacttctcttgagatattgtatttctactccatcaaagcctgttctacgaggaagtattgctcaggaggcttttactatttgagaactcatactaatgattgcaaaattatcgtcaagcttcctgttgatggagagaactcgtcaactaagttagcggttggaaaatgcaaggttaccaagaaatgtaataaagatacgataaagatgaagatgaaaagatgtctgaatatttctctcta

SEQ ID NO: 50530 - DNA, 640 bp, Cannabis sativa
gaggttttctaattgacaataagggttacaacgtttcagtaatttgagaagttgctgaagttgtaggaattcgtgaggcacttaattggattaaagatcatacatggcatgaatattagaatctaatgtctgactgtggtttaagctttgaggagttttattagtatataacctctacttttggtcacattattaatgattgtaaggattcatttgttgcttttagaaatgtctctatttttttattaaacgatcagttaatgtggtttcataattttacttgagcttctatatgttaatatattctggtgtggtcgtttcagtttgaaagatgttccaactaattttgctaccttacgtgagattgatggttaataaaaattttattttccattaaaaaaaataaaaataaaatcaggaccgaccgggccaatgactcttccatcaaaatattctctttaatactcttcttattattccgaacacattgatcccttgtattttttgttgtttgccataaaggtcttctgaaattgaaacaagataacacaagaaaaagaaaagcaaaaatgatggagatatatgcttattaattcaagcatagagagagagaactttggacttggagttggagatccat

SEQ ID NO: 50531 - DNA, 2637 bp, Cannabis sativa
tctaattcttttcaagtatccacaggttgcaaaaaaacattcatagcatagttaggaagagcttgtgcaactatcttcaatagaacctccttacttgctctcgagagtaaatgaccctcctaaccttggatccttttacgaagcttatcctttaaaaagcctaaggtggtcattttattcctacccatggtattcgataggcctaaataggtaccattctcatctgccttaaaaatacccagcaaatcacatatgttatctctcataacaacctcagtatttgaactgtagaaaactaaggacttggagaaattaattctctgactagaggctagttcaaacgtatgtaacaaattgagaatacattgcgcccttcctcaattgccttataataaatgtagctatcatccacaaacaacatttaggatactactggcgctccccaagcaactctacaacccctcagtaacccacgcgtctcataattacggataaggcttgagaagacttacagatatgaggataaggaatcaccttggcgaatacctctaaaaggggtaattggtcccatttctttaccaccatgaaccaatgtatatgaaaccgagcaaacacattgcattatcaaattgatccaacgcccatcaaagcctattctctccaatatagctctaagatatccccattcaagcctatcataggccttactcataacgagttaaagcgccatgaaactatctcgacctctagttttccttttaagataatgcataacctcataggccaccataatattatcaaaaataaggcaaccttgaagaaatacacattgagtatccgaaataacccaagaaagaacctccttcaatctattagccaacattttagaaattaccttataaagcacattacatcgggatataggatgcaaatcacccatatcaagcgaattcttctttttggaaatcaaaacaacattagtagcattcaacccaatcagtttggatgttggatggagtgtctaaaaattcaatacatccaacatccaatcgaacaaattaatattttctactgtgttgacaacattataattgtgaatagctatatgtttgggatttagcataatttatattttaaacatataatcatgaatataacatgtgaactaagcaatatacaaaagtaataaaataatttttgatcttttattgattagtaaataagattacatttaaattgatttttatttaggacataaaaccttaacattttgttgattaccctttcctcactccttattttttcccgcacttattaatgtaattgttatctcaatcatgaatctctttagctgtcttagctatttctagattcttttttccaataactcatgctccattggccaagatgactttttgttttccttcatgcatcataccagcaccctttcctcttcccaagctccaatcatcatgcaccttcgtcagttgccctaagttcaaccattcttctgccctttcctcattttgttccttagtgatgtttctattgttgtaatcaaaacatcacatcatcatattctccctactcaactagcttccatatggtgttgccttttctccattaagacccctaatcataattctttttcatggaaatcttttttgttatgccccattagccacatttgtaataagcataggacctattattattgctggttcatttaacccccataacgtctccagctagctctctaatccttctaacgttagacagactaaaaccaataatgaggaatcccaccattcgtatcctgcaagaaactctgtctggtttcacctcctcccgatttccactttcaggccatctttcaactagcataaatccccaataaagttctacatattctttttttacacatccacaaaatcctcctcactttcaaatgttattccaataaatgagctcatcgaatcatctttcaagcccttcactctccaaaggcttcttggtttttaattcctctaaagatgtttttgatgaattttcccgtacatcgtctctttgaaaaaactttgtcaacaatcgattgtcttccaaagctttttatgtcttcttcattcacaatccattcttcttcattctgttgcctaataatcactttatagtattcttcaaacttttcaatattttctgcctgttccatgcagtcataaggtttgttttaaagatcatgtcttccactacgtctttgttgatattaatcaccataataaacaaaattgagatcgaatattcagagtaactataggatccatgaaaaccatcattcccttacagaatctaatagaccaacttaattaaagctctatgtaggtccgcctataggtgtatattgggacaagtgattttgtttttcttataataattaaaaatatatttttttgaatatttttctttattattattatgtatatctaatcttagtttaggtatattataactttagctttcaaattattgtgtatgaagaatctttattgtaatgttttgagataggtgtaaatctcacattgtaccgcactatactgcatttggtggtgcaatttagtgtgttttgaggtctatgcattg

SEQ ID NO: 50532 - DNA, 1032 bp, Cannabis sativa
tgactgaaatcgtagtaagagaattgttaagaaaagaaatggtaagagaatggtaatgttcaatattaacatgttttatttattgcttttcaagattaacatgtaagtttgttacaagggtttttattttgggattttattattattattattattattatagaccaaaacaaatgtaaaagaattacataattaagatttaaaatattattttggtttaaaaaaaaaataaaaacattcctttgcttcaaagattcaaaatattttttaagtaatattaagataaaatacttcaaatataaaaatactgaacaattctctaaatgtaagtaatttcatatttttttgctaatttttttaatattattttaataaaagtactattatttttttttattattttaataaattaatttatatttaataaattcaaattataaaatattagtaaaatgatcaaatgctaagcaaagtaggaagcatggttagagcaacaataattaaaatgactatttattttaatgttttagctattttagctaaaatttagataaaaatagagtaaccttaaagatactctaatagtcacacaattttccttttataaggaactttcaatatatattaatctgattaaaaaaaaataaacatgtgtaataaatatacaaacttcatcaaatatcactcaaaaatatatcaattaaagttacaagggcaatagactccctgtaggcacaatcagctagtgaaacggaagctctaactaagtggtgagcaacacgattcacaaatcgttttgtccattttactaacagattttgcctataacattttactttcacagtttcaagctacccaaccaaaaccatatttattttgctcttaaaaaaatagcagcatcaacattgatcttaatcatatttccaatcagttttattcaatgctcatccccttcatttgatttcaaatgaaattgagaaggaacaaaagtcttgtcttgagtacacatccattgattaagattaccttttg

SEQ ID NO: 50533 - DNA, 900 bp, Cannabis sativa
aaggacaccattttattttactgaaaactggcttcacacgaatcaccataattaacaaactcacttctggtctgttaagtttatttaacaacaattcaaggacagtacctcatacaaatattttttatgatgctactctgccaaaactaaaccttggctataaggacgaagaattcccagttgctcgacttagagtcttccatacaatgacagcatacccctcagtgcagaggcttcatcctccaacttatcgaagcttgtggaactcggtatcctccaactccagttaccaaactgtgcaataaaaggttctagttaaaaatcctccctaaaagtgttgtagtggtaagagagaaaataaaaaataaaaaactacttctaacaataggtatggtggcccatccctcggagctttctcatgtacatggtaaaaaatttaaacagtaatttttctaaatttcaaaacaggataaggataatacaattacactatttggaatgagttaatgttagtaagggaatggtaatgttaaatattactttgtttgttcggaggtttaatcttgaaatgtcattcccttagtaatataaataccttgagaagggtaatgttgatacattaaaaaaaggtgggatttattattcccttccattatattaatttgaataacatttttgaattaataaataaatttaaatactaataatattatgatttattttaaacaaaatattacaatatatataaatttagtctctaagatcgatttttttataattgagttatttttatgttattagtagtaacatacatatacattatacataaattttatgagaatgtgtacataaatgacatagcgaacaaaaataaataacatagtgatatatagaaatatt

SEQ ID NO: 50534 - DNA, 1093 bp, Cannabis sativa
  modified_base (403)..(406): a, c, t, g, unknown or other
  modified_base (803)..(807): a, c, t, g, unknown or other
ttggagaagaagaaagaaccaccaccgggcacaagaaatggggtggacacccaccgatattctaccggacgaaagaatcggacgaagccgaacacaaatatagttaacaatcgtaaggaataagaaaaataaggggaagaaggcgttttttaaaaaaaaaaacaaattattatatttaaagttgataatattattatatttttacttgtagtggtcattatcattcttaatatatttgttatacataaaacaaattaatcaaacattaatgaattaaatacttacttctatacagacgttattatggaaaaaagaatagacctaacaaaaagataatcgataatgatttcataattgttatcattaaacataataagtgaatctattattattattattattnnnnttattattatttaaaaaaaaaacacttgttatcattaaacataataagtgaatctcttattattattattattattattatttaaaaaaaaaacactcacactattaaatattagaataatcattttgggattgtgagtatcgactttcaatattgaaacattagaataatgtagaatatacaaattaaattataaaataattaattcatgatacatagtacatatatataatattttatgtaatacacatatctttatatattaaaagtgtctatttaacagcatttcttggtttcttggtttaacagaatatactttaaaaataaaagaatattctgttaaatttaacgatgttaataggtttgatccccgttaacaaataaacccaataattannnnnaaaaaattaaacaattttttttaaaattcgatgactttttttttaatattttctattcaaaaatatattctctgtgatctacttcagaagaaaagaaaaaaaaaatatttataaccacttatatcgtataatgtggaaatagttattttatcgtatcaaagaaccatttaagaaaaaaaatcatggaaaaacgattgaaggaaccacctggcacctgctcctttcgatttgggtggaattgggtttgtgttgatttgattgattcatgggcttctatcgattttgg

SEQ ID NO: 50535 - DNA, 3017 bp, Cannabis sativa
tggtttgatatgtacattggctgtgaagactcgttcgactcatggtttagtaagtgttaattgttaggttatttgttaattacttgtttatttgaaatatactagttattacaatgacatggtgttggctgatgtgtatgtgtgagcatggaaatacttattagtattggttatggtttgaaatatattaaacaatgtaagttatggttgcaagtgtatagatcatccacccaagacgatctggtagggggtaatcacgagcttgcaggactcggggttagtggtgaggatgtgaatcctccaccaccaccaaattgagaagagttatatgccatgatgcaggagaccatccgacaacaaggcgattggattcaagaattgagggagcagcgagctcagcctattccaaatcccattcttgatccttcagcacctcctgtagtgccacaggatgcgtgaaatcatctagaaccattgtaagagtagttcaggaagcagaatttgctagtatttgagggtggtgctgatcactcaaggcggagcaatggatgagcatgataacatccatctttgaattcatgtgggttgagagtaatgatcaggtcagatgcgtcatatacatgttgcatgaggatgcccgcatctggtgagaaatagtgtcacagggtcatgatttgaataacataacttgggttgctttccgaacattgttctatgaaaaatattataatgaatctatctgagcagcaaaagcaaaagaatttatacggttgacctagggccacatgatggtgacagagtatgccaccgaatttgatcagctagcaaagtttgcctctgatgaggtggccactaaggtggctagaaaagctaaatttattcggggattggaagaacacatcgctcgaaatgtgcttgttgctgctaaaaaacttagtttgttcgaacctatgcttaggtggttgagttggcccttgctgctgagatttggaaaagaaatagtgcaagaagatattcatggaagcaaaggcctggtgctggttctggtaagggtactaaccctagtgaccgtaagaaaaggcccaatgatccatcggctacaggatcgaataagagattccaaagtaaccagggtttccgatggggtggaaataaaaattggcaaacttatccagagtgtctgaggtgcaagagatgccatcagggcaaatgtcaagctagagcctgcttccagtgtggggtaatgggccatctgaaaagaaactgcccacagctactgcaattgaaatagaagaaagatgacactcttgttcctactcgggtttttgccctgacccaggcagaggctgatgctgacccttccactgtgacaggtcagctctctattactgatactttattgagcattttaattgagtctggtgcaaaacatttctttatttcaagtagaatgatcgaaaaatttgcatagacttagtgatattttaccgagtggttttggtaccttgctgcctactggagagctagttatttttagtaggtggattaggtcccttctagtgttcgtggaaggaagagaattgtcagttgatttgattgaattgaatctgattttgatgttatattggggatggattgacttgcaaagtataatgcaaccatcgattgtaagagtaagatggtaacttttgaaccagaggaggacccattcttgtgggcaaggttcaaggatcccgaatagcattaatctcggcacttaaggcaagagatttgttatgggattgatgtatcgctttcctagccaatgtagtggatactaagggaaataccaactggaacagaatatgttccagtgattttagaatttttagatgtctttccagaagagttaccagggttaccaccgaagcgagaaattgattttgaaattgatctgataccggggtagagccagtgtctaaagcttcgtatcgaatggcacctacagaactgaaagagatgaaagttcaattataggggatgttggatttaaaatttactagatcgagtacctcaccttggggtgtctcgattttgttcgtgaagaagaaggacgaaaccttacgaatgtgtattgattactaagaattaaacaagttgacagtatagaacaagtatcctttgtcaaggatagatgacctgtttgatcaattgcaaggaaagaccgtcttctctaagatcgatctttgatctggttatcactagttgaggattcaggaggaggatattcctaagacagcctttcgtactcggtatggacactgtgaatttctggtgatgtcctttagactaaaaaatgctctggcggccttcatggacctaatgaatcgcgtattcaaggactttttagatgactttgtaattgtcttcattgatgacattctaattttctccgattcaaaagagacacatgagaaacatcttctgatggtgttgcaacgtctctgagagcataagttgtatgctaaattcaaaaaatgcaagttctggctgccccaagtaagcttcttagggcatgtggtgaataaaggcagtatcttagtggatccgatgaagattgaagcggttcaagatttgtcttgacctaagtttgcaaccgaggttagaagtttcctggaattagctagatactacaaaagatttgttgaaggatttgcaaaaatttctaagcccttaacggaattaactcgaaaaaactataagtttgtttggactgacaagtgcgagagtagcttccaggaattgaagcaaaggttaattaccacaccaatgttaactttgtcggtcaatgatgaaaaattcgttttactgtgatgcttcgaaataggggttaagttgtgttctaatgcagtccgggaaagtcattgcctatgcgtctaggcaattgaaggaatatgaacagcggtatcctactcacgatattgaactggcagcattcgttttcccactgaaagttacctgtatggcaaatattgtga

SEQ ID NO: 50536 - DNA, 1552 bp, Cannabis sativa
ggaagcaacggtttcatttgatttgatatggtaagagaagaagatggatagaacatggtccatcgttgtgggtcccatctctggcgtggtttcaactattggtggaccccacaaaacacacaagtgggccccaccacccaccatcaccacctctccttccaacttacttaatcacctcatcccctcttctattcattataataatttagactactattattttcaaggttaataccattttagctatttatttaattcaaaataaattaaattttatatttttttaaaataatataaataaaactctaattaatttaaattcaaattttaaattttttaatacgaatagatataatatctttagatctaattattataaagttttattttgacaaaaatttatttaaagtactattttaaaaaataaaaaatttaatttgtaatatgtaaaaaagagaattattctatatattttatttaaaaaaaatttacagtttggattattccaataatttttatgtagattgttatgtaaattttgattccgatttaagttgtcctattaattattacgtgaattattatataaatttttataaaaattcaaaataaaaattatttaaaagtataaaaattaaaaacccttataaaaactatagatacaaaataatatttataataataatttccaataatataatatgtcaagtagactactattctttataatactataggttaaatctctctatatacatatgtatgtaatctatgataatctaataatgtaatctcagcccaccaacaccaacctcgtgctcccaaaaacaaactctttaaccaaaaaagtaaaataaaaacaaagaaaaacagagattttgtctaaacactctaaaccatagcataaattaatatcaaaatataaaataaaaaagaaggataagaagaaaaatgagtttagtaggtgtttttggattgttctcatgagaagatgtgtggggcccacccaacccaacactctttatttattttatttttttttaaaaaaaaattgaatcatttcaaattattttttattttgttttgttgctgtagttgtttgttgaaggttctgatgatgtggaccttataatgatggttgggacatgcaagggaacatttttgacagtcacacagtcattctcattctcaattttctttttattattattattattattatttttatattggtaaatagcggtataagttactaaacttttaagtttataagcgatataaatttaatagttctttttaatggtataagtaactaatattacatatttttatctaaacttaatgatctaaaatctgggtcttatatatgtattgtttaagaaaataataaagcttgtactgataaaattaaaaaaaaaaattataattttacaaatattagataattatattgttaaaaataaacattaacactttagttctatttaaccttcttatatatatttataaatataataaatacacataacagtaatattgtttctatgcacaa

SEQ ID NO: 50537 - DNA, 1288 bp, Cannabis sativa
gtatggtaattgcagtgtttgaaatggcttttgggtgagtggtagtggtgagaaagagtttaggtttgaagacacctgctttggaacgagtgaccatggtgtgggtagatcggggagggaggggtttggtgggaagtggaggtaatgttgtaggagaggaggtttgggactggtgtggtgaatgagatgggcgattaggtaatagtgaaaaagaaagaggcaggtgtacttcaagggatattgtggagtaagaagtaacagtgtctggagagttactttgactgctggaagatgcagatttggcaggtgagattgaaggagatacttcaggattaacagttggacaatgatcaatatcagcttcagtatgtattggttcatcatgttcctgagacacaaatggtaaccattgagtgtattgaatttgagtgggacaggtgttgatgtcagcacttttgaagtgagcaacactaaagccagaggaaaaaggaaagtctctttcgttgaaagtgacactttgagcaatatagactcgacccgagggatgcaagcatttgtatcctttgtgatttgggctgtaacccatgaaaacacattttgtggatttgaaatccaacttgtgttgattataggctctaagatgtgggaaacaagcacaaccaaagactttaagaaagttgagattgggcttgacattaaaaagcacttcagtaggtgatttgtgattgagagtaggtgttgagagatggtttatcaagaaagctgctgtgctgaatgattcccaccaatagtgaaggggaatagaggcttgtatcaacaaagtgagccccatttcgactatgtgtcgatgtttcctctcagattttccattttgaggatgtgtgtgcggacatgggtgtctgaaggggatacctaaagcatttagaaatggtgctaagctcctatactcaccaccccaatccgagtgaagagtttttatttttgtctcaaattttcgttcagcaaatttttgaaagctgagaaaggtttctttgacatcagattttagctttagagggtagatccaagtatagttgctgaattcatcaacaaaatgcgcataatacctatatccatctttggataaaattggtgaagggccccatacatccgaatggatgatttcaaggggtttcttggctgtcttttgagatggtttataatgtttatgcttggattttccaatgtgacaggcatcacagaagttgagagagtttttaaaaggaagcttctcattaactaaaaggtg

SEQ ID NO: 50538 - DNA, 1245 bp, Cannabis sativa
atatatatttacacatttctttcttaattaatttttcaaatctttaatttctcttgtgataaattattacaatacctaaaaaggatctagagataacattattgtcgctagtaattctcaatttttcattgttagacatctagcaatttacacttaaatttataattatgagatataaaacgtaatagatgatgtgagtgtaaccattcaaaacacataactttttcatttttctcacaagcagatacatataactcacacacacaaacgcatattgctaatgatttttttgggatatgcactgagggaacaaattaaacccttgaaaagtatatattatataatgtcatttcaaaaaaaaaaaaaaaagaatagaatcatattaaggtattaaaactagaagtagagaagaatcatataggttgggatcgtatggtatgtgtggtccctaattaagtgtcgttataagttatttataacagtaggaccattggagctgcaagtatgcgcctaaaaatgccagtgcaactcggattttattacaagtttttggggccccatgcagcgtcgtcgttttgttccaacgtcctctgttagattacaagtctactgctgcttaatgctcatatatatacaactcgccattgtaccatcacatgatgcgcttcctattaataataataatcttatcatgggtccactcaccacactcaccactcaccaatattctatcacaatgtctatatgcttttcaaattttatattttgcctcattttttttccttcttttaattcttagatctacatagttatgtttatatatatataagttacattgggatactcacattacatcaatgaccacccacccatcaattgaaattcaataaagtcccccaattaaaactagagggtgtatggtaaaaaggggaaaaaacttgttgacataaacaaactcgttatatgtacataatagtattgctgattaatttgcactacatttcctattctataattgcctataccttgaattgattgctttccagctcaattcatcaaacaattaacgaattataccactctgaagtcagaaaccatttataggttctaatgaggggactcatcattagtgattataatttcaacttaatttgtaccgtaaatgttttccattaacagaaaccacatatataaactatatattttgcaactttcgattagtgtgggattttaaatttcttggca

SEQ ID NO: 50539 - DNA, 820 bp, Cannabis sativa
  modified_base (373)..(373): a, c, t, g, unknown or other
  modified_base (490)..(523): a, c, t, g, unknown or other
actctactccgttaaggctgttccagtaaggaagaatgccacaataggcttttattatcttggtactcactctggcgagccttaaattattgtgggcttgccaaacaaaatacctttcaaagataacttcttttggacaactggcctcttcccaatcggcacaaccaccttctgcaaaattcgtagtgattatttttatcaggtttggttagattaatccatgtattttcattataatttttctaactgaggttttgttttttacagccctctcaaaaagacttgtccttactcccgagatggccaaccagtgcaggttcttgttgactcttcctcacggccttaggtcgtgcgacttccttctaagcgaggncaatctgagatctgtggacctccttactgacaaggagtttacttgtgattacaaatttttcaagtattcttcttggcagcaggttcccgttctagagggggataaggcttgggatcnnnnnnnnnnnnnnnnnnnnnnnnnnnnnnnnnnccctcgagaagccggtgaaggagcatcccgatgtaatcaatgtggttggtcacccacaatacttaaggctgagcgtaacacactagttacattccgagatagctgccttaatttttacatttggcattccctcctcgtagaccgtattgctcataggtttgacagttggtaccctagattccatgtccagattaattgtaatgagtcgtattatggcatagccgagcaatatggcaccatgatagatagggcaagtcatttaggcacgagctaggatttaggaccaatcgagccctt

SEQ ID NO: 50540 - DNA, 1364 bp, Cannabis sativa
gagagagagagagagagagagagagagagagagagatttgatttttttttaaagtttttttaggttttgaaaaaacaaataaatggtatgagtttttttttgggtaaaatgagaaattattaagataatattgtataaaaaattaatgaggtattttttgtaatggggatttttgttaagtataataaataaaattttccttattaaatactcaagatatttgtctatgtttaagaaattattgtgtgaatgttctttatactattagcaaaatctatatctatatataaaggtatgaaacggtgacgtgttacttaaaaattattttaaatacatttatttacttttcttaatttgcttatttttaaatttttttattggaatttttaatattaattaattatgaaaaagtgaaagtatctccatcaaaagttaatacgtattttctcatttattttttatttttttttttattttactaatatctccacttaatttttttttacaaaaaatctaaattttaaattactttaagtgaaaatacatataaccatcattcatttgttttcattatggctccctttatagttcgagttttttattattattattattattttgaagagacccttaatatttgtttggaaaatggtaacatgtgagggaagaggggcattattgagtgaagatgcatcttatttggggcattggtgtggatttacaccaaagcttttgctcttatgggtatgattcatgtatttttattttttaatttttctttagtaattgtgagcaaagagacatcatggtgcaatagtgtggctctacaataaagctttctttcaggattgccatacttgcaactcataccttaattgaaccaaaatcatatactgaagcctcaaagtatgctgcttggttaaaagccatggatgatgaaacagaggctttagaaagaaatcatacctggattgtcacaacactaccacccaaccaacatgttattgggaataaataggtatataagataaaatacaatccagatggttcagttaataggctcaaagctcgactagttgttaaaggatatacacaaaaactaggtatagacttctttgacacttatgctcctgtagctaagttcaacacactaaaattactctttgcccttgttgccataaaaaattggcaccttcatcacatggacatagacaatgcatttctccatggtgacttaaatgaggatgtttatatgaaactacctcaaggttacactcccaaaggagtgataccacacaatgctgtttgtaaattgaacaaaagcttgtatgatttaaaataagcatctagacagtggtatgcta

SEQ ID NO: 50541 - DNA, 2336 bp, Cannabis sativa
aaacaagtaatgaaattaaatctgtttctttattgatatttgaatagggaagattacaatgaaatagagttttatttagggcacaaagcccaacataaacaccgactgctcattctttatttcattgacatatcttttttgggcattactactttctccatgagatgcagccctcccaagatatccaatatatcctctccctcgacaggaggaggttgtaatctttggttatctgggtgattgggtagatttggttggtttggctcattaccttgacgcctcacatattgtcgaaaataaccacgccagataaggctctctatctcgtctttcagttgtcgacattcttctattgtatgctctatgtttttatgaaatcaacaaaattttgcggaatcttgtttatgtctcgcatgtctcattggtttgggcttacaaaatgcaaccctgtgctaatttgcgagaaagatgttttcacaagtttcattcaacttggtgtacacgatatagattggcacatatttttcatgctttttctatttcttcttatttttagatgattctcttgagtcatcttttcgtttggtctttgaaccacttggattatcagcctttgtggagatggtacttgatgtggcagtacttgtgctgggtttgtttcctaagctagtcttcagcaacttcatctcattcctcgcttcctctttgcacgcgaacacttgtgctctttcgttgaattcattaatatttcttactggacgacccgtaggtcatcccacagctcgcccccagctgttgaaaggtcagttgtgatccctacttgaagagtagtaagttgtatactgtcattcaagtttctaccttttgcagcagcactactaaagcgactcaagtaagccttaagtgatttgcctggttgctgctttacgttagttagggatgatgcttcaggtcgcctatctctagtagcctaaaattgttggacaatttttcccaaaaagttatcgaatggtgagtgaatttatcgagccaactactcgctgccccagtcaatgaagttgggaataaaataaatcaattattcaagacattattggctcgcattatggtattctagttattcaggtgagcgactgggtccgtagtcccatcatactgcgagatgtgtgggtttttgaatccctaaagaaattgagaattcataatatcaagatgaaatggcttggtttcctcatccaagtaatagccaggtaatttcttgtattccccatcctgttattttctaaacttatcctctaactcaatgatttgcaattggatgggatccacttgctgttgatttgcattaagttgatggtgtaagtcaggtgaattttgatttaatcgcttgcatagatcgggttgtcttcgattcaagtgttcacgaagatcgggttgtcttcgctcatagttgctcacagatgtagtatctaagtaactctcagattgataacttcgtgtgttgctcatgctttcttgatcagcataacggcgagacctatttcctttttgcgtttgtctgcctgatcgactgtcctcgagatctagagtatcttgaactagaacttgcctcatcttgcaccggccttctccttcagaagaggtttgatacacatcctctatttagatacgtgtatactcatttcctctcaaatggagaaggacgttgggggtgtctcggtggtaacccacttgtcgtaggttgagtctcaggatttctttcgttattatgagggatttcctgttccctaaatcggggttgccttatgtcctcattcctgtgagaagactctggtacatcattacgttcattccccttattcataaatccttggggtctttgacgaacttctcgacgtggttctttgttattttggcgttcatccactggaaaatccatagtatccccaggtttcacctcctaggtgttctagggatttccttgatttgcttcctgcctcttggttcttgaaccccgaggtctgcctcgtggccttcttacccaaggatcaagttacttttgtgtattatttccttgagtcgcccttgccattgcagcctctgtttccaacttagcattttgctggttagattttaccaagtgtttgcggagttgtcaattttccaattcaactaagggtacatacctagttggatcataaatatcctcacttctaggtacatatcctgtagaagcattgctttcttcgtgtcttccttctgagttttgattatcaccaccatagtttcttcttgaacgtgttgttccagaagtatggtgtaaagaccgcttagtt

SEQ ID NO: 50542 - DNA, 1850 bp, Cannabis sativa
atatatatatatataatacttgatgcactctcaagttttattttctttagtaatcaattaattagaaaattgagctacatttggattagatttagatatcatgatgaaccaatatttttcttatcttagtggaaaagataggaaaataattcatcaacatcgattcttaattattttattaataatttctagtgcctatccacaaaatcttattatataatattgtaatactttaatagtcattttgtgttttcatatatctctaatgatttgtcggattattactattttaatccatttatatcttaacaacttctaaaaaaaaaattgttggtttttctttactttttttgatagcttgccataacaagttttctacgattgaagagattgttagtagtacagttacgtaccttgtacaataattgaatgctcaagctacgaagttgaatgaatctgttacaacgttttattactgttgtatcttttgagcggtatagatgaaaccgaatataagtgtttttaaagttaactatgatgctgcactctttttcatctgattttagttttagttttttgtcaaacgatataggaattggacagttgattatttgactcgtttttctaattctaattatggtcgtgtctccaataaaagagatgtacccattaaaaattgcaagctattattttaattttgctatcaataaaatttattaaaaagatctacaaaaatatattttttttggtcaaaaagtctacaaaaatatttatttattttatttgataaagatactatggtataaggtatataaattcagaatctgtaaagaagaggataggggtttagactctttctcttttatatatattcttcctcaaaatagggtcacacataaatagattagttgtttcttttttctttttatatcctcaaatcctttatctacaacaattttttttttttttttcatttctttcttttgttaaaaaaaattaataaagtggagaatatgctttagagatcaaggagaatacctaattattaggaactagaaaataatgctaaaacatagaaccaaaaaatcccaactgagttggaaaaaacttctttataagaattggattcatcaacttggttagtggtaaccaacatgataactagtttgtttgtttgcatacaatttgggttactttttaaagatgtcaaattcttatttgtattaattaaaagaatcttaataattcagaaatttcctaaaattataaattttaaaagaatattaagttaataatatgtccatattatttattttgaaactaacttataatattttgtatttggtaaatcaattcaaaatacaccttttcactaatattagtaatttttctttttaaaaacaaaattgtaaacatgttttgcacttcaaattaaataattgagtttccaaatgttctttcattttcttaaaagaaaaaactttaaaggtgtgttgagaggtctcaattatactatgcaattctcaaggcttcatgaaaattgagtataattatattacgtaattactaattttttttttttttatataaagggtcaaattttattaaatcaaattaaatgacaaaacatttttaatatcaaaagaaatatcattcccttgaaattaaatataagatgaaaatctatgagcaactctaatagtaaatcgtttaacaataaataaagccacataaagcaaagtttgtaacaacatcttacaatcccaatcaaccaacatttaacaaagttggaccaacccatgttaattttttttaaatattttaataatatataataaaagtaaataaat

SEQ ID NO: 50543 - DNA, 1449 bp, Cannabis sativa
ccggttgcaaaatctttcggaatggcctatgatcccacagataaaacaaaaagttggtaccctttcatatttgaaatgaacccaaaaccagttaccattttctttagtcaatttcatacgccgtctcaacagtttcgctatatcaatcgtcactctagtgcggagataatctctccaaactccaatgaaatttttcggatccgactctaagaacttacccataatattaccaacaccccagactgtaccttctgtcatacatcctggttcaacatcgtgaatccaaacccaaatatcaaggctgtttaacggaacaacatacggatcaccacccattggcaatcgttgaataatcaattgcattctctcataagtccacaggctgccattgataaaacgttgaaatatctacttcatgatagaattgaaaaagaaaacgattattctcaagctttttgacaaacattcccattcccggctgccatagtgaagccaatatattttgcatcttgtcaaaatcaatgatcctattagataggaatcgccccactaagcaccacctatcatcaatcccctcttctaccccgtcccctcctacaatcattccttcaaaatcttcctcctccacctgaaagttgtacacattctctctaaccccagacatagcaccacttgaagacgccatcacaagacaagaaaatacccaaacaagactagattatcaaacccatgtcaaaggacaggactattttatagataaattactattttcttaagtaaacgtgtatacataatttttttattaatgtaaagctcgccctagatacaagtggactagactagtgtttaaaaccccatttttaaggttctcatttaaaattagaataaataaaatattttttttttatttgaactatgactattgtagatttttacccattaattttttttttgttgcaaaaattttatgaactatacaaatcattgtgaatatcctcctttaattatattatgttcatgttttaaaattaatgaatgcataatataaatacattgtatattattatatataaagaaaattagattttaagtttcaacgtgccaaatataaaaatgttcaatcaatactaataaaattccattaaaaaaatacagataatttttttctttttttctaaaagtaaaaatccactagcattgtatagactaattacataataataaaataaaattagtaaatatataattaaggtgaccattcaatgattacatttatattgtaactatatagttaaatttttttttacctgtaataacagcttatgaataggtaaaagttttattttttaaaattaattaattatttttaagtaattaaataaatatttaacaagactttttttaataattaaaatttataaataattttttttatgtatatataaattc

SEQ ID NO: 50544 - DNA, 1383 bp, Cannabis sativa
attacagttttacaaatattgagtacttatgccactaaaaaaaatcattgagtttatgccgcttacaaactcaaaactttaggtacttatgtgcctatttaccctaaattttacatcctaatttattaaaaattgtgtggcacatatagcaaaattcgtatcaaatctaacccgatataccatttgcatcatcatcacaatttttattactctaattacatatttttattcttttacatataaaaatggaaaatccacatatcttaaaattagtaaatagtatatgtggtatgactaattgtgaaaactagaaagaattgacaatgtcagtagccatgaaagtttggttataaagtttcttaatttatatattatattattccttaaataaataaaattaattgacaaagaattttgtatttttctcaaaaagaaaaatggaaatcgacagttggtattttgcataatagaaattgaaattattgtcggtagctcataaaaattcaaaggagttgaattttttttttttaattttattttaaaaaaatgaaaattcaaaggggttattaaaaaattaaaataaattaagaatattcattaattcacagtctcgtgaatcccactttggtaaattacaattattattattattattattttaatatatagttttgttgcgaagctgttaagaaatgttgtgaaataaataattataaaaataaataaataaataaagaataaaatcaagttccaagataagaaattaataaagatttttgaagagtgattttattgaattacacgtgtgtttggttccatggaaacttcctttatagatctatatagctataacatccaaacaatacataattcaagaatcattgggacccttcataattttcttatatacatttattatttaatttccttttttctacaaacactcaaatcatttatttagaaaaaaaaaaaaaaaacagaaatgtttttttatgtctctcaattctacatagaacacacacatcccaaaacataacaataataattaatagaaaagattataattttgtgaaggaaaagaaaaaattactctacatagagtaggactcattcaaatataattaaaatcattgagggttcaactctaaaatttaattattatcaatcaaactagtaataattattaattatccgtttgaaaatctcaaattgttaatttgtagaaataagatttataagctatttttcttattattaattaattttgaagtgaaatcttatacatcttacaattctaacatggtatgaaagtgtgacagtcagtagtcctgtgatccataaggagaaatactgggtaaattgtacaatcccacatcacctggg

SEQ ID NO: 50545 - DNA, 1779 bp, Cannabis sativa
atctctacccaatttttatgagaaaatatttggctaattgtcattgataggtgcgatctgtcacatgttcatttatggtgaaaattttatactctttacatcattttgaatctccacagctagtgacttttggataatttagttggagatgatgtaaggtttattgtcctagttattgcaaatgtcacgcgtgcaataaattttttaaaccttattttctacttattaatttttttaaatttctcaaaattttaccaaatattttaaataattacaaaacatatacgactataaaaacaatattagactaatttttttaaataccaaaataaataaaagtgtatcgatacatcaatttgtatattgtagaattttcttactatcatatcaaaccaataattctattaaggataaatccaatatgctttcttatcatgataattgtgccacacaacagttatacctttgtcatctttctaaattaaggaaaatttggaggaaaattttttaaaaagttcactttgatacagattagtcctcaatctcaaaaaatagcaataatagtccctaatgtcacattttttaaaagtctattagtccttttcttaacgggttcataaatcaaaactgcatgatatgttattggttcaaatcataatttttatttttttaaaaataaatagatatattatttaaaaaatcatattaattagttttttcttttcttttttctttgttcttcttcgtcttcgttggggtgtggctggagatgaagaagacgaagatggtgagatctcagatgactagagatgggtgacgtttcttaagctgcaacgaaggaggcttcgttgtcggcggagagggtgcattgtgtaggagatcgacgaacctcaaaggagaggtaactgggacgaagctcacgtttttccctttttctcttctcttttatttttctttttctttttttttttcagtaataatatttagtttttcttaaagaaaaaataataataatttatttagtttttatgatttttaaataatttatttatttatttttaatttttttaaaaatttaaaattataatttggaccaatagcatgttaatacatggccattttgatttagtaaacggatccattaagaaaagggctaacggacttacaaaaatagtgaccttaataagaactattactgttatttttcgagatttaagattaatttgcattaaagtgaactttttgagattttttatcgcaaacttctcctaaattaataaaagttcactcatttcgaagaggccacatgtgtattcaatcatttacaataatttaatttctacaaatttatattttattgtatatcctagaaaatttgaggaatgaagataacatacattaacaacaacatgcagaaataaagttgaagaattattatatatatctatatgtatatttgtaaagtaagaaataattgaaagaactacagttaaatttttagttttggaatcatgttgaagatattattaagtaatagaggagatcgagttaaagttagtgcactgcaattattattaagattttctttaaaggagaataaaacaaaatattaggtaataaaagaataaacaaaatcacattatattttgtcattatgctttctatagattcttataaagtgtgatcaagtgtagtcaaataattgaattatctacatttcaaaactcaaaaaaaaaaaaaaaaggattcggacccgaaatttttggtgattttaaagtc

SEQ ID NO: 50546 - DNA, 2179 bp, Cannabis sativa
gtaatggagctaatcactctgaaattgactaagactgggcgtcgtaggatagcattgtaggtaatgggggaatccactagtacaaacatacaatgcataaatgtagaagcattattacttccaaccacacccccattaaatgtaacttggagttggaatttccccattggcagtacggaatctccattgaagcttggaaggtagttcgggcatggtgtaagatcaactttagtttattttaattctcggaaggaaaacttgaacagtatgatgattgagcttacatggtccactagcactcttgacactccattgttggcaatttgtgcttcaatcaccagcagatcgttgtacaaaaagagtacattctcaacgtcctctttcatgaaggtgatgggaaaattcatcattcttgcaagctgggctagggattgcactagggcacatagttccccttcatgatccaacacgtttaaatatcttttctgaaaattgcaaatacttctgacgattttcttccctctagggatagtcaccacataactgtccatggaggcagagcaaaccttggacaatatgggttctcgggtttaggagcaaggactaccattgtagcctatgcgttgggtacctcataaggggcttgaatggttagggcttgcatcatcagagcttgtaggggtggaggttgttttccaagagcttaaaggagactttactgctgcgaaagatttatgtatccctgatgttcaaagattacgagttggatgtgagttataccttgtacaagatatattacggggatccaaacccaatgactaatatggtcagaatgggccaatgtttctatctcgtcttttaaataatcacactcattggtagtgtggcaaacataatcacggtacccgtacctcttactttggtatcatattttcttccatcctttaaagatctaaggtggccttttgtagtggaccatattgtaagtatccttatagtgattttctctagtgtcgattaagctggtgtactaagtgtattttgggtcatactacattcttgctttctttggagcctcgctctgatactagcttttccactactcttgctccgcaaatagcttacatttgattaaagaaaataaaattttgactatctgacagtgccactacatccaatttgtattgccccgtagttaaaaaaattagtctaggtaagtgcatactcggggacagcagattcgtagactgtaggagttgtgtgctggctactggttttctaaagctgagaattgtagtataaaattcgtgttactgggtggagttggtgctagagcatcttcgaaagcttgagcattagtgacttctaaattaacaattccttgggccttggacgtgaattcagatagagtttcgaccctttttccttacatttcgctctagaggaaagatcgaactgctaatccagatcgaagggccacaagctttatctcgtcatggacttggtctttaccgcctctccatcattctttggatgaaagattttaggctcccatgcctattttttgatattggtttgggatccaacctccatgttaaagtccttgggggtaatgaattgttctctaaatgtggattgtaggttctgccaatcgtgaactaatcctggaggaagcctcttccactagtcttccatggacatggttaatgtcaacagaaaataaaggcacttagtatcatcgctagcttttcccatttgcattagcaggttatatttggaaaatgggcatgtgtgttcgtacttccttcatataactccatttgtggcattttgaaatttttttggtagtggagcctctatgatccatcagacacatggttctagatcttcctccatcagagatggactcactttatttccttacaagcttggccagggcagctctttgctcttcagagcacttgctatcattgtccaaaagctaacacccacctatcctgtcattgacatggttctggagattgtctccatgaggccttgccctttcacctttggctttttcttatttcgtgtctaggctcctacagaggtctatagtggacaaactatcttcaagagaaattatctctgcctcccaaccttggtttacagaattgcaagggtggcttttggctggcct

SEQ ID NO: 50547 - DNA, 1432 bp, Cannabis sativa
gcattgtttattcggatcccccgtgccactcgtggcttctatcttgtgtgtatgaccctccatacttccatgccaagaagaatttttgggctgagttcatgaaggttggagatagatttggcagcccttggttaattttgggtgatactaactttgtgctccgcgagtcggaacatgaaggtgccattgacagggaccagtttattcctttcatttttgatctggtcgagtcctggggcgtcattaacatgaatattcagggcgatatgttgacgtgggacaatcataggtctagcaagaaccatgttaagtttgcgcttgataaatgattagttaacgaagcttggctcaacttattcctgaaagttattatttgctcttatcagacgagcaactctgatcatagacctttgtgtctcttttctggtgggttggaagccaagtttaaaagatgtttcaagttcgaagaatgcgggatgagcgtagtaatctagtggtggcccatgcttggaattccattgctcacccttgggcccctgcttgctttttcaaaaagattggagccactcgggttgctcttcttcactagcatagatctcagttcggtaaactggacgctggtattaaagagttggaaaaaagacttaatttgatgcagagtttacctgcgggttctcgcgactggaagactgaaagtaacatccgaagatcccttaacgagtccttagaaaggaaagctttgtactggaggcaaagggctaggatttcttagattaaagatggggataggtgttccaaattcttcttccttacggctgctattagaggaaggagaaatactattgagagtattttaaacaaagataacatttggatcacttcccgtgacttaattggccaagaattcatggatttcttcaaagggatcttctctgggtctatcggtgatcagaggatttactgtaatcatctttttcatgagaaaatatcttgtgcagatcacgaggtgctccttgcggcccctactcatgaggaaatccgaagtactctattcgcaccataaagcccatgggcctgatggaatgtctgtattatttttcaaacactattaggagtcggtgggtgatgacttcagtgatgctatttccgacttctttaggtctggcaaaatgcacataggtattaattctacgaatatagttcttatccctaaagtccagaacccaaaaagaacaaaccactttcggcctatttctctttgcaatgtgatgtataaggttatttccaagattattgcaaatagaattaagccaattttacctaatcttatttgccccactcaaactgcttttgtgcctggtcgaaatatacaagataataatgtgattattcatgagattatccactcgttcaaccgaaagagaggcaaaga

SEQ ID NO: 50548 - DNA, 2720 bp, Cannabis sativa
  modified_base (1277)..(1277): a, c, t, g, unknown or other
  modified_base (2667)..(2667): a, c, t, g, unknown or other
tttgttttcaggccttgatgaagccaagctcagctctttgttaaatgccaaaatattacatattttacagtgtaaaaatacaaaataaaattaattctttataatattttcatgaaattaatgcaatatattattatgttgaaatattttatttagatttaattttatctttgtttataaataatattagtatttatggcataataggaaaacaaaagaaatataaattttaagaaatgcattatttttatttaaagaaatacaaattaattaaattttaaataaatattctcattaaaattattgtgatagattttatgttgaaaatattttttttggatttaattttatttgtgtttgaagaaaaaaaaatagcatttatagaaaggtgaagaaagaaataaaatggtaaaaatatggccaaaagaagaaaaaatgatatttttgaaatccagtaacagcacaaaggacaaaagcccaaaaaagggcccaattttctctcagccgacagcctcgccacgtggcgggttgtcatttgctccgtaggcccacgacaggcgcaccagggggactgtccccctcttcttcctcacgcgcgtgtgacgcgcacgaccccttttgggcctctcgtctgcctcacgcgccagaggcgcgactggtccttcgtgaccgcttcccttcagcagcccaaatactttatttttttagctaaccaagcaatgacacgtggcaccactcactcaaagcatccaatcagcgggtgccacgtgtcactccgaattaacttttatgtatttacaattttactcaaatgcaagataagtttaattgcgcattagttcttttacccttctataaataaaatcttaggattttagaattcagttacaattttagtttcaggcaaaaaaatccagagaaaacgctcaaagcgtcagtgttagtttactgcgtttgttaataaattttcttatgagttttaagttcccttattattaaggaggacgatgaaacctagtgtatttaattaagtatttatttttattttgattctcagtacaatatatgcctatgattaaattatgagaatcaatataaacataaatatttttatatacacttaagtggattctgaatccttaataatatccccaaatatcactgaaaatatctgtttctgtcatttttactgtttaaaacactttattttattttgttaatataaacctcacgcaattcccatgggttcgacctcgttcttcacaatctccatactncaataaagattcgtgcgcttgcaagttgataaatgtaaaacgtaccactttcggtcacaataaatttttggcgccgttaccgagaaactgcaagaagagaaactattttaatccaaattagtataatttttctactaattattatattatacatattatattatgtttcttaataatgaagtaagatatattattattattattattaaaaaaaacttaggtatagctgtgagtttttttaaaaaataatatatatagtttattattattacatataaaattaatatattattattataattaaatataataaagtatatatttctgtcaaatatatacatattatttatttcccgctatcttttaaagtctttatttacacacttatatggtaggcactgcctcctaatttttcctattattttaatttttgtgatacttggtatatgatttgttgagaacgaaattctaaaaattgtttagtcaaaagtaaattatcgtgggttgaaattaagattaaaaaatttacatcatggaaccaaatcaagtaaatgtggaagaaaaaactctcattgatcagttttcttccatatctgctaatcctccatcatgcattatttttcctgaaacaaatgccacacattttgagctgaaagcttccataattcaacttttgccatctttttatgggttagatagagaggatccatacatgcatgtgaattcttttttttttagaaatttgttctacttttagattttaaaatttttatgatgaatctattaggcgtagactttctccattctcattaaaagataagtctaaagcctggtttaattcactcccagcccgatccatttctacttgggatgatttggttaataaatttttgtccaaatttttttccatgtctaaaacgaataatattaggagagaaatctccgaattttatcaaaaagatcacgaagaattttatgaatgttgggaaagatttaacgatttattgctaaaatgtccacaccatggttttgaaaaatggagattggtaaaatacttttatgatgaattatctccctcaaaccgacaaatggtacaatcaatgcacattggaaattttttgaaatttaaagcataagaggcttgggagtctcttgagaatgtttctgtaaattctcaacggtggaattgccaagatcctagatcaaaagcttccaacacacctaagagaggtggaatttatgatgtcaaagatgacgtagatttaaaaatatcattagcaaatctaactaggagtgttaaagctatgtcattaagtcactccaggaatactcctatccatggagttaattttgttctctatgttatagtacaagtcatactacccagtcntgcccatcattgcctatataccaagaggcattttctgaagaagcgaatgctct

SEQ ID NO: 50549 - DNA, 1358 bp, Cannabis sativa
cccatgtttaacaaacttcaacagatttgcttcattagtgtactcccttatcttcaaaatttttttgaagtaccaactcatattttgatttatcgggacagtccatatgttgaacttcttgaggtagatagtattcacccatctaacccaaaggcaatcttttttacttgaaacagcccgaacaaatttggccatcatagccaagttccatttctttccttcatagaagccaatacccctaaatttcttaggaaggcaagtcttttcccaagagggaagatgaagcttactcttattacctttaaaaccccaaaggaaatcacgacaatatttgtcaatagtcgaagtgattttcttatgtaatatgaataagctcatcaaaaaaattttaatgccaagaaggacagaatggataagttgagacctccctgcaaaagaaaaatttctactagcccagcaattcaactttctgttcagactatccaagataaccccacaatcggatgctttccatctagtaggcaacccccaaatattttaaaggaaaagaaccctcttgcatttggactaacctgagaatttgaagcttagactcttccttcactcctccaaaatatatatgcgatttggtgttgttaatggagaggccaaatgagtcacagaatttaatgaaagcctcctgaactcccttaatcgagtttaagttgcccttgcaaaaaatcaagagatcatcaacaaagcacaagttaataagcctcagctgattgcaatgagggttgaaactaaagcccttgctgtttgaagtctgagccaaaagcctggtaagataatccatgattagaacaaataataacggggatttaagatctccttgtcgaagacccttttccccgtgaaagagccttggattctaccattcatcaagagattgtacttagtacccctcaaacagaccatcacccattgaaaaaatcttgatgggaaacagagttgtttaagtaaattctccataaagttccagtcaacaatatcataagctttgtttaagtcaatcttcatgatacaactagttgagatgttgaaagataagaacattgtgagctaaaaatctatttttaacaaaggctccttggttgctgtgaacaagaaccggcaacacatcagagagtctagcacaaagcatttttttagatgcatttgtaaagagtattacaacaagcaattggcctaaagtcaatggccgcttttggattctccactttagggacaagcgaaataacagtttcattaaggaaagtaggtcacttcccattgactttaacacagatttaactatatttgctaaataataatctaaa

SEQ ID NO: 50550 - DNA, 932 bp, Cannabis sativa
taggctatgtcgtgctttaaaaaatattgattgtgtcgtattgtgccaatattttcaaaatgtatgcctagtacgacccatagatttgatattttcgtgtcgtgctcagattcgtgtcagatcgtttttcttaaacaggctagcccgtatcatatccgcgctcgaattcgtgctttacttttacatatttttttaacaattaataattactaaactatatattttataatttcaattatatttatgtaatttttcaacaatattttactaacaatcatataaaaaaaattattataattattataatttgaatatttacttataaatattcaatttttgtgtatcatactctacaaataaattattacataattttaattttatattttttaataattttaattgtagaataaaaatattgaatgctatttacaaataaatagttttaattgtaaaaatattgtagaataaatattttacttataataacaaatatacatattattataataattaaattatacaaggttttttaatgtttcgtattgtcgcatttcgtgttaatctatttgtacttacgtgtcatgcttttcaaatttttcaaccgtgttgtacttaagaacatatttttcgtgtcatatcgtgccaatttatagcatcgtgttgtactaatttatagcattgtgtcgtgttattcccaaactcatatttattgaagcgtgtcaaaaaatacaactcatatttacaatactataacatactcaactttgattattttaaataaaaaaaagtttttttattgaagagtttattatataccttacattgcacaatttgagattcgatcacagcaccctccacacacatatcctcccaagccccctatgactacttgagctaacctcaaacggttcaaataaaaaaattaagtt

SEQ ID NO: 50551 - DNA, 1018 bp, Cannabis sativa
  modified_base (26)..(53): a, c, t, g, unknown or other
aagttcttatttaggatgttaataannnnnnnnnnnnnnnnnnnnnnnnnnnnggtaaaataaattccaacactcttgtactgcacaaccgacggtatttccataaaattgtctcccgagcatcgatgagtacagagaaggtagtaaacttcgacgctttttcacgagagttttgttgtttgatattattttttaacttctccttcttattgttgtgttggttgttcccattataagacttcttacacccatgatcattattattggtattttatggttttaaggtttggttaggttggacggatgaattggcaataacaaagggcgatgtgcgacttgggtcggccttcccctcccagcccgtgtccaccttcctgactacttctatgtgctttataaatttgtcttcttgatccaaaaactctcccactaaaccaacattgatctttttgatgtctttccaaagttcaccttttagtttgattcctcaaagtgcagctgctaacctctattctttgataaatcccttcactttggtcacctcggtcatgaactgatagatgcaatcttttagagatttccacggtatttgttttacttctaaaggccttccaagtgggtagggagttgcatcaaagaagagaattgtgcatagaatttcgctgggaagtcattctacgaaatgaattttctcgacgctaacttgaagtaccactactgggcagccttcgccaaggtagctagaaaaattctactttgtacatcaccgttccctccttgcaggtccatttgtatcttgaattatttgatatgtgataatggatcctccttccccacgtacatcttctagggggcatcttaaacatggtcagcaaatcaaaggaattgatccagaacaataatggcgaacctcttatcctatcgagttccaggtcggtgagttttggactggtaaggccttgaatgaggcttttaagttgatccaattaagcttgcaccccttaatcaagttgacctg

SEQ ID NO: 50552 - DNA, 2861 bp, Cannabis sativa
attgattgaataaaattcatttgattctaagctaagtctatttatctttcatagttcaattctggtatttttcggtttgaagtttatgtcttgattacttgttatgttaattgttgctcttgttgttttggcactgtttttggccaagaattaagggtgttttcacccaatatataattggatttttcaaattttgtcaaaactttaaatttttttaattatttttaacaaacaaaaatattttattaaatttcgataatttttttaattttgttttctttattatttaataaatatttaaatattttaacaatgtttaaaataatttaaaatataaatatacacaataatttataaatatatatttatatatatataaagaaaaatataatttatatgactatttttatcataataattctggttatcatttaattaaatttttatgttaaaacttaatatttaatataaaactaaaaaaatcaaaaagcatataaataatgaaaaaaaaatattaatatcaaatggtgttaatgtaagtaatctatatttatcaatatatagttaaatagagaatggagtcttttatggattctatgaaaaattaactatgttaaaattttatacaattttaagacttagttatcattaaataaaagacataatttattttatgtttctttttaaaaaaaaaaattattctatgtaagtaattttttatattttgtaaatatctgatgcgaagcgtgagttgcttactagtctcataataatacagactcatagactaaggcttattgatgcaccaaccacgtaaaaaatttgagtgttctctgcatatttgattcctccaattgtattttttttttagctctaatattaaataatttatttttttccaaaaattttgataaataattattattattgttgaaaagcttagatattttccaattagatatttatccctcttggacacctcatcatttgatatactatgagctgtcatttagagatttctagaattccctaaaatcttgagattccttttattcagccaatcattggcaaaaggaatattttatggttaggaaaagatcctctcccatgtactatttatataccattaacaattatgtatatttttttgaggaattaatacaattaatacaattcatttcagcaaatatactctattttctctctgtttctttttccttatttatctgtttaatttagcttggtatcagagccaatggcttctcctggtgatttctcagtcaacaacgccagatcacaagctgtcgatgctctagctccagctccagctccagcaccagctgctccagcgcttcctacacctctgctgcaacctttggcccccatcaccattcgcttggacagagacaactacccttactggcgttctcaatttgtcccaactgtacgtgctcatgaccttgatggttttctcttcggaaccagaccatgtccgcctcaatttctcgatgctctagacgtaccaaatcctaacatgctgcagcatgtaaatcctctgttcacagtttgggttcgtacagatcaggtcatactaagctggctcttgaactcgatttcaaaagccatgcttggccatgttcttcgttgtcgcatctctcatgagttatggtcccttcttgaaactatctttaccactcaatcccgtgcccgtatactacaactgaggtttcaacttcagtctgtaaagaaggggtccatgaccattcatgattacattcttaaaatgaaaactttggctgatggtcttaactctgcaggacaagcttttactgatgatgatcttatactttacatattgggaggccttggcccagaatatgactctgtggtcattaatcttacgtctcgaggagaccaactaacactctctgaagtgcaatttcttttgcaaagccaagagatgcgtattgaccaactcaactcaacctccgcttcagatctgactgccccttctgccaactttgttgctagaggcaagaggcctttcatcccatccaaatcaggaagatcttctggattttgtggccgaggtcgcagacaaggtcgtggaaatcaaaactgtgtagtgtgccaactatgcaacaagcctggacactctattgtcaagtgttactaccgctttgatgtaagctttacaccagctgctaatcctcagaatccctctcaaaatagcaatgcaaatcagcagcacggcaacaatgctaatcagcaagcattctcagccaactcatctcagcatcctcgtccagacgacacaaattggtatgtggatagcagagccacaaaccacatcactgacaacaccaacaacatccaaactcctagtgaatacagtggtaagagtcaattaatcgttgataatggacagtcccttgctatttctcatgttggtagtttagtcattaaatcccctggtatttctaaacctgttaagttgaatacaatactgtgtgtacctaaaattgctaagaatctattgagtgtttcacaactaacaaaacacaataatgcttatgccaagttttatgctaatgattgtgttttgaaggacatggattcaaagagggtgcttcttcaagggaagcttagcaatggactctatcaacttaccacaccagcaacatgctcaactagttactcaccttcctgtttgtctactcaaaagtctattattaacagtcctagtttcagtcctaatttagagtctatcgagacttgtttccaagtttctactaatgaatcaagtttgtggcatcataggctaggccatccttcctttaatgtactcaaacatgttttaa

SEQ ID NO: 50553 - DNA, 9016 bp, Cannabis sativa
tattattaaattttacatttatttttgtattattatttttattattatatatttttaatagagtattagataaatattaaatgatatattaaattttgcattaagagagcaacataataataaaagttaatgcaaacaaactgctctcggttaatttttaatgctggataataattatatttgattagaggagattccctcaatcattttctctttgttataaatgactagctttaatttataataatagattttttctgaaaaaaaaaagttttgatttggataatttgtcttgaaaatccaattaatccttataaaaataaagattaatataaaaactacgaaaatgagacttggtttttgggaagcatctttctgattctttgaacagatagaccccagtagtcagtagaagatgaaaatgagaatgagaatgagtttatcaattgacagtattttgcgtccaatcaacacagccctcttctcctccaatccttgctttctaaccaccaccaccactccggccctttcgcccaccggaataaccaaactttgctctcattctttctctaactctaccaatctccacactcaatctgctcttccaaatccaggttccttcttttctttactttgctcacaacacttgcttccattttaccatacccattttcttatttgttgttcgtttgtacgttgcagctaagttggagccattcgatgagggtaaagtgagtgttttgaagcagaaaatcgagctgcttggggtttcttgcaatcattcttgggtgcccggacgatactataatattttatgtcctaaggtagttattggccttttttttttttgaatatgtatttttctttcaagtatattgttgaaaagtttgagagaaaactcccatttcttatgagagaatattctggttatttgacattgacatttcaagtagctattttgaactatttgtgttctgataaagtagtgcaatggtggacaatcaatggagaggagtttgtcatttcacattgtccaaaattggtgagttactttgtgttccttagtggtttgtgagatattgtagctgtagtgaacttttctaatttgatgttgtagggaatttgctatgtggaggtgctttcgctttgattgcggttgggctggtcgggtacagaatatcatttttctatgtaattattttcttgttctgtttatgctcaaaagctttgaatttgatttagtctcaggaaattcattgtttgcaattcaggtgttttcagatgaccgggaagcagaaaatagagcagaaaggaaattcaaatcacctagagaatcgacagaaaagagcctgggtttagtgcctcttggtgcaggggtatatggattaacctctcttctataatgcgtgttatgtgctttctcttttcattggtatccttgttatttattatggtaggatttttcgtaaagcatttctgttcctgtcatgtgtagtcctcaaaagggctaattggatttcttgatcataggctttgaatacttaatgtgtattagataacttaaatgctgttaggaggaaggtaaagcattcaatattggattatgtttgatactacaggagtgtataagcaatttcaaatgcaaaatgttgtgacattttttcttaaaattccagcagcgcattgtaaaatgacgcagtggccctcaaactttaccatctgtattcttgctgaagtcctatttttagaagatgtaccaggatgtacaattaacaattgtcaattactatggcattttttttataacttatcccattctaaaattcttttttttttcaaaaaaggtatgcaacaagtattggcctgttgttggagctacatagaaaagtcacaattacatataattagcattacagccatataatgagttggtgtgtactttcaaaataagggtatcattatgcttcctattcaatagaatttgtttagtgaggttagcttcttggatttagaattcttgtgccatagctccctttggaggttttcatgaaaatcgtgttgtactgattaagtttgttaagtcatctcctgttattcttcctttacacctcaagcatcaatttgagattgcaggaacaattatttaccttaagaggtgtttactctgtcttattcttcaggttattgcctacttccgtgagcgaatgatctccgaggagactctgcatagaaatagtgttatgcaactctctggtaataaggtacattcaattgcatgaactgttaaatttatccgaccatacagttcctcaaaatatccttaactattcttgggtatttgcaccagtctcttatggctgatattgtcttcagtcaacacctttctttaacaactaaagtatcccacacgaccagttcattctctaatatgaatttgcaaataaaatctaaggattgtggaatctgatatctatcgcaatgttaacaaattatgccttgcatacatacttatccatatctttttaaaattacactgtcagtttattttaaactattggtataattgccgaaatattatagttgcatgattagtttttcagtaccgactctttcaagcagttaattttggtttcagttctcagtaacttcactgatgaaaggttttatcatatctaaatagactaaatttgcagcttgtcattgcatttacttatagacgaaatggatttctagttggttgcaaataccgagcaatagagaaaagaagattttggcaggtacattgctccttattcctttaaagtctctaaatgggaacatgaacatttggtatgagagtgttacatcctagttgctcatttggtttgtttgcccatcattttttttgtatattttaattgaaaaaataaataaaatcatatgatgataccatgttggcttgttcagtgtgatctggattggttcttgaatgtttttgtttagttttattttgtaagaaccgataattattttattagaaatcccctgcacagaacaaagtttgaaaaattaggctgtgtatttcctttttaaaagtttcttctatgtcatttgattcctatcatcccttgtttttcagatgaaggatactgaaaaagtattatatggactggatgacattattgatgcatctgaaatcatcattgtaagctaccttatttggataacagatattttattttatttctttttctctgggttaaactatgcccctctgatttgattgtttttattttgatgctgcttttaggttgaaggtgagttagataagctctcggtggaggaagctggcttttacaattgtgtgagtgttcctggtggtgcgccaggaaagatatctcatacattaccatcttctgagaaggttaatacaaaaaccaaccaaatacatgaaaaagtaacatatttccctttaaattatattaacatcccttgatttacatgctgttttgttttttgtttttttgtttgcatgaatttaggacgttgcatttcagtacctttggaacgacaaacaatatttggataaggttaaatgactgctgcccgttaacagcaataagaattaaatttcttttcttccaatagaatatttcctaacattttcttttataagtgaaggcttctcgaattatccttgcaactgacagtgacacacctggccgagctttggctgaagaattagctcgtcgtcttggaaaagacaggttgttgaatgtggcgcaattttcattattatatattttcttcctaaatctgaatatttggattttgagaatttttactcaattgatgatgcttgactggcacatcttgtgcttgcaaataaagattgaggttttgaacttcaagatgcctacgtagtacttggacaagtgaggagttcttttcacatatgataaactactgttttcaattctgttctaaaatgtagatagagctagtaatgtacaactgaatcgtgaagtggaccatttgtgacttccacaattttctgtctgtcaggtgttggcaagtaagttggccaaagaaagatgaacatagtcattacaaagatgctaatgaggtgctacattgttcccactctctgtttctgctatcaatcttttattcatattgactgaggttgctgttattttttagatgccaaaatatggatttgataaagatatgtgaaaacagagaacacgggaaaattcttactcaacttcaggaataagcaaagaatctgtattgtgtagattctgttgcatttatcatccacactaaaaatacatataatggttgcttactgacatagaacatatgatgtgaaattggcataactgattccaaagtaagctcttattaacccccaaatactgtttatcttcaaaaatctttttctataggtcagactggaacaacacaatattagcatttatacatcataaaaagtttatggattagttctgaaaagtagtaaaacgaaatgaattgattagaagaaaattttcgtacgcattggatttacttcttgcatgcttctctacaatgtttgatttatccacaggttttgatatatttgggaccaagtgctttgaagaatttaattgtaagtgccaagccatatcacaaatccatggatgaccaagaagtatgaagtctatactctatactctatactgtcatacagaatttctctatcatgcaattgcaacgacagatgaaggacgcgaaatggtgtagatagtgtcgacagaagtgagtttctctcttttaatctgattgtagataaagtgtagttgtacttgtatatgaaactgagagtgggacatagaactagttctgatagaacaagtagtctagtattactatttagtattgatgcttatggttgtgtcatgatttactatgagaaatgttcgtttgattcgtgagctaagtttcatcaacaaagactaggaagagagaaaatcacaggtcacagaatattatttgtagaatattctattgaacaaatttgaatagttgtctcaatgtttctatacagcttgattacattctgcaaaagctaaagttctcacagtccaactttcgatatattcttatggaaaaaaattataattattttgtgtacatactcatttattatagaataattatgattttttccctgtcacttatatagagtgccccccagatttatttatttttaaaaaaaaaattactcaaactatcaaaactattagaaatgcgtatcttcatttgcattgttttcatttttcgagttaatctgacgcagtttaagagtctagacaaaaaatatatacataaatagcgatctaataataaattttagaataaaatcacacaaatcaggaagtaataaagttacaactatcacttatatacttgattttattcgccagtagcttgattgtagatattaataagtccaagcttgtttgaaagaaagtagaacactttttagatagtcccttggttagtatatctgctagttgtagattagttggcacaaaatgaatgctgattaacattatccctccatcaattttttctttgttaaagtggtgatcagatccacttctacatgcttggttttatcataatgtacagtattatgtgctatactaatagtggacttgttgtcgcaaaatagttgtataggtgcttcatattctatctttaactcttcaagcaacctttttagccatataaattcatataccttgtgtgctataactctaaactctatttttgcactgtttcttgcaacaacagtttgctttttttgcttctcaaagtaactagattttcccatagaagggtacaataacttgatgtagatttcctatcatcaattgatcttgccagccaacatctgtgaaaaccacaacctttcttccattagtcctcaaagaattatccttttcttggggtttgttttaggtatctcaatatcatatacactgtgttgagatgaccttggcaagaattgtgcatgtactgacgtactaaacatacggtgaaagctatgtccagtctagtgtgggatagaagagcttgttaattagttgttgatatcctcctttatctgcaggatttccttgaagcatttttttcttatctccaagttcaattggggtttggctcgatttacaaccaagcatcccagtttcctctaagagatcaagagtatattttcattgagatacatgaatgccttttttgtttctagcaattgccatccctagaaaatatttcagtgttctgagatctttgacttgaaactttgccatcatttcttttactcgtcttattcattcagtatcacttctagtgacaataatatgatcgacatacactataagaatagtaatctttccttcccttgagtgtttaatgaataatgtctgatcaatttgatcttgtgtgtaccctagatttttcaccaccttagagaaccaatcgaactaagcttgagggattgttttagaccatacaatgacttttgaagtttccagacaattttttcattatggatttcttcaaatcatggtggtctgttcataaaaacctattctacaagttcaccccttagaaaagcattttttacatcttgcttgtgtaactctcagtttagatttgctgctagagagagaaagaccctaatagtattaagcttggcaacaggagcaaaggtcttgttgtagtcaatcccataagtttgtgtaaatccttttgccaccaatcgtgctttgttcctttcgatagaaccattagcattgtacttgactgttaacacccatttgcaccccaccacactttttatcatgagataactccactaaactccatgtggtattcttttaagtgctttcatttcttctaggacatctggtttccagtgaggaattgtaagagcttcttcaatatttctaaggataagagcatttgacaaactagaagtgaaagcattaaatgaagatgtgagagagagagggagagggagagggagagggagagggagcatcatcaacttttatcagagtcattttcttctttattcttctatgtagttgtttgattattaacatgatttttaatgtgattatgtttgtcattatgaactaaacactctttttagagtgttgatgaaattattttagaatatgaattaaagtttttagattatttccatattttttcttgctatttgtttatacaattttgtattaattattatcttgttaatgcttgatcaccattaattagtattgagattttaagttttatacttgggaaaggtaatcaaaaattgaaattagaattgcatgacataggaaaaatgtgacattgagagatttcatttattctatgagtttcatttaaagagaatcatattgctttgttattgcttgattgatcaatattgaatagagatatcttgttagttgattaatttaattctatcatcacttgagagatgttaatagattacattagaattcttgaaactacaaattatagaataaattaagataattagtaaactgagattcataatttaaaatagggaaatcaatgctccatgtctttactttctgattaaaatcgttgtttgtctgtttacttttcagttatttttattattttgctctcaattattgtatacttcgaattaaagcataaaactaagaaaagtatagtaattagtaaaagttaaaaatcaatccctattggtttgataaccttttttgaattaaaacttttctataaaaaaactgcacgcttgcagtgaaaattgtatatcaaacactaacaaatataatagtctcatctaaggatggttaattttggttgctatgaaattgagggttaaccaaaaagttttattgaaattcagtttatgagaaacaagcatctctaaatgtagcaaaaattctgtaagaatgtcacttatttgagcttagaggtggtgccacctctaatgggagtaggagttttctccttagaaggctcattaatggactagcacaaggctataatagtgcttaacgtgtaaaagtaagagtaaagagaacaaatgaaggtgtatgaaagttttcttgaacacaacattactagttttatcaattaaagacttagacgttcaatccataggaataccgagtagctcaacaaaactttgtagtgttttcactaaggcaacattcaacttgaaagatatattgttttatgcaccaacattgtctgcttagagatgagaaaggcatgagtatttgaccaaatgggaaattgttagaattggttatatacttaaggttaacatgattagtagagactaatcaatgagatatgtttagcctaatagttcaagttaaaaggaaaaatacattaagaaaatatagcctaatagttaaacttgtaagacataatggaacttcttcttgtgtcccaaaacttggttttaagtaaactaagccacccaacaagttttgggtcaaatagaggtgttgaaatgcatgtcttatgagagattgcacaatgtcaggcgacgtgttgcctagtactggtcgatatgtcgcttggaacatctttgggattacaaaattgaagcaccatcaaaattctagacatcatattttcagaaatagagattatgtcaaaattatgtgacatgtcgcttggaacatgacaaagttacgtttttgatgttttacattcggagcatgcgacatgtcgcctagtgatgggagacatgtcacctggagctatgcatgagaaatttcaaggttttgtaaaacataagaaatgacccaaatgacttcattaaataatataatcatatgggttagtgctaatgattgttcctacactatattgttagagattttataacaatggaagaaaatcaagatttattacaactctattgtaaaattatacaaggactaaaataagagattgatta

SEQ ID NO: 50554 - DNA, 1346 bp, Cannabis sativa
ttacttagattgtaatttcaatccacgtatcttctaacccccaatgatcttctctcagttctattctttgccaacttttaagaagagtgtaagcttttttttttttcattgtatctcccgttaatagaatattctaatagaaagtatcgtcctcatcaattcaaaaatcccaaaaatattttgtccccatcttcttctcaattatgtccaccacaagcacaaatattgataattatgtctttcaaccccaaattattatgtatgtaccgtttctaagttgctatcatggaaaatttaggtgaaattctttgcatgaatattacttagatgttgtataagaaaataaattagtttcatgaaaaaatgagactgaaataccaaaatgcacatagggaaacggggcaagagatattttaatattaaaactattttcaagatgtgccttagattgaaaaatatcactataaaattgcatggcattcactaaattcatgtgccttattttggtgtagactacgattattaagcttgttattcatggttctctaaacgatcgagaagatccttgggaaaaaactcacaaattaactttttttgataatgttaatggttatttttttcttttaaaataaactagtgaataggccgcgcttcgcgtgcggctatttataaaaattttaaattatatatgtgaacatgaattgaacaataaaattatataattttaaaaaatatatatttatttgaaaaataaataaatatatattgagaaatgtaaagaatttaaaaaaaaaaaaaaaatcgtacagtttctcatataaaaaatatcttcaaatgacgaactattgaaaaataaacaatactcatgcaaaatataaatgtaaaataaaaagaagtctcttaattttgaaatctaaaaagtcaaaactaaaaataaaagaaacagattaagagtcaaatttatatttttaaattattattttatatattttcaaaaaaaaaaattattattttattttaaaaaataagatatatgattatattgtttacgtttaagatatttctattacttaattggtttatttaacttaaattaattatatatagatttatgattatattgtttaaatttaagatatttttatttatattagattaattaacataaatatttgatcacatatatatagtttgtttttttaaaaaaaaaatatcgggtagatttttttgtgtgtgtaatgttttgttttcatattaataattttgggtgattctacaatgcaccccatgtactggtgcacccttaacttgtttcggcatccagaaaaattttttagtctaatttt

SEQ ID NO: 50555 - DNA, 1380 bp, Cannabis sativa
ctaccgtttattgggcctctatttaaatgggttgggctctcttatttgcactgcttgtgaaaacacttcttgataatatattagaaagcccaattctaaaataaattaataaatattaatctcatgttttgacacgacttatagttataaaatagatgccaataatcaaagaaatcaaaaagctataaataataaataaataaaaccttacctagctaggatttcctctctttatctcattttaattttagtgtagtagtagggattgtctttactggcattcttctttgtttgggtcaataactacagccccactcgaaaaggattaaagggtttagccctttcgaaagctagctttggtgccatttgtgtaatgaaaacccttgaagtaattactaatgtggttctttttttcttaatcaaaagaagaaaaaaaaattacctaaggagctttagttcttgaggttgtgatagggtgcacatgagggatgacatgaaaaacttccatacatccttcgtttatagttttgatatattaatatacattaatatatcaatgtacaaaattttagtgttttcttgatttttgttaaattttaaatatttatattgctaaaaataaattttaaaataaaaatatttcataatttagacacagcaaataattcaaaaaaatatgcgaagttttaaataactatattatatatcaacatataaaaaaataacgagattataacatacaatgtcaaaaatacaaaaatattttgttttgaagcttgttttgtatgcaggagaaataagttatttcaagacttttttttggtacaataattattattacttttttatataacaatttcaatttggttttttaattatatatatattataaacatgatattattttgtgtgaaaatttatgagttttatgtcatctggacagtcgatagttctatttgagtatgtatgttattggtttatgaattagctttgacagatcagtattttcaagttaaaatatcttgaacagctatcattgatttattagtgagctgtcaaagttaattttgtgtgagttggtgttttatataattgattcttgaatattctaactaactctcactcattttgattctttgatagaatagagatttttctctgttagggtagggtaaaaatctttttcttcttcttctttgtttcttgcggattccttcattgttgaagggttcaagcttttgtgataatggagtctgtttcatctgaagggagttcgtattcatggttgaagggaagcaaggggagcttgtcttcgaaccttaaagttagatcttgattgagtcatcaagatcttaaggtaaattgttttaaggatcattg

SEQ ID NO: 50556 - DNA, 1348 bp, Cannabis sativa
gaagtccattatcatcagagatgtcatcttcaatgaaaaagaaatgaccaaggtaaagaagacaaatattacttcggttcaaaaagcagggagtagcaaacctcagattgaggtggactaattgatgaatcacttaagatgatctagatgaaccacataattaagatgctcaaacaagcctaaaaggctattagtttgctaggaacagagagagaaggatcaccaaagcaccgaacaagtattgatatgctgagttcgcaacattttcactatcaatagacgaagatcttgagagtgtagaacctataagctacctagaggccattacaggtaaagatggtgcaaaatggctaaatgccattcaagagggaaatgtgtcacttgagaataagaaaacctagatatagtcaagagagcattgaacaagagacttacaagatgtaaatggattttcaagtagaaaaatggaattctaggagtggaaggaacaaggtataaggcaaggttatttgtcaaagggtttactcaaaaggaagacattgactataatgatattttttcacatgtggcaaacaaacatcaataagagtaattctttccttagctgtagaatttgatcttgagatggatcaaatggatatacgaactgcattcttacatgggaatttggaagaaaagatctacatggagattccaaaggctttaagaatgatgatctagagaagattttccttttaaacaagtctctatatgatttgaagtaggctccaagacaatggaacttgaggtttaatgaattcttgatgaaagttggctatacctagaagcaattatgacacttgtgcatattttaacaatcagatttacctcttattgtatgtagatgacatactaatttttggtaaagataggaccaacattgataagcctaagtctcaactcaagagtgagtttgagatgaaggatctatgtgaggccgagaagattttggcaattgagataaagaggaacaaaccccatacaaccatgttaagccaaggcagctaccttaggaaggcaatagagaaatttggatgactgatgttaaaccagttgcaactcctctagcttagcactttaaattgtctcaagagaaatctcccaaaactgagatagaaagaagaaagactaatgatgtgccttatgctagtgatgttggcagtctcatgtattccatggtgtgcactaaacctgacctgacacataacatgagtttagtggcgtgattcattacagatccttgagaagaacattggacattacttaaatggatgtcgaggtacatcaaagggactctcattagtggtcc

SEQ ID NO: 50557 - DNA, 1010 bp, Cannabis sativa
ctccatttcgttaacagttttcatgcatagcaagaagatagtcatagcatagctaggcaaagattgagcctcagttttaaaaagcatctctttacctgccttagttaagaatttcccctcccaacgttgtatcttttttctcattttttcttttaagaagcccaacagaacttttttatttcttcccaaaatgttgggaagacccaagtaagtacttgactcccctgcctcgtgaacctttagaatagaataaattattgcacgaacatccatactagtattagcactgaagaaaacaaatgacttattcaaatttacctgctgccctgaagcaagttgaaaataatggagaagctccatcacattattggcttcctcctcagtagcacggcaatacaaatagttgtcatcagcaaaaacatgtgggtgataacaggagccccacgagccaccttacagccccctaagtttccaacgcctctcaaaatttaaaattagtgctgacaggccctccgcacacaaaagaaaaagataaggtgataaaggatcaacttgctgtaagccttgctttggcacaatcggacccaattccgttccacccgaaagaatatgataagaggctgagctaacacaacacataaccaactgaatccaatgatcactaaactccatcttttttaacattgcctgaagaaatccccactcaaccctatcatacgccttgctcatgtctagcttgatagccataactccctccttacccgagcttttccttttcagacaatgcataatctcaaaggatattaaaatattatcaataataagtctactaggaatgaaagcactttgagttcctgaaatggtatgatgaagaacacctttcaatctgttggctaacaccttcaagactttttgacactcttacttttaaaaacactccaatatataagagcatctccaatggtagcatcatttaaggatgttaaaaatctccatatcatctaaaaata

SEQ ID NO: 50558 - DNA, 1221 bp, Cannabis sativa
gagggagtaaaatccatccttccatctatcccctttctttgggacaaaataaagatcatagaaaaataatatttatagagggctgggagcgggctaacccctgagagcataaaaaatgaataagccctataggcagtatccctgtggtatcaactgatgtggagctaatcctacaaaaactaagaaatttacaaagtaatcttgaagcgggagcatcacgccaaacatgagatgtgtttggctccatgccccgaaccctctgtagttatggttaggggtttttatttctcaggccaagcgatgaaaaacaccttggtcatggggcctgattccattctcttccacgatggtccctaagtgatgggcacaccccatggaagagtgtagctcctcaattttgcagctggtagctttgtgtacatacagtgtgaccgggactggaccctgcatcactgcatccagtggcaccacctgatgctgtgatacaatgaaccctacatgctgagggttagaaattctttactcacatgcccaggtcaaagatagagtgctcataccttcttgtaatccctaaggcttttctagcctaacataataatattgacttgtagactaagactagttaacgtcccaaccacgtaaaattcttggtgttcttatttattttcttctaattattattctttagctcttataattaaataatcatttttcaaaaatctcagtgaatagttccttaatgtgtaagagtaaacattttcctgtgagccactcattgtttgggataaatgattgggatccgtacccagttggataaatgactatttctgacaaatccttcaaattcatctttcaaataatcacactaatttctggtgtgtccaacatgaccatgatattcacatcttttgttttggtccctcttatgccttctacctttgtacataggcggtggtttcttgtagtagaccatgttgcaagtagctctatatacattttctcgagtatctacaaagattgtatactcagaatatcttgattcatggcttcttcctctctttggggcttcactttgacttagatttttaccactccttttttcatggaatgactcacattccattccaaaacataggtttgttgacttgtttgttcgaatgtgatgtactcgtgtctaagagccattattccgtgggtgtaaggacctaatggaggcttgaa

SEQ ID NO: 50559 - DNA, 1183 bp, Cannabis sativa
ttaatactacatatagttttacataaaatacaattgaatataatacaatacaatgtaatacgatgtaatacgacgtaccaaatgaactcataatgttctaaatcttatcaatattcttgcttcaagctctctctctttgttaaatatgattctcttagcatatcttcaaataaaatcattgttaatagttttatttaggaaaaattttcatttctattttttttggggcaaaatttatgaaaatatatattttttttttttaaaaaaaaattctttatgggaattttttttgaaaaaaaaaaaaatagtttagggtatctatagaaaccaattatgtagtatcttttattttttctataatttttttatagaaaattatatttttgcacaattatataaaaactcctaaaatgtataattttactttatttagaaactagtttttttacaataataatatcttacttgataattacatttaagtagtaaattaatttttaagagcaataatattaaatctttacttaaataccctcttctcttttttttctttatctttctttcaacaataacaccttcaataagtgtaatattaggaatgacttgatattattactggataaaaaaaaaataagtaccaatatttgatagtattaccattaaaaaaaaaaaaaagaaaaatagttgtgtaattattaacaaaaattcaatataattatgtcaaaaaaattattttcttactttttttaaaaaataataataatttgatatttaagtacaactatttaccaaaataaattatattattatcataatgtgattatattgaaattggtattctccaactttctctttcatttagtagggaaaaaaaaattgtctcacttttggtttggcttaagacaatagctcaaagaagacatctccttttttagagatctcatcaagtaaattaactcagttttatctcacttccccaatgcctcaattactcatgtcaacaacacgattaatacttttgctcacaaacttgcaaaaataactttaaggttagatgaagttgcaatttgaattgaggatgacccttataatctagttgctctcctctcctcaaagggtatcccttctttaaaaaaaaaaaaaaagactatacataaatacatttttatttatatatataatt

SEQ ID NO: 50560 - DNA, 1095 bp, Cannabis sativa
  modified_base (1036)..(1054): a, c, t, g, unknown or other
tggacccaaactcagacccatacctggaccccgaacccggatcaagatcaagaacaagattgagcttcggggtccgggtcttgggtcttggctcgggtttggggtctgggtctgagtttggggtctgggtctaggtcttggtccgcatccgagtctgaatttgggtttgaggacttggtttgggtccgggtctggggtccaaggtctgggttcgagttcgagttcgaggttcggtttcaggatacgggcccggtttggggtctgggtccaggtcatgggtcttggtccgggttcgaggttctagtctgaggtttgggtttgagttcgggtctggggtccgggtttgggtcagggtctcggtctggaggccaggtctgagtttgggtttcgggtcagggtcaaggtcaggtctggggtaagggtccgggctcaaggtcccggtccaagtctagggcccaggtctgggtcttgggtcttggtctgagactagggttttgttcttggtccaggtttagggtttaagtttggggttcgggtacaggtccggggtctgagtttgggtccatgtctgggcctggggtctgggttcgggtcttggatcatgggtcttggtccaggtccaggtctggatcctagtttggggtccagatctttgttcgggttcggggtcaggggctgggtcttagtccgagtctgggtccagggttaggatccggatttagggttagggtcccggtctagggcctaggtccgggtctaggtttggggtccgagtttggggttcgggtattggtttggggtttggggttcgagtctagggtttggggcccgggttttagtcttgggtcttggtctgggtttgggtttagggtctgggtcttggtctgagtttgaggtccgcgtccgaggtccgagtctggggttcaggtacgggtttggggtccgggtttgggtttgggtccgtgtccgagttcgaggtttgggtcttgggtcttggtccatgtttaggtttagggtgttggaattaattttaccnnnnnnnnnnnnnnnnnnncaagtatgttgatttaacagcctaaatatgaacttctaaaa

SEQ ID NO: 50561 - DNA, 534 bp, Cannabis sativa
atgccaaatgtgattaataagcattcaacttagtttttcattgttagctatttattttataacctccacgtgtgcctcctattattgcttgaccaaatttttattttggtttgatgattaaccatctatccatgctttcctctttatgctacacctaaaccttggctcccatataattattacagcatcacacaaacaaacccactaatttttttcaataaatctaggcacaattagaaagctataaatatatatgcatgacactttaattttaggttagccaattttaatatactactactatcacgattaaattaaatagttgaaattatatctatatcaataccaaaatcatcttttaacttactaaagttaataatggacaataaaactaaggcccataatttccataatctcaaaagaatatatttttctaataactttagagaaatatttacactaatgtaatagaaaataataactaaatattttagttattacactaaatccagccttgacccaatcctgaactcg

SEQ ID NO: 50562 - DNA, 2244 bp, Cannabis sativa
cgaccttaaacttccataaagctcgagaacacctataaataccgtaataaaccattttcaagcaatagcacctcaaaaaacacaaaaatttctacatgtactgagtctagaatgttcgtacgaccgtactattgaccataatatcagccaatactaggtactctaatcgtactgatgtgatagcgtcaatcagtacttaagccaaacatacgtttatcgatatctaatataactctaaccgctatttcaatataatctaatagccaatcataaacatccacgctaaacatgtaatcacatatatatatcattatactaattttatctcgattctgaattcaggtgtgccagtcaacctgagtggaactgctactcaatggtttataggcccctaagtcacaacatacgcaaaattaataagtgatacgctaaactactttccagggacttaaccttgaaactaaaaatttttatatcgataactagcaaggtaaggccctaactattgaggaaacacgagaaaaactatgaaatggaaaagctacccataaaacggtaggccattttcaaaaaaaaaaaaaaagcatgccatttttttgggttccgcactagaaaaaacagtgtcgtttttcactacagaaaaacaaaaactccccaaatcaacctaaaacttccccaaaactttcataaagctccagaacacatatacatgccataataaaccatttccaagtaatagaacctcaaaaatacaaaaattctaaaatctcacttctattcttacttgttattctgcatgtgattaaggctgagcatgggttgagttggccgggttgagactattttagtgggcaaacccaataaaatcgatttattaaattctaacccattcatttttaaattttatgtataatccaacccaaaccaacccaattattatggcttgggttgggttacaacccttacttttcacaactacaaaaatttaaatatgaatatgatcacaaattcatacctaaattaaagaaaaaaaaattcatacataaagcaaaattgttcaaagtttattacagtcatccaaaattcaagtcttaaaattgtaaaaaatttgtcactcatgaattgcctactgagcaactagacagtgtcacagtgactacaaacttgaacaaaataaggtataatatttccaatgtcatcaatcaagaacatcaagtcttctccttttggtaattccttgtcctcaagttcattgcctacaattcaaaacagaacattattcacatttatggacaatctatataaaactactatatatcttctataactactaaaagaaaaacaacaacaacaaaacaaattgaacataaatcaatgagcaccaaaaaattaaacaaagtttgaagttaaaaaatatcaacaaatacacgtaatatgttaatcaaatcaaagtgtgaacaaaatacctttattctaattgttctcaatcaagcaaaataactatagagtttttcttttctaattggcatttctaactttcttctttgagcccaatctaaaaaaaaagaaataaacaatataacatacaaatatatctcgtgtatatatatacatcaataaaataatctgaaactttttcttaaacaacataaacaataagaaaaatttgattcctttttacaataacataaacaatataaccaaatctaattacaaaatattacattacaaatcaaataagcatttagtaaatcattatataaaaaattggaaacaaaagtaagaaaaattaaaaataattaaatttgttttttgttttttctaataaaataaaaataacaaaggtttctaatgaaataaaaataacaaaggaaaagagaaacatgggtgtgggactgattcgttgtggtccttgacggatggaggttgttgttgagtgccaaatgagagagcaaagagagtcatgggatagagtagcgacgttggcccttgcttaaaattattccggcaaaccaaaaagaaaattgagtgcgattgctattgagaaaggtcatctataaaacttctagcaaaggaaaaaaaaacaaagattagagatataacgtaccttatttgcacccttgcttgagtttttatggcagaaaaacttgtcactggtggtgtgtgtgcgcgttagggaagggaaagtacaaagttgatacaaagaaagaaagagaaagcgaggagggaggcgacatccttatg

SEQ ID NO: 50563 - DNA, 776 bp, Cannabis sativa
  modified_base (223)..(236): a, c, t, g, unknown or other
tttacatgttttaatttgtaggaaggatccctgtgactattgatggtgaaaaaaagacagttccaaaccatccatttgctccaaaaaaagaatttggtaaagatggagtttttcggtattccaatgggaaggtttttccaatgaagaacgggaaactagcagaacaactggaaccctacggagagtactactatacggtaagatcatatatatatatatatannnnnnnnnnnnnntattatattatattatattaataactgcatatcatatacatatatatggtacaatcctataatatatccataaaaaactcttaaggatatgtgccaacaacaaacattaattaataattgccccagagcacggtctattcaaggacaaagccagcttctaatgttaactgttaagggtatgcagttgaaggaaaagtgtagcagcagaagcgttaaggggagaccaagtctcaaattccagagcaattgaataaccggcaaagggaatcgtattaggggacagtacacaaaataataataataataataataatagtaaatagcaagataaataatgctcaaattttaagtttacatgtgacatgaacttaaagtttatttttaggtatttctaaatgtttttttaataattctaaacgaagtctattacaataaaattagaagaaaattacaattttacaaataaaattagagaaaaattacagttttacaaacattgaatacttataccatttgcaaacttaaaattttaagtattaa

SEQ ID NO: 50564 - DNA, 866 bp, Cannabis sativa
taaaattaaattaaaaatatttgcaacaaaaaatttattatataaattttatttgaatttgaattttaaaatattataaatttcaagatattttttctttcaaatactttatcaatttctccttaattttttttattctactttaaattccatatcagttttagattaaatggttgatatgtgcatcaagtagtctcctttgtgcatcgagttggcaaggttcaaatcaaacatcacatctgaaagttgccatatagaatgcgcatatttacatctgaagagtgcatgtccaatagattcccatactcaggaacaaagcgagcaagtcgaatcagtaatgaccttttgtcgaaccaaagaagttgcaacagggagagcatcatgaactactttccaagtaaagatttttactttttgtggcagatgtaaagaccagaagaacttccaccaagcttcgtgcgatgtcgagggagaagagtctacaacagcctccaaaaaaacagctaaatggtagcctgttttgactatataaatcccataatgatcatgatgccaaatcagcaagtcattccttggaaaaaaacttaaaggcagggtcaaaatcgtctcaacataaagatatgttccattagcgttcttcggtgattaaattggcaaccagtccatttggaggaactgaataccgaagaggattgaaagaagtgtgacctagtatccacgagtctttaccactccaaattaaccttccttctccaactttccaacggagtccaacagttaaaagttctcgaccccataaaattccttgccacgtaaaagaaggtgtacgccctgattttgagtcgaggatattggaatttgagaag

SEQ ID NO: 50565 - DNA, 1234 bp, Cannabis sativa
attactttatatatcatttttttttctcaaaggtttatgttacttcggtaatttctatgtagacttttgttgtgatttaagttactatgttagttgctatatgagttgttatatagatatccaaaaaaaatataaaaaaacagctttaaagtgtaaaaataaaaaattcttatattttttatagctttttttgaaaatatgtgcaggaaatttaaatttaaattacaatacttaaaaaaaaaaatactttttatgttagccatatttaatataaaaaagatttaaaacaaacaaatacaattctattttttataataatatttaatttaatgtcgtatctctatttttttttttttaatatcgtatctcttttttaaataccttattaaatagagcttcacaccatgtaggcatgtaaatgtaatgcttcatatcaatattctattttttttttcacaaatatatatttatttttgagagggggattaattagaactgctaacaatattttatcaactcttgtgtttctgtctcttttacttatataaaataggaatatttgtggcgaaacctcctttacatttataattattacacatataactttaataaaaaaatattagtcacaaaaaccacaatttgttgtgactaaatgtatttttagtcacaaaaagtattgtgactaaaactaaattaatgacgatttgtatttaaatactatgtttagtaaaaataatttttttgttgtgactaaagtcacatttaatcacaaaaaaaatttattgtaactaaaaggttgtcactaaaagtgacatttcttttttgtagtgagtccattgctccacttcattgtctgcctgtaaaataggttatgatgacttaataatttgaatattattatttaatttaccataataaaataaaactatattatactcatatataattcttgaaataaacatttttaatatataaataaaaatatattactttctgtaaccaaattaatatttattaaaaacaattatcacaaataaatgatgctggctcaaaatatttttccaacatatttacacaacaaatttaattctattattagtacttctaacttgggagtaagttacatgataactttagaataaaattcataagaatcaatcctctttagtgtttaaataggtaaattatccacttttgttgagggaatcaatcccctactcccttttcttccatt

SEQ ID NO: 50566 - DNA, 1171 bp, Cannabis sativa
tctctctctctctctctcatgagcctttcatttgatgatgatgatgatataaagtcctaacttcacaacctttttcttttgcactcttatgaccttaagtattatcatttttcctactataagctccaattatgtcagatcacatcactcatgaagatcaaaaccaaaccactactagggttttagagagtcgaagaaagagtactacatcatcatcatcaaagcgcgctactaccacctcatcatcaccatcatcactactgtcgcttccaccagatcatcgtgatctgggggaggcagctactgctactgctgttgctggtgctatgacaacagcagcaccaccagctccttgtggtgcttgcaagtttttaagaaggaagtgtgttagtggatgcatctttgcaccgcactttggatctgaccagggtgcagctcggtttgcagccgtgcacaaagtgtttggtgctagtaatgtgtcgaagctgttgttgcatattcctatgaataggagacatgatgctgttgttactatttcttatgaggctcaggcgaggctagctgatcctatttatggatgtgtctctactatactcgctttacaacaacaggtttttacaagttatatatacattttttttgttatagaaaaaaaaattacaaaatcttttatcttatttcttaggagactagttaattagtcattattaatgttttaaaaatcatatgggaagaagagaagaaagaagagaagaatctgagggccccctttctctttcaaatccaaaaaaaaaaaaaaaaatcaaccctatttttaaaaggatgtaaggaaaaacaaacaaattaaatatacaaaatactaaagttatccgatttaaaaataacaaacatttacactaaaaaaaatactttggtcattttaactattaacttttggtccttccaactttactcttaatattaaacaacacagattaacgagagttactaaccttttcatctatcaaattttttattctttctaaactcttcatttatctgattctctcattcctaccaaacatagcgtaagataggtttcgaaacttgttcttatctgttcttcttgaagaaaaatgttagatatacatacttaaattacttatacttatgtattaaatattagtcgttt

SEQ ID NO: 50567 - DNA, 1000 bp, Cannabis sativa
tcaaattgtcccctagaaacactgcataaccactagtggatcttcgatcatctggacaactagcccaatcaacatccgagtatgcttgtaagtccattctagcagctggtttaatgaagagtccctcatgaatggtgcccttaagatatcaaaataatcgtttacaagcatcccaatgtgtagttgtaggagcatggataaattgactcagcttgttgacaatgaaggctacatcgggtcttgtaagtgtgaggtattgaagagcacctaatgtgcttcggtatagtgactgatcagaaaaagggtctccaaccgaaagagataatttgtgagcagaacttgttggactcggcaaggtttggctccatccatttttaaccgactgagaagagttgtaatgtatttagattgggataaatgcataccagctttggttcggaccacttccacacccaaaaaataatgaagagatcctagatttctgacatcaaactcagtattgagttcagttatgagagtggagatgagatgttgattagggcctgttatgaggatatcatccacataaacaaggagaagaattaatgagtcaccactgcctgaaatgaacaatgaattgtctgatcttgaagcatgaaatcctttgctgcatagtgtaattttcagtttctcattccatgcccgaggggcttccttaagaccataaagggccttgtttaatcgacacacatgtgttggatattgtgggtccacaaatcctggtggctgagtcatgaaaacagtctctttgagtgtcccattaagaaaggcattggagatatcgagctgagtaattggccaatcattggagactgctagtgtcaacaagactcgaactgttgcaggctttacaaccggtctgaaggtttctatgtaatcaatcccaggagtttgagagtagccctttgctactaacctagattttagcttgtcgatggaaccatcagctttgagttttata

SEQ ID NO: 50568 - DNA, 1822 bp, Cannabis sativa
gaaaagtctttctcgtcttcttctatctatttaaatcctgtgttttttttctttacgaatgagcaagtgtattataaattcaaaaacaatttacacaacctaatagcatcctctaatttagaggacctaaaaaaatctgtaaaatctttacaatatatgaaaccatctttcctcactactagttacatgttttggcaaaatacaagaaattctatatttgattccaactttaattttatacccaattctatcactaattttcatcactctccattccaaaatttgttgtttcggttggtcaaaatgtagtacaccaaagctgccacagaagccgaaataacctttttcttaaacttgctcatcttagccttcctaatacacttactgatttgtgaaagggaaatcgaggtgatcccccattaaagctaaagctttacttgctcaagacaactcaccgagaaagggcactcaaaaaataagtgttcaaccgattcactgtcaccatcacaaagcaaacaaatgtcattgtcaatcataccaaatttcttcaatctatacctggttttgatcttccaaagcagggcaagccatagtatgaaactatgcttcggtatgttgatacggctccaaacaaagttgctccaatctaccttagttggattgttatgcaacacttgatacccgtgagcaatcttgtagctgttggttagctgacttgtgtctattaaatttttcattgtctcctttatcatcattagctttctccaatactagctagcttgggctttaggtttatagctccaccattcctcattcttcacatacacattatggacccattttacccacaaattgtattcttccttttttgcccatctgtacttgagcattgctgcaatgttcttattcgtaatacacctaaatcccagtccacctgaggatttggagtgacaaactgaactccaagcaactgtaataggtcctgttaaagtataatggccattccacaaaaaactacgacaaatggcttcgatttcacttacaattttccttggcagcaccataacttggcacccatagaagtgtattgccatcaatacttgattaatgagaacaataggactagcaaacgaaagattctgagtgctccaagttctaatccgagccatcatttttccaccagtacattgcactcttttgaggagattcttttaggacaaatgagaacaccaaggtattttaaggggagctcttgtttctgaaaaccaaatgcatcaaacaccctttgaacatctgcatctaacatgttgctgcaatagagagaaaatttcgagggattaggtaaccatcctgatgtgtgagaaaaaaagctttagaccttgcagcatgtagtagatactcttaaagtctccattgcagaacaacactacatcatctgcaaaacttaagtgatttagctcaagatccccacatctctcatgaaacttgaactcttgctttttcccaatcttcttcataattcttgaaatgtattccatgcctaagacaagagaagcaaagacattgggttctcttgtctcaaccctctcttggcctcgaaaaatccatgtaaggagccattgatcatcagagaaaatctttgtgtttgaacacaagtcattactaggttaatgaacttgagagggaacttgaatgcatgtagcatctcttccatgaagtcccattcgattgtatcatacgccttttaaagatccaacttaatcatatagttggaattacttgtcttccttccatagttcctaataagatcttgacagatcat

SEQ ID NO: 50569 - DNA, 1917 bp, Cannabis sativa
tagggcataaaacccaacactgcatccattgggccttcccccacggactcatggctcttgtacatgggtacaccaatagctgcttcatggactgacgactggccctacagaccaacacaagtatttttagtgtgctttggcctcacttgcatgcttcttgggaaaacttcccaagagatcacccatcctgaaattatcccaggtcaacacttaactgtggagttctttcgtgatggactaccagaaaataagatgcatcttgttgatataggtagtactaatcaatccatttaagccctcttcaactatgtagtctgatgcctatacagtctcagagtcatcacacttgaccttccctaggcgatgtaagatttcacaacttactcattatttccccttacgaattacgggactactgactgtcacaataagtcgatatgatttttatatttaaaaaagttattactatttttattcatatttttcctctatttacttttttaatctattattaaatacataatgtgtttatcgtttatcctaggggaaaatctattctctaagactggtatgacgctttaaaattactttaaatacatctatctattcttttcttaaatctctctttattttaattttattctctattattctctcaaatatttattctttaaaattctttaaaatatctataattaaatattattacaatatgtaaatgtactttcttttaaaaataaaaaatctaaactctatatataaatatatacaaggttttcacttataaatttaatattattaattatattaataattttaatatatattacatacatattcttctcttaacttttcctttgtttttttattgtgttttaatttttgaaggataatagcaattttgatacatattatttgtgatcaatcccaatttataaatattttactttaagatttaatatatcttttgatattctttactctctactcttccttttgattactaaattattggaaaattattcgatcgatcatgtagaagtcttcttaaaacgctatgagaagtatttgttaattttacattagttttaagttgtttttttttattcaaaattaatatatttatttatgggtaagttaatgtaaatgtatattaaatataatttacttttttatttttcttaaaactatttaattgtatatatgtgtattatataaaatatcatatatatatgaattaattattttataatttatttctagatccaaaattattccaatttgaaaataaatacttacaaaaagattcttctaatatttaatagtgtgagtgtttttattctaaaaaaattataaatttacttagatgtaacagtgatgacattcgatttgaatgtagtggcaactacaagtgtgtgataacaacaattatgaaattataagatgagttttatatagatttatcaattatctttctattaaatttcttttttttaaaaaaaatcttcaatttctaatcgtttctttattatagcgtttgtattaaagtgagcattttaataattgtttgattaatttgttttatgtatagcaaatttattgagaatgatagtggctactacaagaaaaatacaatgatgacatcaattttgaatatagtggtgactagaagtgaagtgcggtaatacaacggttttaaaatcataaaaaaaaattgtagagatttatcaattattttttctttgttagatatctattttttgtaaaaaaatttcaatttctattattaaaaaatattacattttaaacaaaattcaatcacacataaaacacagtttgtttcttaattattagttaatttaggggtgttcataaaatagccgatccaatccaatcctcacgatccaatccaatcca

SEQ ID NO: 50570 - DNA, 1441 bp, Cannabis sativa
ttagttgcaaatacctgaccacttaaggaggttatgccgcaaataaccctttattaaattatacttttgaactttgaagattgtcaaaaaaatttctttacaccattgagattgttagatttaaagatttttgtctaattttaataagaaaagtctaacatagataaaagttcgagaggtataatttagtacatgtcaaaatttaaagaacataatttagtaaatatcaaagttttggaagcataatttatacatggacaattatcgaataaataaaattgaatgaaattagaccaaatttaaataaaacaaaattttaaatattttctataaaaatatttaaaattttgtaccgccgtatttctgtaattattttgttatttttgtacatttcttaataatcccattttgaatatatttgctagcatatctaccatgtctatgtgatgacttgagtatgtggttagtggttccaaagggtgagaaagggatctaatacaagataacttttgttctaacagagaaaaaaaaaaaagaaaagaaagagagagagagaaaggtaggccatcaggattcaacactaaagactgggcttgggccgacaaaggaaacttgcgttaaacactagcttgggccgacagcctcagatcagtaattgggcttgggctttaaaaatgagataagttaaaaactaatttttttattaaataatttttattgataaatattttttttataattaaaatattatatataacttatcaaaattaaagtgcacgtaatatgaatatgaccaaatttaaagtaataagaaaagagtaaaaaataaaaaaataaaaataaaaagtatataaaatgtaatttcctaatagaaatgaccgttaatgttaagtggaggccaaacttctttaataaatcacataatttattttgataaaggtaatgaatcaaataattaacattgtccataaaaaacaaaaaataaataataaaaaaagagtggaagcaggataaaggcatattttataagatccactcttaagttaaagatgagactcacatctctcacaaaagattacaaaaatatttacttgtggaatattattatactatatgttaactcatgagctctaagtgtaaatttagctaattcataggtattaatagtgttacaacaatgcaatatgtctattaggttgagtttgctttgaactaatgaaataaaaataaaataaatttattttatttatttatttatttaattaattgtattttaaagtatcgaaatatcattttaaataaaataatatttctatcattttagtaaaatattttttttttttttagaatcaacttcagctcaatatattcaaccaacatatctataccatctatcaacactttaaaaaaggcttgagaattcattctatacaaatagctc

SEQ ID NO: 50571 - DNA, 736 bp, Cannabis sativa
aagttttacctaatttttcaaatcactaatcaactgaactactaatttggttcaatttaaattcataattgttgtttccccccttaatctcttgagattggtgacaagcaagtagtcaccttgcaactgttctactacgtggaaaaagtgtacaccttaaacaaaggcatagctttatggaaaattttaacataattttttttagttatgttgatctttaaattcaagctgttgaatatattaggattgaaattttgtacagaagtttttgacaagtgagaagcatgcgagtcagcgagctagtattcttgtgattcacaccatttttcactaatccaactcaattaaagacaaaaagctcacgagtcacgacctcgccaaagccaccatctattagtcaaaactaaatttaataaactagaaaatatactaccttccgcacgactatatgaaaataattatgattgatttttattaataataaattcgtaattgaatcgtgtcaaatttcaatttgaattattttattcattaagccaaaaataaaaggtttttttttttcttcttcttcatgtgtattgggcaggtcctatgaagtactaaaatgataaaaatattattaaaaaaatgataaaaatattacacatatattggacaggtcctataaagtacaaacatttatgggctatttacaaaaataggggaaaataaagataagttttgatatatatggcat

SEQ ID NO: 50572 - DNA, 1303 bp, Cannabis sativa
  modified_base (300)..(302): a, c, t, g, unknown or other
  modified_base (511)..(514): a, c, t, g, unknown or other
ggaaatgactaacagcagtattgtccgtcttcaccacaaactttgaccccaacaagtaatgcctctatgtctgtaaacaatgaataactgccaggaactctttctcctgcgcagtatatcacatttctgcttcggaaagcttgcggctctcaaatgccactgggtggccctcctgcatgagtacccctcccaaagcataatcgtatgcatccgtctgtacttcaaagggtttgcatacatctagcagggtcaatataggatcttcaaacatggcttctttcagacttcgaaaagcttctnnncacttctcagaccacgtccatatagcacccttcttcaaccactctatcaagggtactactctttccgaatagccctccacaaatcatctatagtaattggctagactgagaaatgagcgtagttgtttcacttctctcgcttcacatataactcctctttcctcaactttcgaaacaccatagccaagtgttcccgatgctcttctaannnngcgttgtagaccacgatatcatccaggtacaccacaaagaacttgtataagtcctcatggaagacttcattcatgagtgtacaaaatgtggctggcgcatttgtcaacccaaacggcatgatgcaaaactcgaatgccccataccgagtaacacaagtagtagcctaatagtagcctgaatttgatagtagcctgatctcaagtccaaattcgtgaagtattttgctccacttagttggtcaaacaaatcagcgattaagggaatggggtatatgttccttaacagtcaccttgttaaggaagcggtaatctatgaacagtctcaacgtcccgttcttcttcttctggaacaacacgggggcacaaaatggtgcctttgatggtttgatgaatcctacctctaacatctctgttagctgcctcttcaactccttaagttcttggagagacaatcggtatgttgctttagctagggcctttgcagccgacaccagctttatttggtgatcaactcccctcctgagaggcaatcttttcaaaagttcttctggcatcacatctttgaattcatctaacacctgctcaattataggtggagtggactcctccacttttgcatcatacacgacgggagcaatgacaaatgttgacctcttcttcttcaggctcctctttagttgaagggctgatggtagcatgacttctgggggttgtctcactttagcgggaaccattgaaggattctcacccatgatcagtagattccctgttgctggaattggaatggcc

SEQ ID NO: 50573 - DNA, 1409 bp, Cannabis sativa
gttgggctgccacctcaccttaactctcacatagtataatatttatccgctttgggcctaagtcctcacggttttgtttttaggcaccttcccaaaaggcctcatcctagtagagtacatgaaacacttacattctaggaaaatcttgcatattctcctgatgtgggacttgagttgataccccaacaaagagaatgtcatcaacatagaccaagagatcaaccagagagtctcttaaaaaatgaataaatagagaggtatcgaacttggaagcttggaaaccctattgaaacaaagtatgtttaagcttctcattccaggccatgagtgcttattttaacccataaaagttcttttttagtaaacaaacatgatcaggtcttatggatcaatgaaccctggaggttgttgcatgtagaaaatttcatggattttgctattaagaaaggcattgcttagatcaagctggttcactggccaatgattagaaactgttatactaagaataattcttattgttattgatttgaaaacaggactaaaggtatcctcataatctatacgtgatgtttggagatagtctttggcaaccaatctcgatttgaacttgtccaaggagccatcaagtttcaatttcacttgatgcacccccttattttcaatcacatccatatttttatcataaggaacaagagtccatgtgccttgcttgatcagtgcattaaacacttgagtcaaggaagcaaaccaatgaggattcttacgagctaattggatagacttaaacttagtaggtagaagagattcaaggaaagggtcctttgtagccaagtaggccttggatttgagaataccatttggagatcttgttctcatggagtgtgcttgtgagggtggcacatgagtagaagagcctgctggaggaggaagtttacttgttgatgaagtatccaccacacctgtagatgaggaaatgctaagaaatggtgtagtatgttgtatttgaggtttagatggtagagtgggaattgtttgttgtgaagtatgtcaaagaaaaggtgaaaatgatgatggtaggattatttgtggttcaataggttatgaggcagatgcatgggtggaggcgggactatttgtggttcaataggttgtgagggaggtacagctggtgtaggtgggattatttatggttcatgaatagggagagtagcctcagtaacaacaccagaaggaccaacatctatacaagtattagtagcagtaaaatggtatagaggtaaatgtagtaactgaaaaatagagtagaaaatgagtgaggtacttgtgatgatgagtaaacattagtagtttaagcctgcttagcagaatagcactcctcattgagcataacattccatgcaatgtgttag

SEQ ID NO: 50574 - DNA, 1108 bp, Cannabis sativa
tatgggacccgatacttaattggaccaatagcgatattgacacataagagggtgctaggcactactaatgacctttaacatttctcttaattatattaatagacacaacacgctaattatgtatcctacctatctatatatctatataatcatcttgctaatcaagatgacttgggaacctatatgagtttgttttgttaatctctcttctcttatttttgtaatttaattaattttttattttatgtcttttaattaacttcttattttatttattttcatatataatctctcctcgcatttactttaatttaattaactttttttttcaatatttattaattaggtgtattattatgtatttattcatttattcattgtattaaattatgtaaataagaatttttttacattgtaatataataaatttagttgcacataaaaaaatgccttaaaaacaatcattattcaacaattttttttcatatgtaatggcattgaattgttatatataagcattatgttgaaacatatgttagtttattctttgttgatttattattgtttactataataagactatttttcaaaactatgcaatttggatgttccatcacttatatgttgctatccctcgtctctttcactaagcattaatattgggtgccaataagaattggaatattatgcctcctttgaaaacgatgtaaaatactttttaaatttacctaataatctaactagctagaatatatatatatatatagcaagaatggaatctctactgccgctaatctaactagtttatattattattctttaaatttcttcaataataagttcccttcggtactgtaatatatgcacactgttcatgtgtatatatatagcagtcttttatgttcaaacggtccatctattggaatagatcctcttgaaatagggacacataccaaaccaaatccaattccttctatatacgcttctcattgttgtcaatgtttggtaattatttggagattcgaagccttaaatgaccactttttttgttgtatgatatattctaaacattatggccaattttcatattatacaattagatctgtat

SEQ ID NO: 50575 - DNA, 1417 bp, Cannabis sativa
catgtcttccttaattacctcccagtgggattgaaagacagccaagctgaaaccatctggtcctggagccttgcttccttcgcaactaaacactgcctccttcacttcctctatctcaaatggcctctccagatccatggcggagtcaagagggatcctttgccagtcaataccttctatgcttaagccctgtcttctttcagctttatacaggtttgtatagaaggacactatctcatcgactatatcttcttcactatcaatgattgacccatcttccttttcaagtcttgatattgtgttcctggcttttctggcgttcaagaggttgtggaagaatcttgaatttgcgtcaccctctttagcccatttgcactttgattttagccacacacttcgttcttcttcaaatgcaagttgctgccactcttttttgatagccttcctttcgtccattaaagattgattccaatcatcagaggcctccagacgatccagaatcatcaatcttcgttccatggcgatcttagcctcgtgtttgaggccatacgtttctttgctccacttctgaatgtttcctcttactgttcttaatttgctcatgaatttcgtaccagcccaccctaacccgactgcctctttccaccagttacggaaattattggggaacaatttatgttccagccactggttatcaaatcggaaagggctaggaccccatctaggcgggtttgagtctagaataataggactgtgatccgagacaatcctcaccaacatttcttgtctcacgtacgggaaaacgttactccaattgctagtaaaaaggaaacggtccaatctacaacaaataggtttgtctcggaagtttgaccaagtgaaacacccattatttaattttggatcaattaacttcatttcccgcactaactgatcgaacgtcttcatactcttagtccaagaagagctatttagtttttcttgtaccgatctgactacgttgaaatccccgcctaaacaccatgaatctccacaaattgcgctaagaccagccaactcatcccagaaatcatgtcttgttttatacgagcacggtccatatatcccagaaaaccaccacgggcttctaccttctgcttctactaatactgagatagagaactcgcccaccagggagtccagcacattgatacttctggtatcccaagctaacaacgtccctcccgaacttccaatggctggaaacaagatccaagctttaaatcgggatcgccaaatgctaccaatgaagttcctatctacagttgctcttttcacttcctgtaatattattaaatccgggttaactttgttgatagatgccttaattgcttttctttttcccttgtctccgctgcctcttacattccacgatagg

SEQ ID NO: 50576 - DNA, 641 bp, Cannabis sativa
atgtttttgatttttttttttcacttttctaattttaaaaacaaaaaattaattaaaaaaatattaccaaatgccacctaatgtttttttttttaatttataattacattgaattttgtttgttattgtatatttggttatggtaatatttcaccgcaactgacattaataaaggagattttggtgtgtttggttgtttttatgaaaatttttattaggaaaataattttataaaattttttattaacaaaataattttttatggtcacaaaaacgattatgaattaaattgtgcgactataaataattattatcgcaaaatcatcataaatttattttgtgggagtacatagagtaaaaattaagtgatattgcaaattttaatattttaaatggtttagtttgacaaatttcttgtttggttgtcgagaaaaaagtaaagagcgaaaattgaaggataaattctccccttctttgtgcaatctctggttatccaaattttgtcttcatcagtacgttcattctatgaaaatttctaaattttaagagattttctaatttcctttttgctcagcaatttctcaatatccaaatagtaccaataaatttaacccctttactttttttaccctttacaacta

SEQ ID NO: 50577 - DNA, 665 bp, Cannabis sativa
  modified_base (496)..(508): a, c, t, g, unknown or other
  modified_base (612)..(618): a, c, t, g, unknown or other
tgtgtggcatgtccaatttgtgtgttttggttttgattttgagctatgtgttgtgctcaatttgaataccaatgttatatgggtttggtgttgattaaagatttgtttttgtgcatggttttgaatgagttttggtgtaaatttggttaaattttgaaagtataaaaaaatatgattttgtgtggtttcaagggctgtcattgtggccacggtttggctcgccgcggcgagctccaccagattgtggcctccgtagcgagggctttggtcgccacggcgagggccttattttcccagttttttgttttctcgtttttgccataacttttgactcagaattctgttttggacgttcttcatatcattagaaagctcatttcgggttctatgtgttaatctgtagttgaagtttaaattatttatttatgagaaaatgaatttgggattgttggaattatattttaccaggacctggatttactaacaagtatgtttnnnnnnnnnnnnntatgaatttctaaaacaatgaaacttaaacatatataaagtttgagaaactttacattggttccatgaaaatataatgacttcttccacttagatctctaaccnnnnnnnctttctgtcgcagagtattatcatagatctgaacttggatctctttc

SEQ ID NO: 50578 - DNA, 834 bp, Cannabis sativa
gaagtaacttcaatggaattctaaaacacgactcagaaatttggaatagattctattctacacttgtactctgaagagacaaaggtaatgattagtttaggaagcctgatctaataacatctctctctacactgatttgactagaaaaaagcattaaaaaaaatggagaaaaaactccttaaaattctttagtcttgtggggctaaggattgttagaaaactgatagaaataagctcaccaaggggctgcactaacaagcccagaacgatcggtacggcaactaaattgagtatttggagatctgttatcatatgcaccagcaatagtcaatatttctgcatatgaccatacaattgagactgacaagaggacagcaaatcgatcaaaaaccattcttttggattttgtaaagtggggaagatactgcaattcaattggttaaagaaaaacattaggcgtagtcaataaacacaagcagctttatatatatatataagatatcttcaaacaaagtaaaaatgaagtaagctcattttcacacattatgtattccccccacaaatctttgtaatatgcatatagaacacaaggttaaaaagtgaatttcagtaggcatcattgtacatcatgcccaaacagatgaagtaaagctcgtgaaataacaattccagagtcccctttaactccaagaagatgactggaatagaaataatgcaataactaaaagaatggagataagaaaaatgacctgagatagaacaaccactattatcaatgctgggagtccaacctcaatacatcttgctagctacaagtaccaagcaaataaaatt

SEQ ID NO: 50579 - DNA, 679 bp, Cannabis sativa
ctctcattgcttatctcactcatactcaaaacttattattaattttacgagcatatatataggtgatattctacgattggttaacaacattttataaaaactattttcttaatttcttttattattttttttaataattaaacatatatttggctcaatttgaatgtataaatatctacattttcaagtgctgatctatatgtatacgtatagttttatatgcaagtgctcatatataaaaatagaatatattgtgttaatgggaataaaaaaagtattgtgctttaatcatcattcattggtttcctcttcattttaaattattattttatacttaattagtactcctcctaatggctctaaatttctttcattgtaatacatgcatgcatgtgcactgagtgcaagtggcaacactttgataaattattaggacttgtgatatttatattatttgacccatcatataggtttaaacattattggaatgtatataatgtagggttttgaatggttcatatataattaacaattgtataattgattaaataataaaaagtaataatgtaatatacatatcactactaaaaaaaatctttgcattcatatgttaattactgaaagagtttgttgctaaaagaaaattgtttagtcacgtttttttttttttttttctttt

SEQ ID NO: 50580 - DNA, 1220 bp, Cannabis sativa
tggaggcttgaagcggggacgttacaccatgtatatacatttttacacaccagcaatacaaacctggatcgggatcggggtctagggccatgtgcaggtccaggtctaggtcagggtaggagttagtgtagtggttgtgtacacatgtatatacctggccaccggacccagacttagacggagacctcggacccaaacatggaccccaaacctgaatctaaacctgggcccgaacctcaacccctaccccgaccctgacctaaacctggacttggacatggccctagacctcgaaccctactcaaaacccagactcgtccctgatctgaactcacacttcaactcgaagcctagatctagaccctaacctgaaccctgactcggagcccgaccctaacccttgtaagggtttatgtcctaaaagtaagtatttaatggataatatattattgaatatatgaaataaaattataagataaatgaatatgttaattatattagtataattaataaatatatgaaaattccatattcatatacaaaaggaggtatgatcatgtaaggtcgtacaagagaatgaagatcatacaataagaataaaataagtcggtaatgtattaaagtatagaatttttaatatagaattaccaagtaaggtttttaatgtaccatactatattgcatgtgatattgatttggatcatatatgtggatagacatgtagtaaaggtaatatatataatttgattatacatgattggattgatataaaataacatatttcatcaacatgccatttataatgaaagagttattcatatcacaacaatgatcattagtaaatcagtctgaatcctgactatacatgcactcatatttgtattcaatgatttctttgattcactcgttaaagtttctcagacaagatgattcttataactttatctttaggagcttaataacatgagcggctgggaacatattatacaataatggaatctaaacttttcaagaagatcgaatatcaactcccttatagtgttaattcaaggagtgctaagtgttgtatccaaatatataattggattatagatcaaaagttcacattgaattaatggtacttaatgacatcaagaaataattagaagggtaaaatgataattttgaccaactctaattatgaactaataattggtgggcaaactacttatattgattat

SEQ ID NO: 50581 - DNA, 1003 bp, Cannabis sativa
aacatagattggacttgaatgtgatgtcttgcgtttttgttcataattaacaggcagtcgatctataccagccaacaaatgtattgtatgttttacatatatacaatactatttaggatatataatttacggtaaaactatctaactctagtaattggtacgctacactcttcaaactaattttggaaggcaaaatctgtcaaactttgggtttttaaggttacgtgagttaattaggagctgttaaatgtcaagatgaactactacatctacacgtgtcatattttatgggttttttttttacactttaaaataattttttttttgttgttgtatttttgcggaattttatatagaaattcattgcaactagcgctacaacctaaatcgtaacaaaatatcgtatagaaacccctattgcaattagcgctgcaaccattttagaaacttaaaccgtaaatttgaaaaaaaaaaaaaaacaatatatagggcaattctcctttattaatctacatcattttatttcttttaaatattataaaaattattgttaaggagactatttaaatttcagagttttaattatttttataatctttaaaataattaaaattatgttgacccactacaagaaatattacttttgttggtgaaattgaccaaatgcgccggcaaaagttgccggcataaagtggcttacctaagaatgacatttttcatccaacgtttttagcagcgtagtgtattgcaccgataaaatgacatataccggcgcaaatcatcaattggaccgacaaaagtggtgaaatgaaccacctcatggcgcgaacaattcccaatggttcatgaaccttttgtcggcacaattatgggctagcaaaaggtccaaaatattttgggaggagttttactgtgtaagtaaatgtctacgaggaaaacttttgttgtcgcatatttgcgccggcaaaagtctacagaaaaaaaatattttggcatttagggg

SEQ ID NO: 50582 - DNA, 1357 bp, Cannabis sativa
ttgaaagtgaaagtcgccaaaaactggtggaatgctctcgaaaccaattcacttgagtgagacagaggagagtggaatttcaaatcacgcaaaagaaaattcaatgacaagtccaaaaaggtaaatctttttattaatctattatttcttattaattgattttttagatataataaaggaatgggtgataagataattttattttataaataggaacatgcaatttaaaggataaaagtaatcctggtacagacactctacatctaaacttggaagaaatggtatgaaataatattaatttgtgtattaattaataatttataaatttattttagtaattttaattatgtaacttatttagttatatttgtgcttatgttaactatttttatttttgtaccaacttaggcaagataatagggaatatatttttcccaatgatgatgaatgtataaatggaacggtaaatattttatgtataattttattaattttaataaatttttattatataaaagttaacatgtatatcttttgaggaagaaaataacgtattaagtatagttttacacaatactcacaatgtataagctttcagtcgtacatgaaaaatggtatacatttttatatatatcttattatatataataaataatagtatgatgaattttatatatctgttctaaaatttctctttcatcacaggtattgaattatttatgtatattgacaaaatactatctttaaatagaatgcaagaatgattaggaaggacttctctatcactacatgatacttatctcttatcatgtatttatcttttgataattttattgttattttgaatgaatttaaattggtaaatgaatgtatgaatgttattttgactcctaattttttttgttttgactcctattttattcaatatataaatatatatattgtgctcattatttagagtcgccattatttatttttaacaaaaataattcagctacaaataaataattagtgtattaatttcattaaaatggcataattgtaataagatagtaagattatggttaaataataggcacaaacaaatcaatctaaaaatttaacatttgtcattcaattatggggagagtgcaaaagagagtctctttagcactcctctttttataattgtacaaataggacaatgaactgattttttttgtcaaaataaaactaaataataatttgatttagatatattatgacaatatgaaaatatttctatttaaggaaataaaataaataattgattttgtgataaatgaatattttatgttcattgaatctggacaaaattaattacgtaatattctatata

SEQ ID NO: 50583 - DNA, 1574 bp, Cannabis sativa
aaaaagtttggccggtttgggcaggttaacccgaccaaactgcctaaaccgttggtcggtttacaatttttttttaaattgggcgggttgcacattaattttagcaacccaaaatttagattgggctagaaaatatataggataaaccgcccaaactgaccgatgtacaaccctacttttttgacccgtctcgcttgaaaggccattactccgtctatccctgctataaattccaataaacacttagctattagaaccattcctcatccaattccactcaccattgctgaatcttcctctaaacaatccttggttactcttactagggagattttacctgagtttccttctccttttccttcttactatcattctcgaattccctccattgatgaagggattttagctaatgccacggtgggacttaacactaaccataaccttttttctaagatcaatttacctcccatagctaatgatgccacatatccccctactgattttctcctcaagaatccgactactcaaatggataatgcttatactgttaagagttgtgatgttattattacttctacagaggctaaaggcaaaactatcattacatgtgaagatgatcaagactatgttctgcataacaaggctttcaaaagataagtgaatactgataatcttagaagcatcttgaaaaggtgtcgcagcaacaagcaacaatcttcatctactgattgttctatatcttaggaagtttctaattttcttatggattctactgagttaatgccatcttctctaacgggtgttgttgatcagtaatcccgctcacaaccatgaatattttaagctagaatgcaccgggtttggagaattcgagtgcattcggttgtctctgtttgcttgttcgtgagcaaaatcctcaacttctgttccttatggaaactaaagctcctgctggtgctcttgttaggttcaaacagtctttacattttagtaacagtttaaaagtttctcgtgttggtttaaaaggagggttatgttgttatgaaaagacaatgtccatgtgtctttactttcaatgaatacaaatcattttgattgttatgtgtcttttgaagagggccctcgttggcacttctcggttgtttatggctttccaaaattcaataataagaaacatacatgggttttgattaattgcctagctgatgtttcttcccttaatccttagatgttaattggtgacttgaatgaaatttgttcacatacacacaagaatggaggacctcttcaacatgataatcaaatacttgcattccgaacaacattggacagatgccatttaactgaactttcttgtattgaggataagtttactttggcaaaaaatgagaaattaatttattatatttgattattttactaatttttttaaataaatatttactaagttaatttctaaattaaaaatcattttgcatttattttgcatctcaatccttttctttatgggataattacataaaacactgtttttgtaaaaaaattacatttttacgtttaatgttttttttttt

SEQ ID NO: 50584 - DNA, 640 bp, Cannabis sativa
agtaataaatatttatattcacagtgataattttgtaatttattaataatttagtcctctagtcatatttcatacaaatacttctggaagcatcattctacttctttctcagtgaccatcttgcattgctcctcatctcaccaagttttcttcaaatagaacatgttattctttttttattgccacatttattatcagattttattggagcttcaaccaagaagggatttgtggttcaaccatgttataaagagtttcttagaatacatcaacaacaagacaagaccacatatttttatttttcaataaatccaaggagagtgaattcttaaagggtctcaaggatgtgaattgaagaacccatatttatgtagtgggaaagcatgacctattagaagcagaaaccaaaatgccttgaaaccagctgaagcactaatgagaagctaactagaaagaagcattatttagaagctagagaagggcagcttatatatatttatataagatgacaagaacaactaggctgatcggtcattcagtatgaagaaagaagaaaaaaacacatgcagctactatatgacaaatctctaagctacataatacttcacatcattaccaaattgagttttataagcatttt

SEQ ID NO: 50585 - DNA, 4031 bp, Cannabis sativa
tatatatatggacacatgtgtgtatatatcacattccttaggcagcaatgaaagttaggtgggtacttcctttgtctcattgactgacattaataggtttataattaatacaattatctacccaaattgcttcctacactttcactaaattattaattgaactgttgtacacgtacgtgtaattaataagtctctcagaatataggaccctcctcatcagttccttaataaaaaatatacataactttatagtcggcaactacaatatgactaaagcctcatatattacattttgttacaattaaaaaagctttgtaaataaaataattgttacatccaatgatgataagacaatacttttttaaactgtgggtcatgttttaatcatatattgaaaaataattaatcatcattattagtgtagtagtttgcatacttaatttgtgcatcatcaactcaaaaaatatttagttcatatatataacttattatgctcatatatatttttagtggcattgtcactaaaatcgttcaaattttagtcacatttttaaggattatatatatatcttgattagtttttgtggacacattattataattaatgatgattctttaaatattagtatggaagaaagtaagcatgtatatatatgataagatatatgtatggaccatttttgttttattatttatttaaataattacctacgagtttagaacattccaaggagagagcttagataactaagttatactaataatatactttgcaaaaaaaaaaaaaaaaagttatactgataatatgccattaaaattgtcgttttctttttctttttctgtaatgatatatatgttattgtcatttgaacattggtcttctattttacttttcaatattaaataaacttattagttattatccaaatatggcatgacatataaatggttagcaatttttagaactattaaagtacaaaaataaatgacactaatattaaattacacaatgaatgtgctagtcactgtgaaaattaaacattttctctaataattataataataattgtgtgttatatactagaccattatttccaatggagggataaatttgtgtgctaaaattagtttaaaaaatgagtaaattttatatttagtttaaattttataattatattaataataaaataaattttgttttaatagaaagtagtaaaaaagttaacaaattaaaaacatttaatttttaattaaaagtgtataaaaactatattaaatatataaataataatataaaaaaagttatgggtgtttttacgtacgatgcacacccttaaaaaagaataccaatgcactttttatctgttttgataataaaaaaaatgaatctaattttttttcatggtcgtgtacgttataattatttaagatatcttacaaaattttaaataatttacaatatagaaaatagtgttcaaacagtctatttcacacgcgtataaaataaaaaagtcacgcgtgtaacaaactgtgtttgaaccctattttcagtatattaaatttctctgaatgtcttaaaattttacaaaatattttaaaaaactacaacgtacacgattataaaaataattaaactaaaaaattgtctcagatgttgaaatagataaaagtgcatcagtaaataatttttaaaagagtgcattataaattttttcaaaatttattagtgatattaataaatagaaagagaataaataaaaaaataatatttattacaatatataactttgttcatactatattattgtgccactttacaaatttaattttatgaacatatgtaaaaatgagcattactattaagtattattagtgtctagcacttttacattgcgattgactagcgatactttctaaaagttattatattaaatcatataaaacctaatacttaattgaaccaataacgatattaacacataagaagatgctagaccccactgatgccctttaacatttctcataaacaaatatatatacaccaccatatttatagctactacattggagaaaatgttagccttttgacttattaattttttggtttattaatattaagagtttaattaaataactgcaagtatagaaatagtaataaagagagcatggggctccatgaaaaaacaatatatggaggctataatagctagctagcgacgtttgcacagaaataactgcttataataaaataaatatatatatataatatatataaagatgcagctcattttgtacccactgttcattgacaatgaaatttaattctggaaacaaagatattaattcccaaacttatttcactcaggttgtttcccacttcattgacaacagtcaaaataaaataaaataaaataaaagatatcacttattgatatccaatttaatatatattctaatttaataacctaataaaatggctatagttgaacaatattaatagacaaaccatgcatattaagagtaattaattaaagaaaaaaaaaaaggttgtactatttccatctccttcccttcaaacggccacctgtaaagaaaaatatctatattattatcagttttaatgttatttcagttaaaatgcatttataaaattaagagttgtgcttactcgtttccttatgttggtttccagatagagaagactgttgtaaaaatccaaaggaatcttggaatgcaggtctttcctgtaataaacaaattaaaagaaatcatcaaattaaataattattacaaaacaagaactgaaaatgttttaacaaggtataacattctttgtctcaaattagaaaatatcaaataataattaattaattaattaattatacctcttcaaaatgagtagctgagaacccttgtgaataatccagtacactctccattgacccagtttgattgttggtctgcccaggtaagtcctcctgattagataaattatatttaggtcaataaatacaataaatatttttaaaatgaaaaataaaaatggctttttatatatatatatatacttacgatattggagaagttgaagagaggagagctagcagtgtcatctaagaaagcatctttagtaccacatgattccctcaattttcttcctccattgattttgtgagtactaccccttttaccactactactattgtgagtaccactactattgtttataaaaaaacatggtttatcttcataattattagtattaatatttgagtaatctacttgttgatcttgatgatgatgttggaaatagtgtgaaggcccagaagaagcatccgaaaccattgaaaggtcttcttcttcttcttcttcttcttcttcattcacttgttcgattccatctttgtctttaactttattatacccaaaattactacttttccttacgaacccacttccatttctatttgaaagaaaagattgttctaagtatagagtccaaccagactcacagccgctactacattgatctgaatccataacattcaaaaataagattttttttctttttctttctctctttcactactaccccttatataataatatttcaagataagagaaaataaatgaaaagtaaccaaaacctaaatgatataatttcccttcttgtctccaatagagctctcctttttatcaagtaggaaatggaaggttgtaaatattgatgtggaggggattttttaatgttttcacctgttataagtaattgtattaagataggtaaagagagttcaatttaatggtccaagtatagtactaagtagggtaaaatatattgtaggtaaattatatgatatattaattataagaaaaagggaaggaagtttgaatcggtggatagtgatgaaattgtaggtaaattgattttgtcgtgacttatactactcttctgtttttggggtgactgtatatttatatataatatatataatgaaaaatataattataatataatgccagttgggaat

SEQ ID NO: 50586 - DNA, 1539 bp, Cannabis sativa
taaaacggtctgccgttttttatatagaaacacactaaatctcatttcttcctcaaaataactccaaactcaaaaataatctccagagcacttaattagggcctaataaacataactcaagcattaaaagcagctataacacagaataacaaaaattaccattgttgaaccttgaacttaaacttgctcaataattcaactagtactcgaattcaacctaagcaagcttaaaacaaaccaaaaccaactcagaaaataacacaagttaaccccaggttcggacaaaaatctcttcttactcttacatgcttaaacttaaagaaaaatcttcaaaacccaaatagaacggtgttaaagatctacctctagtttgaactacttcaaaaccctgaattgaagctcaaatccacaaaaattgaagaagaaatcacaggctcttgctggttcttttggtcgaataagagagatactaagggattggtttgttcttttggattttgattaacttagaaatgatgtgaaatcatataattgattaattctaacataataataatcagctatggagttatctacattctcataaaaggaaaaacttacctcttggacaaaaagactaatttgccctttacttcaagtttaaacagcattaaagcttaagagtaaaataatcaaataccacaacttcatctaatcctgatatttctaatatcaaataaatataccccattaaaagaaaggttctaaatcattatcgtgtgactctaatgtctaagtcgtcgcatttctatcattaccgagcaaaaatcacaaaaataataaattacatacataacataaataatacatttacaatttaacaaaatctccggaatttaaaaagtataaccctaatgcctatttcttgaaaatagacccacaaaataaaataatcatatatagccatataatataattaattagtgctaattgtcttactaatttatattctaagcatgtagtcattacaatagctatattttccttctcgggagaaacaccgatgggaaaatacatgtcttttatagatttcctcgtaagccatcttggtccagttagtttacaaatcttccaagttgatcactaggatccttgcaagataccttggtcctgattataaaccttccaagatgatcacaggagcaagtctttggtaaatcttgcctctcctcagaaacaataggtataagtgtaaacattctcaactaagagtatcatatgagatgaccttctcttaaggaacaactttccttcttttacccaaggttgttggatatactttaacttattaggggtcactttagctgtggtgatatttcaccctactacgtctttcgagatgtgcatgttgaatccgaaccttttaatgcgcgagtcaaatggttagttttgttaattgcaagatttgataagcgtatcatacaactgcacccatttattaattgctctaaatactgtataagtataacgattcattgtaattattcataaaaattaaga

SEQ ID NO: 50587 - DNA, 712 bp, Cannabis sativa
aagtaataaatacctccttaatttattccttttaatagtactaaggagcctttgcaaatatttgaacatcttgagcttcccttgaactcataccttgcatcattaaacatgcttaaggaaatcaaatttgtagccaagtttagaacatatctaatatctttgatttctgtaagtgttccatcatccaatttgaacactacattttcaattcctttgattgagcatgtttaacacttcccaaacaccaccttgtcaatcttttggcttctctaatctttgatccaactcttgttgatggtcatatgaaagttgcaccccgagtccatgatccattcacttttcttttctgccgaagttagagcttcatgcaattctactacaaacacatctatatcttcacattgttcactgtttgttgaattcttctggtcttgatcattctaatcactcaatcttgaatctcttagtttctttatcaattcataattgtatttccttaagtggcctatctttccacaatggtaacacttactgattagttcttggacctcataattgcgattgacctctttccttaacactttgacttcttcctttccttccatgtgagtgatttgcatttgagtttttttctttgtattgatgtcttcccgagagtagtatgcctcataattgttctttcaagccatgcctatttgtttcaaagataact

SEQ ID NO: 50588 - DNA, 1212 bp, Cannabis sativa
tcttccaggttgagaggtcttgctaggggaccttcctatgagccttcaggtcgactgagggctaaggtggcctagaccacccgtaatggagatgctactagattatctctaccttctcctccactaaggcctacaccagttcatcagccagtaattgatgatctttcgactaagagggaacaaccttcaggctaggaagctctaaagcccagtcgaggagtaggctctgctacagggcagagagctatggaagtggcttgtagacacctagagagagtgtttccttctatggatgaggagcttcaggagcaaactgatggtgagccaaacaaactctactccactggcctttgggatctatctgtggtaagttgtacatttaactttgctcatctttctggcacttttgcatgttggtcgcccaaggaattagttgcatagggctagctggctagggatgtatctttgaggggatggccggccatagcagcctcaaagagaggctggccaaccagtgttgtgttttgatactgactttgtcttgttttgctttcagaccttgatgaagttgagttcttcatgtgatagctcctaggggttctcaaatgctctttgggagcatatgaagaccatggaggcctcccccctagcaaatgattagaccatatctgagatggaggctcgtatcgtggagaactagagcatgatttttggcttggagaccatgcttcgaactaggaacaaggagaacaccacacaagctgccactatttccaggctagaggctaaactcatggggaatgaggagaaattgagagtaactcttgatggccagcatgccataaaggacgagtatgttggcttgtcttcataacttatctatgagtttaagctacgtaactccaaagttcatctatcatacatgggcaatgaggctttcctaaagagcacattggcttgaggaaaagtgttattcgagagttggctaggagtggaccagatcgccgcttatctagaagggtcttcctcggggaatcatgatgaggggatggccggcccacctgctgaggaggtggccgaccaggactttgaccattaggccggccagcctgttgttgcgatattttgcacacgcaagtgtacgtatcgtttcaagtagtaaaactcacgaggagtgaggtcgatcccacagggagtatagttaagtacgtt

SEQ ID NO: 50589 - DNA, 858 bp, Cannabis sativa
accccatcggactatcaattttttttttttttttttatgtttttgcactaaaaaaaagtatggaaaatttgaaaggggtatttttgagtattagctattagaaataaaatattaggtatatgtaagtatagaaaatcaaatttcccaaataaaaaagccccaaaagtaaagtaaactattacaacaaatcagtgtgaggtagatctctatttaaaatgtcctgaatttaaactaatgagtgagaagaataagacaaaaaaacaacaaccaaactttgatttgattttagtagtggctaaggacaatatattgaaaccaaatctaaactaatcagtgagaaggataagaaaaaaaaaagaactaaaccttaatttgattttagtagtggttaaggacaatttattgagccaaaatctaaactaacaagtgagaagaagaagaacgaaaaaaaaaaaaaaaacaaaccttaaagattttagtagtggcgaaagaaactgtgagatattagagtatgagataggataaacatgacaatgagattttactaaaaagaaaatgatacaattagaattttaaaaaggatacagttagaattttaatgaaaggccatactattttcctaggacatatccgctcttagtaaaatgtatagatatatgttctattaaagtatttttacatttaatattaaaatatttttaatagggtaaatactattttgaactttgtgttttgtaaaaaatactgatgtttaccctctattttgttaaatgacaaaatggaccatgtattttctaaaatggtaaaaataggaccctgaacttaatttttgacatttttttaatataacaaacttga

SEQ ID NO: 50590 - DNA, 1229 bp, Cannabis sativa
atgaaatataaaatcctattttccttgttcagatgctgcaacaaacaggcttagattccatgtttatattaactagtgaattgagaacataatatattaatgactattttccaaagagggatttgatccaccaaatgcccttggtgtccttggggccttcttctccctctggtggaggatcactctgtggagtcttgtggagtttggtcacatcatacccctcttctttggctttctcaacaagttgattgtatatctcatcatctatatgtgtcctcctggccaatatctacaaaatcataattccccaaaacaacaaattgtgacataagttatgactcaagaaaatataactacaaaataaataaatcccaataacaacaaaaaatgatacaagtttagactaatgaatacatacagaactaaagcaaatcagtatcacaaacgggtgtttatagcttaatttttaaaccatgggaatttcatgacaattttataccctccttctgctaataaaatcaccctatattccactattcatccaaaaattcaaaagcaagtcctattaacaataatttatttcgaccctaaagagacaaattcatatatattctttcatgaaaaagaagagaactttaaattgaaagtaagcatacccaaaggtacttcctggtgggctgtccaacgagagcaacttggtaatcttcatcaataaacaaaacccagtaatcaccagtgacagggatgatgggtaagaatggagggacatagaatttcactttaagctttgcctcatcactatttgggttagccttataagcagtcccctctatggaatctcttttaccatcactccaagtctcatttaagacatggactgtcccatcttcattgagagtgtaggtagcccttgtgttaaccccatttctgggctgaaaaaatgatgggaatgaagctatctcataccaccttcccatgtacctctttatgtccagaccctttactacttccatttctttgttcgccatttgagggggtttttgaggctttgagagaatgagagaagagagtttttaatgttatattcatttcgtttggtcttttattgataagaaaatggagatgggttatgccattttagggtgggcagtggacaaaattagtactattctgtaagaaattcacgtacgtggagccctcataccccaacacgtgtacatttggaagat

SEQ ID NO: 50591 - DNA, 1768 bp, Cannabis sativa
atatctgaatgaaaaattaacagtttatgaatttcaaaaaaaaaatattgccagattggaccatagctacaaaaattaaatcaaacaagattgcaatacaaactaaataaactagaaatcatatagattttctccacattgttttcttggatctcaaatttcctatcatgattcataaacttgtgtaacagaaaaattatcagaatgtgataaataaatatctcttacccacacaactcttgataccgtcgcctctaaatccaggaggacactgacacttgacctctccatcatcctgttacacagctaggaatcaaagttaaattgtttttgagagaaaaaaaccctggaaaagaagaaactgaactgagaatcacgtacagtgcaagcagaatatgcatgcccatttcgagcgtcatgccagcaaccaccattgtttaccttgcacctcccaggcccacttgctgaaagcaaagggaatatgcatcatagaatgagcattcataaacaattctaagtcctctgatattgaatgaacagaggacttgaatgaacaattcaagtcaagataataatttcaatcacataagctgcttctcaaaaacgagaaaccataatgataaataggtacagtaaccagattttaaatgtttctttcttcttgctcttttatctttttcatttagtgcccctcttaattttcccctttagaaggggcagagaggcaatttcatagcttccctatcaaaatttataccgctcattaatatatattgcaagaagctggagcagtctttaccttcacaggtggtataaccatctcctttaaacttcaacccatcaaccaggggacactcacataccctcccacgaaacgtgtcctgattatgaaagataacaatcagaaaagaagaaaaagacaactagacacctgcaagaagagaaaggttcaaactctgccttgcaggcagtgagattggctgatttatcatgccagcaaccaccattgttatccaagcactcattcgtctccacatctgccacaaatcaaacaaccaaaccacaataaatgggcctcagtatgaaaaagtaacacaaaggacacataagaaccacttcataataacattacaaataatatataccaggactcaaacaaacagctggctcagttgtttcctcgaaaccggaacagatagccttcaaaacagcacttttctccaactttcctgcaaacaaatacataattagaaaatgatggaagcacagagccagatattcaacagaatgaagcacaaagaccaacctctgtactgtcgattattgacaacaagagtaggtaatatggtcacgtcacctcttgatcctttcccaacctacatggcgctcccatcattagacatacataacatttattatcaaccaagcaattgcaaaaggtggctaaattacgaaatcattccagcaaaaggaaaattcaaataaataactcgaaataaaaataaaaaacaaagtgtagtaagtataaaattgatagatagatagatcgatagatagatacctgagcatcttgctcttctttcagaacacggttttctgagtctgcagaagggtctcccatgcactggtcaacacttttaacatccagtcctatcatatattacatgaacattcaaattccatccaacagctatgccagaaattagaaacgattaaatggaatggaaatttatataccaagattttgaatgacagcaacagcacaatc

SEQ ID NO: 50592 - DNA, 1287 bp, Cannabis sativa
tatgagttttcattattttgctgagggagccctttgccacttagtctttctcgacttcttcaattttgtaacatttccatggaaggagtaccgactcttagagcagtctcgacctcttctcagctactcattttgtttaagggagctttttgacactttggcttattcaacctcttttatggtataacctttattagctctgaaagcaatctcttcatctgctgagtgtacattttttacttattcttagtcgattattagatgaattagtattaatttttttaaagttttacatagatttgatgtgttttctctaagtgtgtagatatttgtgcttaagagataattttgtgatggactgaaacatttgagcaaatttttgacaatgtttttataattttcttgaagaacttatgaaacccaaaatgatagagctcattcttagcttttcaaaatatgctaaaacatctcatttagagtctgaacgcgaaagttatgcatgatttactgagcaaggtcgaagcagtaaaagagcgatgaaaaaatggtatgtggtgctatagcaccaaaagtgtggcgctatagcgccgctcctaaaaaaaaggataatttaagcacgtggtgatatctggaagtcatgcattgcgctatatagcgccgtacgtgtatttttgaatttaaatcctaattctaaataaattctttctattttgttgggcctatataaagaatgacgtaagtcgacttttggacgattggagagatacaaactagaaattttgagattagaaaacatattgaagagcaagagagaagagattctaagaaatcatcatcaactatcatcattagagtcttttttttcttcttcctctttattcttttatttagttatttaattatgaacatgattattgtggttattatgtttgtgattatgaactaaacaatttttctagtgtattgatgaaactattttagattatgaattaaatttttttagattattctcatatttgttcttgctatttgtttatataattttgtggtaattatcattttattaatgcttgattaccattaattagtatagagattttagatttatacttgaaagaggtaatctaaatttgacatagaattgcatgacatatgaaaagtgtgagatttaaagattacactaattctatgagtttcatttaaaaagaatcatattgctttattattgattaattgattaacattgaatagaaatatcttgttagttaattaagttaattctatcat

SEQ ID NO: 50593 - DNA, 604 bp, Cannabis sativa
tttttaaaaaaaaaaaatatgatttaatgcttagttttgtaggaaaaaaaaaattccaaacccaatctacatagtgggcatccatggaagcccattaagattctttttttttaccctcaataaccagtccctcttctcacaccaaagaaatagattaatactatttacacaaatacaaaatttaaatttgatatttaccatttgtttctccacttgataaactcacacttcatcacccaaaaaaaataaaggggattttttttctcttgatttaatcataaaatcctttttggcttcaacatatttttgaacataataagtcaataaaaaaatatgctaccatttagtgacaattttttagtcacaatatagatattttgtgattaaattttttgatattatatatggactaacataattaagtattactcacacaatattaatattaacatttaaagaaaattatcgatagtgcatagtattatcatcaattaaataggatagacataacattaaggggtaagttaaaaaatactacttttattaattaattgatcaaatttacctctaattttatatttgattgaaacatacctctttttat

SEQ ID NO: 50594 - DNA, 1295 bp, Cannabis sativa
ttgtgagcacaaacattacaattacgaagaattcagacaaaattacaatccaataattgatcaacaacaattttacaattttgggtatagtttgctataacccatctattctgtttaccattaagagcttgaacaacattcaaagaatcacattccacaatcacacgatcatatttataagcaatatcagtttctaaacctaaaacacaagcaacctcccctacgataggatccaaaaagaaaaatcttctagtcttgacccaaattgttttcacataataaattttagctaccacaacaatcactatactcactgctacatcacaattgatcttgatatagtagtcacaattattggctaaagtacttaatattatcattcaaactcttaaatacttaaaaataatttttctagtaaaaatacataaatcggtatgattcaaacacttaaatacctattttttctcataataaaaaatacctattgttacgatcaaaacacttaaatctaaaatttttattttacgtaaaagaattacctaacatcaataatttggcaatttgtaaagtcagtatatagttaattttgtaaaatcaatatggtctaattaaaacacgtattgtaggcatctttaacaatgtagatgagaacagataaaccctaatatttacaactctcaattttgatattttctttttagttattaaagttttattgtctaattttcttaaggtatctttgcatgcctttaagatagataataaatttttataaatggaagaaatcgtccactatttacgtaacgttgttacttttattattttaacatctattagttaccctctaaaaaaatttaagtgtaacaatttaagtattttaagtgtcaatatccttcaatgacactattatttttacaaaacaatattataaaatagtcttatcatgtatctccaattaagcctaatcaagtttaggttgcaaagattggtttagaactagtttaactctttaaaccactattaaggaagtggtctaaggttaaaaagtggccctctatattcccttttctagaataataataataattattattattatcataataaaatccatgaaagtagttttaagatgattgtggaccacaaaatttaggtgtccaaatcaaacattgataaggagttaaatccagaattactaacaaattgtttgttcacgggtcattcaaaatcatcattacttaacgttaatgagtttagaaagggataagttacattgtgaaaaacaaaacaataaa

SEQ ID NO: 50595 - DNA, 2062 bp, Cannabis sativa
cttgtggtgttttgaatttaagagttgttgaggaacacgtgtttatcaggtagcaagcagttttcaatgcttcaccccagaattttttgtcaagtccagcacccttgaacatgcatctccctctttctaattgattcctattcattcttttagcaagtccattttgttgtggatttttcacagctgtcttgtgtcaatcaattcccttaagttgacaaaacctagtgaactcatctgaacagaactctaagccattattagttccgagtttctttatttttcttcctgtcttgttttcaatcagtctcttccatgtgacaaaggtattgaatgcctcattctttgtcttgagcaagaaaacccaaaccttcctagtatagtcatctactatacttattaagtaactagaacctcccaatgtttttgttctagaagccccccaaagatcagagtgaatgtagtgtagttttccttgtgtagtgtgtctccctggtgtaaatttcaacttgcagcatttaccataaacacagtcatcgcagaaatctaatttctcccccaattcgcccttgagaatcccttgtttttcaagttcactcatgcccctttcactcacatgtccaagtcttagatgccaaagcctagtgctttccatatctagccccctaacaaccatgccattctcactagtgacaatttttccttttagataatagatgccatttttaagttctcctttcatgacaactaatgagcctttcataaccttaaaagagctatctatctttatgatatatcctttttcaatcaattcaccaatgaaagtaagtttcttttcaaatctgtgacatacctaacatcttgaattaatctgacttgattatcatgaaacttgatcctcacagttccaatccctgcaactttgcatgccttattgttacctaatagcactgatccaccatcaagtttcttgaaactgtcaaatagttctcttcttggtgtcatatggaatgaacaccctaaatcaagtatccatgagtctcctgattcttagctacaaacaaccattacatcaactaactcatagccatctgtcacagcaccatcatctcttccttttttgcttttgtctctttgtagtttagccttcaataccctacattcatccttgtaatggcctttttcttgcagtagtagcactgtttctctgcctttgaattggaccttggtttgtatgattgattcgagcctttgtgatttgatttttgaaaaccacctttgttttcccatgtctctgatccgcctctaacaaatagcccttcaccataaccatttcacctttgaatttctttagagttcaaagcaaatttcacctctgtaatggtcaaagattccttaccatacaaaatggtgtccaaaaagtgctcataactttttagaaatgtactaagcagcaagattcctttatcttcatcttcaatcttaacacttatattgcagaggtccaagattatcttcttacactcatcaagatgcttccttagatccttagtttcatctattctcattgtatacagtttcttcttcagtattgactagtgacttcttcaagtaaattgaagccaatttctcccatagtctcactgcagtatcttcactcgacacctccctaagtacttcatcacctaaactcagtaatatggcactgtgtgccttgttttgaacttctttaatcttcttcttgtcttctctaagagcagcaagctcttctcgatcaatggcctttggaattccttgatgtattaggaaggctttcattttgatcctccatagaccaaagtcattggtgccattgaatttatcagcttcaaaccgtgtagaagtcattgcatatcagttcttgttcctttcttgatgttcttgattcaattctttgaggatgcctcttgattgagctctgataccattagatgtgatcaatgtttgaccatgtacctcatgcataaaccaacacaatcaattgatcaagaataatacaagttgataatgcacaaaacagattgat

SEQ ID NO: 50596 - DNA, 919 bp, Cannabis sativa
ttaaaatgtaaacagaatagtactttggggggttttcccaccaaaatatgaggttggatggttttttgcaagtaaattgatagttaaagaggttttaccgcaaattactctatttataatatacatatataggaattttcctcttaaatttttttcaattgcaaaaattctatttaaatatacaaatcgttacaaatatttctttgagaatccaattgcattctcctcattttttataacaatttacttatataactatcagttataagtataattagtataagagcttatttaataatgttaagctacttaaaattcaattattaacattaaacatataaacaatagctctaagaatatacatgtgtaatctcataatttattattgaatggctaattatataatatttcatcttgactctttaattgaatcaaactaacattatgttagtactatattaataaattatttaaagtaatgaatatataactacaaataaacattcacaacaatttttataatttaagagaaatttttataaattataaaaattctacaagtatcatactttggggaattcatcctatttatgctatatacatattggatgatatatatagttatatagtcttgcattgcaattcgtgttaagtaaattttttattttaaaatgaattgatcatatgctacgttaatttgatatctgattgattaagaggttaaaaaaacccacaatagctaattaattaattaaactaagttttgcactttaattaattaatgttatggacacgtggcagcattaaggaggggtgattagtatgggcggcacgttttaatttattttttaagtgtgtgacgttcacgatgttaactgctttcgaaactaacgcaaaaactaataggagtggtcgttgt

SEQ ID NO: 50597 - DNA, 830 bp, Cannabis sativa
ttatactaaaatattatatatttaggtgtgcataaaagttaatactacatataattttatataaaaatattgtataaaatacaattcaatataataccatacaatacaataccacagcattccaaaagagcccatttattatttaaccaagaaacgcacaactaattgttacgccaattactaagtaatacacatatatgtaattatgtatagtcaaccttgatgtgaaaataccttgaaactccaatcttatcattccaacataaattaaatctcttcataaagtacgaggcaaccatttaatttatatttattaaatatatatcaattaataatatttcttctagctcttaactggaaaaaaaaaatcgaaaccgtttgctggaaattaatattaatatttatgtatggtagactacaacaactgcgggtgtacattaatttcagattgaaaactcatcaaattaactaattaatttcatgactaaaacgataatactattatgtcactgttaccatttttcaaagccaacaggaaattttgagcaaaattacgaaactgtgacatattatatatacatatatatatatagaataacatacattatatatctacggttcaacgtggaagtttgtatatatcttccatctttaatgtataaaatatgtctatttaacaataaaatattttaagaatatatttaataataaactagttttatgaatatatatgtaaatattaatattatttattttaaattaatttaaatatataaaggtatattcaatatacaatattaacaaatttattttaataagtagtttttttt

SEQ ID NO: 50598 - DNA, 2052 bp, Cannabis sativa
gagaactctttttattcttttgttaaagagatagactatgataaccagaggatcaaagtgagcaaatcatacatgtgttgcatcttccttagcaaagattattggtggttcctcaagcttcacacgcttgagtggatatggtgcgaaagctaattcttgattttatacttgattcatataccatttttaggcactattgctggctcccgtgagatacaaccctctagaaataaccaagatgtcctcgccctcaactaggggaggttgtacacatttgttttgattctaggttgttggactggttttgtttattccccctatttcttacatactgccttacatagcctcatgaaataagtccttcgatctcgtcctttaattggtgagtttcctcaataatatccccaatgtctctgtggaactgaaaatatttgttcagatcttacttactttttgagtgcctcataggttcgggccttcaaaaagtgacccgattctcatttacgagatagatattctcacgagtttcatttagctgtataaatagtgtgcataggaacatacttatcttgtttcttttgtttcttctttatcttttgatgaatcttttaattcatctttcctttttccattcaacccattctagctcaaattatccatttttattcttacagtagtcgcagttgcagtactcgagctggttttatctcccaaacccaatttgagcattttcatctcgttctaagcttcttctttccaattgaagactaatgctctatcattgaattcattgattgttttgactaggggaacttgcagatcaacccacaatttacttctcacagttgacagatcagtggttattccagccttgagagctgttaactgaatactatcattcaagtttcttacttttgctacttttataatgaattaacctagataagcctttaactactctctcggctattgtttggtgttcgtcatcaaggttccttttagccttctgtctctcgtagcttagaactgtttcttaaattcctcggataactgttcccatgaggtaaaggagtggttggtgaatttatcaaactaactgctcactgcaccagtcagagatgttgggaataatatgcaacacaagttgctagagacattacttgcttgcattatagtgttgaagttgttcagatctgcaaccgggtcagttgttttgtcatactacgcgacatgtggattcttgaatccttaaggaaatcgagaattgattatatcaggataaaaaggttctttctcctcatcaaaataataccctaactttcctgtattccccatcttggtatcacttgaaattatcctccaaccgaatcactctcaattgaattggatccctggctagctgctcgaattgttgctgacgagctttattctaatttaaccgatcttaaagatctagaacataacagttcagatgctcccgtaagttaggctatctacagtttaagtgtccacgaagattagggttgcatcgcctttcattcctttggtcataattgctaaccgaccttattgcagagtaacattctaattgataactctgagaattcctcatgctctcttgttcatcttgataatggtgacatgtatcttccccattccatgttttcctttcacgtgcatggatcctggtcgatctactttaactatgcgcccttgaccttgacccactaggaccagtgcttgatcttatttcttggggttcctctcgcactggcatccatctttgaaagagatttgacacacgtcctcaacttaagtaggtatgcatgctatctttgtcattttagtttggtctttgtgagtgtcttggtggatgacctaacccaggtcgtctccctacacccatcgcatcatactgagtaaacccctggtctcgaggttgtgtttgcctggcatctttgttcatgcgagacgactctgggttgttgggttgcacattcccataatttgtgtttttgcgggaggttttaggattgttgggtcaagtttctc

SEQ ID NO: 50599 - DNA, 5329 bp, Cannabis sativa
aatcaaagttcttgctacataatcagtggaagcaagatgttatctagttaacattcacaagattaatcttttagaagaaaaaaatactgacatttttaatccgtatccaagcagaagcttataacaaagattgtgaataaaaataaaaacaattatatagtgaaaaggaattaatctatttaccatggatttaccaccagctcctcactttttagtaaaaaaaaattgcttaaagcatgttgctcaacatctagggtagggtatgtttggttaggagtaatcaaaatataggaatcagcataggaatggaataaaatttaatgagtaaaaaaaattgtgcattggaatgttcattctatttgtttttgaatgaagtagccattctaccgaaatgatggaaaatccattctattggaatgtcactctttgcatgggccacatcaatctcgcaacaaattgaatgtaatattaatttgacaaagcatggtacacgtcaatcaatctagcactaagttgaatacaaaataaataacgccaaaccaattcaaaataaattattctttttaaacattttaagggcaagaagttgcaaccaagacttctattacatcaacttaccagaacataggtatccttttgaggatcaaatttagcagttatctcaggtccccagcttccaaattgttgaaggggaagaacctgaaaacctggcaaagatgcctgagccctgccatatagaagtgaccgaagcagtaaagcaaatgacaaattttaaacaacaaagaaaaaccctgaagtatgtgactgataaaccacagaaatttattttaaattaaattactatgaaaaatataatgagaaaattcccagccatcaaaaatccttgaacgaaaggtaagagcatacacttcttcaggttcacgaacatcaatcaattgtgcatcttcaaggaaacttggatcttgcattttgacatggagctcttcaggaggaatttcttgaagtattgattcttcccttcataaacattttgacaaaagaataagtactgaagaaactgtaagaaattgtattcaagtaggatatccagttaggcataggctttcggcatacctctctgaaaggacttgcaacaaatgccatccaaactgtgttttacacctaacaaccttgttcaatggagcattaaaagcagcctcctcaaactcaggtacctgagatatttcactatcagtgttctgtgctctacaaatcccatttaactatcttaaatataactgttgacagcaacatctaatggcaatacatcatcatttcctagtgtttgtagaaaccaggacttacgagaatataattaatgaaagggaaaatcatgcaaggactgagctttaccaagtatcagccaaaagaccaaagaccgaatataatttgattcagtagccttgcaaaaacaaaaggtttattctcaaattaatgaaataatatttttgagttttccctataaatttcaattaccacaaaaccttgcccaagtttcccttataccaagcttatcttgactcataagtatcctttcttactcaccaaaaatccttgagatttcttacattttaaaaataaagaaaagctacccatttcaataaacaaaatcaaacagaaaaacagatattggatagtgggtgtgtttgtccaagcgtgtgcatttcaataaacattcacacacaatcttattttttttcaaaataaataattaattataatataaatatataataaagctttaagggctcaatattgtttggacaagataaaattttccatccaggttttaatatacaaaataaatttggaggtcacaatgcgccatcttcagtcacaatcactttgttgaactttttcctactacaaagcaattcccttctgaaagtaacaacttcctactaaatgtgttcatgaattggtatcagagaagacaataaaaaaaataggtttaaatttcagtattgcagtggaaagaagaaattttatactcttcaaaagtatcaaatatcaacctaataaacaaaggcaaatcacattcagagttcagactattgttatcctttagcagtctatcatataaccttctaaagtaggaaagaaaactatgtagtatacatagtttagatgagaatgtcacttatgtttcatgtaaactttcacatgcaaagaccattttaatgagcataccatttgaccctttctaacccacccaagcattcccccttctttctttgatggacataatgagaattcgacagcaagatcacttaggtcctcacctacaagtaacatatagcattataatagcatatccacataataatatgttctagaaattaaagcctcatgaaccaaacgaaaatttgatgttttcaagactatggacttgacatccattcaatctctactggacaatatttgattttgatctgcttatatttccaattttaactctcagtaaactaacctcgtacaactctctgctgaagatccaaaagaagactgagatcattttctttaacaagtaaatgctgcaccagtatttccctttcactactcgagccactttcagcactaaacgaagctgaaaaaaaaaattaaatttttgattttccaattcacaggcgatggtttagagagcacaaaaaccactaagtaaatttattttctttacaagcaaactttatcatttactcattagtcaaacaaatactgttagaaattgaaggagatggaggatgaaacttagagcactctttatgttggaaatatgcttattcccaccatctagaagcttgtagatttgtatggaattagctttcaaaatatgattaaccttatgagcaacattcacttgttgcttggtgtaaggtaatgatagcaacaagtgaatgtttttatagcttctaagtatttatcaacactttgatttttggtttgaatgttttcatagagatgaaagatgaagagaatggttgttaaacatagtccacgccgatcattggaaaaatagagaaagatgtatacagaatcctctgtactattcaatatcatagcgattacacataattacagatgaataacaatcagtagtgagggaaaacaagagacctgtaataaaataaataaaagatagaaatgaccgacccacctgctgcggctctgaaacatgaacgtgccgccatagccaagacgcggttgaagatgaaagaagattgggatgaagatgaagagggtttaagggttctggggatagatgcaaatgaagagatttggcgaagttttgaaggtgaaaaggaagtgaaaattggatggcgagagagtctggatgcgaagagagctggagtcgacaatggcggaagatgagaaacccttaacatagacattattgagtccctgatttttgaagttaagaaaacgagggagaagaaagagaagtaggatattaccacacacacacaaataaaacggaaaccgataataggataattttcacaactatttctaagatcttatttagagaaaatgtatattgttattgatttattgttatttgtatattattttgatgatattttggtgttattttcatcttattttttatgtttttataaaatagtaaaaaataaatttgaacctaaaagtataaatattttaccaaaaatagcattttatgtaatttttccaagatgatattattgcggaagagagtaaaaacagtaaaaatgtttatttgaattgaattgaaatatgtacaaggagtagaataatatatatacaacagcataagtcggttgactactacaactaacataacaacctatctgataaaataggaactaacataacagaacaactgtccaacttacttagctataggtagatataaggacagagtaaaatacagagtaagtgtacagagcaattagttatgtaatcttgttaccccctctccccctcaagatggatcatagatgttatgtatggccatcttagataaatggcagttaagagtggtggaaggaagatgttttgtaaaggcatcagctagttgtaggttgctgctaaacagggatgaggcgaatggtgggatttggcaattttttcacgaatgaaatggcagtcgagttcaatgtgtttagttcgttcgtgaaaagttgggttgttagctatgtggattgcggattggttgtcacaatagataaaggcaggtgtgggttgggcaatatgaagatcggtgtggagatattgaatccaagtcatctcacttgtggtggaggctagtgcacgatattcggcctaagcagaacttttggataccgtggcttgcttctttgtcttccatgagataaggcagtcacctatgaagatgcagaagccggtgatggatcgacgagtggtgggacaagtagcccagtctgaatcggagaagccacagagatgtagtgaagatgtagtggagtaaaaaatgccttggcccggtgatccttttaagtatcgaagtaagtgatgaagggctgtcaaatgtgtggtccgagggcgagacatgaactggctgagggtgttgacagcgaatgtaatatctggccgtgagagagtgaggtatagaagacggccaatgagttgtcgatattgagaaggattgtcaagaacttctccttcaatatcatcgaacctttgtcttggatccattggagctttagccggtttgctgctagtgtaccctgtatcatggagaagttggagggtatactttcgttgagattaaaaaaggcctgttttggctcgagcaatctcaaagccgagaaaatacttaagagaacccaaagttttgaggcgagatctggactgtagtgagtcttgtagagcatgaagtatgtgtaggttgggaccggctaagatgatatcgtcaacatagaccagaagagccacaaatgtatcattggatccttttgtgaaaagtgtgtagtccgcttgggattgagtgaatccttcatgcaagagggcgtcagtgagtttcttataccattgtcgcgatgattggcgaagcccataaatggatttatggagcttgcaaacaaggttggtccccgtgatagatgaaggaattttgaggcctggtgggatttgcatataaacctcctcttccaaatctccattcaaaaaggcgttattgatgtcgagttgtaatgtgtgccattgtttgatagtgacaatggcaagaaggagtttggatgtaaccatctttgctaccggagagaaggtgtcaaagaaatctaatccttct

SEQ ID NO: 50600 - DNA, 869 bp, Cannabis sativa
taagtcttctcctccacaccataactcctcaggtaatagttaatcattgattactcaaattagttacatatattcaacttttttttttttaatttattaatgctaatgagaattatggattgtctaacataggtattaacgtagtaaattattatatgttgataaaatagtagtaaattatacaaagtattactatagttattacattaaatatttgtgatcttatatcaaattgcattaataatgttatctcactatggcatattgtagtgataataatagttttacgacactattgcatacatatagaatattaagtaactaatagtgtcttataattagaaatccttaagaatctatgatcacctttcataagctactagtgcaattcaagatgattagagcatttttatttctaatagagtataaaaaaaggtagtatattgttatattttaacaaaaattattattctaatagtgttttaaaatatgtgttaaatttggcacatattaaaagttgtactaaatttagtataaaatatagcattatctcaaatttaatttaaatgctacttttatttattattatgctactaattattaattcatttaatttgcaaaactttacattctatatttactatattaccattatttaattaataaaagaataaaaaattataatttttgtatattctcaaaaaaatattatataatcatcatcaatataatttttttttttttttattttacatcttgtatattgaagtacaattgtaaatagtaggccaaatatagtacaaagttattttaaatgttaagtttaacaaactttttaaatcttcagatggtgttatatcccaatatat

SEQ ID NO: 50601 - DNA, 1319 bp, Cannabis sativa
gttctacacgttgggctaagtggtggccttttgttgctctggacacatgatgtggatgtaaccttactttcatatgatataagtcattttcactgctatattaaatttccgaattttactgcttttacctttatgagtttttatggcgctcccaatccaataaataaaccacactcttcgaaatcgcttcatcgacttggatccaatcttcgcctctccccttggcttatcatgggtgatttcaacgactatcttactttgtctaataaaattggtggagacatgtctcgttgcccatcaactcagtttcaatttttcgtagatacctatgctctccaccctatttgtgtcttaggcagccccttcacttagaaaaatagacaaaagcaacaaacccatacccaagagcgacttcattggggcattttcaatattgaatgggactcatctttcccaaccgctcgtctccttcatggtgatttttttggctctgaccatcgtcctctgattttaaccctccatcatcaatcttctcactccaaacccaacccccgattcaactttgataagctctggatgtcagaagcaggttttgaagtctgtctttgctctgcttgggcttcaagcaacccagttcatgagcaaaattaatcccttggacctcctcttgccaatcaaatcagggacatccaatctcaactcaaaagtgtgcaaaactctcttcagcatactaactctcaactgactcagggtaggtatcttgaaagtgagttaaatagacttttacacaaggaggaagagtacatcatcaacattcgtgtattacctgactaaagcttagagataaaaacacttgttatttccatcagatttcctcttcatgatgttatactaacaaaatctatttcctccagcaccctgatggcttcactgtcactgatattgcatctatattgatgatcattgcataatattttgctcatctatttcaaagtaaaaataccgacagtgacatcatcaacaacgtcttctctggcatcacagagcacattactgaggcaaaaactgggattttataaacctctttctcagcgagtgagataaagagagtaactttccaacttgcaagtgataaagcccccgaactagatggcttaatggatccttttttttaaaaaaaaaaaaactggcacttgttgggtgaggatgtcatctgagcagctcaaagctttttgaatggggacactgatatagcctcaataaataacaccgtcatagtccttatccctagaaaagcacatccccagcaacccagtgac

SEQ ID NO: 50602 - DNA, 1203 bp, Cannabis sativa
taattgtcaggtgattattagattactagttaattatttgaattatctacttacttgaatgagctacctattagaaaaacatcataggttttagatactgctgctatgtatatgtacgtatggaaattcttattagcattgatttttgatttggaagattctaaaagttgaaaagttgtgatcgttggtgtattcgatatgcaccctagccgatctggtagagttaaccgcaagctttccgggctcggggttggcagtgagggtgtgaatcctccattaccacaaaactgggaacataagtatgccacaatgcaagagactatccgataacagggtgattagattagagagctgagagagcagcaagcttagcctgttcttaatcctaatcctgatcctccagcacctctagtagtgccacaggatgtggaaaatcatctagagtcgttgtatgagcagttcaagaagcagaatttgctggtgttcaaaggtggtgcggatccacttaaggcggaggaatggatgagcatgataacatccattttgacttcatgagagttgagagtaatgatcgggttcgatatgctatctacatgttgtgtgagggtgctcgcatttggtgggaaatcgtatctaagggtcatgatctgaataacatgagttgggatgccttccgaaccttgttttataaaaaatactattacgaatccatctgagttgctaaggtggaagagtgactacggttaacctaaggtagtatgaaaatgacagaatatgccactcaattggatcggttggcaaagttttcctctgatgaagtggccactgaggctgctagacatgccaagttcattcagggattggaagaacatattgcttgggatgtaattgtggctgctaaacaactgggggttgtccaaacttatgctttggtggttgagctagtccttgctgctgagggtgatgaagatcaaattcggaagaggaatagtatgagaagacatctaatgtgggttctagtaagggtgttgaccctaatgaccacaggaaaggacctaacgatccaccagctacaggtcctaacaagagattccaaggtaatcaaggtttttaacgagggggaaataaaaactggagaacttatccagagtgctcgaggtgcaagagacaccatcaggtcgaatgtcaagatcaagcctgttt

SEQ ID NO: 50603 - DNA, 1551 bp, Cannabis sativa
gtttatcaaatgtgtcactcatgaaaaatttagttactgcctgaacttggtgaacatgagtgccattggataaatttctcattagttctcatatggctctgcctctcactctctctctttcaagtgttaaagtcttggtggctacttcaagatggatttgttagtgttatggtctagtcacctagtcttgtgcacttggcatcacttcatttgttagatagatttagttagttaagttggtttttattggttagtctataaatgtccaacctgagcaattgtattaaaacaactctcccatccattgttcaatttttctttagcttagagtcttagacagttggtataattttgagtattgtccattactgtttactgccattattgtccattgctgagccatttttctgcaactctttctcctcatctgtttttcttgttttatttttctggtttagattcaaattgattcttgctactgttgtattgtttatacttgatgttttatattcttgatcctccattgtgtgattgttaatcacaacagagcttaagctaaaatcttgaagtttttcaccagaaaaaatggtgcttaccaaaagatctcaagaactacaagatgaggagatggataatgcccaataagttccatcaacaagaaatctcatcgaaataatggagaacaatctttgcattctggtaatggtaggggtggcaaaacgtgtcatcgtgcagtgttcgtgccatattttatgtgacttgtttttaaattttgtgtcagacgtgtcaacccattttttgactcgtgtctaattttctcaaccctaacccgacccataaaaaatcgtgtcgtgtttgtgttgacccactttgacccgttttactattattaaagttagacttgtagaaaaaaataataaattaggtttccttagaaaacttatatacatttatgtatatatagtttattatgtgtataataaaaattaaaaaaataaaatattttcaatttcatgttaaagaaaattaaattaatatttttttaagttaacattgaatcattatagatatatgtttacataattatattattattaataattttttattttaatcgttattcatttaatctaagttctattcttcatcacaatttaaaaatacctttgacaatattaagaattacaatttatcacaaacactcaaaatcatagactattaggtgaataagtaattctaagatgataatagattaaagaaaaacctaatttagtgatcatctacataagattaaaataataatcacgacattaaatatagaagaatagaagcaattcgatataataggaaactagaagttaacattcatcagagaaattaaagattcatgtcttggattttaaaataacccttaactaaaaagaaactactatgaactagatattataatcaaaattataataaaaagtatgagtttagagagaagaaaaaaaaacaatgatgtagaacaattggtgccgcaatctccttcttctttctctctctctctct

SEQ ID NO: 50604 - DNA, 889 bp, Cannabis sativa
  modified_base (244)..(248): a, c, t, g, unknown or other
ttttttttttttttttgtaactctatttatttataacctctcaattagaatattattttcttagtcctaagtgtattcttggataaaaattctactgtatatggttataggatgtaactaattaactacctcttattgaaaaccttcgtgcgaagctgacagattttttctatagaaataagaaaacgttttagtctctcgttcgatattttttttgtaacggattattattattattattatnnnnnttattattattattattatggaatgactatttatttacttttatttatttggttatgttaattgtatggtatttttatattgaatttttcgcatctaaatttttaaacaatcattttacttttactttattttttaatttcaaattttactagtaaaactttctaaaatactgatttgttagcaaatttcaagtatcatcaatttagtacagttaagtcccgatatagattgtttatatgtaaatttttatatacgtgacatgtttatattggtctacataattttatgacttaaaataaaataaaataataatcatttattttattttaaaacaaaatcatttaaaataaaataaaattaagctcactcatggctaagtctatctctctcgatctacccatttatcttttaatcttaatttggagttgaaaatagtatttgtggcactattggaaaagaaataaaaaatggtgaaaatatggcccaaacacataaaaaatggcattcttaaagaccaaaaacaaagcccaagaaagagagcccatttgacccaagcaccactagcctcctctctctctctctgttgccacgtgtcaacgccagcgacgggtcccacacacaaagagcttgtcccccttca

SEQ ID NO: 50605 - DNA, 1113 bp, Cannabis sativa
ttagtggcaagcaatatgtcatcggcatatagaaccagaaacatgtacttactcccactaaacttgtgatacagacaatcatcaacaactttcattttaaaaccaaacaagagaatcactcgatgaaatttgtggtaccattgacaggaagcttgcttgagtccatatatgatttttttttttttatttacaaaccatattctttgggttgatctagggtaattttaggatgggtggcctcctataggaagttttctcgataagtgggcgagtgaggacaaagcgcatcgaaaagactcgtgttaatttgttgggtcagttatcattccataaagcaatataagagtcattagttcatgagagagggcccaatagaggcttgaaacgaggacattacaaagaagaccttctttgctgttttggcaccaagggggacgaacatggcctctctcgtgaaagctggagagacggtgaagacctccggagttcaaactatggagagacggcacctaaatccagttgaaggtgtgtccaagatggggacgacattggcccccattttaggaaaatcaactcgggagttggtctagccgaagaacttaaggaaattccctttaacacaacggtcccgaccaaggttgtcaagattaaaataaacttagcggaggttttaagtgagatgctcatggtttgaccccgtgttgattgacatgtaataataaattattcattccaatttacacataaaataaaattatatataactaatattttaatgtaaaaaataataaattaaaaatctaatacatatcataaaaatatatttcaaaacttaatagatcaaataatcaaatgtatattttattcttatacataaagaaaatataattttaaacaaaactaaatatttttttcttctttctttgaatttattttttttttaatttgttattagaaatataaaacaacaataatttaatttatattattgttagttatgaaaaaaaaaatatatattttaaataaaatattaaataattcaatattaaaaagtaattaatcaagactacctcattcgatatgtacttttgtggattggttagattagatttg

SEQ ID NO: 50606 - DNA, 1688 bp, Cannabis sativa
ctcaaaaaaaattaaactgagcatgcatgcttatattaatcttgtaataacaattcattctatactacataatattttttttcttttacatattttatatacaaaattgtatatttttttttatacggtcctattagtttggtgtattacaagctcctttttattatattatactttaaaatacaaatttcatatttatataatttgataaaattaattctataatctaaaattttaaatacttatataataacaagctatcttaataattttatagatattagtttttttattttcatttatttagtgagtcaaacatatcatacttagatagtttcaacatcattctttgtagttgaaggaaaaaaagtctaaataggtttttaaataataataaataaattgcataaccagtcataagacgagtttattaaacttaaaaattattttttatttgttttattataaaaatatatgcaatttttctgttaattctacaatttttaatatttgtcataaaattacaattttctacatattttgacaataacaaatttcgtttataattttaagtgttatttcatatatcatacacacatcaaaatgttaaatattattctataaaaaaaaatgttatattttatactatatatataaaggaatgttttagagagtacatgtggcatgtttaatcttcttattatctctaatacttatttttccctctttttaattttcttaatctttttctttaaattgttttaattgtaacttatgtactcttactaatatttcagttcattttatgcaatcaatgaatatgtaacctacatcaatgtcaaaaactatacgttagttttcattagatctcattgtgtggtatttctgaacaaaaaaaaaaaagttagcatgaaaaaaggcacgacttcattagtagcatgaaaggtctatatatgtatttcggctttctgtattcatattattgattaccaagaaaatataattgtaataaatatgaacaaacctcttaggattctaatttctttggtttcttatttatacatgattattagggaggatatttctctgagaaatgtgttttaccaaaatcagattaataaatctgagttctttattatggaacaagagatctcaaaatgtattacttttttttcttcatttttactctatattttttttttttttttacattaaataatgcactttatatacatatactgatgtgaatgcaatgtttttttttttatatatataaataaatatgtatataggtagagtttattattttgaaggatatgtcacatgtgttacaattacaattaagtttctactactatgatttctcatctaaaaagcaattggtttcttgataaggtttgcaaggtaactaaaatggcggagcttataacgacagccatgatttcagtttttggagaagaagactcaagaaattaaatacagagataataaaagaagttcgtgagtgattataatatatttttcttagtactctctttcttatctttgacatcaaacatatatgtatgtatcaatatttttgaaaggtagacacgattttgctttagattctctttaagattcttttttgtaaagtccttttttggcaagttaggtgacaaaataatttttcctttttatggtaagat

SEQ ID NO: 50607 - DNA, 2030 bp, Cannabis sativa
ttatttatagacaaaatattttgagtgatgatcaattatgttaattatttagtttaattttttaattaattatcaaaatattttaatatataattaattgtgatagagactttaataaaacatctcacttatataaatatagagtctcagttcccaatttattactcattgtgtaaaacacagagagtagagagagattagaagctcgattacctacgctaaacaatttctttttttttttttatttttgttgatccaaatcttatatgtggaattgaagctcaaagaatcaataactaaaagtattacgatctctttggttgagtaatttgagttttcagtgtataaatatatatattctccgttcatgatcaatccgatattggatttttttatttctaattattttgatacattttattattagaattgtctttattcatgagttataatatttccaataaaaattattattttcatacatatatatatattgcaatagttctatgattttattatatgtataattgattagaatgttctattctatttatttatcatgttataaattagataaacattgtatataaatatatatacgtgaaatttttagttcccggtaggttttattcaaaatattttgttttcatttttgtgttttctttttgaatacatttacactaatacatttatataatgctatagaggtatttgtgcatgaaaacaatttgaaaaattatgaaaacttaattttttttttggaaatatcatgttcggaaccaaaagttttttgtgaatttaaactctatgttttatgtgttattctggtttgatcagctaagcttgttgatcttgataagtttctgtgtatataatcaactgtatctaataattcattaagcaatactattcatgtttactctgctatatagtccagtatgtctttcgatttatgtatttattttatacatgagtagttagttagctgttcaaaatagtactataattaaacttattgtcctgcaatcttataaatagtctagatatgtgcatatttccgttgctaataagatgaaatatttcatgtcaagttgaggtttggaacttacttttatgaattttattggaacaaaatttggacagataagaagagatggttcttaacattcccttgtttctctctatatttttagtttcatcaaaacctataactataacttctccttcttcttcttattttacttgtagcaatataattattgatgaagctcatattggtaaaccaattgaaaatcaagaggaatttagctcaattagacaagaaaaagagttataatattgatttgattttgtaattctagcatataatattcatctatagtggcaatgaaagaaaagactatagtttcatgaataagaaccacttaatctgttcagaattttcatgtacagtgatgttatggtttatatatttgcactatgtatttaccacacacatttgcttaatgcagctgaaatgctattatgtgttaagtgatgctcttcatagtaaaattcctatggtgtctgatgtctcaaccacgatctttggtgctaatgtaacacatccacactctggagaggattctaatccctcaatagcagctgtaagtaattaataatcttttttttttgaacaggtaattaataatcttttattccttttttttatggtgtgtttgttttagtgtaatcaaagttacaatctaatgtatcattatattgttaggtttcactttaaaatattgtaatcctattcggtggtaattgtagttaccttatgtattataatgatgattaggtgagtgaccatgtttacaagattctattgcatcactgcatcactaagtcgtcaataactaaagcaggacacagactgcacaagaaagtttctaccgtatagttatgccgctagaaatttaagagacaaatgtttactcaaattttaacgatgatgacgtgtaaagagtaacaacacgtggcataaaaat

SEQ ID NO: 50608 - DNA, 808 bp, Cannabis sativa
aattgcttgatctcaatactaacaaaattttttgctctagagatgtaatatttcatgagcacatctttccttttttgaatcatagcaatctgccttctgctttcacagattttttccttgctgatgcatctcaaaatcctactgctactattaattctttatctcatatcaccccaatctcagatattagtcccaaccatcaaaatgttccacatattactgaacccgatgcaccagatattgatacaccagcaactattcctgcttctaatgtccataacagtcctggtccttattttcacaatgatgttgctgatattgcagcacctattcctaataccaaacctgttagacacattaaaagacccactaatttgcaggattaccattgttttttatccactaataatgttcaatctcatgtatccaaagtttctacagatcaccctatatctgaaattattgattacagcaggctgtcttcttcatttcgtgctttggttcttgccatctcaagtcattgtgagcctcaattttaccatcaagccaaaggaatcccagtgtgggataatgctatgaatcatgagatcacaacccttgaatccaatgggacttggataattgttacacttcctgctggccatcatgccattgggtgtaagtgggtttatcgaattaaatacaatgttgattggtccattgaaaggttcaaagcaaggctagttgcaaagggttttagtcaacaagaaggggttgattacaatgagacttttgccccaattgtgaagctagtttctgtcaaactaat

SEQ ID NO: 50609 - DNA, 989 bp, Cannabis sativa
catcaaactcaatgaccgaacctcaatgatgaaatttgtcaatgcttttcattctaaggatttgattcgttctttcttaagaaatgagcattttcttgaagagctttttcaattagaaattgactggggttgctctatgaatgcttcgaatatagcaaagcagctaggaatgacactatttggggctgaacaactagaaaaagctaaacattatgaagaagcatcattacttcttctgttccatgtacatgaaaaatctctctggggtcccatgagttctggctggcctttgaagaattttcgggaaaaggataagcttctagaaaaagctaagcaattagccaagaaagtttcacacaacttctttgagttggtctgcatagaggagaacattctttcagatcaaaaagtgtcattgtctatgctgaagaaattgtttaaagactcctgtagactttccagctttagaggtcagatattctgtgctcgaaagattctcgatgttcatgtgacatatgattgctggacaaatataaggcaagagaattatgttacatatccaacagaaaatgcagagaaaattttgtcattagatcaagtttctgttggatctttgttttacttttggaatgtgtggaagcagaatattgaaagaatattggattatcttgagattggatgcaaaaatgacaacatatatggcaagttttgcttggactacttaggtgtgattataagtgaggaaaacatcttccatttggttattccagatgcctctgcctatttggtgaaacttgacaaaaatttgaataaaagtgaaaagactctgagcttaaaggccgaccaattcgttcatgctgctaaatgttattggaattcacaaatggttaatgttggaaatatggtattacgaaagctcaaagatgtttctcggaccttggaacgaaaatcgttctacccctatcgccagttgatgccactcttttata

SEQ ID NO: 50610 - DNA, 953 bp, Cannabis sativa
aacccacccgaaactttttaaaaaaaaaaaatttgcaggttcaccagttcgggttcgggcgggttgctcgagttcaggtcaaacccgttcaaaatgttcagccttaataagaacttcgatttgactttagctatgaaatggagaatgataaatcaattttggcaaagaaaagaaaacaaaaattttaaaagggaataaaaaattaatgtttaacataaaaataaaatatattttaaaataacaaataagaaaattataatcaccgtataaggtgattcccctacaaattaaaaatatgcagaatataaatgtatagtaaatattcacaatcaatttatatttcaaattaaatttagaatatcttcaaactttcacatcacttgaagtatattattttattttatcatttctctatcttatttttaatattttttgttttaaaataatctaataataagcatctctaaaaaacattaaaataatataggaaatttttcaataatatacattatttataaattaattacaataataacattatctaaaataattgaaatacttaacgtgacacctcagtgcgtaaatacaaaaacaataaattaaagatgcctgaaaaaaaaatcatgtctaaaccatttttatcaactaaatgaaaaaataaataaataaataaataaacctgacaagttaatccacgttctcccatcaatccttattgatatcattagtaactatgtaatttttttcttcatagttcaaaactatttaagaaactaataaattaaaagaaataaaattcacataacattttaacaaaatttatagacatttaagttatcaattaattattttaaagttacagtatgatatcttaatgttacttaaaatatatttttgatatttataattttgttataaacacatcattagtttagcttaaaaaatatattatt

SEQ ID NO: 50611 - DNA, 1522 bp, Cannabis sativa
acattattattaattaatatacatcttttttggggaggcaaacatccatcaagagttctatctcaatctactctaattgtatggaggaagataggaatgagaacgaggacaagaaaaaattcactatggagaatttaaaattatttcttaaaaaaaaatggagttcaaattttaagattatagatccaaactctctcttgtaattataaccatctttacttctttttttattaataaacaaaataaatagatataaaaactcaaacttagatcacaaaataataaaattgtaataatcatgggtgttcaaaaatcatcatcaattcatccaccatggacatttgagtaggacatgagagacacttgtcttttaagatcaagcaagagcctataatttgcctagctagctaagctatgatatatttatatcaatattatatatatacaacaactttctaattcttcctcacaaataggaaaattaaataaataataataaataatgataagtactatatatgttagacaagatcaaaccattttggttacaaaaatagcaaacatataatataatgaagaattttgcattcatatcatataaatgaacaagaaaaaacaatattaatatatatatttatgtggcgaaaatgaagaaaattgacaaacatggcttatgaagatagtgaagagtttaataaacctcaaactcaaaatctaattttagaataaatggccttcattataattaatcatgcctagttgattggtcaaaaagtgactataggtcaatattatttatttgatgagacttgagcttctaaaacacagttaaaataagacaaccaaacatagattgtgaccattatatattagcttaattataaaatttaagtatatacatatttctaatttagttgcacaacttgtatgcatgcatgctaatttgatgtaaacaacaatgatatcataacactcttccatacaaataatccatatgcctcaataagggaataggcatgttgttcaacttgattaaggggaagaaaaatgctaagcaacaccttaagctgataagtattataaattgtgacatactcttacaataagatatattttaatattgaatcttgtacaatttaatttaataaataaactagaaaagaaaattactagtgtattatatagtgtcacacctgtatatatagtatctaaagctaacttggtgtttgactttttaacttcaaaattatttatttttaaaaataaaaaaatacttttaaaaaccactaggggtgttcggccaatttcaattttttttttcaataaaaaacatcaacattttgttttctattttcaaaaataaattttatctttttacctaacaattttttatgtatattttttcatattcaagtatggatttaaaatgtatcatagacacgtttagaattggtgttcgagttcgagtctggtaccaaatcctaccaaggctagattggggccaagttcaaaatagatgtac

SEQ ID NO: 50612 - DNA, 1122 bp, Cannabis sativa
atccaacatctaatggatgttggatcgattggatgattaaaactaattggatcagatcggatggtaaagtttatatctaatatataattagattggatctgaataggcctaaaaacattgaatgtggtccaataaacatccctacttgtacttaaagaataataaaatcgagatcataagagaaacttgaaaggcaataagtaaaacacaacatttccaaaaatgtgtaatgttacataaaaaaataatttaaaacttataaaatctattttcttactaaaaataattatataaacctaaagttatataattaaaagaaaaattaattataaatacacatttgagaatgatgtagtaatgccatatcagtcactaaagaatcacaattcaaagtgaattttaactaacaaaaaaatttggagacacaatttaatagtttagttcgggaagtaaaatttcaaaataagcaaaaaaagaaaaaaaaaaaaaaaatatatatatatatatattactattacatggaaactatattaatccatatttttttaacaatttttattgaataaatacatatttaattaaagatttgtacaacttttgaacaatgataataagaaatgtaaatgagtttttgataagtacaaaacaattataaatgtaataatttagattgcccatgtgtaagtggtcacaacagcaatatattgtttcagtaatgaacactgatgatagatcaaacattttgaatgtgtttaatcaatttcaaactttttgggtccacatgcactcatatattaaatatatatatgtatggcattgatgttggtataatgtatatgtgaccacaagagatctcaccaaattcatcaagttttattattgttaggagtaccaacttaatcatatagataagatggtttacagatctaatcaccttttctcatatactcattaatttatgccttggtggtattgatgattataattgcaccttctgatcaggctaattaaattcaacaatggggaaattaaaattaccaaataaaatactattaacaaataacaatatagaaaatacaattgaaggtttagacaatatgagaatctgtctaaattctctat

SEQ ID NO: 50613 - DNA, 1293 bp, Cannabis sativa
tcaatgttcattacaaaattagtcaatttatcttttgttatcaactgattgaagatacaaaaccaaactatgaactgatgcttaaataaagctatatagtttcataactctgcatagtaaaaattcacatcagtaggggaaaaaaatcttatgacttttactaatggaattggaagactgctcaaaattacctcttgaaatcgctctcttgattatatccttggcccaacacatttgttagtttgatggtactaaatcaggtaagtagtggaaaagtttcgtattatttgattatcattgtaccatagcctctatgatctttagatgtgtgtacattaaatcaaaacaataaaagtaacaagttcacaatatacctcttgaagcctatcagggtattctcgaaatttctcgtaatttgtatcctttaattcagttaatgaggaatatacaatttggactcacaccagtgtcttccaaattgatccaccacacacacggaataatatgggctattaggataaagtgtataatcttgttcttgttgagttctcaacaattgagcaagaataatagagagaaaaataaagtttcctttttctctctatagattttaaattttacagtgtaaagaatgttttgatttctcaaattaagctccaatttataatagtagttaaacccctttaattaaattattatttaattatttaaataaataaatttacaactgaatttggttactgatatttatgagagaatttctcaactacttgagagaatatctcaacaacctttaaatatctttaaccactttccaaattaggtatttacataattgaattaattaaataattaattaacccaaaaatacaaatcctatagggacaggacaatgcttaggtgcctaccttgtctatttaggacaaagttgataccttttgtcttgataatttttgtcctgacaaatcttgtattgacaaattttgtcttaataatttttatcttttccgccactagattggtcttctcaggtaataatgagtttcacagtcttaatctttagctaactttgaccattgcctttgtctcatattccagtattttttgataataaaatatttcacattttcctccacagagatagttttgccaaaacctaaagtaaaattattatcacaggttctaggtaataaattggataacgttacttatgctccttcaactgaccagaagacgaagaaataatcctaacatcttgcatcagaatgcgctctaaatcctgtctggatgtct

SEQ ID NO: 50614 - DNA, 679 bp, Cannabis sativa
  modified_base (404)..(408): a, c, t, g, unknown or other
ctactaaccttaattattatttatttatactttttcacattcattgtaaataaattagttattaaaatttatgttatattatttccgaaaattgcttctaatgattattttttgggggaatttttattgaaacttgttatgattttgaaaaaaaaaaatactaaaaaagcatatgaaactgttataatttacataattgtatatatttttgtaattttaataaagtttagtatttttctatttttggaagaaaaaaattaaagtgttacattaaattttggggaattttcatttttatgggttgtaaagtataagtttgtaaaaataaagttttttctcaaaaaagttattttatgggaattgttttttgaaaaaggttaaaatatatatataaataataatannnnnaataataataataataatataaggtacctgattgctatacccagttacctctacttgaatttctcatatttttaaactttttctttaattttttcataaagtaattttttttttaaaaaaagaaagccatatttttgaagaaaaagtataaaaattcatataatttgtaatttcttctttagttttttatgtatatttgttagtgaatgtaacataacaacacatttgtacatctttcatgacactactcttctatttctttttttctttt

SEQ ID NO: 50615 - DNA, 556 bp, Cannabis sativa
aaatggtgtaggtttagttttgagcaatgtttaaaattacttttttattgggcgcctcaatttgaggcagaaaaaaatgcactattctgtgcgcctcagtatttaggggagaggcgtacgcctcaaatttgtgaggcggtagaaaatcgcttgaggtgtaaaaacatgtgaggcgcacgcctcgaaagaaaaactaatactatagggtgttttcagcccattttcatttaataacttttaaaaaaaaatccccataacacaatttaagaaaaaggttcaataaaacataataaaaatccaataaaacttaaacaaataacttaaaaaaaagcccaactcaaaactaaacctacactatttatattaaaaaaaatacagctatatttctttagggttaacacttaaacagccgaccccctccttcaagcttcatcattcttctcaaatatcaatcattcttcattattcatcctttcttctttctgccgccaaaaaaaaaaaagaaaacttgctgcgacctttcctcattcatcattcttcttcctttcttctttct

SEQ ID NO: 50616 - DNA, 782 bp, Cannabis sativa
tactcgatattatgtaggaggagcaagagagaggagatgttgcttctagcatagattgttatatgaaagaagagaatattgaatcggaagatgaggccagaaaacacatcaagaaactgattagaagctcgtggatagagctaaatggagagttgaaggctcctagtgcattgcctcggtcgatcaccacggcctgctttgaccttgctagaacagcccaagtcatctatcaacatggagatgatcaaagctttttaagcgtagaagatcatgtacaatctttgttttttcgaccctgtcaatgattttttatcaaaacaatatatatgtataataaataatacaacatcagcatcatacacgaattgttagctttaaaaaaattaatggaaattgcaaaaatagaattccattcaaaaacttcgaggcccaacaaattacgcaatttaatcatgtcatatctacattcagtttctaccaaaacctgtcccccacatggcggaatgcgtaggctaccaaaaaaagattatatttttgtctaatgacatattctttgacattctttgtatggacttggttacgcacaaacacctggcatcttcaagcgtacctatcattgtacggacaagtctcatctcgtgaattgggcctcactcaagtggcttaaagttaataactattctattttaccccattaaagggcctacttgatcccaaaacaccctatcgggttcgggtatgcccataccctatttcaagaccggccctagacataggcgggg

SEQ ID NO: 50617 - DNA, 963 bp, Cannabis sativa
cctgaagtctagaggggttgtggtggataaactttttctctatatttcaattgtggtggatacgatctggaaggcctggaacgataagatacacaacaattatttgagtaactttaaatagtgttttgactctattaccatttgttacgcaaattatgtgtttgtcttgttttccttgccggaagttgcgattcctcaaaggtggacccctcctccagaagattggatcgaaatcaattgtgatgtgaaagttggttgcggttccatgtgcagagtgtctttggcaagggatcacacgagttctattttgtgggtgaccactaacaagcttaactttgaggatctcctgattggagaagctgggacttgtcagtttgccatggagaaggtcgtgttattgaaacacctttttgtgttaattgagagtgactcaaagatagttatcaatgcggtgaatggaaccagtttcaattgaggtattagtaactatattcaccaatgtaatatgctttttaatttatttttgagttgtaatttttcgcttatttctagactttgtaactttgcggcctataatgtgattaagtgggctttcaccaataatgtgtttggcatggttgacctgtcaaccatcccgagtaacattatttgtaatgatcgtgaaatctaatttattttatctatatatatatatatatatttttccttcaaaaaaaaattccatctggtgtgattttttatattcatcttattcgtacaagttatggccattgtcatagatcatataaatatatatatggagagataagagagaatttaacttgttaagtttttaatgtagaacatatatttatatgagtatatatatttgtatactataacagcaattttcttttctaaagaatcgatttctttcaaatgcaatgtaattagaagaatacaatgtaattttagaattgattt

SEQ ID NO: 50618 - DNA, 1195 bp, Cannabis sativa
  modified_base (32)..(60): a, c, t, g, unknown or other
tttagaaagttcttatttaggatgttaataannnnnnnnnnnnnnnnnnnnnnnnnnnnngtaaaataatttccaacataagattctccgtattaaccaagtccccctcttcgagagacttggggtttatgctctgataaagctttaccctctcatttaagaagatcgtcaagttagggcaaggagggtcatttgaaggattaaagagaaatgtctgggttagatattatcaaagcaggaagggtgtttaaagaaaagatagacgagaaaaatacattgcatacccgcaacttaaaagtccaataaaagagttggatgtcacttcaaagggaacctagtcgtgaaaaaccagtagcctcagacgtcataagcatgcatggatgagctggttgggttgtccaccttggaccgcttcttcaaggagtagaagtcgatctctatcttgttcttcctcattggattaggatccagcttatagaagtataggatttcatcaggagatggaacctaaaaaatataccaacctgccagcagcctatatacctacgggatgagttagaatggagctatccccactaccgcaatcaagcgtgctaaataactataaagtggaagatgagctttggattcaacatggccccaactctagacgctaaagccatccacgcaagaataaggtgatgcatccttcagtgctagccaattctaaaacaagtcgggaatgctctgaagacctcatttctcttcataagactacaaaattagataattacagaatttatttttgtattggtccatctaccactgagatggattggctgctactttcatctctatgccacttgcttctctagccagctccattttgtggtccatgatcatttcttcaacaaacttatttactttagccatcacgaaaattgaaaggaaaagaaatgcaaaaccaagcagtaaataccctacaccaacaaatatagtaagggtacaggagagtcctcccccagtattgcttggagagatccctgttggatccaacatttggaagcaacttcttcaaggaacattactccaggatagaatgattgggcacacaagaatatgaagcaaaagattatagaatggtcctgtaacaccctaactaacataggcgtattacgtgctttttaaacatgttgtgcagctcattgctaatcaa

SEQ ID NO: 50619 - DNA, 1443 bp, Cannabis sativa
tcttacttttattctaatttgaataatgatgttatcaatttttatgaaaagatctttggtagatagtcattgacatgtttgattcgtatgggttcattcgggttggaaatctaacactttttgcattcttttgattcttctttgctatgacttactgaacttttaattaaaggtgttgtgagggtttttctacttatatgtgtaaaacaatttggcagttaatttctattaattcatgtcttcatgctcaatgaactatgttcaatttttatattaataaaatttttcatttacttttcaaaaaaacaaaaattatacaagcattgagtgatcagtgttcctctcacgcatttttattttcatgaaattgccgaaaaaatattttttggtttgcccagcctaactcgaattcgacttcaagtctacgggagcctgtcccaccttaacacaaagcatctaaacccgaacccaatcaaaacgggcaggttcagtatatatcacacaccaaaaacacgaaaaatccacccgatgtgcaaccctaaaataagaagcatttatatatactacaaaaaaggctatttgctttgatttttaagtgacatataaatatttggtattagttggtgtaactgatgctatagccatagacataaatagtaatattttttttctttggttttgaactgacgctaattggaatattttaaaaaaattgaacaactacaccaccacaactgccaccaccacatcaaaccattcagatctgaaacaaactacataaccaacctagaaagaacatataaacacaatagatcttaaaataaaagttaaaatacaatttatatcaaatccaaacctgtaaaagaggaaaaaataaattaaaaaaagagatggcagaaaaaataaaaaaaaaaagaaaaagaaaatgggtaaaccatttattagttttgttcgtctagagtcctggtggagtcgtaggtggtttcgtcgagcgtcggggtctagagtcatgagtcgtgggttttgttcgtctagagtcgaggtggagcggtggtttcgtcgattgtcggggtttggagccatgagctgtgggtttcattcgtctagactcgaggtggagccatgggttttgtgttcatctagagttaaggtggagccatgatttttgtgtttgtctggagtcactactacaaaacaagcctttagaggcattttttcagcataataataaataaccgacgacatagggttgaaattttttagacgggaattttacgccacttatggcgccggttattaggaaataactgacgctatagagtgtgcccttataacgtcgattatttccaaataaccgacataaaaaggatttataaccctagcccagcccttcgtcttcctcattcgatcaaccaacccagaaaccctaaaccctctccgcca

SEQ ID NO: 50620 - DNA, 1973 bp, Cannabis sativa
  modified_base (1393)..(1406): a, c, t, g, unknown or other
tagttcagagagaattttagagaatttttaacgaaaaaaaaaagttcaagggacatgatttggtacatgtcaaattaagttcgagaggaaaaattctaattagccatttttttattatctgaaaggagattacgtggtgcaaatctttccctatttatttagtatttttgataatgaggatcatatgttaactataaaattttccctatttatttagtatttctgataatgaggatgatatgttagctataaaattcttatatatcagttaattttaattaagttattggtatcatctcgagagtttttatctaaaaaatattaccaccacagtaaactttagccttcaaggaccaagcaaatctctttcaagagcggtcataggtagattttgaacccttgattcaaataaaaaaggatattaataaaagcaatatctattagctaacttatattattctaatatatctattagttaatttatattaaaatgtatatttataatatgagaaatgccaaaggacaccagtggtgcctagcaccctcctatatgtcaatattgctattagttcaactaagtatcgagtcccgtataatttaatataatagcttttagagagtatcgctaaccaatcgcaacgcgacatgtcgagaagatgctaggcaccactagtacctcataacaatgctcttataatatctttatatcattatatttctttctataaaatttcatacaaaaatattacattcaatttttgctaactttgagacaaatatattttagatggtagttttttatttttatacttttaagatgaacttggcctcattaatattttagatagtagttaagatcactcatatacatgttttcttattaaatagaggtgtctagattttatacatgaattaaacactttcatattaatgtggagtgtggaatatgaaataaatacttgggaaagtgaagtttcaaagaaaaaaaaaacttgaaaaagtgccaattctatttaaatttttctaaaaaaattaataaataaaaaaagcatgacacacgacacgagaagtacgaacggtacgacacgtaagtacaaatagactaacctgaagggcatgacacacgacaagctcgaaaaatatgacataaaataattattataataataataatatgtatgtatttgtcaattataaataagttaaaataataataaaatttaagcataagagtaatttgtgcgtaaatatttaagtttaactctcggttgtagataaatacctaaacttaatttttgattgtattaatacctaagttacattttttaaacttacataagtatatgaccattaagtgtcaagtcattattcacgtgttatttttttattggtnnnnnnnnnnnnnnttttaaataaaaaataaaaattaaatgacttgaaccaatcaaacacagtcacatgacttttaatttaatacttatcgaataggtactatacttacgaaagtttctaaaatatcattaaaaaaaattatataaatataattgaaactataatatatatatatatatatatagtttattaattaattcattaattataaaaaaaaaataaaacacaaatttcaattcaaatttaaaaacaaacgaatttatttaaaaaaattaaggtggcgtttggttagaggtaatgaaatgaaatggaatggaaaggaaacaattttcatttcattcttttgtttggttgtatttaaaagtattgaaatgatgttccaatggaatgctatttctaccattttggtggaatgactattccattttaaaaagaaaggaatgaccctttcaatgtaacaagaaaaaaaaagtttaatgatttttttattaatttttttttatgcatggaacctactctttgagaattgtataagtataatccatagaaaggaattcttccatccttctttctctccccct

SEQ ID NO: 50621 - DNA, 818 bp, Cannabis sativa
ggtgaaaatccgagaactattcctctaaacaaccttgatatttgggtgcaagtccatgatctacaacccgggttcaaaaccatatattacataaatatattgttttctaagaaaattcttcacatttattgatagaagtcataaagtataatagagaaattatctaactgaatttcttttaattgagagtgattttgagacatttattaagacgttgaaagaaacctgaaactttttagttagaagattagtaactatgtgtatcaatgtaaacatctttttatttttttgttaagttgtaatttttcgtttgttctgaaagtttgtaattttgcgactcataatgtaattaagtggacttttatctattggtatggttgagctttcttcaatatcaaataatatcatttgtaatgattgtccaactttgattttattctataaatgcttattttcaaaattagaaaaaaaaaatagtactaaacctacctgtgggagaaggaacaacaaataacaaaagaagataaattaaaaacataagaaaatataaattctacaccattttgtgaattttctttacaaaacaaacaagcatactactagcctactaggagcgaaaccttttattccggttattaaatgcctttagtcctgtttttaaaggcatctttgctcgtttatttcatgtaaagtatagtacttaaccaaacatgacaggaatgcccataaaaaaaaaaaattacaaactccattaactcctcaatcgacctggcatgagatttgcaagagtactcgtatatgtttaaaatgtctacaag

SEQ ID NO: 50622 - DNA, 1577 bp, Cannabis sativa
  modified_base (440)..(449): a, c, t, g, unknown or other
taaaaatgtaaaaaaacattctttgaacgtaaaattgtaattattttacaaataataccttatgtaattattccattgcaatactctattccacagaaaaatgttaaaaaatattaataggtttaagtggtatattacaattggtacacatatatatttgtttgaaaaaaaatgtttttgagtattagtttgatcatgtgtgtcatttttttcttggattcaatttgacattgtgaaggaattggtcccacattcatatataattgggatttttggttggtgacaataaaagcatgcaaaacatatagtgtacgtaaagattcctcaaatgtcattggcttcttccgtgactataattacacacatcatagataggatatagttaatttggaacaatttatgagaaggtcatcagatttttcttttttctttcttttttnnnnnnnnnntttttttttttacaaaaatattgtattttggacaaaaattttcacgcgaaattttttataaaaatcatgtctttttgtaaaacaacaaaacagaacaactaaaacaatagtgtagaaactagaaaacaaccgtggaacaacggtgaaaacttaacacattatatagtataaaactgacacagtattttttaaaaaaattctaccccacaatataaaaataaaaaagttcaaaatttcagtgtgtagtgtaaaaactttttgttaaagagagtctatttgcacccacaaaatgataagtacactctgatatttttttaaaaaaattaagcttaaaataatttttcaaaatcactcttaatatttttttaagaatttttctcgcattattttgtgttaatctcaatacttattttaattttattttcacatttttttaaatgatatataactttttatttttttctaataaaattttatataattttttattttaacatttttgttataatatttaatatagaatttatttttgtttgatatgtatattttttaagaatgggttggaagaaaaaaaattaaaaaaataataattaagagtggacactgctcctctggtacgctgtaaagaccgcatatgattaatactttaaattattaaataattagggtttatgtatgagattaaattaatatttatgaaatgtatattttggaaatatatttattattatatatgctattatgctatatgtgaacttcttaatttctgtggctttgtccggaagctgagggaagcgacgttgggcctttagagagtcatgttgtgaatgtaaataattttattatttttggggtatctttgttaggctcgaaagtattggttattggtcggaatattttctttaggactaaaatgcccttagaagcttttctttcaagatcatagaatttgttaagggaataattagttttatttcttttattctttttattactttcagcttatttaataagcttattaataataagggtatattatatgtcatccatttaatcatagaaaagtcaaaaggaaaaacctagaagaaaccaacccctttttccacaccaatctctctctctctctct

SEQ ID NO: 50623 - DNA, 1027 bp, Cannabis sativa
acctttcaactatatatgctaaactagaaattgagcacataatttgcatattatgtatatttggactgagcgtaatcgtgttttgcacggtcacaatgcaaaaccagcaagatctgtgggttcttttgctactaattatctgcagcaattcgtttcagcccagaaccacaacaggcagctggatcggttgcacatcaccagcaacatcaacagaatgtctctgttgcagttcgtcaatggcagtctcctcctccatttgtagtaaagttaaatgttgatgctgccgtggactgtcagcataacataatcggaagtaggtgtagtggttcatgactctgctggctgtgttctcgctgcaatgtcaaagcctattgttggcaacttcgcatcccatgaaatggaagctaaagccttgtttcatagcatcaactggattttacaaatagaagtgccaattactcatattgaaacagatgcgctcttagtttctaatgccttgaatggcacttgtactgcaatttcttcttttcaagacttaattgtagacatatcttgtcttctttcctctctccctaatgtatctatttctcatgttaagcgtaatgctaatatggttgcccatgggttagctagatatgctttagggttggaagaagcttgcttttggttggataatattctaccaccgatttactctgttattgtaaacgaattatcttttgatttatgataatatagtatttctcctaaaaaaaaatcttatttttatgtttgacaaaaaaattattattaattacttagaaaataaaattatctaagagtgataatatatattgtatttacgcttttatgaagttatgagaattaataatgagagttatatagattttttaataaatttgaggatgactctgacgaaaaccaataaactgaagatttagaagctttttactaaaaaggatagaaaagccctataatatcagtatcgtttctattttgggcattgtcttttttctttttttttttt

SEQ ID NO: 50624 - DNA, 6001 bp, Cannabis sativa
  modified_base (5819)..(5822): a, c, t, g, unknown or other
  modified_base (5878)..(5879): a, c, t, g, unknown or other
tatgctttgagatttaaatttgacgcatcaaacaacgaggccgaatatgaagccttgatcgctggcttaaagataccaaggcgttaaaagtcaaaaatctcatctaccagagttattcacagttgattgtaaaccaggttctcggggaataccaagccaagtgcctgaaaatggctaagtatttagagaaggttcggaagaacttggaaatattcgattactttaaaattgagcaaattccaagagaacaaaactctaacgcttatgctttggcaaaaccggcctcgcaaaacgacttcgatgaattgaacttggttccggtggagatgctaagcgagtcaagtatatgtgaaagggaagacgtcgagatgatagacagttcacctacatggatgacccctatcgtcaactatctgctcgacgggtaacttccaactgacaaaattgagacgcaaaaactcttgtactcagtgcctcgatacacaataattgaaggcaaactatatagaagaggttattcgatgcctctacttcggtgtgtcctccctacagaagcaaacgagatcatcagagaaattcatgaaggcttttgtggggatcatgtaggttggtagagcctatcgaaaaagatcattagacaaggatattactggccaacgattaataaggacacctatgagtttgtcaaaaagtgtgataagtatcagaggttttcacatatacctcgcgtactgccaacagaactaaggatgatgacctcaccttacccatttgctatatgggagattgacctaattggggcattacccaccgggcgaggaggagccaagtacaaagtggtagcagttgacttcttcactaaatgcactgaggtcgagcctcttgtttccataacttgcaagaaagttcttgaccttgttgtcaagaacattgtttgcaggtttggaattcccatgaagatagtatctaataacggaaccaaatttgatggcgacttgttcactgagttctgcgagaggaacaaaataattaagagcttctcgtcagtatccaggccttcggcgtatggacaagtggaagctgttaataaaaccttaaaggatactatcaagaagaagttagatgcttccgaaggcaggtgggtttacgagctactacaagtactttgggctcacagaactaccgagaagacgacaacgggacacactcccttctcgctagcattcgactcagaagcaatgctacctattgaagtgaacatatcgacttagagacgagagttttataatgaagaagaaaactaagaacttctaaagttatgcttggatctgcttgatgaataatgaactgagtcacaagtcactaatgtagcgtatcagcaccgagttacaagatacttccacaaaagagtcaagaaaagactattcaatgttggagacttggtgctaaggtgagtatttgtaaacacgagagacgcgtcttcaggagtgttcaatccgaactgggagggtccatatgtaatcgaagaagtagtaggaatcggagtttacgaattagcttggctaaaatggctcgctaataaagaactactggaacgtggaacatttgcgaccctattactagtaaataaagagaatcatttctattatttaagtaattacaaagctttactctttaaaattacttaaggggcatttgtgtatgattaatcaggattcatttggaaatacatgatataatgcaaacccacaacttaattgtttttggtcaaacctttctgacgagaaagggatcaaaccatcataactttttggtttaaacttgtctgacgagaaaggaaaatcaaaagttataaataagatatagctcataacttgcgtacgaagctgaatattaacggttcacgcaagataggaaagtattaaacgagacatcgagaggtcttgataaaagtacttaaacctagtgaatggatatataatctaactattcatacaagcaatcaaaaatgtacaaagtgataaaatcattaaaagtatattcaagtttgcttaagacaaactataattgtcatagcgaggcagaattgataactgctcgtaaatcaaaagtctagtagattactaactgcttaaataagaaaattacgagcaatggaaagaccctaaagtactttgcatttgatcaaaattagttgtttacattgtgaatgaaaacgcaagcaaacacaaaaataataagttcgaatgaaaaagtacaaggctttcaagataagagaacaccagttggtttacaaacttgtctttaccaaaatgccactaggggcaaaccattaagccattttcctaaacaatgatataaggttattcatggggggctggagaacttgagaaagattgtctacacgtagctcgagaaagaccgtctacacgtagctcgagaaagaccgtctacacatagcacaagaaataccgtctatacaaataaggacttgacctttgcatagacctcattctctgcatcagaagatcccatttgctgcagcagagacctcattccctaaggctgagacctcattcccagtctaaggaaatttataaatgcctatgattggctggttcagagattttcttgtgcaagcttgggtcttgagccatttgggttctttagtagaatccatgatctcgctaactgggattacctccttcctggactcctggttagcctgagggggacctatgaacttgctctcaaaatctacgtccatttctgtagaggcaaagacaaaagatcaatgaagcaacagtaaaaaaacgacgaattcagatcaaaccaccaatcgcagaagatgatgcttaccctcagaaatctcttgtggggattgcctgtaacgatcaactgtatccccttggtttggattaaacggatgatcttcagtcttggaatcttttgtttccaatttaaactgaggtttgaaatttttgggaacatatggagaagaaaagcgattggtatattccagcattacaagccttgaggaataaatttttgagcctggatgggacatctccgtaggggagtgataatccaatttctgcatgaaactcatcaaaaactagaaagtttatggaacgtggctaaactaagccaccattttatactcagaacctactaacggaaaagcaaaaggttgagaaaactaactgttgggaatgaggtagaagatgaaaaggcggtccatgaatactaataatgaccctccaaatcgtggagccgttaaaattgagggcatgcgtggtcttgaaaaaagggattatgactaatataccttctgtaagcatttaaaaagtactttttattaaaaagaactttttaaggggcaattgttatacccaaaattcagctaccatctcaatggaggacacgtgtcaagttaaggagaatatggatcgatgtgtgtaacagtaattacatttaatggaacaactcataaaatgcaaaagtgacagagtatatttacaacttgctgactataaggtcttatgcgagataaagatatacaaactattgcatcatgtattaatgagaaaccatacgacattggatgcacaaggcgagacatgaacctcgctatgcctgggaagacgtaagcgatgcgtaatgactgtgaaaacacttagcgtatacaaactaagtataacagtcgggtggactcaagacctaataagtgaggtgcctatctcgctataggaaggtgtgctcctattactttcaccaatcaacttcagacatctttcagtgagacttatagtcttgacgagtcagaagctgacattcaaattatgatgactgatgaagtactctttgttagtaagaactgcgattgtcaaaatgaagtgttatgccttcaagaaaagaagcaatgaggcgtacatcatcaacctcggaaagataggggaaaagctctagctcgctatcaaggtcattggtactgagttcctgtcgagacatcccagaacattatgatttaaaatgtgtttaatacaagaccattttggcccagtaaaagtggactaatcatagttgtgtgatattcaaataataaccgcattaatactacgtgatatgtaatcaaaccccatgatttcaggggagaattgttgtaaagattacagtcaactctgtaattaactgcctactatgtgattataaatagaggcaagttatactaaaaaacagacgaaaaaaatcataagaaaaaaggtcctaaaaagccatcagaaatccaataagattgactcgtggactatgcagaattttaactgtaaaagcacgtaaaaaatcctttgcgttcatattattttctttactgtttttatttttctgtacaagtttatcattcaggctcaaattttgttaacaaaaatctgcgttaacaactagtgttcccagtgtcttgcacgcctggtgtgatcccagccataggggaagtcgcaccatggcccatagtgtattggcctatttggggtttgtccctggtggtcctctcgtgttcccaggggtctgcacgttaggatctgtcaccaccaggtcgccctgatcagccaggcctacacgagtttgcaccaccatcttgtacgcctatgaaaacttaagacaaaaagaagacttgggttttttctctcaatgaaagcaccaaaatatcaacctcgtttttagccaacgacagtgagtcaattaataagcgattaaggatgtaattaaaatagagcaaaaacaataaaataataaagaacaccagattttaaagaggttctgcaccaccatccccttcaattgtattaactcgagagaaagaacgaagtgcttttctctcttaaagctcttacaatgaatctctaagtaattctcttagatctctctctcttaagcaattcttttgttccatttcacagtgaggctaactcactatttatagggtcttaatgcatgaaggaaggtttctcttacatcctaaacatgaattcttaagacaatgaaaataaatacatataaagttaagaaaacattacattggcggcaacagaatactatggttccttccactcagatctctaacccttattcccttctgtcgcagagtaataacaagatctaagcttggatctctttcaggtgttggattcttcacaatcttccacactatgattgagtacttaacttgatatgagtgggcatgtactctatcactatagggaaaacattgatgaagagaaatagagggagaagttgaaatctatagaaggagactcttaatatttagttgtctgacagagctagaatactaggttatgaaagattaatcagaataagagccatcttattccttatataggatttctcctagagtttgatttaaattacatggaaataaaaaaagataaaaaaaaatggctaaaaatacactttagtggccgaccatacaatgggccccactatttataagtttgccattttattcaacaatttatcttttctttcactgacgcaatattttctaatttcaatcatttaaatgtcaaaactatttatttaataattataattaattgttaaataaaattgccatttaacttatttattaattagaccttataaagtctctcaattaacaaataaatcccaaaacctcttttcttcacaatgaagcccttgcttagtgaaaattcataaataagaaaaaagtctaattttagaattataattgattaatttaaatcaattaattgagtccataagcagtattatctcaactagtnnnnggaccatggacctatataatcaagttttcaataagtagatctagaatttactaagnnaattctctaacttattaattcttctttgctccattatagattcggaactgcactcttaattgtatagaacactctatatgttccaagatatagatacacttttaattatccattgttataat

SEQ ID NO: 50625 - DNA, 1368 bp, Cannabis sativa
tagtctctctggggataaagcccctggtctggatggtctcaatgctttcttctaccataaaaattgggacatccttggtgttagtcttattcatgctgttttagactgcttaaataatggagttgatttttctaatattaatacaactttcattgttttaatcccaaagaagcagcatgctaattatttaaaggattttaggcctataagtctttgtactactatgtataaagtaatctctaaagttctgtctaatcaccttaaggtggttcttcacaaaattatctctccctttcaaagtgcttttgtttctgggcggattattttgataacattcttattgcccaggaaattgttcatgctataaactctaggaaaactggtaagaaaggttgagctgctttaaaactcgatatggctaaggcctttgatcgtgttgaatggcattttttggaaagcttaatattccattttaattttccaattaagtttgttaatctaatcatgaaatttatttctactatcaggttgtcttttcttattaatggtgctgttagaggttctcttaggccctctaagggccttaggcaggggatcctttgtctccctatctttttattctctgtgcggaagggttgtcttctttacttcaggttaggcaagatgctcagtctcttaaaggaattgctatctctaggcatgctccttctatctctcatttattttttgctgatgatagccttatgttttattctgctgatagaaattcttgcttagctctcgagaaggttttaaatatctatcctagggcttcggggcaggttattaatttctctaaatcttctttcattttttctcccaacactgctcaggaaattcgtgctttgttttttcaaacttttaatctagaatataggccttttggttataagtatttaagtcttcctcaatgtctttctcggtgtaaatatcattcttttacttttctttgtgataaggttgcttctgtccttagaggatggtcttctaagtgtttttctaaggctgggaaagaggttcttctgaaagttgttattcatgctatccctgcgtatgctatggcttgctttaggatacctactaaaatctgtaagggtattgagactgcgatggccagattctggtggggttctactggggagtctagaaaaattcactggaagtcttggaaatttctatgtcagtccaaatttaggggtggtttgggtttcagatcttttgtgcatttcaatcaagccatgcttgctaaacaggcttggcatatcttcaaaaatactgactctcgttggatatattttacctggatcgagatttactaacaagtatgtt

SEQ ID NO: 50626 - DNA, 1244 bp, Cannabis sativa
ctgtatctcaaaatttctgataaaataaagctagtagaccatgcccctaatgcctttgtaggtaacatttctgatgccgcacgaatgacctcctctttcctaaattcttccaataattcctaattcataggttgagaaacctttggttggacggtagccaaaacttcttccatcacctccacattcaaatctgaagctgtaaataatcccataaaatagtcactgattatattgtgcaccatattcatatcattttaccatacccttatattgtcacagagccctttaatctcatttttttccttcatgccgaaactttatggtggaaatatatttagaatttttggtctgccaaaatcggtcgatcggttggttctggtgcaacagaactggtcgaccggtttccctgttaaaaaaattcccaagttttcttcaggttcagttttggctcgggatggtacctagtatctgatttaggttatttatacgttgtatggcctattttagagctattggaggttaggttttgttcggttatggggattagggtttgttcccagaattttggtttaaggcatttattgaattttgttgtcgtgacataggaccgatatcatctagctctgtttccattcagctcggcccgcacacctaatttctgggttgaggcaagaaaagtgttatgcaccggttatggttaaacgattatgattgttatagtcttgactgtgaacgagatctcgatatgtgtttgttgtgccttgattatgatcgagggttggaaacaatcattactgttatgagtaattactcttgaaaccgcagataggttttttacttatcagtcgctatatcgggcaatgatagtgacatacatagctcgtagataacgagtggtaagggtactttatgaagtactgagtttgtatgattataatgatgtgaaattgtataggaatattaatatgtgatgtgttatgattgcgtacatcttgtcatggtgtgattacttggattttatattgcttttggatttagtcacttttcttgctaagtctctgtgactgactcacgggtgcttaatggatggtgcaagtaaagggaaaggcaaagttgagcaaccatgagtttgagatctctgcagcagtgtacatataagccgcagtgcgatggccccagtggacttgattcctctttttggatgtattttgaagtgtgaacttattttgtaaagtcacttttag

SEQ ID NO: 50627 - DNA, 3636 bp, Cannabis sativa
  modified_base (3064)..(3070): a, c, t, g, unknown or other
aaagataaggattctgaaaatccctgaaaggtgatgacagcctagtttgttgggttaagtctacttcattctcaacaatcaagttgaaaccaaatttagttaattatgatgttccattatattttattaaggtgattgtaaattttcaggagatggacaaaagtctcagggaaccatttctttgcaaccatctgtgccagaatatcatgctcgtttcgagctgggattcggtcagcctgtggtatggaattctaacaatacaaacttgttcttttccctattcaagaaaaaacacttatttccattcttgcttttggcattaaacttcaggtttgtgcaaaatatccatacatggatcaattctgtgggctcctctcttatggacatcagctatcggttggccttcatctcctcctaacttgtcaattttgtaaaaatccctttgttccattgatagtagttatgtggtacagaaaatttgccttgctttttaatcttgtatattacaagttaatctctgatgaaaatgatttgcaatgcaccagggacgtattatgctacccctgaacatcactgcagatgatggaccaatctatgtcaatgctaagcaataccatggaatcatcaggcgtcgacagtctcgtgccaaggcagcagtgctggagagtaagccgcctaaagctcgaaaggtatgacaacttggattttgtaatttgtcatctctagctcttttaaacttttaagatggaatgtaaaatatttgacagaggtaaagtcttaattatgtcaaactttagttcaaatgccctgcaaccttaataacattttgattctttagaacaaaaaaatctgatgtctttgccaattttgaaagatggttttctctttaatgtcaatgttggcattaaaaaagatgaaaaaagaaagataagatttgcatttcatctaagccatgttagaaacctgtaagaaatttataacacatcaggatactatattgcatacaatttagaacatagaaaatatactttatcactccaaagaaataactgagaattaatagagttagatagtgcaaaattaacctattaagtctttttccctaaatttctaaaacagaagtagatcaacgagaacatacaagttaagttatgagacaatatgtattaatacagttaaaaagggtgcctaacaataaaattctagttgaactgatcactgagccttctcattagagactccaattaactaaaactcacacttgtatttcaactagactttatacaaatgttaagtccataaattatagatcactaactatatgggctaaaccggcaaaaaactatttatcagcttatattttaataaaacaattgaaatactaatgtaagctcaaaataaaagtctaacatgcgtttttattttacagccatatatgcacgaatctcgccatctccatgctatgcggcgtccaaggggttgtggtggccgtttcttgaacacaaggattcagaagaatgagaaaggtgcaagtcctgtggcaatgaaacgcaggaatggacagcagctgtctaggagttcccggtctcagagctcggatgttctgcactcagacagtggaacactaaactcatcaaaggaagcaaacaacagcagtggttcaaatctctcaggatcagaggtgaccagtgtctactccagggtagaacttgagcacttccagctcaatcttcttggctctcctttccattctgtctcggaaatgttggaaacttctcgtggcatcgtcatgccaaccacatggattgcagccgctgatcatagccgctgcaacctcaatgtttgacaacaagagaaaaatggggtttgatgctgacgaagcatacataccccatttcttgtttgcagccataatggaaaaacctgttgccagcagtttccttgttatggtttctgcaacacaggttttcgggtctgaggatggcctccccacccatttggctgcttctgaaaacggcaactcattcttggctcatgttgacttccactcggagttgacataaattacttagtaaactatatattatataaaatagtataaatattgatttgaataaaatggtgactggtgacaaaggctgcggtttgtgattgtgactaaggaagagaacaatatcaatgttgtgattggtgttttgtaagattatgttttagactgatgtaataattcaaaactttgtggtgtggtgtggtgttgtattatactaataatgtctatgaagtacgttctgttttattgtgttactttgaatctttgaacagaggggcatataatccccctcagcttttctagttttcatcatatataatagtaaaaaaattgtcaaataatttactttatatcaattacagtaaaattacatgtgatattaccctcaatttataaatccacaataaatctataatgataaataacctaatgatcagctaagaacacatgatctttcaatttaagaaaagtattagtatgcaaaagggtttattgtattctaaaaatgaggaagaatgggtgggattccatttacaatgatatcactttattttttagattgcattgttaactcgaggtggatcccatagaaagctcaaaaaaattaatttttgcattattttgtgaggatttgttctacttcaagaatttggaggtcatgtgttcaaatttggttgatttatttaggaggagattatattatttaattattttattttatttgttttcatttttatatttatttctatatttttttagacactatcacatggaaaatataaattgatactttatttacaaaaatacttctataaggtgtgaacaaaatttatacctttttatgtgattttaattaccaaaatacctcttacactatcatttacacaatcagatgatggttacagggtgattgctgcgtggttgcgtgatatttgcattagacgaaagtttcaatcagacgatagttgcaggatagttgctgggtggttggccgaaggttgctgggtggttggnnnnnnnttgcatcagatgaaggtttcaatgagacgaaataactgttagcaaaatgtttatgcaactgttatgaaacattaaaaatcagaacagtatttccacgtacgtaactctatctacatgtcttttcatgatttaatatgaacaaattcatcattaaaaatttagaaaataacggaaatacaccaggataaataatttactatagtattgatgtaattttttttggattatacttgagttggattgtttgagaactccagttcaactttatgagatctacatttcatggatttgaaaattaaagtaaggacattagttttatgcaaattaaactggatttccagttgaattttaatttcgtagtagtttttctacacttttttttttttttttttcatgaattcgaaatagcccatgttttgattgattctcgtcgtcttctcaggtgaagtcgccaaaattaatggtagtttcttttctggttgaattttcgttttggttgtgttgggttcaatggcggacccagaatttaaagtgaggggagcgtaattttttattgtaaaaggagg

SEQ ID NO: 50628 - DNA, 674 bp, Cannabis sativa
cagtttagaaaaaattcaaattgtgcaccgtaaagaatttcaaattgtatttttgtttttgcggtgcgggtaatttgagcggtttgatgaacacccctacttgggtggatccctattactcaaactctactcagcctttgatccttggttgactgattcttcctttattttcttggttaaggcaaggttgtagcattggtgtgcggtcttttggtctcctttcagacatctaactccattcctggtcaggaacttgacacatagatggtagatcaaggttacagcttttaaatcatgtagggttggtcagcctatcatgacattaaaatcaaaagggactcaatcaataaaaattgggccatcactatgtttgttgttggagcttttcctacggtgagtgggagacggatatgtcctaaaggagctatgctttgtccggagaagccatatacttgttgcgcgcatgggaccagattttaaggagaagtcccatcttttcatatgttctcttgaagagaatattcgaggaagcctcattatcgatcattgaccgagccactgtcatgttagaaatttgtacctcgacgaccagggggttgttgtatgcgaaaatgacatggtcgacatcgtcttcactgaatgagatgacaactttctctctacgcagctatttt

SEQ ID NO: 50629 - DNA, 1683 bp, Cannabis sativa
ggcaagattttggtggggttcatcgacatcagggaattcaattcattggaaaaattggaatttcctttacaaatctaaaatacaaggtggcttgggctttcaaaattttatacattttaacaaagctctattggcaaagcaagcttggcatcttttggaatttccttactccctcatcagcaaaatttttcaatacagatactttttaaatggccattttcttgctgctgatttaggtacttgtctatctttgacatggaagagtattatttagggaaatgagttattgttaaaggggctgagatggagggtaggaacaggtagtaaaatcaattgcaaatcaaatccatggatcttaagatacacttgttttacaccttatttattcaaaggctcccattcgagtttgatactggttgatttaataaaccaccatcaacaatgggatatggtggctttacaatccaatttctgccaagctgacttgcgtactcaacattcctctaagcctttttccttcagattatacaataatttggcataattctttcacaagaaactacacggttaaatcgggttatcactttgttgttaaccttgctgaacaagaagacacaaacaacaactccttgatagagcattggtggacaactttttggaagttgaatcttccatcaaagattcaaacttttgtgtggaaagcttttctcatggcgctacccgttgctgctgaacttcatcaaagacatatagcgtcctctcctcgctgctctctcttcaattcccatcatgaaacaataaatcatgctttatttttctgccaaagagcaaatgatgtgtgggatctctcaaagttaccaattaactttaatctggctggtcgaaacacatgtgaggatttcctgctacaactttcagccaccctctctacttcacactttgagcaattcattattctttgctagtgcatctggcttgaaaggaacactaaattctatgggaatattgcaaaaaaaagttgatgctgtcttcctatttgcaaattcatatctccttgaatttcaagcaacccgtgcaaaaatcaccagtctgacccacaacaaacagtgttgtcttgcatccaagcacttttattgctttcacttctaagcctaatggttggctccactttcgggaagtctcaaaattaacacaaatgctgccattgacatatcaaaaggtattattggtgttggcgctgtttctattgttgcagctttatccaagcctctttggggctgtttcaaatctgaagaaatggaagcattgagcctagctttaagtctacaatggctactatcacttaatttgtcagcagattatattgaaacggatgcactcatggtggttcaaggattacaatctgcctatttatttacgagaaacttacaaaaatactggattttgacccaatttttacaaaaatactgccacacggcaaaaataacttttatactgccttggaacttttttttttcttttatactgtaagcaccgaaaataaaaaaacgagatctccatcttctacacccacagacagaaataccacagcaacaccagaacagtcgaaacacaaccattaaatctggtgagatgaagcaaaaacattaaaaccattaatattagggctgtcatggtttttct

SEQ ID NO: 50630 - DNA, 1202 bp, Cannabis sativa
taagaagatcgtaaacaagcaagatgaacacaagcactagttaatcaaagtaaactagtttgtgaaagaaaatttaataaagatgagcacgaggattttatagtggtaataggctagtgcatttggagtgttattgaactcaatgcttgatgagagttctccaagagttcaatcctcaagtgagtttttagaatgagagaataggagctcgtgagtatgattttgtgagtatcaaatttaggctccctttacaagtgacttcactctccttatataggttttcatctaggatttcaaatctcttaacgataggagcaccttcccataactatagtcgagttaagtttaaaatactaaaatcacatttcaaaataaatatctaaaaaaatgataaaagatgtatatgtcttctaagtcatgttgatgagtcgtgagagacaagtgccgttgaggtgaggaccttctcttgggtcgtgacgacaagcagactgaggcccactttgggccatggtgatggcatgtgaggacccccatgtggtccgagacgatggtgagagagtgagaccccctttgggctgagatggcaagggcatgaggatcctattggtggtgaggatgcgaggatcccattgagagtgagggcgtgaggatcccgttgtgaggacctgattggtggtgagggtgcgaggaccccattgggaggacccattgggtcaagatggtgaggcactagcctctgagtaaggtcccgaaaatggtgttgagatattatggccctttcccgtattcaaagaaaattaaacaccaattgccttcgattttttgagggataacatctagctctcatcatcattctattttttatgtttgaacaatgtattttagttatcatcgtttaagttgatgatatgttatatgtgttgcagttcaatcaacaagatgatggtttgaattcctacttgttgggtttatgtgaaagttaggaggtcactaataatggatacgacatactgaatcttgtcagaatctcttagagtttttggttactgcactcatttgccagagtcaaacttggacggatgtaactttatatgttacaacttttggttactagttacttgttgctagttttagaatttagtttgtttctttttaactagttctactttagttatattgaatcactacaaaaaatcttactt

SEQ ID NO: 50631 - DNA, 853 bp, Cannabis sativa
tttaataataattaataatataaaaattagaataggataattataatttttgcactgaatactatatttttaaactttttgattaaaaattttgcttaaattattgaaattatttattttaagaattttacttttagtgattgtttatgtataaattatattctccaaattttgatacttttcaaattatgtctttcgaactttgacatttccaaatcatgtctcttaaactttcattcaacaatctcaaaagtttagaagagatttttaataactttcaagaacataattttgtacatgtcaaagtttgagagtaaaaatactaattaacctataaaaaaatataatttttgtcttgaactataactcttgtagagttttgtccctgaatatttttttgttgtaaatatttttcgctaactatgcaaattattgtaaatatttcaacaatttatttatgcaactatgaattagaagtataattatagtctatgtatttatttaattactttaagttaattaaaatttaatttataatattaaacatatatatataatagttttaagaatgcatatatactcttatagtttattattaaactgttatttatatttattttttgtttaaattttaaattgaattaagttagtgctatataaataaatttaaagaattgaggaatgtaacttatacaaaaattaaaaggcaaaattctcccataaacataatttaggagataataataataagatttttaagaggattacttcatgtactattttttaatttttttttttaaatttatgatttggatttctaaagtggtttctctggtggtttctatgtgggttg

SEQ ID NO: 50632 - DNA, 977 bp, Cannabis sativa
catgaatatttggtattaaaaataggataatattcatttttatggctttttttacttgaaagtagatgttggtaggatttatttttcataaatttacaaaatgatatatattattattccatatttttaatcatagttatatacacatattttaatttcaaaatcattttttttaatgtatgtcttcatatattgcttacttaaaccattttttatggtttttcctccctatttcttttttctttccttattttttttattgtttccttcattttttttttaaaaatttttgttcttttcttttccttttcttcttcctacttattctattttcctttcttccatttattcatttttcttattttttttttctttcacttaacattatataattatttaatttgtgtgagtgttttttattttttttaatccaatattgcttctattctactatgtataatttgttttaaaatatattttgcaatatatatgcacacatatatatatataaatgttaaattaagtgattacttgattagttatctttcatgtcggtggaaattagacatcctataaaattttgagaaattcgaaataatttacaatataaatgttcaaactgtttatttcacacacgtgcaacaaactctttaaactctattttcagcgtgttaattttttttttttgaatttctcaaaattttaaaagatgtcataaataactacaacgtctacgatcataaattagaaaaacaataaaaatcgaattaattttttttctagataccaaaacaaataagggcgcatcggagaagtacattgtagaatttccctttaaattaatggatcactttttcttacaaaatagaaaacatatatatcacttgtctctctctctgatccctttccctctctctcttatctctctttctcaaaagcacaaagtatggccaacttaatggtgggaggagctcttc

SEQ ID NO: 50633 - DNA, 1171 bp, Cannabis sativa
caggcccattggagttggccaagggccctaattttttttttttgcctataacccatttcaacgcctaactggccatgtataaactgtgtagtcaaataatataccatagtgtaaaaagtagatacatcattttataaattttttttatttacccataatcatattttgtctctaattttatctatacaaagctgtatattttcaataaaaagaataaattaatcaccataaaaaaataattatataatataactttatagctgttgtatacctatttagctagagcttattgcttaaactaaaagatgctatataaatttaacattagggtatatttattttttttatactatggtgtatattaatgttggatatagttcaagtagaaagaaaaataaaatatattttactcaattagaaaaaaaagatagagttgttgaaaaataaaactggaaaagaattaataaagaatcatgagagatgaaaagaataatagcacataaaagtaagtaaaagtaaggacacatatgtaattttaatggctaaggatgtgatatttggctatttacttaatattttcaaaatatgaacatttatttaattgctaaattattttggggccattttcctctattgcccatataattaactagttgccaaaaaattggtcaacgacaaacaattttgttattaaaaaaaattgctctaattcatttgaaatcattgtaactgtattgcccaaatcatagtgttaatctgtaaccaaaagacactattagcttcgttttaaaaccaactctaactccagtatctagtgtattgcttgttttgttcaatcctaactccctttaagaaaaagcctctaaagcatccatcagtgaagaaattgagaatttggacagtgacacttgttgtgtataagctttttgtgatgtttccaagtttcgaaaattcaagtgttaaaaagaaaatcaaatacgagaaaattacattctataccctttttatattgtcttcttttatttatactttcttttttaaagtatatcatttttacctctttttttaaacattgtaccaattttgcccttatcacttcaagatactttccatgtgagtctcttatgtcaaggatattttgggtacaatacatataaaaagaggtatgttt

SEQ ID NO: 50634 - DNA, 858 bp, Cannabis sativa
  modified_base (30)..(42): a, c, t, g, unknown or other
aggtacgcatacctaattattatatattannnnnnnnnnnnntgttatatacaaattgatcttggatttattattaatttatctaacagtacaggtatataaatactaggtatataaatactacataataataaactttatatttattatacttaaaagtgtatatgtcaatgcaaataatatttagataaagtaagttatatacttaggttggtttcttgaatgatgtgtagaatgaggtacttcattgtatgactcatacgagcaacctattacattctctgcagcgttttcttttgccctccaagctttttggtaagagattggtacactataattttatgctatctcatcaataatctcatttgatctgtagattcttttgggatatataattttttttttatacagtcaactattatattacttgttgtttgagtgtggtcattatgaatgagttctaaggagcatgtatgattctccatgattttttgactttgaagatgattgtttgtccatgttttgtggccagaaagtgtcatttacagttgttatcaacacatattaggttgtaatccgtagatgatgatctttttactctgtattgttaattcatttttattgcaaatgggctcatagcaagcttcactatttgtttgtctttaaaaaagttgtccaacttttattatatcaattcgaggatatgtgatgatattttttgtattttcccaagttgaggatctgtgatgatgttttctgggagctgagaagtggagccttcatttctgcttgtagcatgacccataacagtagagctattagttggtgagctagctgtttgggaaatagcattgtcat

SEQ ID NO: 50635 - DNA, 936 bp, Cannabis sativa
agtttccttaaccatgtgacttttagatctttgaaagtttcttttgtatagtattcatcctcttccctatcgtaatcaccttcttcgttttcataatgtccttctcaattatcttctttgacggggttttcatcatgacgttcctccggttggtgaccattttggagaggaccaccagctaccactgatgcttcaccttcccccacggtagcctccaaagcgtccaccggaggagggttcatatcctctgtggtagaggttttggcattgttgtgagtagtttgagtgactgttttccagtcgtcgttcttgttataactatttttatagatgacaaaaatggtaagatctttcttcagctcaatgaaagcatcaaaatatttaccgagatttccataaacataattaaaagaagattacgctgaagaaaataagattaggaaataaataagatgggatttttgcgtggttaggaaattaacgagccttagtccacgagtcaatgttattaagctctttggctatggagtatatactagtttttacatacacaaattttccaacccttttcatgaagggataaagccatattataggcgtttggctagtgaatcgattggacctagaataatgattccgtttggtgttaaaagtccactgatgaggtaaatacaatataatattggttgttagactaggtaggtgaggcccagattgtaggtattcttcatccatacacgaacatactattgacaatgataggcgcatatgtcccattagttttaagaaagagaatgtcaatgggtgttggccgaaaaggtgatttcatattttatgtgtgccttttttacagtctaacacatggggacaagccgcctgatttcttgggattgtgtcagaattgtgccgcattggtcggcttccgtggccttaagt

SEQ ID NO: 50636 - DNA, 2386 bp, Cannabis sativa
aagtattgtggattaataataaacttgttgatttataaaaaaaaataaatattgtctcaaaattaaactaaattattaaaaaaaaaaacataagcaaattattccctaaaatattcagtaaacgagttataaagtcccgatccgcattattatcattacgagttcctgatggtcgtggcggagaaggaacatatggttgatctgacgataaacccagtgttagatttcccagctcagcttggttgagaataggagttgaaaaaagttgttgctcttgcgatgaactcccaaataataaaaaatcagtaaaatttgagctgagcggaggagactctaatggagttctatataagaactgatttcccaattgctgactagattgttgttgctgttgaggaaaatattggggttgctgcagcaaaaatttttggaattgctgctgtgaagaagatcgaaattgttgcgaaggagattgttgttcatgttgtggaggagcgcataactctgagaagatgaattaccaggcgactgcgattgactatacgtttgaataaagttctcaaaccgtgggttatataaatgagcccgttatttaggcattaaagcaccccccatgtgtcacgcaaagttgagaatatttctgccatagtgctaaacatttcagcagatggaggaggaggcaccgttgactaactttgagtaaatgacttctttcctttgcctttgacccttttacccacgcctctttgatagtaagatccttcgccaagaactgttcccaaaacgctgtactgataaccagcgtcagattcagtaccagatgtatcgctctgggattgtctttcaagttgtttgctatcaagctcttttactagtttctcctatttaaataaaaattattagaatatataattaatataaaatttaaattttaataaaaaaatattttattctcttacataatcttttgcagcaacttcattaacgaaattgtcagatggctgtttcgtatgaaccaccttctatccatcaattgtatgctcttcgggaggaccccctacatgaatataaacaaataaattaatttataatacattttttaaaaaaaatcatattttacaattgaaggattaatacttacaaatttgtatcgtatcgaagccaaaaatcttgtgccctgtgtcgttttatattttatctattgcttattcgctttgtttttaattgagcggttcaaaaagtttttgctgatgaacatttcccaattaggcttccaactctccatattcaagtagtcattgggcaattgaagaacattctcctaatcttctggtttagtgtaatgttgtttgaaatactgtgtctgttggtctttcgctcattatacctcttcgccatctccgtatattaagtctccataagtaggtctcgaggggaattcccgtcaatattaaaataatactatataataaaataatttaaaatttatatcaatttataaataagaatataagttaattataaccctaaataattgaaaatcactcacccttattctattaagcacatgatccttatattgttggggtatatcgaaaagattataatgatgacctggacacaaaatggatacttgctagcccataaatcgaatgtaagcgctggcttcagtcccaactactttgtcagtttcaagatccacctcaagctctaatggcttaccagcgtccgtccttctttgttcatgtttagcatttgatgcaaggccacgaccctttctaaccgttggtttagctttatttattcgagagaaaaaatattctattagtacattaaacatttatcatgtacttatattaagaataatgttagagttgagaatatatgaaacctgattcgcaggacgagggtaccctagaaggatccgggggatccctaccatcaccatccccaccgtggtatgtcgctagactagctgacattatactttactttgaagatgaaaaatataaaaatgtaaaaattcacaaaatgtaaaacagataaatcaaagatgacacaaatattaatacgaaggaaaaaataaaatatcatttaatcattagagttttctttacaaacaataggaagattaaagttacaatgaagaatcagtatcatttccatcattcaccaagtttttattttcatcctcaacaaattcaactagtaaatcatttattttttcagcaacataattttcatcaagttcattattttccatctgaggatccactgactgattggtcattcaattgcataatcaactctccaagatcaaccgtcaacacaaaatttgaagagttagaatcatttacaacatcaacatctgtctcatcttcattgt

SEQ ID NO: 50637 - DNA, 643 bp, Cannabis sativa
ctgtcccgacattgccttcaccgtcaataaattaagtcaattcatgcacaatcctacccaacaccactggaatgtgtacaaacggttgttaagatacttgaaaggaacaatcggacaaggtcttatgttcaaacaatccaaagaactcaatatcgagtgctttagcgatgccgattgggctggatcaatttatgatagaaagtctacaaccggttactgtgtttacttgggagccaacctcatcacttggagttcaaagaagcaaaaggcagtggcaaagtcctctacggaagcagaatacagggccttatctcaaacagccaccgaagtagcttggctccattctttattcaaagaactgggcatatctcacaagcagccagccataatctggtgcgataatgtaggcgcaaaacagctctcctccaacccagtttttcacagccgaaccaaacacatcgaagtcgatgttcactacatccgtgatcaagttaagcaagggaaaatcgaagtgagacacatccccacttctgagcaaacggcagacttgtttacaaaggtcatctccatcccacaatttgcttatctgaaaagcaaacttgccgttgttgctcaaccacgccaagtttgagggagcgtgtta

SEQ ID NO: 50638 - DNA, 1101 bp, Cannabis sativa
tcaactaagcatgcatgattttaaatcctaaagtttttttctctcaaaattaaccaattttatcataaaaagacttgaaaaacactgaaataagcaaaaacagagatctcccaatattttacttgaaaaatacacaaaaacaaataacaagcataaaataatatatatatataaatacattaaaataaactctaaaaattcataaaattaatagacctaacagccacaaatcaaacaatttgggtgttcactaaccccaaacttacgtaatctagctactacatgtcttcaacatgtctcttctatctaaccacaatatataaaatagtatttgggaataatctttttataattccaaactaaattggccaaaagaaacaagctaggagagttatcattctcttgtacacctgatttatagagtaaggattactaaccacatatcctgaagagaacaatagttcttcatcttgtcttcaactaaaaaagattttctttattaccccagtcctcaatcttaattctttggtctacaaatgtccttccaagtgatgctccatgcatatatatggaccattgaaatctgaagtagccttctagagaaacgtcctacctacatatgtcattgatcctcttgaacactctttttgggaagcattcaatcattaatttgaacccaataagtatatatgtaaggaaataaggacatatatatttgattagaattaatccacctgcatgccaccaaatgagagttttgaaaaccatcttttcaatcatcccttcaaagtctttaactcacattttcctagcacacaaataggtaggcaactccaaataacgaaaaggaatagaccctttctgaaaaccagaaactcttaaaattctttgcacctcattctctgctatatgccattggcaaatagcctctaacttgctattgttgacttgcaatcaacaagtttgagcaaagagcttaatgcgccccttaacaattcatgtataccaatttaaaacacaaatgagttagttcaaaacacaaataaataatcaaaatattaaaataaaaattatttgaataatattaatacaaatgttatt

SEQ ID NO: 50639 - DNA, 668 bp, Cannabis sativa
ggttgaggcagctcgatttttgttagagttttataggagtttgttagtgttttttttatgagttgaaagcccaattatttccaaattactgccactaaaaaggtttgaaagtattttatcttttcattttagtataacatccattttttcttggtgattgaaaaaatttgtaactaaaactcctttttgtagtaacgaaatcttgaatagttaattatattaaaaatataagacttaaatattttattgtatgcgtcattatatatttttatttagtacgtaataaataattatttaaaatttataaactaattatcattttttttaattcatgagaaaaataaataaattaaacaactcttgttaatgcggaaaatacttcttattcatataaagttaaaactcgatcacaaatagggagtatactgtagtatactacttatttatataatgataaaactcatgaaatattgcactacagaagaaagttaattatgggaatatgctacgtacatgattcagattcttttctaatcaaatcaagtcaataaacttacactgagaaaaggctgtctataacatgtcattccaaatttaattaaaaataataatgactataacacagtcacagctcatatgcaccaaactcaccaaagggagagctaaaa

SEQ ID NO: 50640 - DNA, 1314 bp, Cannabis sativa
aagagatttatatgctttaagcttcagatttattgagagctaagcactgccacttattctgagagaatgtgaaagagtgatattataaacttagaaaataaatgatttagtataccttctaaagcttaagataagaaaaagttaggtaaacttaaatgttggggagggttttgggaaatttcccaaaactagtaacacaaatattttcacctgatgtcattgactcattaattgcatccccatgattaaaagagtcacatatattattttttaatgtttagcttaaaggagtagttaatttgcaggcttgctatatgatttcatctaaaactaatactatgtaaactattttctaattcattcttttttttaaggaaggcactccaaaataaatagaattacatcaaaataaagttctaaggtaaaaacaaataggaaattccggttaccaaattttcagatcctcaaaagatagatccagttttacaagaatatgagcaagttttgcaagtttataattcattcttttaaaaagggtaaaggtatgttcagaaaattcttcttttttattttttatttttgttcccaccttatattatgaaggttaggtgtagcagtagtactatagtagttagaagtaggtattaaggactattaatggaacaatatatcaggagattatttgtgtctttccttttattaatagagctttgttacgagacacctataatgtctagcactatgattacaatgacatattttcattgattagtaattttttataatatttattaaactaaaacaagtgaaactgatattgtgttgcatcaatagcgatattacacttcacaaaagcgtagataccttttaatatttctattattgataaagaagaagacatgctcacttatcccctcatcaatatcatcaacacacttggtttgataaaagaaataataaataaaatcatcggttgatgctttttggaaacttgttttaaattatcttttgtgacataaattcataatatttcttcgaatcgggaaaagttcctgaagtccttgtcttctttgcactttgcaggaattggttttatgagaatgatttggcaaattaaattgataagttcctcaagaaaaccataaaaaaaaataaaaaataaaaaataaaaaaaaagtcatgagaagatcaactacacactgaaacagttagaaggttattaaatgtaggtaaatattaattgaaaaaagtagctttgcttggtggtaatttgaacagcagtagtataaccatttatgcttgtaaatgccaagg

SEQ ID NO: 50641 - DNA, 1180 bp, Cannabis sativa
  modified_base (398)..(412): a, c, t, g, unknown or other
tgataactataccaaatcatttcattcgaactttgacatgtataataaatcatgctccctaaactttcatccatgttagacttttttactaaaattgaacaaaagtccttaaatattccaacaatctcaatagtttaaggggtatttttaacaaccttaaagttcagggggcataatttggtatatgtcaaagtttaggggacaaaaatcttagttagtctttatataacaagctaattaattaaggtatttgccccaaatcatctcgtgcggttaaaaatgctcctaaattaactattttctcaattttattatcataattcattataaaaatcttacttttagtcacaataaaatttgtaactaataaaaatataaaagttgtgactaattataannnnnnnnnnnnnnnttgtgactaaaaggtccgtaactaaatatattagttacaaaaatcacaatttattatgattaaatatacttttagtcacaatacttattgtgactaaaagtaaattaaggacaacttatctaaatgctatatttaagttataagtaattttttgttgtgattaaaagttgatcacaaaaaatatatattgtgactaaaagattatcacactaaaagtagttttgtagtgattgtgtacgcatgtattagattatatgctcccaaactttgaatttgacatgtactaattaattatggtgaacttttatctatgttagactcatctcatttataaaaatggacaaaaatttataaatacaacaatcttcagaatgaatttttaatgatatgaatagttcaagaacataattcattacttgttgaaatttgggaaacaaaaatttcaagtagtgtataaaatatatatatagagttaatttgttaagttagatacgtagttatcttgtaattaatttagtagattactatttatcatatcgtcgaccatatgcctagctagctaggtcttaatttgataaacaaaagtagtgttaaaaaatgaaaagaggaatcaatcataatatctctgtgtttgtttcttccatattcatgatatgtttctttttaacaactaaatgttataaatataactgatattggttggtaaaaaatatatgatgatgcaaacataaatatatatatgtattttcccatattctttattacttt

SEQ ID NO: 50642 - DNA, 1459 bp, Cannabis sativa
tgtattattatttgtgtttatttattttgttatagaactggttcttttcatatttatgctctcaatattttttgaaattgatctccattttttttaagaaaattataatcagttttataaggtatcatgtgttatgaggttttttattgtagaactagttttgtttttaatttatgtttcagtatttttaggaactgatttctcctttattttttaattgtaatcggtttgaattattgtgtgttacttgtttgtattcattatgttatataaccgattctattttagttgtaatcggttttgagttatttcatgttattagtttttattcattataacaatgttatagaaccggttctattttaattataactggtttaagttattttgtcttatttgtttttattcattatattgtagaaccgattatattttaattatattcggtttgagttattttgtgttatttatttttatccattatgttatttagaaaaaacactattagcaacactttttttatagtaaagaaaattagaaggcaacacttgtaaaagtgttgtctcctagactgttgccaaaaatattaagaaaaaacaacacttataaaagtgttaccataggttgctaatagaaaaatacatatactaacatttaaaataccaatattaattatatatatattttgtatatatatattttttattattaatcactattttattattattttcttaaaataaatttaatgtttaattatatctatctgattcaaatttattttatttataaatttaaaaaaaacattaaaatacacatacatttgattaaaatttatatttacaatgcagattaaaaaaatatatttacaacacataattcaagtatattattctgattatattcaatcaaaatattttttgcacaaatacaagatatgattttctaaaaatttaattcttcactgaagctacaagttgttcgtcgttattcactacttcaaaaatgtgcactatatagttatcgtttcatgaacactgcaaaaaaaaaaaaaaaataataacatgtgaaaagtttatacatatataacatagaatattttatgagtcattttatacatacattcttaaaactttataatagagagtttaatagtgaagtatgtgataaagtagaattatgttcgcttcaacttgggactaaatgtatttctacaagataaaagaaaaacattttttttatgttaatagtgacacaactcaaatataatttatcattatctaaactcaaaatatatatttacacaaaataaagagaaattatacatatataatggtttaaacttatcttttagggctcgtttagaacgccgtgttaggtcgtattgtattgtattgtattacattgaattgaaatatatatcatatttttatataatactatattaaactttaattta

SEQ ID NO: 50643 - DNA, 1317 bp, Cannabis sativa
taaaataatttccaacagttgttttgtctcatttcagtttccaggccttggacttggattcttcttgtcttcttgatttagaatactgaaagatgatgagttggaaatagcttggcgagatccaaacacccattttggagttcctagagtcaacatggtcgtagggctagggacccctcctagatcgactgcttaactccgggatatttttttttcttgccacgtgtcaagcattgatgtccacatcacttgaaaccttattctggtaaacatttgcccccaagtcaactttgcacttgtgtggtgttgacttgatgacgtgaattaagctcatttctctcaaaattaggtgggcgttaattttggcaatcttagcaactattttctattcttcaatgacttcttgtggggctaggaattttgaaatcctattacttttttgattggtgaatttgaaatttaaagataaaaaggaaggaagatataagggaaaagatagtagatctttctctctccgtatctttctttttaaatttaaatttaaatgcattccttgttggcttagtaatagaggagatcaattactataaatagagaactcctttattcacttttcccactacttcacatggaaaaattcagagcctgaaaaattttgctctcatcaattcttcaagtgttcttcaaaatcaagtaaatttctccaaattgtcaatttttttttttcgattttttctgttctcctcttgtaaagctttgtttaagggttctaaatcttgttgtaaatccttaaaactccatttgtaagccctctaaaaatcaaaaataagattttcatgagagttgttagggtagaaattcttcattcctacaaggtgcattttgtctgaatttacttggaaaaagttgttttgggttgaattaagttgatatttatctagtcaaagttgaggagaactgagttgaaagaaaatacgcctcgcgtgagaagaacttgtagaaaaactgaagaatatgactgacacacgacccaattcatccgtgcaaagcttacagtgccaaagtctaaggatttagacaaggccgtggtggaaaagttatggccattgagctactcactactgttattgaaagtgaggatcgaagagaccgagcctttgaactaagatctcttatctttagttccatgactcagcaccaggttgaattggtttgagatgagtattcactacctgagactattgtcaaaaaacctagagttggatgtcctagtggttctcaaaatccttcctgtagtgcttagtcaagattccatat

SEQ ID NO: 50644 - DNA, 1439 bp, Cannabis sativa
ttttgtaactaatacttttagctatagattttttagtcacaacataagaatactaatttataattagtcacaattttttcacttttagttaaaagttttgttgtgactaaaagtaaaattttttgtagtgtggacctatcccggcggagtagtatttagaggagactaaagaaggaatatttatcaaggagaatgaaagtcttcatgagtactattatggtctattttctttggcaaactagacagtgttctttgggattaaaagctccccattgtccatataattgttaaaaatattatttacaccgtttgtaatagaattcaacatatgaatactcaaaagtttaataatattgataaaaattgggtggaaactctatacaaagctttgtaattaattggggtggtatagttgagttataattgttttgtgacttaattaatacaatactttactgatattttattttatttttttaaaaaaagtttgagttcaatttgagaatgatgtgaatcttttgactgggttttctattctgtgattcaatttaattccggtccaagtggtccaagcaggatatgtagccaatatatttatagatccttcttttgcagcatgacacttctatttgcacatatcccaacatcgtctaataagaccaaaaaaccaaactagtatccaatgatctcctaatatcgagagattaataagctttatccatattgtaatattttaaggtacaaatttattatataatgggacatatattgttattaacttattttaatattaggtgtggtagatattttaatttagtaaattatataaaaaaaaaactggtaactaattataaaattgtagtattaagcactttaaaatacttacaacaatattattttaataaaagttgcttattagctagatctatatgaattaataaacgagtagttataagcttgagttgcattgaaccattaactatatagtagaattattgaattaagaaatactttcatgattaaaaaaaatgttataactaattataagagatcaagttggcgctcgatctctcttcactcgatcatcaaatacattaaaatatatgtaacaaaaagatagaaaagaagcagagaaaatgatggatttttttgttttggtgaaaagggcatgtgaatgcgtggttatgaaagtgcctagatgagaaaaaaaaaagtgactatttcacaaaaattaaaaataaaattgttttcatttctttttttattattattataccatattttccatcattgagaagagtaattattgtcatcacatgacttcatcgagttctcatgagaatcacactagaacaattatgggatccatctcctttacacgcaagcaaaacatatatttacatttatttcatacacgaattatttatatatatatatat

SEQ ID NO: 50645 - DNA, 1865 bp, Cannabis sativa
gtcttgcatttctcaagctgggcaaatgggtttactcctagcagcccacatggattgatatgaaggtccaagttgtacatacatagtaggatatctgaacagagtcatcaatgaaaatccgaccagctctatcgtgtgatcaactcgcatacaccggccaggagatgtgagttgggaattatagcagtaattgatgatatctccaaacttatatgacacaaagtaatccctattttgtgggattgattcgtaccttcagagaataaaggcaattagcctagactttcctaattcttttattgtaattatggaaacatactaatttcatattttatttcttatagattaagggaaaccactttatgtaatcagcccctataaaatagtggtctcatctcattatgaattgaatcagagaaaacactcaagagagaaatattgatctaagagagagtaacttatagatcttttgaagagctttcaagaaagaataattctttttttgtctcacaagttaatacaacaaaaaggaagagtaggctattactactatcacgaggtcgaacctctagaaattttggtatttcctttacttattgttctttgccttctattgtttatttaatctaatcactttaattaagactaactgtcgttggctgaaagcaaggtaaatattttgttactttcattgagagtaaaaaaacaaatttttgtcttaagtattttacaagacacgagatggttgtgcaaactcaaagggggattcaaactgatacagtcgatccaatggtgtttgttctgagcgtgcaaacacctagaaatgtaagagatccatttgagatgacccttggacaagttaatactcaaccaccaacaacagtccatggagtgacttcccctctgactgggttcactccaggtgtgcaagaaactgggaacaccagtaagaaagccgagcagaccactcctggcactgaaatctcatccaccacaaacacctaaaggtcaattagagatgatactaagcttcaaaacttaggagctgcattagggttcatgcaaggccacaataacattatacaccatgaccagcaagatatccgagcagctaccaatcttgcctttgatgaaaaaagatgctagttcatagagtggagggattgagagatggaagtcatgagagcccagcaggaagccattgataatccctctaggcaggccaacatactaacagggccgaccatgggcataggcgggctaggcctgtacctagggcccacctagtccaggggctcaaaaaaaattttctccttttaaaattacacaattttttttgctgattttgacaaatacaatttcttttctaaataagggcccaaaaataattttttttcctatagctcactaaatttcagggtcggccctgcatactaatcagaaaggccaatcaagtcactggtgagcaaccagtgactgattgtagcatcccgttgggatttcaaaatgggttggaagagtatgtagttaatcataccgcacagactaatatcggttaaccgtccaatccaaggccacaggttcacactgtgggcaaaacagtagacaagcagatcttatcagactgccccttgggagaaagtaattgttaggttgttattagtattatttttaggttaatttttagtgtatttttaatttagttctactcttgttaggagcatttctatgatttttatcttttatttttgaagatttaaaatagaagaatctagaaaatatcaaaggaataagatggaaaacaaataaaaaaaatctcacaaaaagaagatatataaaatagaagaaaattgtgtaagaaaata

SEQ ID NO: 50646 - DNA, 642 bp, Cannabis sativa
taaagtatataatattttttttccaacaaattattataattaagttaactcaattaacaattagtaaacaaaaacacgatttaaaaaaaaaaaaacttatagcattatagtataaccctagattataaaaaattaataaaagaatacaaaattaaaaaaaataagaaaaaaaactatacattattattatttcttatttattacaaaaatggaaaatggaaaggagtaatatattttacaagtaatggtcttagaaggccaaaaactggccaacaacccttggtggtttcgaggtgaattgtagctccgacgaagagagagctctaggcccttactctgacaaagagagagctctactttgagatggcatttagagctttctctctatctctctctttctctttcgattctctgtagcacaaccatcaacattctcgtcctccatcattgcgaaaaaaaaattgtcagagtttgccctgtcgaatagggaaagagagagagagagagagacgaggccacccatggaggaatatggctgttcagtccgtcggggtcgggggaggatgcatgacagtcaattttttttgtcattgcaaacgactatgattttgtgcctccaatttttgttatttgagagagaag

SEQ ID NO: 50647 - DNA, 976 bp, Cannabis sativa
atcctatttagttgctgatcgtgttatcaggagtagtgatgttactctagattttaatcatgtaatcactatggattgcaattaataaaaataatgaattttttcaaaaagcatataataaattcaaaattttattttatattattatttcatcaaaatttaataatttgtaataatttaataattctaaaattaatatttataattaaattctttaataacgtactaccaattaaaaatgttccatgtataaaaatgaaatgtagtgaacattaatttttgggatgattaatataagatggtgtaaaagatgatgtatagggccatctccaaggcaaatataatatagtgccaattataaactttttcaatccaaccgtgtatagtcatttttttatattattattatattatatttagtaatttttaaatatatattaagaaaattatatggtatactttaaaatgggtgtagtgatacacttatatttgttttggcatctaagagaatattttagtctcttttttatggttatatatgtttgtaattatttgagacatcctgtaaagttttgattgatttaaaaaaaatttaataagccaaaaataagatttaaatagtcgattccatgtatctctcgtctattttatacacgtgtaaaataaattgtttgaatattattttttatattaaaaaaaataaatattctattttaaaaaaaatattataataataaataataatatttttggtataacttttagtgttgcggttggtattagtgtaacattaaatatatacaattaaatttaatgtatatagtataagtatttatttactttgaaaaaaaaaatatatatggtaagattaattaaaatatggaccaaagctaataaattatttttgaaaacaaaatataaatatagaaaaagaataatgaacacaaattcataatagagttaaagaaaaaaaaaa

SEQ ID NO: 50648 - DNA, 2320 bp, Cannabis sativa
ttttttttttttttttacatacaatcttcaactctatatattacacgtgcaacgcacgttcaaaaactagttatagcttaaaaagagaggattaataggaggcttgaaattctcaaattatttctagaattcaatttttttccaactctagtaaaggctctgaatcaacttattagaggcaagaagaacaggattattagaatcaaagcttgttcttatatatactaatgagaattcattttagtaaatgaagtgataccgagaagccattttagtaaagcacactacactgccataactctcacttttacagctcaaaagcacaaaattgaaaattgaagctctagagactatttgagcaatactagaatatcatttcaagttgatcatagctactcgttgtatcataaaatgaatagtaaagacacttgaaagcaatttactcgtgcaataattcatgcagcaaaccaaattccatttagtattcattcattatctgtaacaaaccaaattccatatagatataaaattccaattaagtcaaatatcaatacaaatccccaaaactcaatcaccaaactattaaacaaaatttggatttctttgcacttcatatacaaaccaacaacaaattataatattcatactaaaataacaaacatagaaacaagcagcaacacaacataatgaataaacaaaaatcaaaaggccattacatgaaatgtccaattcgaaatgtagggtaatttttctttttctttttttgaaaaaatgcaattacggaagactgatttatagggcacaaaaacagaagagcaacaatatcaattaataatagtccactaaacaaaattaagagaacattggtaatttcttcttttaagctaaaattttctacgctaatcagatatgttatacacgactctaattagaaaatatgtacacatataaatttttgaaaagtcatctaacatatcatttatgggggcttaccttccatgcgactgagaaaccgaggtgttgagcaagaagactggctccgacccaacaaagaaaacagagcaatatgaaataaataaaaatagaattctgacctgctagattcgaaccagttcctccactatgaaatacacaccatgtatgacatcaaaatacttgattttttcatctagattccctccaaactctacaattttgagactaaaaaactaaaacaattatgatgtaggcaaaccacgttgagaacatttgacttacatgcaattgcctctgaacgttccttggtcgctccttgggtcagcaaggaggtttgtgacctaatagagagatgaaatcttcttcgatctctttcttcgcaagcttctccggtggcgataccctctgagatgtagcaaaggagtttaagaaccctacaaagaactaataagaacacgaaaaatgataataaaagcactaaaataccttggtgatgatcttcaaacaataaaagaaaactgaaaaagtgatttttggcctgtttggagcttctttttgattttttttagctgaaagtgaagttctttagagttgaaaaagtttctttcactttactaaatgggcggaaaaatttaaaatgtttgcaaccggttacaaccggttgtacttcttattttcaagtcaaacacccctctatttatcaaattaaatattatataaaaatgatatatgaggtatctaatatcagcctttagatcaaaattaagacaattcaacaactattaaagttgtgtggcactagtcactcaaaaaacccaggctgacaaccgccaacccctgtaaaagtatatatatgtgtgtgtatatatatgtatatatatgtgtagatgtaaatgtatgtattacatatatataatatatacacatactactatacgtttaattttttttacttttaaatatttttatttttttgctctaaataggtttctggtatttctttgctcggtgtttggcaaaaatcacttctcgttatattggaaggttagtatgcttatgttatattatttacaatattaaaaaaaaagtttacttgaaaatacatattagtagagtttgaatatcttatatatgcatccatagtgaagtaagttctgtaaaaaatatactgtggtcagatgggttgcaaaaattaattatgtatgtaaattatttttgtattgtgtttgtaatttttgtataagtgttataaatttgggaatgatcaattgtaaagtgttatgctgtcgaattttcggtagcataacattttcaatttgataatagtttttatttaaaaaataat

SEQ ID NO: 50649 - DNA, 2200 bp, Cannabis sativa
taaattattccgaatttctcaaaattttgtaagatatcttaaatagctataacgtaatgaatatgaaaaaaaattagactaaaaaatctttttgaatgtcgaaataagtagaagatgcatcagcagatccttttaatatgatacattgtagttacaccctacaaaattaattactttcaaattttttttttaataaatttaaaataaaattaataataacaaaaataaagtaagaatttacaatcttataaatacttaacacttataccactgaataaaattattaaatttatactactcaccaactcaatatattttataaatctttatattattattattattattattattattattagggcaagaaagaaagaaagagcataaagaaaagtctataaaagacagagaaagagtagtcccatcaaagcctttccaacccacaaaaccattatcattatcatcatcatcacttttaaaccaaacttcttcttcttcctattcaatattattatttggttggctataattgatttctcttcttcaatatagtttcttcatatctctctagctagggttttatatacaaacacaataatatatatatagatccatatatataatatatggagtggagctccttgaagtccaaaagaggttctttcagggtggattgtgctgctgagttatggatcccacagtcctatatatcttcatcatcatcttcatatatatatttatatataaaataagattatagacttgtggattgcataaatcaggagctccattactccttctgttagatctttctttggattgaagggagctctaccctatatctacctatctatctatatatatatttcagttataatattgttatttaaaaaaaaaaaaaaactggttttttatagttgatattgttttctcaattttaataacttgttttttttaattgatatgatttttatatgtgtagggtgtgtgtatatattgttgtgtggttgttttataaatacttttatttgtatatatatatatgttaccatctcagatctcaattcattatttagggtttgcttcttgtgagtacaattatttgttatgtcttatctcatgtattatataaattttgttatgatttgatgtgtagttaagtacaaaatctgtgaatgttaaattttaatgattttaaattatttatctatatatgtatataaacatgtaatatccaatattacatttattgaagaaaagtgagtagtgttaattttctttacagtgttatatcaacaccatctggggtatgaattactatatatatttatatcactgcaatttatgaagtatatatatatatggatttttcactactaggccaaagaaataataaatattgacattattttatatattttacgatgaataaagtttagggacttattactaatttgttaggggtatgtagttataaatatgtatgtcattacacaaggattaatttgaatggaatgataaaaaaaatttgagttttttattattggagattaattctgtctgaaagagtttataaattacttgctctattagtggagagcattagtgtactcttaaagataagataaatctttaattgaaaaattctcaaatttcgtttcattttattcaatttttttttttatgaaataattttgcatatatgtaaacatattactaatgaatttctagagtgaaggatttgatttaaatttaagacaatataagttgaatgtatttgtatatattaatgtagtaatgttgcaggttttgattgaaacccactatccgaaccacgtgactgtacgagattattagggtgtttagcatttgatcggctaattttgtgaagtcacgagactcggattgtgagtttctatcaagactaactagaaggttttaatgtatagtaatttttatacccttaatacgaatggtgttgaataattttccataatgtaagaacttggaaatagcttgctaattaattagggttttatatatgtactctgcaataattgtgtgctagcatgttatttcttttttgctctctttgaattagctatttcgattcttttggctgcacaagacatgaatattgggagctttgagcattagcctttgaaattttttgtgcagccaagcaatggtgctatatatg

SEQ ID NO: 50650 - DNA, 1412 bp, Cannabis sativa
  modified_base (1349)..(1371): a, c, t, g, unknown or other
ttattattaattttacttttaaagtctaatcaattatttattagtattattttttttttttgtaagttacataatttgttgctttctatactatcttttttttcaaaaacatattttatatactgattttagcctatttttatatacttatagtattttttttcccataattataaataaagtaaaataaaaaatattaaaagtatattaattaattatctattttatcttattttaaaactatatattaattaaagtatattaattatatttttttgtttctgttaatggtttctcattcaataatttttataatgatttgattgtttttatgctttttaagggcactattgtccgttttacaatttttgtgtctatgtcttgcttttaattgtttaagttagttttgtagtatagttaatggactagagaagtgatccattttgtgctcgtggtttctacattaacggccttttaattttaacagataagtactttaagcttttatatagatggttttatattataatataaattattttacaatctttttttatattatctattttttcattaaattatgtagtaatagagttttatttattgttattttgtaagttagttttgtggaggacctacgattacagagactttaccgataagtttaattttgaatataatttgttggattttgattttctttttttttttttttgtattagtggggagttagtagtaagttgttacaagttaaagggaatgcctttgaattagtgggattatacttgtgactggttctctgtaggtttttattgagattttattttttctttttgttgttgagtttttgtttattttagttaggcgtttaaatttgaatttagcctatcaagtttaatttaaggattcttttaatacctgttattttttggtgttgtttattttttcaagtagtatttcagtattacaagccgaaattttggctcttttagtaggactcaatcgggctcatttgtgcgaaattctaattagagaggtttattcagattcgctttctctagtaacaactatcaacaaaggaagattatttcttaatgagttgggggtgctgtttgaggatgttataactttaatgtttaaatttttgggggcagttttgtctcatgtggatcgcgattagaattctgcagcttatagtgtggttagatgatgagctatcttgatttgcgaaagtgtcgtcgccgattgtggattactatatcgttaattatgtgtgattttaatcaccacgtaaaaaatatatataatactttaatataaattaaaattttaatatatatatataaaannnnnnnnnnnnnnnnnnnnnnnaaatgtacaacaaaaacaacataattacaaaaaatgtgcaa

SEQ ID NO: 50651 - DNA, 858 bp, Cannabis sativa
tgcactataaaacttacatgagaggaaaaaattgcaattcacatgcaaaataggaagaagaaaaaaatgaagctaagctacggatatgagagaataaaaagaataatataagaagggtagaatatgtttagtttaatattaatataatcataaagtaataaataaataaattaattatttgttaattctcataaaagtcaaacggtcattacactggcacttagtgattcctggggactaactcactcttgaatgatattttctcatgattccaagtctaatatcttatttttggagtgaaacaagaagaatgcctgagacagaatcagaattggatcaactagaccaccagaagtgtggctacgttaaccttggcgcccagctcttcatcgggagccttgatggctttgtttgtcccccaaaagcacttgtatctttctcgtgggtgaaaataagggaaatgcctgggagacttctctagaatgacgtctcagagtgccccgtgtttaaatttgccaacctggacacccaatatggcatggaggcctgcattgggagcctaggtgggggtccacatctccgaaattggtcctgttgatgttcaatattctttatgatgaaaagtgctccacaaatttcagtttcatcaaatttgcaccgacggaacttggtgaaacaaaatcagtgcctaggttaaaatgtcaacctgggcgcctatagctgtgtatgggctcctttaggatttcgttgatgaaacatcatgtctttgcattattccttgatggatttgaggattcgggtccatgtatgaccccgaaaacttaaaccctaaaccctagccactatatgcctagatca

SEQ ID NO: 50652 - DNA, 1022 bp, Cannabis sativa
  modified_base (69)..(75): a, c, t, g, unknown or other
tattctgagcaagagaaggagctttttcaacttaagcgtgaggctaagttgaagggaggagctggagcnnnnnnntatgctcaagaatattttgagcaggcggataaggatcatgactattcagaggaggaaaggccgctcaaaaggaagaaactccttgaggctttgaagaagagagtggaaggaagctcagacttatctcctccggccaaaaagtctaagggcgatgaaacgaccccgtccagagagaaggcaccagcttaagtcgtcattgacctttctgtggaagaaactgtcgtggacgctcctgcttcaaaaatgactaagtccaaagattctggagaaggcagttcggacaggcctgaacaggcgaagggaggatccgagttgatcagaagctgatccgagctaatcaaaagcgaattcgagctgatctgaagccgatccgtgcatattaaggcccttgctccacctccaatactacaatcgaagaccaaaagaggcagagaaatgctcacccattacgtgaatcggtcggtccctaaggtgaacgagcaactagctggggcgaataacgacctgtctttggagctggttatgggaggagtcctaaaattagttcaaattttaatgtcctctctttgtacaaactggtttgaagatggcttatgcttattctcgagctaagtcagctgcagctaagaacgttgcaatttccaacacaagacggaagtggacttagccaagaaggaggccgaggaagcccgggttcaacttggggctatccagatagagctgggagaggtcaataaaaagagcttcttgctgctgagaataaggtcgccgaactgaccaaagatctgcaggacatgccatccactgaacaacttgaagctgatattgcctctttatctcaggaagtgtccagcctcaaggacgaaagagaaggcctccggacccttcttcgtaggttggagaatgaaaagaaagcccaagacgaggagcttgtggttgaggttcag

SEQ ID NO: 50653 - DNA, 2267 bp, Cannabis sativa
aaaaatcaacaacaaaataacaaataagatattataaaaatacataaaaaaccacattttatgtcaataaaatctaaaaaactaatagtacaattcaacatgaaaatgtggcctttacaaggctctttggtgtcctcttagattgcgcaaatataaatttatcttgtggcaagtaactcattcttatcttatcaaatgtaattttaaactacagacaatcttatcaaatgtaatttaaaatttgactcccaagtctgtacggtgtgtggcaagtatgatgaaaatcatcaacatcttttctttgattgtcctttatcaaaaagtataattcaacatatttttagttggctgggttttctgattcttttgtatagattacacaatgtaaatcataggaagttatttcatagtgactttaaaattttgagtacaatcacaaataagtgttaatttggcatgtctttgtttgctttgttgattatttagcttggttgattaataaaatactttttttattgataaaaaaaaaattagaaaaccgtaaaaatattgaaaattcgtataactgtaattttataatttatatatatatatattttgaaattatctcttgtaaatttatttaaattttattttatttctcaaataaatattattttcaaaaatttgccctaaatcctattaaaaaagatttgtatataatgacgaaatagaattagtggctaaataaatatcctaaaaattcaaagtgaaaagatttttacaatccacatattatgactttgcagcattatactattttctttagagcatgccgatataatattatttatttatttagttggaaataaaaaaaaacatgtagaaaatatagatattaatacaaaaacagagattttttttttattttaatttaataaaaaagtgaagcaattgactttcaacatcaaaaaaaggctttcatgctcatatatggtgctgtcgggcatgattatgtattttgtatagaactttctctctctctttgatcatataaatataaacataaatatatatgtagagaagattttgtggtaatatgaatgtggccaaaaaaaaaataaaaataataaaatacatacaaaataaatcactataccaaccaactataaagttttaaatatgaattttctgagtgttacttttgctaatttgccttaaattttagaattattggacccaaaaatgcaccctattgtaagtaaagtaagagcgacctatcgagtaagatcttagacaaaggagttgtatacaaaaaccaaattgctatgaatgcatgatcacatacatatgtgaccctctttcacaaaacacaatgtataaattatacaattaatgaaatctttgagtgttaagtcttgccagtttgccctaaatctcgaaattgttggacccaagtgcaccctatcgtaagtgaagtgagagcggtctatcgagtaaagtcttaagcaaaagagctatacacaaaaatcaaattgatcatatatttatatgatacaaatttatatatatatatatatatgtgtgacatgttcaatagaatcttttaagggtcagtcttgccaatttgtcttaaattttgagatcattaaacttaaacgtaccctatcgtaagtaaaataagaacgacctatcgagtaaggtcttaagcaaaggagccatacataaaaattaaacaaaaattaaattgtatatatatatatataaaaattaaattgtatatatatatatatatgatatatatgtgtgacctgttttcacaaaacaaaacataatatgtataaattgtacaatcaatggagtatgatgagatatataagaaagtcaaatggggtatataatttttcttttctttttttcttaactttagcccttttaaggtgatgggattaacattcttccactttgtcccccaatcttaaccttaatattatttattcatttaatttttcttttcttttacttttgaataaatatatattaattttattatttggccttattttgttgctaatgggttgaagggtttccatctctacttttgccttgagccattgcttttctcataggaaaggaataatatttgccagtgcttcccctatataaactccccctcaccccacccctcttttttgggggcccatttaaggtccaatcatgtgggcccatccttgtctgtgggcctagacccatcaaaaacacaaactctctctctctttctcacttaa

SEQ ID NO: 50654 - DNA, 846 bp, Cannabis sativa
catcccccttaaccactcggaggcactttgaaaacattatcaaaacataatctattcttaatatgcattttgtggcctgcaaggagcttggtttccatcataaaaaacaaaaaaaggttggtgctgattcaccaacaaggagagatttaagaatgctcgaggactccctaatcctcgagcattccagcaaatgatattcattttccttaacggggttgcgaagcaacacccaccatttcattcagaggcagagagagttgagacaacattatcatcaccttgagttgctctggcatgtttgagcatacttctgtcagagctgccaacttgagcatgttgtcgagtgaaaggtcgtttgactccagccgtagtggtagtggcaacactggtgagttcttggatagtaatgtctttggttaaaggcctcggaatagtgggagtgggaggacatgcatcatcaggttgggcaatacccttccctttatcagtgtgtgtaatcaccgatgtgaccatgatatgggaatgaggtagagttgagaaagccatattcaaactagcaagagcattaggggtagcagaagaaactggtgcatgatcttggtcaagagttggaaccacaaagtctgagcccaggtcgaggaactgatcaaccgcttgttgcaagccctgttcaaatttgcttccacgactcaggtactcttcaatgggtgtggaattggaaatcaaagggattcttattaaagagagttctagccgaaacacgaaggttttccttatggccaaatttgggaggaacaacaaaattatcacacctcacgaggcatcgtccacatttattataggtgt

SEQ ID NO: 50655 - DNA, 1121 bp, Cannabis sativa
tacctctttggtcataatattctagagcataatgtaccggctgatcttcaagtcttcttgtattctaaatattaaattttaataaagttgctatttatttttatttttttaattttttaaatagaatattttgtaaatagcttttttaagtacaccctaataaataaaacacaatattttgaagttccatttaatatattaggacaaaaaattgtaagcttagatacctcctcccaagttttacttaatttaatttattattattattattatttgcaataataatatttaagtaatatgatacctcgtaatagtaataactactaatagtactcttttcaacattgttattaagcattaataaagtctagtaccatttagaagtgacgtcttataaatagttagcgatatttcataatagttattaaattaaattatatgagatccgatacatataattataccaatatcaatacgccacctttaggtaaagatactaaacaccaccggtaccttttaccatttcactactcttttacaatttctctataaatatgtacatttgccactcaattcttacacctttcaaaaccagaagaagtttacacacatatatattgaaagagttatagtgataagagatggcatacaatcttattattacaccttttgggtcaccaaatttttgtagtagttttcttaagccaccaccaccattgatggccagaaacttctctactacttcaacaaaatctgataatacttctaaaacctgcaagtaagtatacatataacatttccattacttattattaattataatacaatatacattatagtggaactattaagcactatagccagttagatttagtttcatgactacttgttgattgttttcattctttgtccataagtgtcatgttaatcttcttttacaagtcaattttcgtacccaaaaatatatattagaatatattttaaaaaaaaattataagagtgtccgttatactctcacaacatcatttatgtaagtttttaaatttttttgaatagtttacagtgccaaaaatgacttgaagtttttagaaaatgtttagtaaattgaaatatcaagactt

SEQ ID NO: 50656 - DNA, 2002 bp, Cannabis sativa
aggatgttaatgaaacatacatggtagtaaatctagatcctagtaaaatatttccaacaaaatgatagttcatttctcgagatgaattatctcccaaataaagttataaatagaatagttcaactcaagagctattaagccactgcttgaataaggggtcactcataacgagttctagataagatcaaatataactgccataattatcttataattcgaatacatagcagttatgcatatatatttcctgcctgcaaaataagataaatgaaatgtgaagattgtccatgtttcattaatcgtaaatataggatttaataattgctacttttaacctatgaataggggaactcaatgtaaaaagggacgataaaaattccttactgaaaaaacattgccaatcttgtatcttgattctaaattttcctcaatattttcataaataaaatagactcatgaagtatgtagaattaactacaaaaccacattaaaaatgttcgatctttcatttattgttcattattgaatacattatttatattaatttgatattcaaagtattaattatctaagcctcatttaatgttaacgaaatttggagttaacagtttggtattttcaatgacagtttttgataattagactctaagaaaacacatctcctctaatcacatattttatatattaaaaagtttttttccatgaaaaatactacccatgacgttcataccgaacaaacggacacggggcatcaccctggaaaggagccacaggaaactcatctcaatgaggatcaaaacacaggaagaggttttagtgtatgaggttttgagaaaaatgacaatgaagagggtattccataaagaaagaaccaaggggcgtatgatcccaacaattacattccaattgtaaaagtggaaaaccgtcaacttcagcaaaggcttattgagtcaaaccaaagaaatgtgaagctggaatgcgaggctgctgcaataagagcggggcagaatgatacacctccaacacatactaaacctctcgtgaggcgtccatgaggaaggtctcccagataaagaacaaggagggctatcaactatttgaccatgtggatgagtcatctaccagtagctttctggtgcaagaatcaccctaattactcctagaggataaaaactacacagagttgtaaattttgggttttcagcctcgaataatgaagtagagtatgaatcactcattgttggactcaaacttgctcgaaaaatacacgttgaatagttagatatatgtagtaattcacagttgatccccaatcatgatctaggaaagtatatggcatgagaaaaaaaatggcaacctacctcatcaaaatcaaagatctcttggcacaatttaaagggtacacgataagacaaatcccaagggaagaaaatgcaactacatacgctttagcttggttagcaagcagcacggtggtcaacaaggaaaacttagttcttgtccaataccttgaagagccaagcatcacctgcttaaaggagattgacattttggacgacactcctaccaagatgaccccaatcgcaacttacctcgaatcaagaacactcccaagtgacaaaaataaagctcgaaaaataatgaggaaagttgcatggtactttattatggacggagtaatgtacaaacgtgaattttacttcccctcctaagatgtgtcaccgaggatgaagtagcacacattcgtgttgaggtccacgaaggtttttatagaaatcacgctaagggacagaacatgtctaagaaaatactcaagcaagggtatttttggctaactgtgataaaagatttaatggcccatgtcaaaaggtgtaacatgtcgtttactataaagacctaattcatgtcataaagatgatcaatagtagatcaacataaatcctgagtaatcatgaactgagttcatgttattagttccttgattacgagaagttgattctta

SEQ ID NO: 50657 - DNA, 1990 bp, Cannabis sativa
  modified_base (450)..(451): a, c, t, g, unknown or other
tttgttgtcgactttgctctagcaacagccttggaatagagttcttcgtattgagatgctgaagaatcccagctgaaatccatgttcatgacattctgaacgagttgttgccacctttcgcggttgttgttgtagtgatttaatgcacgctctaatgcactgttcaatccctgtcattacaacgaaaatgtcttcagattaaggatttcgagagaatcaaatttcgatgaaatgtgaaatttttgtaggtatgtttaggatgataataatacaagcggaatcattccgttgattttacctgctcatcgggattcaaaaatgtatagccatttcgaaatcggagaggtatggtatcatcatcaacatcaaagacactgcaggatgagttcaaatcaataatatttatatatatatattaatataaatagaataaatactattttggacccnntgttttgtaaaagttattaattagactctctgttttgttaaatgacaaaatgaaccctatattttttaaaatgataaaaataagacttgaactcaatttttaacaattttattttttaatataaccaactttaagacaatttctaacacgaacggatacaaaaaatagaatcagttttgtcataacatctctatattagattattattaagttttattttgacaaaagatcagttcaaaatcttatttatacaattttagaaaatacatgatccattttgtcatttaataaaataaaaatgtcaaattagtaacttttacaaaacatctaaaatgatatttatccatataaatataaaggccaaggaaattgggtacaaacctatcatatagaccaccagtttttcttacaataggtatagaaccatatctcattgaaatcatctgcacaaagccattgatgaaaaaaaatatacaaaattgtgataaaatttaaaactaattcaaactaaatttgatgaagtcgttgatgaaggaaaaaagaaataattatttattgggaagggaagcctattttacctgtgtaaggccacaaggctcaaagagagaggggataacgaacatgtcagaagcggcatatatggaatgtgaaagggcctcatcatattttagtatcaaccgaatatgatcatgattttgaaactgatttgcaatgccctcaaattccctctacagaaagaaaaaaagtaaaaaaataaaatgtcataaaaaataaaacagattatgagtcctgagtcctgatttttcttatgtccctttactcagtgatgcaatgacattgtacgtgatttttttgttttgtttttgacagagtcctgattttgaatcaaaataaacgatttaaaatagcaaactaaactaaataaatattctgacaaagaatctatttacttgacaatattccgcgttatagtcgtttatttgaaagtacctgaatatgtggcactgggcttgaacccagaagtacaaattgtcctcccagctctagtgttctgtatatcgcatgtctgataagatgtacacctttttgaggaaccaaccttgtaatgatacctacctaaataatcaaaaatataatgtagagttttagatcatttaacaactctcatcaactatgcttaatatgaatactattgacaaccatgaaattgaaaaaaaaaagaccatatttgtaatgggggcgtttggtgtaagagttttacttggtgggttttagttgagagggggtgagattaaggcaatctcaaaatcaagtatttaaataaagagtttgagattacctaaaaataaacttaaaagtggcccccacttaaacataagctctccactaaaattataccaaacaccccataagggattcaaggctgtttttgtaaggttagaaagaacaacaaaacaaccaccaatagaagcttgaaaatcaattgctatttattttaatacaattgttacttatgtcaacttgagaaagttaggaaaa

SEQ ID NO: 50658 - DNA, 2153 bp, Cannabis sativa
caatgattttagcagccacttggaaaagaattccaatcttctgaaacctcttctgcattataccatatcctgtagattcatgggatagcatgtttttgagtaccggccgttccaaacattgtcagcaatgatggcgttcactgcatcggtaggatgaaactgatcccaccatatgtagttagaagcatcagtacaagccatttctggtgaaagacacataatccaacctttgtacttgcctaaaccacaacaagcctcagtagtcacattgaaacctgaagaaaccaaaggaaaaaaacctcaatatccagcattagatgcaaacactaacacaatttaggctgtaatactcaccataacttgcagggttctttagtatatccatggcaccttcaagcacatcacagaagattagattggaatttcgaagcttcttaccgagctcttcaatggtgtatctcatgacaaagttaaactccattatcatgtcgtttatctcttctatacattccccatttcggctaccgaattgccacaagtagtgaggactgcagcctattggtggcagccccattataaccatctttctagcttttaagttgtacaagttctgcaccaaaaaaagaagcaaatttttaaaaattccaacacataataagggcaattaacatagtggaattgttctcctcaccttgagttgttgcctaactatagaagctaagaacttgttgaaagtccatggttgatagatggtttgaacattagacacattacgaagatagtaatgtatgtagtcattgataccaatcgaaatgtaaaacattgagtttgagattaaatcagctgcagcctgttctcccatacttaacacaaatttctcatatgtatctgtgaactgctgaatttgttgtgtaaaggaaatcctttgaccctgttcaacatcacaaaagtaggtactgaataatgttttctagattctagggttctttgatactaaaattgaaagaaaacacataccaattctgatccacttgtgaatatgattccagctccagcagaagcataattcactccatgaagcatatcaccaacacttccagattgcccaagaaagcttggtacgaatggaagtcccagatgagcagctaaacatggaattcaagaacaaaacaatcaatgaaacatttcatcaaacacattcaaaacaccagcttttgataaaaatcaaaatcccaaactttaatataaaagcatttctcttcaagaaaatcacactgctttgaatttagggaaagtgacccaattcaactaaaaacataaacgaagagaaaatatcaatcttttccacttttttctcagtaaccaaacagaaaagaatcaagaaaactcggttttaactcaaaatcaaagaagaatttcatcaaacacattctaaaatcaaaatcccaaacttttatacaaagaaagtctcattcaagaaagtgtttcccttgaagaaaatcacataaccctctgagaaaaacccaattcgactaaaaacatcaccaaagataaaaatcaaatctttacaactattttctcactaaccaaacagaaaagaacaaagaaaaccctcaactcaccaagataatcaacggggattcttccattggagaaacggccggtagggcggtgagtatcgaaatctcggccgtagggaaggcgatcagctctagcaagagtgccgaggaagttattggtgcctgaatcgacagaggaatcgcctatgacgaacattgcagggaccaatggaggaggatgaggaaattgggggatggtaatgccggtagttggatacacagaaattgaagacggtaaagttgtggggttaatggaagtaatgagttcttgagggtattgtaaagcttttgttagtgcaaaaatggaggagatgaagatcaagatcagaggaggaagaacagtattagcttccatttttggttttggaagaaagaaaatgaaaatcagttttggcgggtaatatggcagttaatgccgttgtgacttgggctttttttaaagatagcccaagcccaagcccagcccagcccagcccactcattcaaaaatacaatgatttttataaaaaatactgaattttggataaaagttta

SEQ ID NO: 50659 - DNA, 1110 bp, Cannabis sativa
tgccccgtactcggaccaagacccataatagactcgaacgtgaccctaaaccctagactcgcacctgtactcagaaccaaaccaagatccatccttaaaccctagacttcgaccaaacctggaacctggcctctggaccaagacccggacccaaactcaattcagaccctgacctagactcagaccccagccccagactcgaactgtggcccgagccccagaccccagaccgctgaccactcttggacccgaacctggactcctagttaagatttgtgacctggggctggagatgggatccaagtctaaggttggggtcgaggttcgggtgaagtttatggtaaagattgtataattttatataatctatctgtttaccaagatttttgaaaactaattataataagttaagaaattaaattatgtaataaagagtaaaagatggagatttttatgtggttcagttgttaatgaaccataatccatgagtcaactgtatttagctaaatagccttgatgtattataatgttcttgataggcttaagaaccctatagtgtttacacaatggatttctaaccatttacatgagggtataatgtaatatttataggctaggatccgggttcagatatacttgtgatccgctaggatttgcatctaaatttggcccactaatggggtaaatacataaaatgcgttgactttggacccatatactaaggcctagcctatggggtgaaggtgattcgtacgcttaaggaccacgcgatatttgatagatggcatgtgtgcatcgtctttgtgtattgtagtgtgagaagcgaggtcgatggacaaaatgaaagtttccttttggtagagcgcgcacttttagggtttgacataggagattattaagtgggattcagtgtcagatgggcgccatgtcatcctggagtaggtttacagaaggcctcttgaaatgcccttccataaatatcccaaatgctaatctagaaggcctcaattgctctttcgtatttgggccggacacacctctagattcagagagatttggtcttggacgtgaatatcttggaccttggacaagtgtgatatccttccatac

SEQ ID NO: 50660 - DNA, 1911 bp, Cannabis sativa
aaaaaaaaaataattaaaattatattttaacacttttatattttaattaaaatactaaaaattatattaatttttttattgtattataaattgaataaataggatttgtccaatctaactataatccttataaaattttacccctaaatttttctatgttacaagagttcctctaaattataaaaatcatttcaaatatcctccttcaatacattttgctccttcatttaagtaatttattaatgtagcactaatataacgttaatttaacccaattcaagaattcaaacaaaaaataaatatttcaatagcaatctaataataaattataaaaatatgtatgtgcattcttagagctaatgtttgtatgtttaaattttatatactagattttgagaagtttaaagttgttaaatagacccttgtactggaactatacatataattcattgtcacataagcaaattattttataaaatgagtagcaagtaactaaaatgagatatttgcaatgatttgtatagttctgggagaatttttgtaaaaaaaaaaaagaaacatttttacacctaatgtaaatatgttatccattgttaaaactattaccgtcattcaactcttaatatatgatctacaaatgagttaggtcaaaattattgttttaccccttagtgtattttatccttaaaataattagctctttgtaaatgatatttctgtaaactttaattatagaaatgagtgttcaatcatttaactccatgaaccaaactctaaataaattattgtttcacttctttattaaaagttataaatttttctatctatgattaatacaaccactcaattatgctaccaagtccctagtagaaagtatgagctagaccgtaaggaaagctattaacgaacaaattaaatgactcagataacataatcagttagagtactaaccactcataattgatatcgaattaacctatggtcaactatatgagcgactagagtagataataatagtacatttactcatttatatctaaagtcaataccgatttagttcgatgtaatgaatatatttgatcttatctactttgccaatatcaagaacataacacttgcctagtgtaagcagattgtatcatagattagcaattcatcataaaccttgtgcactaccacttgcatatatgaacatacaatcataattatattctacagtgattgtgtcactataattatgattttcttcatatgttccaaatttaataaacgcatatattaaagtaaatcgtcatgggaataaacatgtaaagaatgcatcaattaaataaattaatttctatttatcatattgataaataatagtctataaaaaacatggtataacacccctactgttacgatgttttcttaattaatatgttgatctttcctaattaaagggttttaacataaaaatagatttagtaaaatttgcgtaataattaaaacttcactaaacacaaaacacttttgtaaaaaaaatacaaaccgaaatcccaaaatctagttatagaacatacatagcatatagtatcaaaagtgtcgtttaacgatatagtcaaaaaggtattagcggtgtctcgaagatcgcaaccctttaggtttagataactagatatgtacaatcttcaccaagctcattactcacggttgttcagcattcgctttgccttacctacacataaaaatattgttggaattttatgcttaaacaaaatctaatttcattgtaatcttatttactttcaataaagatcagaaatcatatatttaccttgttgttggtacatatcagagttagaatagtgaaagcaaatgtaacaccctactagtttaggggtgttatcatgattttatattaactatgca

SEQ ID NO: 50661 - DNA, 796 bp, Cannabis sativa
tttttttttttttttgttcatgtacgttaactattctaaatattttcttttagtgtggatgagttattcaatcgtgaaaatattttatataagtattatttataaaaagataaattattagttcacatgtatctatagttttataatatttataatatatcttgatttttttttaaaaaaaaatacatataaataaaatatatatttcttcttatttcagtatattaaaaataatattttaattttttttcttattttagaatattaataaaatatatatcaatgaaaaatatatattatttttaacttgataaggtaacataaaaatatttaaaattaatacataaataaataaaataccattattaaaaagtgaagactttatatttctaagaaaataaaagtttgaaaatcaattggcttatgactagcttgttaaattttatataattgaggattaatttgttaaaaaataaaatttaaagaccaatttatcaaaacctatataatttcaagaattacggtacaaataatttaggcgggtggggtgtaattattaaaattaaaatatataaatagaattaaatttaaaatgtatacttttattattattttttatttttttcaccaatttttattattatttaaaaaaaaataattatatttttatatattcaagctaagattataaaaacagcgcttcattattatcttcccaatttttcttttacattttattttgttaatttctgttagagagtcccacattgctaatgtgtggaaagaaaatagaata

SEQ ID NO: 50662 - DNA, 1700 bp, Cannabis sativa
gaccttccccaggcgatgtgggattgcacagcttacccgatatttccgcttacggatcacgggactactgactgtcacaggatccatccaatctaataaataaataaaaaaatatttaaatttaaaatctaacttattattcattcaaactaaataaaaatactaattaataatcagttgaatatttgattgtattggattttggacaacacatctaatactcgattcaatccaattggatattaaaaaatatcattcgatccaatctgatcataattggatctaataattgtcagttaattttcattagatcggtcagttgtaattaagggtggcaattcatgcatgtttgtgggtcgtgttgagacccatatgtattacaagtatatacttgacctaaacacgactcatttaataattgtatcaaaaaatgaaacccaaacatagcccgttaataaaggggttgacaaaaggacccgtgtaacctgttttacaaatgaattttgtttaaacatgtcaacttattaatacattaatgatatatttaacacgtttgtgacatgttcaacacatttataatctattaaagtatttaaataattttaaataggttattaaaagtcagtttcgtgctaaccgtgtgaactccaaacaagactgtttattacccaaatccatttaagagaaacccaaatttactaatttttgtatgaatttcgaatcgtattatcatccttgatttgttttaccaattctaattataattagattgtatcgattcataaacaaccttaataattatgacattagaattttgtatagtggagaagaataatttcctcagaatgacaccttggcttgacctacccaaaggaataaaatgatataatatttatgtatatatttaaattaatatagtgagattaattcctacaaatgtactatataggctaaatgggataataccaaacacggtataacacttctaataaattcaaacttagtttattattagggcttactttgacaatatataaaactaactaaaatcaagttatggcacatgtcaaggcttttttgctttgaaatttcttcccctttaaaaatgcttaatcatcatttcattttctaaatcttcatcattgtccttttggattttaatccttttatttctaactaccattttggaaaattgggtattaattaatttgtttattattatgtaataaaaacagaacaatattcataccaatatatgtatgtactataattaaccaaacttaatggaagttctaaaaaagtgatattgatgcatttttatttactttagtacatgaaaatgttatgtaggaattttaaattgtcttttacaattttgccctacaccaacaaaacaaactaatcaattttccaaggtcaattttgacctttcccattccctgacttttcaaagtcagcagagtcaaaacgactccgttttggttttgaacaaaatcaaaagatcgagactcttctcgatcactttctctttcactaggtttaggtttagaaaccctagcagagtgtttctctctgagaaactcgaatccaaaccctagcaatcccagaaatccaagcacaaacacaacaccaagatcagatctaaaatgatctgatctatacacaaccacacacacaaaaacagaaagattagagttaga

SEQ ID NO: 50663 - DNA, 2620 bp, Cannabis sativa
  modified_base (1938)..(1938): a, c, t, g, unknown or other
taagaatttcccttactttctcttgctttcttttgcctgttgaatcacctaatgtcccagcataaaatgttgcatctatccatgaacaataagaggatcagtgttgtcttgcaaatcactaaacatatttccctgcttccttgtcattcttttctgaatacagttacttttcctttttggaagttcccaattctccacaatacaatctcctaattgactctcctctggttgcttaattaacttagcagacctattcaaaacatccttttctcctccttggtcaaactgttggtgcaaacaattccccacttcattaatgacatccttctccaccaatataatggggctcttctcatgtactggtaatgcctcttggtcccttaatccttctagggatttattatatttttcctcaacttgtatagtggatttggcctcagttttagacatcctagaatgtcctttgtttgatatcgcgacaaacatcagccctgtgacataacccaccacacttggagcattttgtgggtaaccattcatactcaacagggacagtatcaagaactccccattcattttcaaattctatagctgcaggaacttcatctttaatctccatctccactagaactcgtgcaaacttcacctgggatctttctttggttatgttgtctaccattataggagtaccaatagtgctaacaagagcactaagactgttggtgccccaatattgaagacccaaaccaggaaacttcacccaaataggcacaaaattgatcaatttcatagaattaacctcaggagtccaaggtcgcatgataacaggtttattatcgaagtgcactccccctgcctcaaggacataatctctggtggcttcatccttgaatttcactaatgttacaccattattcattctggcaattttttcaatccctaaatctccccaaactcttctagcaaatccctcaaaaactttaatgggtggattagcacccataacaacacatagcattgctgttttccagtactcagattcatattcaattccagttaggtcaagcttagcaattaccttgccctcatgtttcgccggaggagtgaagtgaagcttagcaccaacataattggccttcggcgccagctttgcccagagatttgatgcctcttcttgcaggttcaaactagaaactccatttgcaggtggctgatgagaaccccttgcagattgcagtttcggaccggaaccactagtcgcaggtacctagagagatccctttgcaggaactcgagcatcttcttcaacctgtaacaggggaaaattcccatccataacatccataaactcagctgatgaatcttcagtcatcacagcttcttgcgcattgtgaaatcgagctggaaggtcgatcgattgaaacctaatcttgttggcttctggtttgacttttccttcttcatcgggagagaaaatcgcacctcacaccttttgttaagtattactaactattattcacaaggttattgtactacggtttgtaggtgtaaacacaacttctagctgtatggtcttgcgatttaattaatgaatgcagcaaggtgtcaccattattcgtaagtaattttgtttacattaatattcagtagtttataggtcaatttattcgttaattttgttatcgtcttaaatgcaagtctgcaagacatgcttagtttttttttttttaaatgattatgccttagtgagactaatagttttaaattataatgatatcatcataaatatgaatagtttatgagatctttgaattactctgtaagatggtttggtcttggaaattaaaaaaaagaaaaaacttgagaaaatgaattggtgtatatagttatgttattcatttcatatactatgtattttttttttctaatatcaaattngagggtgttggatctatctctctaagatcaatctcatactctttcaactctctctcttcaaacacatgttactaacttctacaattagaaagtaacacttttttttttttgataaatcagagaagtttgtattgcatcaaatatctttttacaacctattcaccattggttctaaaaaaaccaatctatttacaacattttaatccaccttttatcctccttactaactttttttgtcaaaaacaatctaacttctatatttgacatcatttttcactctttttacaattgtatcaactgtataacactttgaattccaccaactttcatttcaacacaccttatttttgctttgctttagagttatgttttttcataaaatttatttgcttattttttctttcatagatttagaaaggattatacactacaagaattttgtctaaaccgccggtaattatccgccagtattaattggtcgctattaatgactattagcgaccaaaagggacttccgccggtaataatattaataccggcagattaatagcggtggggtccgccgatattagtgtcagcagttttatacgctgacacattaataccggcggaccacatttagtattcctccggtattaatatttctttatataaaaaaattattatttttaatatatataat

SEQ ID NO: 50664 - DNA, 1850 bp, Cannabis sativa
attgatagagattagtgagattgagtgagaatgagtgagattgaaagagagggatgaaggagggatttgagagaaaaaaaaaattctaaaaaaaaaacgaaaatgggattgctcgtcgaaggggatatatgaacacttttaccggcgcattgaattgaatcccacctaccaccactttccacgcggatttttccccccaaattttcacgagggcggtcaagattcccaccaaaatttgggaaacttttaccggcgcaattttgcaccggcaaaagccttacagaagtggacatgtgttcgcgtcatttggcggttcattgttcatcttttaccggcgcatttcattgcgccggtaaaagttatagctgaatccaatcccgaattcaacatttcatttatgctgacaacttttgtcggcgcaattggtcaactgcgccggtaaaactaggctttcttgtactcttaatgtgtttagcagtcttcgtgatgacgagaagaaagcatgggtaagagttttattggatggtcatattgtatctcaaatttgaaaaacataatgcatataaacttacctagaacttaaattattatgtgtataagttatatatatattatgtttggaagtaaagataaaaccaattgctaatcatataatattgttattcataatattatctatttttatttagttatgatttatattaatatatgttcatatattatttttattctactataaattaaatattatttttattaacaataaaaataattttcattttattttttataaaagatgaaaaaaatatgggttaaaagaataatattttatttaaattttaataatactttaaaaatataaataaataatatttttgtcaattcaattcaattttgattacaaatttacaatattcattaccaaaataaaccaaatatactaatagcattcccgttattattagtagtacattctattactatttctattaccattacaatgtaaactaaacaccatcttaattctttagggttttaggataatgcatactatgtgagtgctcatagtataatgccttggagttttaggataatatataagttcctaacctacctacctaaataccacgtgttatggtaaggataaaaaaaaagatgttggttaagttggtgaaaagtggaaacgattttaacatgcatggttaaaataaaatatccatgttattaattaaaaaatgtgcattaatgggattggttggtggcttttatctataaaagctataaatatctccaggtctcactctatcactccacgctattccaatccaaaccaatatccatggctttcaacaatgcgctgatggtattgctactattggcacttgtggctgcaacaactcatgctcgtgtggactttgtggggctttttgttaatggtcattctccctattgtccaccacctggtgagtgtacatattctgtacgttttcatcaatcaacggccgaaaggcttagttttgatattttataatgtgttaattaatatatattcttttacattcaggaccaacaaaatgtgtaaactgtgagtgtaacgaagaaggtgggaagttggtgtgtgttcgtactgattcgagaaaagggaaatgcccatccagctgcagtggaggttgcgcctgtgactattctctgtgtcctcgttgttggtgctcctatgaggttcaggcatgccctaaagtctgccccccaccaagtatcaccactgccgaagctgcgtttgagaataatcttcttgcttccaagacagactaagtaattaacagtagtactgatactgtgctttatcttaa

SEQ ID NO: 50665 - DNA, 2312 bp, Cannabis sativa
  modified_base (2262)..(2263): a, c, t, g, unknown or other
tgtttaagaattcagtaactaagcaacgataacaataatggtagaactttgttgattattctttaattttttagttttttaaattaaaaatatattatcttataatagtaaaactttttttttaacaaaaacagtacattcacaaaaattattacacaaggagagggaaatcctctaacacaatagaggcagtcattaaaaaaacatctccattccaaaaactaaaagttttacaataaaaacatccttagctataaaatgcaccacttcatccgtggaacatggctggaaagacacatcaacaataccaaattccccaatcattcgacgtatatttgaaacaaataaagtccattccccacacaagtcaggtggccttcccaacatggcaacacccatattataatcaaaagaaatcttacaacgctccaaagataacaaaccagccaacttattttcatgtttaatagctagcaactcaataaaaataagagagaagggtctattcaagaaaataccttacgctgcaatgatctcccccgaatgatttcaaccaccccaccagtactacaacaatcatcaatctgattaaccacaacatcaatattaatcgtcacctcgtcaatccctggaggttttcacttacacttcgacttattcacagccaaacacccccatgatttttattccaaaactcatgtaagtaaccaacaacccaatccagagcctgttccatcaaaggaacaaaagaattatgtaacatataattacgcatatactaagcccaccagacgaatacaacaaagaaatcaaacctgtcatttggcaatatccttgcaatatagctgagaaagtcaataggatcttcatctccatacttacaaataatctttccaaaactagcaacttttcataaacttttaattcgaccacaaccccatatggcacatctacactctctaaatgcaaagcacatctacaacaccccgccacatccctcctacccgcttccttaacaccacagaggcaaccatccattacaaagacgccaaagaaagtgtttaatctttggtagctccttcaaaccaaaaactcacctccaccattgctcgacattgtccatattcgacccctcctctatcttcttcttcttctttatagccacttgatacccactttttgttgtatactctccattcttattatagtgccataaaataagatctttagaatctaacgcactaggcaccaaactaagaataagagagacatcgtctttatgaaaattagcttttaagaactcaacatcccattccccagaaggcaacctcaaatccccactctaatgcctggcaataagataggcccaaccaaaaaataagaatttgaaggtcttggcagccatcgatcctccacaatacgaactcgatttcccaacccaatacacaactgataaccctccaaaataatctccctcccccataacaaactcctccaaaccaccaaaagacaagaacccaccttggcattcaaaatatatccattacaaaaataggaatgcctcaacacttgagtcactaaagaattctcattccgcagtagctgccatacctattttgccaacatggcctgattaaaaagctccaagtttttgaacccaaaacccccttctttcctcttacaaaatctctcacatttacactaatagatcttcctcttcctttccgtagaacccaaccaaaatttagcaattgaaccatgaacattgttaataaaattctttgtaaacctaaaacagctcatagcatatgtcggcatttcctgaataagataagagtgtggttgtgtacgtgtgtgagagagatggagaacttgctctatgatgagcttcttgtagaattctttcagaaactctcactaagttcatgttcttcagtctctttggtttcaaaatgctggcttcatctctaccgttcttccaagtccaccctctctctccaacttaccattttctgttactagtttattttgttattgttttattattgttttaagattgttttactgttattttccttctttttttatcacatttttctaaatattattatacttctctatttttaatagtaataggaaaataatgacatttatatgtaagttattttcttcattatcctatgctccaatatatgctcagtttttctctgttgtccactgttattttttagttgttttgcttcttgttgaccgaggttttcnncaactattaaaatataattataataaggagctgtaagaaagtgagatga

SEQ ID NO: 50666 - DNA, 1204 bp, Cannabis sativa
tcaccatagccttgaagtgcgtgttgtaatctcgaagtgtaaaagtgatgatcacattcaataaaagctcattcattttgttattgactcaagctaagttctcttcccaattttatatttagttcttgagttattattcatcataacaagttagagtgaagcaatgcaaattgtatcagaaaaaaggtgaattgagaagaatttttcaggattcgcatccaaccaatcaagaaacaactgcatcaattcaagaatcaaattcgaacaatcaagaacaagaataaaatggttacaataaagtttgaggtggacaaattcatttgatcaaatgatttcagtctatggagaataaagataaaagcattcccattttaccaggggatctatgagggtcttgatgaagaagccatgaaattgatcaaagataagaagaggaaaattgagattgaggccaaaccaaatagtgccattcttctcagttttggtgatgaggtgttaagagaaatctctgatgaaaaaaaggctttaggattttagaacaaactggcctcaatttacatggagaaatctctagctaataaaatgtatctcaagaagaagttgtatacacttcgaatggataagtaaaaggaactaagaaagcatcttgatgattacaacaaaattattcttgatttgaattatcttggagtgaatataaattatgaagactaggccgccataatcctgttgagttaccatgacagaggttaaggttgcattgagttcaaaaaatattcggaagaaaggagatgagaaaggagaaaatagtggagaaggattactaattgttaaaggaaaatttgcaaagagggaatacaaaggaaatcaaaactctaatggctactagggtaaccatccaaggtcaaattcaagaagctccaatggaggatcaagttcaaatggaactacaggaaagaaatgttactattgcaagaagcacgaccactttagaagtgagtctttggccttgaaggctaaactgagaaggaaaaatcatcacaagtccaaaaaacatgggattgcagacataacaaatggctatgctgaatttatttcttctgagtagatggccatccgacatagcagatacctatcaacatgagctgggtagctattaattagctagagacagagacatgagacaaagtaagagccctaatca

SEQ ID NO: 50667 - DNA, 1497 bp, Cannabis sativa
ttttaaaaaaaattgaaataaaagtctttgttttttatgatattttttgttgtgtttaggatatttattaaggtagttaaaattggttaaacagttataattgtcggttaatattagatctaattatcatgttttatattcttactttaattattacgtcataaatattaaataatacaacattgtatgattttgttaaaaaaagggaaacaaaaagcacattgggagtttaatgaagcaattattgattgaatttgattcttgtaataaattgataattaattaataatagaaaattaattaaagtacaatctttgttaattattgtgttgagatgttcccatttttttttctttttttaaattaatttttcaaagtttataagtgaatgtaaatatacaataatgtcaaatgatgatatttttggtccaaaactaaattaaatagaatcttatgaataccaaagtttatttatttattaatttcaatagttattatgataataatcatagtaaatcttcaccttactcttctttttctttttttttttaaaaaaaggttcatattgtttttgagagttgataactacattttcatatagtaaaaaaacaataatagttgatatgataataaattaataatcatagttaaatcttcatcttgaactactttttcttcttcttttttgaaaaggttcactttgataataagacattttcatataatttgttatttaatcattttttcttcctaaaccttggattattttcctctaaatataaagggacaagttttatttatttagggcgcgttcgaaaatttgttagaccatgtaattacactgtaactgtatacttaaagataattgaggggttccaattataatttctaattctcatggcccccaggtgtactaaaaaatattgttttccttctgtaattactaattgttttgccaaactagatattaggaattcgtatgtaattgccattttatatccaaatacatattgtataataaaatatagtgtaactattatacagttacttccaaagacaccgttacataagtaatgctaacataaattataataaaaaaccttcatagctatttttttcatcttatgcaagataatgtgtgtgaatttaacttcataacttttcatatttcattgtagatggtatctagagaggatcataagacagaccttgattcagatgaggagcttccattcagtagttcatcaccaaccaaaagaaaaattcattcattggattttgagatacctcataatcatatgcattcttcaaacctagacattgcaacaaagtcaagaacatttaattttatgacgattagtgtacttcgaagtatttacattgtgttaatcagagcgaaaatcaacgtcttgctaccgtttggccccttggcgattctgctacattatactaccggcaagcatgtaatggagtactacactctcttaatcaacttat

SEQ ID NO: 50668 - DNA, 1587 bp, Cannabis sativa
aagctagaatcacaagtgcccgacaaatgtccatactaccaaagcgaagattgatgatcaagagccaccatagcacaaccaaaattgccaatactgaaggatccatccaccaaaaggcatttgtttgagcgcagaacagggaaagttggattagacaaaccagaaacaaggacagtcgaatttcccaactcctgatgtgataattcaaagaaacggcagtggatatccctcctaactttatctaaacttggcccagcataagggggatgcattaacgcatttctataattccaaatgcagttaatcacaataccagcacaacataacatacgatttctaccctccgagtccaagtgctcaataagattgaagataacctcggacaaggaagtgccagggatatcatccattctcaaaggcaaaggagaagagaaccataaaccaaccgcaaacggacatctgcaaaataaatgcatcggagtttcagatgccaattgacaaatcgggcatatattaaggtccgacgccgaaattctgtttcccgtgggcagagagtcagacactgctctccaaatcatgagactcaatcgtggatgaaccttagagtaccaaatccacttccaaagtttgctaggcacaccgaatggcgacttctgatgaagccaataagcccctttaacactgaaccgcccaacatccgagtctttccaaataaggatgtcatgatccccattcttatcaatatgtatggtgttgattcgagaacccaattccgaaccaaaaagatacctcaagtagcccaaattccaggtcctcgttcttctatacataagatccgctacacaaagcaagctgggcgctttttgtctaacattctccatcaaagctcgaaattcctcataattcatccaagggatccaaggttgccaccatacatccacttcctcccccgatgaaatgattgtacacgccccttcacagattgttctccaaacgctcaaaatacctcgccaaataaaactgtcagagtttttctcagtaatactccaaaaggactgtctcggatagtacttgcttttgaaagccttacaccaagggctgtccatcttactagccaactggcaagctagtttagataagagagcatggttaatatcttcaaaacgcctgaatcccaaaccaccaaccgatttaggttggcataaggaatcccaagacttagcagcccaaaatctcttgttttctggtgagtcgttccaccaaaaccttcgcaccaccgcatcaagatcacgacaagtagtgagaggaattttaaaagttgacatggcataattcggcatagctaaagccaccgaattaatatacaccactctaccagcctgagaaagagaacgaactcgccaaccttcaagtcggtcccagattttagttttgaggaagttgaaatccttcctcttgcttcggccaaagaggaagggattcccaagatgcttttcagtatcgttaatgacccccatccttagaccagattcaatagacgacgttagattattagcacaatttttcgaaaagaaaatcccagatttc

SEQ ID NO: 50669 - DNA, 1066 bp, Cannabis sativa
tattattattattattatgtaaagaaagtgatgatagtaaagtaattaatgaagaaggtaataaatgaggaacataaacgggattagtttgtttgagaagattaataaatgaggtggaaaaaatagaaataggtggcaattattgattgggggacaggattgggatagggaaatttgggacagaggatttttttccatcttcaatgtaccagtccctaactacgttgggaaaatccaaagtgtcatctatcacgtgatcatatataatgtttaattattttaaatttaaaaacctatataatctaaaaataaataaaaatattttttttattactagtagtatacatatatccgtttaaacttgtaggatttagcattatatattgactatataaacaaatatgttactacacaatatctatggcacatatatatttatatatgtagattatatatagtaatatagttgaatgacatacatattcgtttaaacttgtccttgagctcagtcatgtgttggtttttggtgactcggaagtagaaatcaggataatcagcttggtagaaggaagtaggaggattggccgttccgatggctagcacggtggccggaccattggcacgttgagcctttcgaatttggtccacacttatggatgccatcatataataattataataatgtatatatgtatatgtattgtattatatattgcttagaaagatatctatatatatatatattatatatagagtgaggaaatatatatgaagtataagttgaatcaattattaggttaaatggacggtcatctgagtggccacgtatgcaaatgtatacaatccaacacactcacacacaccaactacgtacgtactattaatttagactttgatacatgcacgattgtaatttctttggactttaattaaacttcaacaacaattccacaaactttgatagttaatttcaatggagaaatagcacaacctagcaccttagctattagtgtaattaattaagtattaagtttgtataacttaataactataatggaatatttta

SEQ ID NO: 50670 - DNA, 1166 bp, Cannabis sativa
tcctcttgaagaagaagaagcttagtgggaatattctagagttgataatggaattattgtaatgtgtttacacagaataacccttcggcccttaggcaaaaatctgaaagagaagaagtcaaggatcggaaactgaatcccccaccctgtatccctttaggtgtatttataggtccatccctttacatgggcaattttgggtggatcttcgcaaggatgaacccccaacgttggattggtaggtggcatattttccatgtggcctttactgatgtcagattgcactggttgtactggtggtgctttgaacgtgtgtcgcttcagggctgttcttatttgatttacccttatccttagtcgttggatggcactgcatagtacacaaggacatgcatgctatgcatggtagcgcgacatggcggacaactcttgacattgtacatagaaaagcatggtcattgggtccgtagcctgatacgcatgggttgagcttctgcgggtcaaaggcgtaccccgaactggtgcatcctatcttgaaaagatcaattttcctcgtgtgagcatagggtccccaacttctagggtcgagtgagtctctagctcacaggcatcttccttagggctcgaatctgaaaagacttctcgtgggggaatctgttctgtgatacctctcaccttctcggagcacggggcgaggcacttgggcagccttaacgatttcttgaatttttcttgattaatttccacatgtcatgcttgcaaaaatgcggataacatttaatccgagttctcaggacataccgtggtctgagagcttgcaattttttctcctatgggattttttgcgctagtggattttttgacaagacttttaatgttgtatgtcaatagccgtcaaaccgaagcgtcattatgtgggaggcatgatttctcctgcttccttgtaagagttttaaaagatgacttctagactttgttgcgcgtgtatatctggggaactcgaaatgacggcgattggacttgggcagttttttcttcgagcattttctacgatgcatgtaacgatgggagtcatccattgagaagtgaggtatcctttaaacttctcacatctaatcatcagacatctcttggggcgaaccgaagcgtctgctttgtgtgaaatg

SEQ ID NO: 50671 - DNA, 2098 bp, Cannabis sativa
ccggcgccggctgccggaaaacgaagaggtcggctgatgaggtagtaaccaccttgaagatcgatccttgggccaccaagattggctatcccttccatcaagaacccttcggttgggccttgaaacgcagccgacattgcttccaaaagtgcgtctgtactgtccgttttccccgtcggatcagcgccgtacgatgtcacgtgatacactcgtggatgactctccccctgttctctccaatcatccaatataaattaatcgaacacaacgacaaaggccatcatttcattaatatgaatatgtagtgcactatatataaatatatataaatatgattacctacctgtgaaggagaaggagaaactaatggagatcctgaaacagggacagccgaggcttcgaaagttttcattttccgaaaatgggctgctgccaccaagggagactggtcccctccatggacatgggttgtgaccaagtttgctaataaacccattatcatacaccatatcatcaaacctcttacctcaactctttccattcccattttttctcttaagctacagagctaggaagagaggagatattttctctctctctctctctctctctctctattgttgttgggtttttagtttggtttggtgttaatttgtctctatttatattttacatttttaaataatattacagggcgaattgataggaacatgaaaagagaagggcgtaactaagatttgctaagaaaatgttttcttattggaatcattcattatacaccattccgtatatgtacatagtattggttctctatatgtacatctatatataatattatatttaagggatttgttccttttttatgtctctctctcaattttgtctgacagaaaagtaaaagtatttatttaccaactcagttgttttggttacctcaataagtttgacatagtaaacaacgaagaaaaaaaaggaaatatattgttttagtttgaaaattttgtcttttagcacgaatctagatattgtagagtagtgggtttctttcttgattttgtaacgtaatgtatttatgttgtagtatttacacgtggatcatataagtgctgcaaccaactttagtcatttaggttagctaatcaaaatagtaggtgtggatataataataacaacactaaaaaagaacaagaagaagcaaaagaatgcattgagaaagaataacttcaacttgaagaagtctttgattgaaatcccaacagcaatacttaaatctgatgggcaagacccaagaaatgccagcctcttatgcacttacatatacgatcatggttttcttgtttgttagtttgcttttatttattattaaagtttctgtgtagcttttttttttatttatttttactttttggttggaaagtgagaatgatcaaaactagaagaaaataaagtagcaagtgaggatactgattcagcttaattctcactccaacaaaacatttaaaaatgaacaattagatgatttgctcctagtattagtttaccaataagttattattttgcaccaaagttagtattatttcacccctacctttaatattgttaaatttaaaccataaattaatattttttataagcataataatcttttaaggtaaatgcatattttttatacaaataatatttaataataatatttgacaaatttcaaaacatataaattattattattattattattattagagaaatttatggccaaactcttgtatgtttcaattattaaacacttaatccttaatatttttattttatttttggtgttaatatctttcttatctttgattctgtttgcaaattttatatatctgttaaatttaaatgttaagtgccaattaggagtagacatgctgccatgttttcattagttcaaataattttaataactaatattataaaatttattttaaattaaacataaataaaataatttttctttttttttttctttacttatttattagatttttctaatctatctctctctctctctctcatttgctctcattttctctctacccaactgttgggttttatgcct

SEQ ID NO: 50672 - DNA, 963 bp, Cannabis sativa
gtgggaaatgtggcgagaagtaggtagcaattttttaatggactcttataggcgatggtttaaaactgtcgccagtactataggcgacgacggttttaaaccgtcaggtataagggatccattaaataattgcattttattaaaaaatgtcgcctattttgtttactacgattttaaaccatctggaatactaaatttttccagatggttttaaatagtaacttaatttttttagcgacggttcccgaaaaaaacatttttcggaccgtcgcgaactctgatatttgtggtagtgacgtatatgtatatctgtatgtttattatatgcatgcttcttaaatgatttgtatgctaccaacactagtacgatagcggtacggagtgcattggtataatataaagagtacgatacattgttaccaacactagtactagatgagtacgtagtgcatgtggtaaacactcagtggtactggaagtgcgtttcagcactaccaacacttgtatgagaagattacctagtgcatgttgtacaggggttgtacttcttttaagaacgctcttgatgcatatgaagccttgtaactaggtgtatggtcacctagatacaagtcggtactatgttacatgttttgtgcttttcttactcagtctctcgactcacagatatgttttatttgtgtaggtaagggaaaggcaaaggttgagtaccaatgagtccagagctcgaggatggttttacatattaggatggttaaacctggagagttcagtctcacgatgacgggggcctttattttgtaatcccgaagcaacatggttataaaatgtattttgaatatgattgtaacttttaaagacgagatcccgacttttaagaccctttaaatgtttataaaagttcaaagtttaattaaaagtttaaatttgacacaatttttgagaaaccctttgattagcaaa

SEQ ID NO: 50673 - DNA, 1035 bp, Cannabis sativa
cacttgtcttgagaacaaattttttacttgaaatcttcaaaattgcaatatgggtgtgagacatgacttgaaattttttgaaagatatttaaaatacaagttgaatcacatcaatcgaatcaatattgaggtagttatggtcgttttactgaaagttattcagcaccgagcacctgtattctttgatgcctaagtgatatattgacatcacttagacaatttattagttttggtgaagtcactcaccagttctcagagatgtcgtttttttgtgaaattaggtagacttaaaactctctaattttgtcgatattcccccttgccgaaaaggtaaaatatcaaacttgtcacaagtcgtggctctcgtttactacaaaaatagtcaagacagaaccataattagataagcaaaacccaatgcacaaggccacatgtcaacctggacgatgggtgctcctcgggggagttctcggggctcgttttgatacttctaaggcattcgagattgaaaaaaaagtctcctaccccatttttgacaaaaataagaagaatgtctggagaagaatttgtgtttggtgagtgaaagcatgcaaaccaagccatacatcaaccggggcacaaggcccatcgcccatgttaatctgagtgttagggccccgttttggctcccaacggatcttgtttccgagaccacttgtatcttcgttatttctgtaaatagaaaagatgtctggaacacttttttggagaagcacttggaactggcccaggttgataaaatgtaaacctgggcaatgggcactaggcccaagcactaggtccacttaggttctaggtcccagttttgcccaaaacactcgtatctcaattattggtgaaaacaaagaatatacccagaagacttcttaggaaaaatgtttggaaatggcccaggttgacaatatgtcaacttgggcattgggcccagcactaggtcaacatggcactgggtcccagttctgactcccagacggctctatttgtttcctaaaatca

SEQ ID NO: 50674 - DNA, 757 bp, Cannabis sativa
aaataaaattaagaatggataattaccacgcgtcccagggaacacatttgcagaccgcgggtgtgcataaaatcggttaatgttcttccatcaactggtgaaagttccagtgagccaaagtctgccacctaataatgaagacgaaacaccttaaatatatcaagaccataacatctaaggtcaagggggtaacaaaacaacaagatcatttgagaatttaccagtttgggaagtgcagtatcagcatagtatgtgtgtgccatttcaatcaactcgtcaggagactgtcaaagtaaatacagctaagagattatgcattatatgaggttagatcaaagaaaaaaaacactcaagcaaatttccaaagaatgacctagtgtaaaacatttcataggtcttctcctgatagatgaatttccatctaaaacataaacaaacaaattgttgtataatggtcattaagagtgatcagaaaacaaaccttaaggtgaagcccagtatctgattctttaaggcgcaagtatgcagcttcaggaagcagatttttccatattgctgacatttctttttccacatcttgtttttcgatttctttctgattagcatctgcatttttgttaatgtcaaggttgttacctgcagtgacttctttcccctgttcggttttgccgctcttaacatctattttcttcttaatttccttcagcagtccaccttgcttcccaagacctttaaccgccggctcatgtttagcctc

SEQ ID NO: 50675 - DNA, 762 bp, Cannabis sativa
agatgatgcttggattgtccttggtgactttaatgatattctttgtagggatgaaagaataggtagcaatgtcatgtgtaaaaactctttggagttttgggattatgttaatgagtgtcaccttgaagatgtgaaatatgctggcaatttttatacatggtgtaataagcagattggagatgagaggatttaatctaaaatagatagggtccttgcaaatccagcttggcttaacttgcatcctacagctgaagttatctttcaaaatgaaggcctatttgacaactccctagctgtgaaaacaatcttcacatctcctcctggaggaaagaaaccttttcgatatttcaggatgtggtgctctcatcctgtgtatagaaggttggttcaaaacagatggcaagaaattgataatggcactaaaatgtataaggtggtctccaaactgaaaggtctgaagccactattaaagcagttaaataagccatttttttgatttacctgctgctaatgctaaggctaaggaggatttggatgcttgtcaatctaagctgcatcaaaaccctttgaacattgaactacagagcatcgaagtagctgcaagaaaggaatatgctactatccaagcaacatatatttctttttctacaacagaaagcaaagttactcgagcttaaggatgatgattctaattcagctttttaccacagtagtatctgcgctagaggaagtcaaaaccaaattctttctatcatggattct

SEQ ID NO: 50676 - DNA, 1427 bp, Cannabis sativa
ggttgtgattagatagttaatattatcaagtgaggtaggtcaaattttaattttaaagaaatgctgtagtgaaaagcttggctgaatttccaataaatgggaaaagatacaatgtaaaaaatgaaattacttgggacaagttacaggaagaactacatatatatgcaccgagtcaaatactattgttacttcttgtaaaaaatgaaaaaaaaaataattgaaatttcttggcatacaaatggttcattcttctatatttcttttgaatattatgaacaaaataatagacattttgggcgatgtgtacgaagatactaagaattatatgattgtacaaatgactctctgctagcttgccatcgttaaattggccaatatgaagcaattatgatgaagttttcaccgaaatccaattgactgtttttgtttctgctaataatttagcttacgagtataacaagaacaatgtaatataccaaataacagaattctagtttttttttcacttgcagaatttttgtatcttgcttactcactgctgtttttcttgttaattacagaagcagttgaaagatggagaatggaaaaactgaaccaaactaagcagttgacccctgagagagataatgcggtgtcaactatttcccgtgaggaggcgggtatgctttttgtagaatcctcacgttatattttatgaaatacttcaatctgcagtacttttagtccatgatgtcattaacacattttctcatgtatattgttgggttgtagatatgctagtaagagctttggagtcgaactgggctgtggtatctgaagaaattggcctttggatacctcctgaagctattaacaaagaacatgatgataaacccgaaggcgaagaggaaggtaatatattgaattcctcagtcatgcttgtggtaatttattattgcgagtggaaatttatcatatgttgttgttgatgtactttttcttccagaggaagacattttgcccggcagaccagttccagccgaatgtcatgctgaacttcatacggattacggtggtgcagccgtgagatgggggctaacgttccacaaagaaagtgcagctgattgctgtcaggcttgcttagatcaagctaaacatgccaagcccggtgagaggaaatgcaacatctgggtttattgcccgtctgagggtggctgctactcaccggacatttaccaacatagaaatcaagaatgctggcttaaattcgtaagaaccgagttattcttttattgtttttattttccatttatttgcagaatcatgcaaaaccgaagtttagaaagtccctcgcctctactcattcagtccactctaacatcaacattgtttctctttccttaaacactatcaaattacaggcggagaagccaaaagtaaatttcaag

SEQ ID NO: 50677 - DNA, 781 bp, Cannabis sativa
cctcttgatcgactcccttttggtgggagggggctttctctaggggactgttccctgagtggccatgaagatggccttaggtttctctgttaggagggtgaagcaggtatagttctcctccttgtctttctggttttgtggagtgggagaagtgttcaacttcccttttctgccactgtttcttctagagttgttattattgcgcttgctcttagtattcttgccactggatattttctagagttattagtgcctgtatgtgcgcctggcaagtcatggggctacaggatgccttgtgactgcctattgttgatcttccctacctgggcttgttggacagctttctttagcttgataaatttttcaactctatcgaggaactctttctgttgttagttgagatccttcagatatctttccagaagtcgctcaatggaaggatgccccccagtatggtcgtatatcgaccttcttttgtaaggcctttgaccttagtggcctcgtccatgaacctctggatgtaatccttcaaaggttctccttatcgtcgtttgactttgacaaggtcttctagctacgatggtataagccttgaggacgagaattgtgtgtagaattcttgagaaaactcattccaagaattgaatcttcttagggcaagtttgaagtaccattgttgagctgtttccaacaaagttaccgggaatatgcgacactacacaacaccagtaatcttttgagattgagctacatctccaagtacttgatgtgtgctagtgag

SEQ ID NO: 50678 - DNA, 1266 bp, Cannabis sativa
agtatcttataagtcattttagaaattagttggtatttgaaaattccattttctagtaaagaaactaaaaagtcatttctgattgtaattatttttttcgataattgtaaaaaaaatatatgcttcccatatgttaaaacgatcatcttaaaaagtaaattgcagtgatagaatttttgagttcaaataatatttggtgtaactaaaataaaaattttaaactttttttaaaaaaagaaaaaaagaaacaaatatataaaatagatggagagagacataaaaaaaaaaaaaaaaaaaaaatctattatatgtgtgaaaaaaagaaaaaattaaatgacataacaaaatacaagtataaatatatatatatatatatatgatattatgatgatatgtcattgagagaagaaaaaaaaaattcatcattacatatgaatggaaagagagagagagagagagaaataaaatgttagaaaaaaaaaaaaaaaaaaaaaaaccacccaaagagtctgcttcagtgtaagaatatttatatatatgttttaacggtatacttaaaaacagcatatttaaataattgaccaacaatattatagcaattaattttagattttagtccgttgatgcaattaattcttttatttttttcattatcactatgtttgttgtgatgttggctttgtgtctctatttgctggagatgtgtgttttcttggtgttttgattttctttgcaattgttgtgttgttgtttggttaatttcttgcaagtttgtgtagttttactttggattgattttgagtactttgtccattttctgtttaaatgatattcaaatttcaaaaaaaatttagagttgtgctattttcttatgtttctttaagtcatgtacttagtcttgagcatttgaacttgcaaattttgcagcatttgtcctcaattctattgtccttcttggtcatgcaatgtactcttacgtaacgtttaggtaacgtttgcttataaaataagaatggaatagagatgatgataagaatcgaattatcgaactacaaaggaatgaatttttattttttggttagtaaatactatacaatcaattattattattaattatttataataattatggttagtaaataattataataattttgcaaattaaaaaagtaattatatatctattctatataaaatgtgtctatataacataatttttggtttatgagaaattattgggtgatttttttaaataaaaaaaaataa

SEQ ID NO: 50679 - DNA, 1239 bp, Cannabis sativa
agtttattatatgcacttctttatatgtttttgtcatcctcatatatagtttcaattacatatttttttgtatattatagttatatttaagatattttataattttttttttaaaatcaaaataatttaatgtattgaaaataaagtttagatgcatgcgtgttttttattttatacgatagtttgaatcctactatttattataaaattttactacatatcttaaataattacaatatatattattatcaaataaaaattgaaattataatcttttgaatgtcaaaaattaaaaatgatgcatcatcagtgcatctattttcaaacaatattttttttaaatcattaatatttcaaattctgacttcaatctagactttggaatccaaacgaaccctgttcccaactttggacctagactcggcctccgattctagtttcgaatccgaacccaacttaaataaaatcaacaaatgaaaatgataaaatttacagaacacacttttgttttctgttttcaaaattaaaaaataaaaatagttataaaacgtatttttattttttaaaattaaaattttaaaaataaaaaagcatattaatatatatatatatataaatatataattgtactaatgtgattttttatgcatatatgatatgattttgcagcaggtatcctgattattttcgtcaacttgccgaagcacaacatcccaaggtaagttcgtgggtagacctaattaactaaatacacttttttctttgtttaacagaagagaaaaaaaaaatacaagtgagaaagatattttttttttttacaaaatagaacaaattttttttaaaacaaattacaaaagtatttcaacacaatttatattcattttttactctttattttttttttatttacaaaaatacttcttaatataaatcaaaataatagactacttttttagttgttttatagtttatttatagatatattatagttgtcatatagttattttttttttgttattttttagctatttttatagtttatttacagttgtcatgaaattaatttctcgttgtttttaattttttttcttatttttaatttgctaaaaaagtgtgtttttgtaattttaaaacttttaaaaaatatttttataaattaaaattttaaattgtaatattgtaatattgtaagaaaaatttaaaaaaatgtgtttttaaaaattatatataaaaaaaaaa

SEQ ID NO: 50680 - DNA, 2221 bp, Cannabis sativa
  modified_base (1623)..(1635): a, c, t, g, unknown or other
tggccttccaaccatgcaatttcgaagtaagtttatccaggataaagttaaagtcagcatccttttgtctagatctaaaaagaggaagtcccagatagttgacgttaccctctggcgatcttaaacccaaaagctcccttatcctttgtttaaccacattgggtgtattcttactaaagaaaatggaagacttcatcgtatttaccttttgtccggaccaagagcagaactgatcaagacacccccaaacacccttggcctcttccacattggctcttccaacaaggattaggtcgtcggcaaagaagatgtgagaaataatagggcctcccctactcagcctaatcccttgaatgatgccctcggattgggcattctctagaattctagacaaaatttccgcagcccatataaaaagatagggagacagagggtcaccctgacggaggccgcacgagggggagatctttcctaccggacccccattaaggcagatattaagggaggtagtagtaatgcactgagaaacccaagcccgaaattcttggggcacaccaaaacaagccagcacatgatcaatgaacccccagctcatcctatcataagctttcataagatcaatctttattgcaaacaagccttctctacctttcttcctattgaacgagtggactatttcctgggcaatcacattgttatcatgaatgttcctcccgggaacaaacgcggcttgggtagggcagataagctttggtaacaaaggtttgatcctgttggcaatgatcttagagataaccttatacaccacattgcagagagagatcgggcgaaagtgattaggcctcttcggattctggactttgggaataaggacaatattcgtagcattgactcctttatgcatacgtccagtgtggaagaaatccaaaaccgcctcacagaagtcgcccccaacagagtcccaatagtgcttgaagaaaaggacagacataccatctggccccggggctttggagctactcatgacaaagagagtattcttaatttcctcgggggagggtttcctaatgagttcggcttggtcgtccgaagacaaacattccttgactagctcgctacaattaggattacttccaaactctgagccagaaaaaatgccttggaaaaactccatgaattcatttccaatcaactcccttttagagatccacgcattttctctattgagtatgcactctatggcatttcttctacctttgatggaggcagaaaggaagaagaacttagaacatttgtccccttcctttagccaggaaaccctagccctctgtttccagtacacctcttttctcacccgggcttcgttaagagagttgcgtaaggcccgttcagttgtccactctctagatcccacaggcaacctctgaatgatatctagccgacgttccaggtcacggattagagaatcaagtttcccaaactgggatctattccaatgaatacacggtaggtggaacgttaatttttaataattgtttgtgtaaggttattattgtaaataatttatcaattatgtatattattttaaagttaaatttctctcttttaggccttgtgtgagannnnnnnnnnnnngaagtgggtacgacatactaaatctaacccccctcacatgaacaaccccaattgtaaaggcccatttgcctgtttggataactgtgctaggttaattaaattagtttgacctaataaaattgtttagcaacataattaatttcattttttctgtgaaattaatttaaaaaaaaaacataatttgatgaataaaattctagaaaactatatgtatttttcttgtgtttaattaaatatataattataaccaactagattttttctgaagcttaatttcataatttcattaaatattcctatttaagtttaaaatttgttatttctaacaaatcaacttagatttgaaaatcttttgaatttcctattataaattaagttgaggaattttaagaattggttattcagattctttggatattttttaagttgatacttttaaatatggaaaaacttaaaatggaatatcttctaaattaagtggtacaaacttaattgttaatatttaattaagtcattgattgaagaatatttaagttggatattttagatttttctaaacaacttaaataaggtatttttcaatttt

SEQ ID NO: 50681 - DNA, 1530 bp, Cannabis sativa
ttcctattacttaattttatacgtgattaatctatctaaaataaataatatttaaaatactaaacgtataaaagaagaagaagaacctaagccagtaactgtcaaaaactatgaatgtcgtgagagaccaaatttgactgttttgatttgagattttttcaaaaggacactcaactattattaaaagtatagagattgttgaaaaataaaaaataaaattaaaaaattaaaaaaaaaattacaaattagaaaatatgaattattaaaaagaaaagataccacatgacctcctgattctcctttatatatttattatatagatgtgtttttttttttttttgtaagatgttttgattcattattattaccatcaatatttggaaaatgtctaaaactcattttaggaagatatcaaacgcacaaacaataaataagggttgctaatgtataatacaaaagtaggatgttgggttttgatcaatttaattaacttagtcaagactagcagtgtttagtattattttatgtgtcaatattattattagtgtaattaagtaaggaattccattaaatttaatgtaataacttttagagagtatagctaacaaactataagataatacatctagaaggtactagacaccaatggtgcccaatatcaatagtctcatattatatatgacaatcatacctatattttaggttaatttgacctaatcttattaattagcggatgttggtgttatattacttattaaataatatcatatttaaaattaaaattataatatactatatattattataaatataatatataatatcattaggagatttacttataataatcacataaagttgtaatatggagagacgaatttaaaaatagaatttgtaacctatgaatcgataatgtgcaactaagagagtacacatggaagctaagaattgatgtggggaagtttctcagagttagaaactattacaaaacttgtttatatcacataaatgacttttgacacatttggaattggttcggaaaagttttgaaaactaaaaagaatttttttaaaacagtttcaggcaacatgtcacctcgtaccgggcgacatgttgcctagatgaagttttacatggtttttgatgttaaacatcatatctcgaggggctcgaagtttcactacaagtgacatattacctagaacacttttgagataaacgttgaaaaatgttatgcaatcaaaggggaatgatttctacttttttaccaacagagttctacctcatgattcactcctacacggttggtaacatgcactatatttgtgggatgtgtttttcaaaacttggtcctctcactactataaataggatttttcgcatcaatttttaagcggtatataaaaaatttatttcggttggtgcaactgatgctatagtcgtagacgtaaatagttatattttttgcttcggttatgaaccgatgctaattagttttttacttcggtttataaaaaaaaaaaaaaaatt

SEQ ID NO: 50682 - DNA, 2979 bp, Cannabis sativa
tagattattggtctaaatagaaatatgtagtatcagttacttctagatattcttttaataaattcaaaacaaagtctgtactgatgaaactgtaaaaaaataaaagttttatatgccgctaaaaataaacattgaatttattccgtttacaaacttaaaacgttacgtacttatcccactatttactttaaaaaaatataaaaatgttcatgcgtggtcggtgtgggacttatgctttctaataaagctaacattttctgtttttcttttcatgtaaatatttcagccacatattttatcctcatacatgaacgactcagatgtatatataataaagtgttttgataagccagtgtgacaaggatttagtgctaattgtaagttgtagatagactaggcacacacatcacatgcatgtcatgaaatctaacctttttctcctatacttgagctgagtcaagtccagaatcaaaaataacataaactaaaaaacatgacttttatctgtacatattttataccatattcatatatgtcatgtagaaattatacatgttttatttatctatatacactaggcaccatcttcaccaataacaactcagtttcctgccactacttttgcctagaaaacaaggaataaaccaagctgggcaatgtgctttaaaaatttggtagtacaatagtaactagtactgcaagtaagatcccccttcataaaacataatattttgtactcatcttaacagaagaaaatatttttcttctacttttttttttccttataatggagaaattaaatgttaaatctaaaactgtctttcagcaatatttgggcgtgagtattggggaccaagacaaattttgatattttcataatatttatagatataatggtatttttgtgaaaattaggaatttttttatatgaaaacaatgacacacttaaaataaaaaataaatcatatttgagaaccttaaagttttggttggatggatttctatgaaaatatttttgagtttttgaaacttccaaaacacttctattgttgatttgggtaactaataaatttaacttttaattctaaaatattagagggaatattagtgtccaaccaacatcagaacaaaatgaaatgactaccccaattaagaaaagaatgctcatggaaggctctacatctgtgtgcactagaccatccaaagttcttcggcaacaccccggtgtggtgcgcgatttttcttgggacaacatgaagtcgtttaaagagggtaaagcaggttgtagacctgtgattgaagatactggatctcgtgtgtctgatcgtccgggaacctctgtggaggaggttagtgcacctcctccacacgagttatgagggtcgttgcttggaacaacacagggttgggacatacctctacaattagtgaattgaagtccctgattcggttgactgctcccgatttcatacttttgtccgaactaaaagttgatgattcgccactggtacgttttttgaacaaacttcactgttactttcatatttttgggctggctattggtaatgcatgaagtattattcttgcatagaaatttgggtttgagtttgaaatgctctcttgctctcgtaaccatattttggggttggtgtttttggaccccccaactcatccctggcttctatcttgtgtgtatggctcgccgtattcccatgcaaaaaagtattttggtctgagcttatgttggagggggataggtttggaggaccgtggttgattattggtgacacaaattttgtgcttaacgctttggaaagagtaggttcgaaaagggaagatctttttatccctttcatctctggtttggtgaattctcgtgatctcattaacttgccaatcaaaagggactaattgacttgggataatcactggtcgagaaaggaccatgttaaatttgctctggataaggggttaatcaatgggagttagctccgactttttccaatagctactttgagttcgtctcaaacttgcaattcagatcataggcccctctgcctcctcttcagaggtgtcagggaaaagtttaaaagaattttaaatttgaagaagggtagacccgtgatgattggagtaaattggtggtttcccattggggcactattgtgcatccttgggccccggctcgggttttcaaaaagattggtgccactagggttgccttattacgttggcataggactcaatatggaaatattgatgttaggattaaagagcttgaaagtaagttgaataacttacaaatgctccctactggctcaagagactgaaaagcagaaagtgaggccttagacaggaaagaaattttttggaaacaacgtgctcgagtttcttggctaaaggaaggggataattgctacaagtttttctttttatcagctactattagaggaaggcgcaacacaattgagagtctcctggataaaaatgacatatgtatttccagatgtagcgacattgggaaagcattcgccgaattcttgagggatattttttctaattcaagatctaggacggacctaagctgctctgatctaattcagaatagattgtccccaaagaagcaggaggatctggttagaatccccaactttgatgagattcagaaaactttgtttgccatgggcaaccataaggctactggaccggatgggatgtcagttatgttctttaagtattactgggattctatggagaaggatttttgcgaggccatctcaaattttttttaccactagtaatatgcaaaagggggtgaatgctatgaatatagtgcttattccaaagatttgaaacccggagcgggtgcatcactttagaccgatttctctttgcaatgtgtcttataaggtgatattgaaagggaaatttaatttttcatgcttacatatacttaatttttttccctaaactcgtaat

SEQ ID NO: 50683 - DNA, 1539 bp, Cannabis sativa
ttcgggccataaactccactccgccatagctatcaactgttgaagttcagggatggattgacgggaaagagcatcatccacttggttactcaccccacactaatattcgatatcgaaatccaagcccatcaatttggaaacccacttttgatattcagacccaatgaccctttgttccaacaaatattttaaactctgctaatcgatccggaccacgaacttcctgcccattaggtaagctctccactttgctacaacataaacaatagccataaattctttctcatagattactttttttcgtgcttgttgtcccaaggtttggctgaagtaggcaataggcttgttatcttgcaaaagaattgcccctaatccatgacccgatgcatctgttttcaccacaaaagtcttggaaaaatcaggtaaagtgagaatagggatcgataccataggtgttttagggcctgaaaggcattttcagtcatgcaattctaaccaaattggtcttttcggagctggtcaatgaggggttgggcaatgtggccataggttgccacaaatattttgttatatccagtaagatcgagaaacccccgaagttgttttatagtagtgggtgtcggccagttaaccataactttaatcttgtcggggtcggctgccacacccttttgagaaatgatgtggctgaggtatacaatctcctgttgcccaaaggcacactttttcttgttaacataatgctaaaaacttcattcaagtggtgcacatgctctgattcagtcttgctataaatcaatatgtcgtcaaagaataccaagacacgcttccttagatgggagcaaaagatgtctttcattaagaattggaaagtggttggagcgtttgttaaaccaaatggcatgacccggaactcgtagtgtccatcatgggtgtgaaaggcagtcttgtgcacatcctcctccttcattcgtatttgatgataacctgatcgaaggtcaagtttagtgaagctttttgcaccatgaagttcatccaatcgttcatcaatgactggaatcgaatacttatctggtatagtagcgcgattgagggctcggtagtcaacataaaaagccaagacccatctttcttcttcaccaagaggacagggcttgtgaaggggctgttactcggctggataatttctggtaagagcattgtttggatgaatttctcaatttcacctttttggtaatgtgggtaccgatatgggcgtacacttatgggggatgtaccaggttgcagtgtaatggcgtgctcatgttgccgtgaagggggcaaacccatgggttcctcaaaaaaggatgtgtatttgtggagggtgggttgtaagtatggagggcactttgcaggactcgatggttggtctgtttccaccctatttaacccaccaagactcactttttgtagccatcagtgttttacacatttttcagtgtaatcaagcgtcgattgagggttggatccccctttatagtgactgtctggtttcccagt

SEQ ID NO: 50684 - DNA, 1641 bp, Cannabis sativa
caactttgtggagtacaagctttattcggtagactttataccccagcctgtgaaggggagaaagaagaagtccagtgttgaccgggctaaaggagctgagcaagagaaggagctcattcaacttaagcgtgaggctaagttgaagggtggggcaggagccaagcagtatgctcaagaatattctgggcaggagaaaaaggctcaagaatattcagagcaggagaggccgctcaagaagaagaaaaccctcccgaccgggccgaggcccattgaacatactatctggattagagagcctgatttacctgctcgaccatccacccctgtagaaggaaaggggaaagccgtcctggaggagcaggaagattcctcggatgatgatgccccgtctgtgcttgttcgggcaaatgctcttgccagcgtgtagagtacttcatcttgcatttaactttcttgattttcatgccttcatatatcttatgctttcttctgactgtgttatttttatttcatgtagaaatgtctcagaagatgattgaggctttgaagaagagagtggggggaagctcgggcttttcccctccagccaagaagtccaaaagcggtgagactccgtccaaagagaaggcaccagctgaagtggtcattgacctttctaaagaacaaactgttgtggaccatcctacctcaaaaattactaagtccaagagttcccgaggagggagttcagattgattcaagcaggcgaaaggtggatccaaactgatcagaagcgggtctgaacaggttaaggccccttccccacctcaagtattgcaccaggagactaaaagaggaagagatatgctcacccactatgtgagtcagtcagtccccgaggtaaacgaacagttggttggggaggacaatgacttgtctttcgagctggtcatgggaagagtcttgaaataactttcacgggtaagtattttgtaacttttccctttcacttctctttgactagtttttattttaatgcctttttcctgcactaactagtgtgaaaatggcttatgtctattcttgagctaagtcgactgctactaagaaccttgccatttccaacacaatgcgaacggaagtggacttgaacaaaaaggatgccgaggatgcttaggttcagcttggagctgtgcggatagagttgggagaagtcaacaagaaactcctagcagctgagatcaaagttgccgagctgaccaaggagctgcaggatacgccttcaaccgaacagcttaaggtcgatattgcttctttatatcaggaagtgaccagtctccaagaaaaaagagagggtctccggagccttctttgcaggctggaggatgaaaagaaggccatggaggaggaactcaaagctgaggttaataaccagaagtccgaggtggtaaggctcggagagaaggtgaatgccttagagacagctggtatcgagatattttatgacttttggaaggccaatcccaaagaaaaatttgactatctgggcgcttccaaaggcatgtttctcgactactgcgctactcaggtggcctacggggagtccgaggaatgcacttccacttctcctgccgatcagaatgttgaggctccttccactca

SEQ ID NO: 50685 - DNA, 1007 bp, Cannabis sativa
aatattatagtgattggttagtaatattccctaaaaattatcacttaaattatatgggatacaatacttaattatattacgagaatactagctaatagtagtgcattgtttttacaaagaagaagaacaacagtgctaccttcggaagaaggttttacaaagatttcgggagattgcttttcaagtcttgcattgggaagaaacaagcactcttcaaggagatcgaaaggagttcgagcacttgaagtttcagcaagattcgattagaagatagaataaatcaagcttgcggcatataataagagggagtctatttatgcataagtcaattactttatatttttgagatctatttaatgaatcttatctttgggcataacaacctgaaaggattgtcagattgttacaaccgcgtaccaaaactttgtgtgtttttacttatctgtttatttttttgatttttttctggagttacacagttgtttctctgtagctacagaaaaattatttcagtaccagtttcattattctgcatttaattaaataataaaactaagaatattaaaatacgaaattttaattatagtagtacattttagtatttctctaaattaaattatataggacttgatactattgtttaattgcaaagtattactactggacactaatagtgtttaataccttttagaagtgacatcctgtgattggttagtgatattatctaaaaattattatattaaattatattagaagaatagcaatataataataaggaggatgatagataatttctcattaatataatattattattaacttttctttctcagacaaaaagagtagtgctactactcacctcacctgcttgcttctttttatccctttatttattttttattttctaaattaaacattataatatttggagtatattgtgatttacttcattcttgtttatagttattggggaaacaaattatgctttatttttattttgatatata

SEQ ID NO: 50686 - DNA, 1221 bp, Cannabis sativa
ttagcaaagattgcacaattattgaaaagcactgtaacgtgccttagcattagggcgttacagtaattctatagaaatttattttaaaatgaaaatttatacttaagatttattaactaggtggaaaatcatgcaagacgtagcatgtgtcattatagaggcttggtttttaatagtgtgtacagtggggatgaggacttttattctttgatgcctggtttgccataggattgggatcaggagttgtggtgggagttgtagcagcagctactaggggaggtatattacgattttccaaggttctttgttgttcttgatgaatgattgcggagaaaaccttattaagatgagggcggtgattaatgagaagaatttgatcacgtactgcgtgaaaggattcattgagcccttttaggaattggagtacttgattatggttaagttgagcatatgattttgtgttgcaattgtccatgtacacgaaatgcgaggcctaagttgatttattttatcccacacagtcataagtttggtgaaatagacactaacataatcatcaccttgatgaagataggtaagagtttcattaattcaaagattcttagaccattgccttgattgaatctattgtttaggactgtccacatctcagatgcagtatcaagatacattatactactttttatttcaggtgatacagaatagagaatccaagacacaccatctaactgcataggttgagagagagtgccttcaagaaatggtattttgtttatggccccaatggagagcttgaagtcacgtttccattgctggaaatttcgattcgtaagaacaggggttgcgagagctaagcctaggtgatctgcattgctgagataatatggagatgtgacatcttcataggcaggacaatctgctggaattacacgaggaacctaaaacagagaatcagaacgtctgggaggatcgatagaagcctgagatggtaaaggattagtatgtgtttgagtttttacggaagtgtgagatggtggttgttctatggtggcatcgaccacgggaatagtggtggtagcagaggtagtagctcttgttctcaccattgttgaattcttgaagctacaattgatttcttggagcttcactttgtttcatctaataccatattagaacgaaaaacaaagtattttattgatattgttttgttaaactgttaca

SEQ ID NO: 50687 - DNA, 1427 bp, Cannabis sativa
gaagagtttataaatatattaagtaaaaaaaattataagattaaaaaataaatattaaattatttaaatttgaaacattaatattttgaagagtcacaaaaaaaaatgacacgtctttttattttgtttgaaaaataatttatacatacagataaaagtctcacatcgtttagaaaacttttaggtactatctatataggttataaataataatttagttacatttatttttttagtctaacaataattattttttttcttatgggtgattaattaatatcttacctattaattatttcattaaattttatttttaataattattttttaaaataaattttttcatatatatttatgaaaaaaaattaatttaaaaattttaattctagtattcaatattattatcctacgaatggaattatctcactaaaagcaaggtatgacatcttataaacattaaaaatcggctatattaaaaaaaatctactatttttcattaaattaggtagcgtttggcagggacgactcttatggggtgtaagttgggctattgtacaggccccaaaaaataaagggcccaaaaaaaataaagggcctaaaatatttgttttaatactcttcaatctttttaatgaacccaattttttaaagtgctaacaacttatcattgattatttctatgtcaatttcaaaaatctattttcaattctattattaaggaaaaacttcattgtaatacatattctatattttaattacattaatcacctaacaattggtttcttacatttttaacttatatttttatgctcacataattctactaccatcttttaaaatttttattcatttgtaacttaataagataacgttaaactggattacataataaatgaagtttcaaaaaaatagaaaaaaaaaagattacacaataaatagagattctttaattaagataattaaaaaatattaataatacattttcttttaatttaatgtatatatataaatataaataaaaataaatattacatataaatttattcagttagaatataatataaatttctttaagaaaaaaggtatatcatgtaaaattaaaataattagtgtaaattttatttatataccaatgggttttttttttatatcattatttatataccaattagtatcatactactatataaatttaatatatttgtaagtaatattcattttttatagacaaatcttttatatataaataaatatttatactaatgaagaaaaataaaaaaatatatttatatataaaagtaaatattactttgtagtatacattaaagtttatttatatactatatatacttaatagaatatattaaatttagatagtatcagttttattaaaataattagtataaattttgtttatatactactta

SEQ ID NO: 50688 - DNA, 665 bp, Cannabis sativa
acggacaacaggaggcttggtcttgttggattgcaaaagctcaaaagaggagggggacatcgaccttcattcctatgaaactactaagaaatataaagaaaaatggaggtgtgattgagttgagaagagtacagtagatgttattgtgcattatagatagacatatatatgttgttagtccaaatatggaatattatggaggggataacttcacatagaagaagctggtcacgatatggactacggcttccatattttttttacataaaaaaagtattaaaaaccagataatcattattttatcatgggtgataaaagaaccctagtgatattggtgcttgggctatcaaagtgagctagacttaagaagctaatcaacgggacacaaaagggagctcaattttatctttactattatgtgtgtttttattttgtttttgaattttattttgtatttttactacattgatcacaagatgattttgaagggtgggaagtgttatttactattacgtgtgtttcttttgtttttgaattttactttgtatttttactacattgatcataaggtgattttgaagtgtgggaagtattagattatgaaaatactataagggttttttaataatttgtaaatagtatgaaagcctataaatatgtaattg

SEQ ID NO: 50689 - DNA, 861 bp, Cannabis sativa
caactctttctggcaatgccatctgaacaaagttatggagattcagatcatccttgaatgattcatcagttgggctccttcctgtgaacatctccatcactaagatcccaatactatacatatccccttgctttgatggctcattgcccatggcatactctgcaattcatataaattgttaaatataaaattctatatttaagtatatgttttgtacaaaaaaaaataacatctagaaattaatgattttcgtacgcccaacttatgcaaatgttaaaagaagaatgaactaatagggttcccgtgttgtgcattaaaatagataagatagtacatcaaactttgtgtaatcttagtgcacgaaaaagtatctcaatgcactatagcccaaaaataaatgactagtcatatcagtcctatttgcattatttttgtgataccaatgtagtttgattcttttccactaagctcaattcacttatctatacttttgcagaaagaaaactatgtagagttcaattattacctggtggtgcatagccaatggttcctttcattccaattatggttgattgagtttcagacatttgattggtgttaaagatcaaccttgctaatccaaaatcactaacatgtgcaaccatttcattgtcaagaagaacattgcttggtttcaaatcacaatgaatgattggatcgtcgcaatgattatgaagataacatattgcataagccacatcactagctatagttagcctctgaaaaaacttcaaaccccttgattggttttctccatgtaaccacttatctaggcttccatttgtcatgtactcaaacactaaagccttaaactcattccca

SEQ ID NO: 50690 - DNA, 1332 bp, Cannabis sativa
  modified_base (61)..(63): a, c, t, g, unknown or other
gtgttaattttttttttttaaaatttttcaaaattttgcaagatgtcttaaataactatannntacacgactataaaaaaaattggactaaaaaagtttctcgaatgctgaaacagataagagtgcactgatgcaccactcttaagaagtgcattgtagaattttcctatttgttaaactgtcaatgtgcataaaaaggatccactaatacacctctatttgtttcgatatctgaaagaattttttaatacaatttttttcataatcgtctacgttatagttatttaagacatccagtaaaatttgagagattcagaaaaatttaatatgtcaaaaataaggttcaaatagtttgttgcatgtgagactcttttattttatacgtgtgaaattgattgtttgaatcctattttcaatgtgttaactttttaaaattttgctgaatgtcttaaataactacaacgtaaacgactattatgaaaaaaaaaaattagattaaaatttatttttaaatactcaaaaaataggagttcatcggtagacttttgtaaaggggttgattatagattttttctatattttatgtacacaaaatattgcacatattgtacatatattttttaacttgcatgtctgattatgctatagaggttatgttaggtgagattttgtttagttttaaaataatattaagcgtacatgaaatttatgataattcaattgtatagttgaaaattatgtaatctccttactggaaattattcattaatggtaaaaatagacaaaagttctaaagaatattcttcttttttttttgaaacaaataaagaaaattcttcaaatcgttttaattacaaaaatacaacaaaaaccctagaataatttcaccctacaaagtaaaacaaacaacaagacaaccaagtgatagtggctcttaagagaagtggtcacaccatccaagtaaaaactaaatgaagagacaaatcaatgaaattatacaagatagcaagatcaagatattaatttgttgaagactatctacgcgcgtataatattggccaaaataatatgacgcaagtcaagtggtataaattttaaagaagtaaaatttgtagggcgtataaataaatatttgtataagaaaataaataagaaaattgtatatttatgcacaaaataaattgttttacaaaaatgacatatacatgaagttaattaaaataagacatatatatatatatatattcttatgtgaaaatatataattatgatttaattatcatatagtctgaaatataaattttgtaaaaattatgtgtcacgtaaatgttt

SEQ ID NO: 50691 - DNA, 1052 bp, Cannabis sativa
cccgccgcaagcctaactgaaccttctcaaggcagcaaccgagcagtggacaagcaccaaaagagagggtgtactccccagtatacccattacacggacctgatggacacacaagagcgtgtgtatttcgccacgaggcagaatacgcactacaggaggccgcctcctctgtacagagatagttcacgaagggatcccaacaaaacatgtgaataccacaatgacattggacatagtaccaatgagtgaaaaaatttgaaagatgaaatcgaaaacttgatctgactgggtctatgagtggatcaagaaccggctgccccatctcaacccagttctggcagggggcccatttccccaagggacaccaggaagtgcacctagagcgttggccccagctacgccctcaggaggaccaacccctcagcaaatccttggcctgccaccaagacttaacggaagagtggtcatgatctttgtgggccccatattggggggaccactcgaaaagaattaaagcgctatgccgaggccattaaacatgacgaagtatgggaagtcacttagcttccagctaaaaggccctgagtcatggatcagccaattactttcatggaagaagacgcaagactggtgcgtttccctcaccatgacccctggtcatagagactcccattgccaataagattgtagctagaatattgatcgacaatgagagttccgtgaatttgttgtttaaagaagccttcaccgcaataggcctcatggatcgagatctatcactgagcggttcccaactcacgggattcaatggaaccacgctcatcccaatgggaaaggtgaggttgcttgtcacattgtgccaggatacaccccagagtaatttcaagtactgcacatttgtggtggtggactgccaaacagcctataatgcaatccttggccggccagccctggtagattttggtgcagttacatccatccggcacctgtgccagaaattccccacccaggaggccgaagtggggactgtgaggggtaaccaaggtgaggcc

SEQ ID NO: 50692 - DNA, 1149 bp, Cannabis sativa
gctgaattccaatcttgatcgagtaaaagggcgcatggtagaatcgatatcaggaacaaaatatagcaacatgcctgatgctaaaatatttagaacggaaatgagttgttcgtgaatagtgaaagtcgttctagaaaattaaaccggtagcttaaatgtttacacattatcaggaatgactattttgttatcaaaaacgaaactgtcattcctaaagtcattttttcagagttattaaatttatttcaattaaataaaatattgaattctttgtgaatatcacattttttctattaaataatttctttaaaaactaaatattttatatttaaactaaaagagttcatacatcattttcatatttaatactacacattatttttatatttaagagagtttatactaaaagagttcataaatgttcatactaacaaaagtaataaattaaacatctaagatatggactaattatcatcaccaccatttttatttcctctagtctgttgtgacgttgtaggttgtactcataggatctgcaatggttgttgcaatatgtgacatctctgacatcggcataatttgtggcatatgtgatgtctaaggtacatgcgacatcatttgcatcttctattgccatttctgaagtgggaaagattttgtatacaagtaatgattttattatattatttataaaagacttaaagctaatttatagtattcaccccaaaattgttattatattgtcgagttctgcaaataagttacctgtttaagaatcgtcttcctcgtctactctcccaagaacaaaataactgtctcataaaccaatcacatcatcacatatcatatctattatctatctaatatattcacaactaaaccaaagtggagaagttaaaaagattcaatttttcaaaagaggactcttgttatatagaaataaataagtacactaacacacactaacactcacaatgaaggagaggagaggcttctaatttctttagaagtaaatacaacttattggacaagaaggttagcttaatggccatagaggaggacaatatcccagctcaaggagtaacaaaagttttagaagtttctcatgatatgtctgatccccttgatatcacaattgattggatagaa

SEQ ID NO: 50693 - DNA, 1506 bp, Cannabis sativa
  modified_base (56)..(58): a, c, t, g, unknown or other
aacaatcttaatagttcagggaaatttttaaggccaaaaaagttcaaggagcatgnnntagtacatgtcaaagttcgagaaggaaaattgttaattagtcttacccaaatatacacacaagtaaatgtacaacaaattagcaatacatctaaaaaaatattccagatcttttatcttatatatatgatttaaatttgaatttcaaaattaagtatattttatgatttaaatacgagtttcaaatttcaatatttttttttatctttcatcaattaaatttgagttttaaatttaaatatttaaaattttgtatttttcaaaaatataaagtagaggtacattattattattattctcactcaaatttatcatatgaatatctatttgtctttggtcaatttggtaaagacatttgctataatgtgtatttggatatcaatggtaattacattttaattactattaaataatttgagagtgtcattgtttatgacactttaataacctttatttatttagttaccatgtaaataatttgattaaacaaacccactaaagctaataattatccgaaagtcatataattaattgtaatttagataatgattaggtttatacctcgtattataattggatgtaaaaatattgaattctaatacaacattatatttcaatgtgtggtcattactaacacttttctccaatattaaaataaaaattcatataaaactaccaattatactactttatattacacaatgaaatttatgtttaataagttgtgtaattatatatatatatatttgttagttaattatgctttttgcgtgttgaattttgtgatttgcttgcccccgaactatttattaggatgttaatttttttttttttgaattattaagattattgaattcaaagactttcatttaattacattcaattttactaacatgaaaattgtccatgtactaaaatcgtatctcctaaattttgatatttactaaatcacgcttctcgaactttaacatgtactaaatcatgccatttgaattttcattcatatcaaacttctgttagtaaaattaaacaaaaattattgaatctaacaatctcaataatttgaaaaaaaaaatttaacgactcaaaaaattcagaaagcattatttaatacatattaaaattggacaaaaatcctaattaacatttttctttttcaagaagtaatcaactctcaaacacacactaagattaataatgccaaaataaggaaaagttacaattcttacaagttttataataaaattaggtagattaattttcccttttatatattcactcgtatttcttaaaaataaaagttttatataagaaaattaggtaaattaattttcccttttatatattcactcgtattttttaaaaataaaagttttacataagaaaattaggtaagggtaaccagatataataatttttaggctaattagcaatttttccccccgaact

SEQ ID NO: 50694 - DNA, 1079 bp, Cannabis sativa
tttaaatatttaaaatgatttttattttaaaaaaaaaaattaaatgatttggagcaatgagtgactgacatctagggctgacctggtacttaacggccatgtacttacggaagttccaaaagtatgacaggtatttttaccgccaaaattttaacttagatattaatctgcaactaaaagataagcttaagtatttatgccgcaaattacacttttaagaaaacaaaactttcagccaattattgattagattataaatttataactccaatttaaatattaaaagtaaatcaaatagttaggaatgacaaaacatatctaaacttattttatatcttatattatttgacttgtataattttctgtgtcaaacgtatcgatctactctcaacttgtgcataatttttctaaaaaaattaagtctattcatgatgatgtatttttaacttgtgtactccttctaattctaaatctatctcgttctcaacaactttagctatcttatctagctatattatagtctatagctattaaaatgagattaattgggagatgactaagattatttccggtggttgaacaattgtggtatatattttttttttaactaattagtatagaatctattatttttaatgtaacaactttaataatttaacacaaaatatcacacttaataaaaatatttgtttagaaaatctcacattttatattatttacattaataatcaataataattaatttacaatataattatatatattgtcaacaaataattaataattaaattttaaaataaattaaaagaagggtaaaataaaaagaaaaggtcatgtaccaatttaatgtaaattccgggtcgattctaaagtatatgaaatctaaaacaaaattaaattttggacccttttatgaatatgtgaattgtcatcaaaataataaacctattattttagtatagtggtaaacatatttaaaattcttaagagttcaaagttcaatcatccatgactacatattaaaatatttctaaaaaaaattataaaagtaaaggttgggaattaattcttactttttt

SEQ ID NO: 50695 - DNA, 1140 bp, Cannabis sativa
atacattttcactaattttaatgaataagtttttgattaaaaaaacataaattaatgaatgtgtgataattcttgtaaaatcttaagagattatttatcccaccttggatgggataaataatctcagacagataagattagttggattagttatcaagacttccaatatatccaaacactggattggacaaattaacttgtctaatccagtccaatcctacctaccacccctaaattataaaatatttgctgcaaataagttctgtagctactgtctccttatttatttgagtgtagaatataactgaatgaaatatttataactatatttatagttaggaaaaaattataatataacacttacgaatatgaatcctttgatgatttgatcagaatagtattcaggattagattcctgcattgcaagcaagtgatcaatcatggtaatatctgatttcatactccgacgctcatccacaagtttttgcaagaaagcatccattttcttaaaagcccttttcatcttaaactcataactaattcccaaccatttcaacccgaccggcaagaaatcggtcgggttggctactccgctactaggcactacctcatcaaaaatcctcatagccacctttccttcttctttctctgccacgtcatcaccgtaatacctttttccggccaccattctcattatgatattgaatgtcaaattcgataacaaactcttcatctccattgcaaaatcaaacttattgttatttatatcggacgatgcagatagagagtttctagccagagtataaagcaatcgattgatctcgtccgtacgcgtggacaagtgtgatttaagccggctagccgagaagatctcaatggagccgattcggcgaaggttacgccaatggtcgccgtaggaagctgctaccattgcggtgtagttataggcgaggtacttgccaaataaattttttccgcggttagctaaaacgacgtcgtttttggtgaagcattcttcggctgcggagcgtgatgatacgatcacaatgcggttggaaccgaaccaaagggtgaaaacggtgccgtatttggttgccagctgatggaagcatctgtggacaggtggctttattagatgga

SEQ ID NO: 50696 - DNA, 685 bp, Cannabis sativa
tcctttccattccattccatttcattacctccaaataaattagtgttatcatctcctttttgccgccaactaactttgcttatctgtacattttcttcattttgaaaatcaagatccttagggttcttttgagccctcaatctagcttcccttaggttgtctttagcttgctaaaaactcttccccacatctctaataatctcatgattgaatctcttaaggttatgcttcaatcacataagtttgagatacacgtcatataggccatacgaggacatagtcttctctcaactagataaaactaggtccctaaacttcgggtgaatagcccagaaattgtaatatctaaaaggtttaaccccaatagacactttgactctagtagtaacaacacaagagcaatgatttgatatggtctcccaaccaaaatgtgctatagaattagtaaacatatcataccaatcctcattcgcaaagacatgatcaatctttgaataaattctatatctcgatctcgtactcatgagagcttcaacataagccttagatatccaatcattaaaatccaccaaatcactactgctaataggactgcgtccagacctatcgtcgaagttgaacactggattaaaatcacataatattaacccgggtttaacagggtgcttcaaccgagatagatccc

SEQ ID NO: 50697 - DNA, 1113 bp, Cannabis sativa
tttctaagaaagaatgttctcgaaaatagctcgtcaacacgatcatttaggctgtccaattgatgtgaatgatcatgacactcgatgacccttcctcgattaacatcctctgagttggaaaaagagtgctctataaacaacgtaatttatttcgcaaatcgttaaggtacaaaagagcgttaagagggagtttttttagttcgctaataggactcatgttgtgtgaaaagtgaggagataaactgtgacctccagaagatatgtccaatgattgatattcaaagaaaaaaagagatagcatgggaagaaagaggaagatgcatgaaagtaaaagaatagtgtgataatttataaacatgggagcttcttctccaaactttcacctagtaaaaagatgaaaagataagtaatcatctttgaacagtaaaattgatatgatgcatgaaagtaaaagaagagtataatgatttatagacacgaggataaataccaacccttgacgtagtaaaaaaaatgaaaatgtaagtaatcaactttgaacaataaaaattatttgtgtgaagaaaaaacactaaataatactctttgttgattgggtatacttgatagccaactttgaattatacccaacctttccaaaagccacactccatttcaatcaacagcacagattcttgttaggtgcttctcaatctcatatgttctaagtctaaccacctctcaagtgcttcacaatataagtaaattactaaattaagctcatattcttttacatattttctccttatcaaccctataattaggggtgaatagaatatccatttaactacaaaactcacattatccgtggtgcagttaaggaaaataaaattaactaccatactttgcaggttgattaagtttttggtcagttcaccatcttcacccctacccataattacttttttatttattacatattactaaacagagcactcatcagttaaggacaagaagagtacaaacttttcactgtaaatctcttattcttttttcttacatttaagctatttatatgtagctgaaaagaatccttattataacataaggtacaagctaaagtgaatgaatggc

SEQ ID NO: 50698 - DNA, 886 bp, Cannabis sativa
attaggagtaaaagtggatggatgcatagtaaaataaatattaaaatttccattttactatttttgatacaattatataattatatattatttattgaagggtagcgaaggcatttcatatattttttttttgtcattttcattcttggattcttccaattttggagggattaaaatttctttacctggaggggactttctccctttatctctcctctctacctcttgccaaacaaaggaatacatctctccctctatccctctccttccttctctccctttctggagtggatctagtttcaatcaagataatgggcttgataacaggactggagaccgtggtccacaacatactacataggatgctaactaactaaataattgctaatattaatgtatatagaaaaattctatggtaggggcaccatttttgttcctatcggtatggggtatctttatttttattacttaaagaaattataattcaaattttttatatgactgtttacattgtagttatagctgccatttcacctatttttttaaaaaaattaaaataatttacaataccgaaaacaatgttcagacattagttgtaggcatatatttttttaacacgtgtaattgactattttaaactttgttttcagtatcataaattattcaaattttttcgaaaacaggtggaatgcctgctcaaactataatgtagactgtcatatgaaaacaattagactataatttcttcaaatgccgaaaatatagttgtactactttatcggtagggacaaaagtgatactcctactatagttgcatctgatataattaataatgtagtacctgtctgaattcccctcttgtcgcttctatcatatctacatctac

SEQ ID NO: 50699 - DNA, 671 bp, Cannabis sativa
aatggttacaataaggttgttgaatccatgcggcttgtttgatgatctcatacttttgtttttggctattgattttcaagtttggtatgatgatctatatagcttttaggtgttggagggtccatatgttgtaatgaatttctagtttctactcattctggagctcaatagatcaaactccttatttacacctataaccaaaatttaaatcttaatcaaaccactatcttaaaatcttatttttatttatattaagaagtgagaatatattaatatattcattaaagtataaatctttctactacttatattactaattacttttgatttttgaaattgaattttctatatcttaataatagcttgtatcttgagataaaaggcagatgataatttttaagattggcaatttttcccgttttattcttttttaaaatttacaaatgtcattccaatcaaaatatttgatgcaacgtcaataatcactaactacgctactagataatccatgtagttggatcaaaatgtattagtgtatattgctatgaagttttatccaattttagtaattgttgattattaagtatttattaagtagtatttctattttattaagtgactaaattagaacactctattatcatctcccactgacattatactctttttga

SEQ ID NO: 50700 - DNA, 651 bp, Cannabis sativa
gtcacacccaaattcatcctcaaaccagattatttcagggagactttgattgagactaacttcaataagaattcttggaaaattcagtttgtgcctttgcttagtaaccgcatccacttgcaatggattccgtagttgcctaacaattttgaacaaggacttctccccccaatatttcaagtctaaatctttgagttgtatccaaatcggtactgttctaatgtcttcttttctgaaattaacaatggggtcccaaacttttataataacaggtctgttattaaaaaagacatagccaccattgataatctcatctctatcttttatggagcaaaatccaaccaaataaatccgatgcgacagcatacccactctttcaactttgtctttccagactcttctaataaagccttcaagaattgacaatggtggattgacacctagtacatagcaaacaattgagggctgccaaaattctacttattcttctatatcttctaatattatcttaactttttgctccgcttcagaattcttgaaggactttgttgaatttcttactacagaaccagatcttacgactggaggagaagcagattagatgttcatagaacattgctaattggcattaagaaagaaggtaaaatctgc

SEQ ID NO: 50701 - DNA, 1294 bp, Cannabis sativa
tatatatatatatatatgttaatcactttattctccatatatatttttaatttaaaaaataaaaattcttcatatatatatatattatttttgaagatttgtttcagttagtacagtctgtatatatatttagaataattacagtatatttatatttatttagaagaaaattcctaaaattccaccctaaaaaacaacagctctaaaaaagtagaataattacaggaaatatatgttaatcactctattcttcttatatatttttaatttaaaatatctcatcaaatatccatatattgttttcttttttatgcatgctctgaaaaaaaattattcacctcttttgttttttattttttattttaatagatattaaaagtgttaataaaaggatatatgttaatctgtatatttgttgctatatcacctctaataagtatttgctttttattttgttagttctttaaaatatacaactgtcacaaaataataaaaagtgattaaaagaaaatagaaaaatcacatcttcaataacatatataatattaataattgaatggagctaggttctaattagcacaaaaaagaaggataaattaatgaaagatttaggctctatgcttgccattagaatatattgttaatagattttatatagtgctaaataaatactatttaatgatattttgtttaagaataaaaagttgaccaataagtcgttgaacaaaacttgatactttttttaagctacataccatgattagtttgtataacttttttgagggattaatgtaggtttgggcaatacaattagtgttatgtgtataacatactctttatgtgaatgcattatgcaaatgatgtattttcactcaatgctttcacatattaaaatgataagaaaaataagaagagctagaacaaatttaagagttaattttagagaaatgaaaagaagtttttaatactgtacaaatgagtaaaacacggttatattttcttaatcacaaataagtttaagtgacattttatattcttttagttaaaattttagaattttgagaataacacatatatttggtctcaaaaaaattaaactgaccgtgcatgttttttttttctatacggtcctattagcttggtttattacaagctctcattttattatattatactttaagatacaaattttatatctatataatttgttaaaattaattctatcatctaaaattttaaatacttatataataacaagctatcttaataattttatagatatttgttttttttt

SEQ ID NO: 50702 - DNA, 1385 bp, Cannabis sativa
aaacttcacagaacaatcatataacttccatataacaatctctatgtgacagaaatcaaaatcatgccataacatgaaaaatgtcatgagagctcaagctttgagttcaaaaactcaagcttggctctcactccaccacaactacaaatagaatgctcaaaatgcttccattcaatccaaaaaaccaacccaaagccttacccatcccatatcagctacagaaccaaaaacgcacttccaaaacttaaactttacaagaaagaaaagagaactaaactcttaccttagcttcccttcaagtttggcttaccttacctactaccaaaggattgtagaactaaatctggacagaagaaggagagggttcaaaatgagggtttggtgtttgattttatatcaatgtttagctatatatatatatacttcaactaaaaataagaataataatagtaataataaagaattatttttatttttaatagtaaaataaattattttatttcttttcttgaccactaagaaaactttaacctcaagacatttgatcaatttcgagtacctcgaaataccctagtaattctaaaaccaacttacctcaataattctattaaaattactaactaaactcgttgtgatatttttgaccttcgattgggtcttcaaggctgccgaacctgaaaaatatttttattccacaaataactcatattataaccacatattctaaataaatctccgtaattaataaattacgtttattcatccacttatgacaaaatttcataattcatgctgaattaaattagttaggatcataattgtactcattactctccaattaacccacaatataataaaccttaattattcataattaagtttataggatattacaaaaagcaaaatgagtacttttacaaatacaaactttaaagttttattgtctagttctcataggtggtgtttggttggaggtaatgaaatggaatggaaaggaaaggaaacaatctctattctattcctttgtttggttgtatattaaagtattggaatgtcattccaatagaatgacctatccaccattttggtgaattgacaattctattttgaaatggaaggaaagaccattccaatgtatgatgagaaaagatttaataatttttttattaattcttttatgcattttaaattttattccattccattcctattctcattcccattctcattctgattctcactcccattcttatgttttcattcatcccaaccaaacgtcacctaagagtatttttgaacgcctttaggatagacgaaattttatattgtatcaaagagatcactctttctttccgtattggtgtcctttaattagtatatcattt

SEQ ID NO: 50703 - DNA, 874 bp, Cannabis sativa
gaaggatttgcacacttcggggcaaaactgatgtcatatccatgtaggtacgtgggtacaaacgtgtgtcacctagtcgtgcaaattgcgaggtctagaaagtcctcatacaaccaaaagtttccacgcagacttgggggcaaatgttaccccaaaatttgcactgatatgtagcacctggcaagctaacaagtggcaaggagattgaccctgtgtggaatatgacaccagtttgtaccgaccagaccagatgatgctaaatggctgaccgaggcatttgctgaagatatgtcaagatacattctttaattagttctacaataatgggccaattgatatccctatttccatgggatttcatttaacaaatggagaaaaggggattcacattcaaaccatttctaatttatttccaattttttttgggtaacttatgtattcattattccttatacagtgaggtcaattcactatttagggacttcgattttcacgtgctaagaacagagagaacagtctgaaatatttgtaacatttttaagggatattgagaaactcacttcatcacaccttgttatcttgatattcattttaaaagtaatacaacaaaaaaaaaagggaatagactattactgttaaaagaagacgaacctctataaaattcgtaatatttacagtttttcataatccttgttatgattcaaatacttacattatcgctttattgactcaacgttattgattagaaacgaagtcagcaacaagtaccaatagaaactatcaatcaaaaaatggaagaatgaagaaaaaaagagtaatgttggatacataagtgtataattttagtgtattccaatcatttttctttaaaaaa

SEQ ID NO: 50704 - DNA, 695 bp, Cannabis sativa
gaatgaaagagtatgagttggttgaaaaaatgccaaggttcacccgaaagtactctgcatttatcacctgcacatgccgttgttaacaaaaaaaggtcagagtgcatctcagaaacaacaacttcaaatcgacatttgttactccagaattctcccatcttcttaatgaaagtttggggattaacagaagaagataggcatctagccactaagaaaaacttcggtggggtatcagagtcttgaagatcagttgcagagagaatgtggacatctctctccttctcagacagtgatagagtggtattcatcacgctaattatagattccatacgatagtgagtaattgagaaagaaaataggaagcgtaagtacaaatcgtagattgtgagatgatgaatatatataggtgcaaaacatttcaggttcttcataatactggcaagatcaacagatcgtgagaactgggaaagaggggggagtgggaagttaagagagttcatggaggagatggacgagatggggaagaagatgcagaaaaagctaaaaactagaaaaccaaagtaaccgcctcagagaaccccactcgggcactataataccatgcccctgaactttcatatccttattagaatttctttactaaaattagacaaaagtagtttaggggcacgatttagtacatgtcaaagttccgg

SEQ ID NO: 50705 - DNA, 1067 bp, Cannabis sativa
gtattgctattatatctcaatgatattttttacacttagcaattaatattttttaaaaattattatattaataaaaatactaagcagtactggtaccttaatatttagttaaattaatagcgataataacatattaaaaaaaatactaacttaataccttttttttaataaactaacttaatacttaattaaactaatagcaataatactacataaaaaaaaaaaatattaagcttaccctttagaatttctcaataatgcctattatttttccttcatttgaggttgttacataattacattgccggctctctttctttctttctacattccaatctccattgagtagttttattttaggtgacaatttccttattctataataattgtttttcatttactctccctcacgttattctatactttattctctttaaaatacatccaaaaatctaagaagtatatttatatttgaatttaattaatttttccttattgtactatttgttgtacttcaaataattgttaacatatcatcacatcacatcaaccgtccaccaaacataattaaactacacacacaatctaaatggcaatttagctattaatgttatttaggtgagttgcttattcatatatactctataccttaattcgatttattaagtttgagactagatatgcacctttacatgacgtgttggatttttaagattatttatgggagatccactttattatctaatctcactttaacactaatgataaatattggacaaactatatatgttcaaatcacgtgaatttattaatattacattcatttatttgatatattgtaagagtataatttcatttttctgttttatgagtacaaggtcaaaataattcatatcaaaacttaattatgaatctaggcacatgtaaaaaagaatacttaaaatgctcagtatcatattcattaatgtcattcggttaaagaatgaactatcttagattaaagaggattttgcgctccctgtcattatattcttgaatggttctaatttttaattgcttcgtcaaaa

SEQ ID NO: 50706 - DNA, 2955 bp, Cannabis sativa
  modified_base (64)..(64): a, c, t, g, unknown or other
cctcttctgaggcaaagcaggggagtactcttgccttagaatttctgttttgttattaattgtnaccatggttttcctccaccacaagcgaggcttttaatataaaacgagaaggatcctgtctaagacaagaggatctcttctctttttcaaaaaaaaaattgtgtaatcaaaagaacttgtgctatacttttgtaaatgaaggataaacttcaacaaataagagagagttcgaaaattgtgtgctttgtaaatgcacgtactttgattagtttccaaataatgcatggaattaaggtcctaccatataaattaaatgttttccttgtattacgtttactgtaaaattaaaccaaattggtctcactctcttttctttataatttacatgcagatgcccgcagggaagcaaggaaagcttttttagcattttcttcagatgaagcaaaagcacaggttgctcactccgaatctattcaggatgaccttgaaaaatatattgagcagcctgctggtgataatgttctctcttctcagggcactcttgtaagaattttctttgtatgtagaaatggtagctttcttcttgatataatattggagccctgagaataattttataataataaaaaacaaaaaaaatcccatacttgtattttttataataatcaagttccactaaaaataattttaacttttgtttaaaatagacattgtttttataataattaagccccatagaccaaattttttgggtccgtcactaattgtttcttatgcgcaccactcttaaaccttatgacgccttaagatttggattggttgtgtgaggagaggatttttatgttcgccctactttttctcaaataaattatcactcatagcactatatgctagtagtttagtttgatggtttgtatgatttccacattagtttaaaatatccttggggccatttgttacaagagttaaggttctgattaatgagaatgtaaaaagggaaagtattcttatgtggaaacttgtataattttgtttggttttgtcatgagaagtttatggatgattcctgtgaatataatatttttagaaatagtcccacattgcaacgatactagaaagaaacatgtagtcttctataggattagtttattgatactccacctagtgctaattggttttaagttggagccccaatcattctctaaaaggccatttcttctccgttattgcaggtccatggactgaccccaaagcaggacttgcatggcttaggttttgacccttataagaatgcgcctgaatttagaggtatgtgtttcttcaagaaattaggtttgggcattcagttatatattaatgaattgatttattttctttaccatctccagaaaggaaaagattgcgcatttctgggagcagggatcctgagtacaggaaagctctttcagttaaaaacagtctctttgctctcaaatgtaagatttgtcattcaatcaattggcatgtcttcgtttgatggccatttatagatttatatatcgataataggtgcacatatcaaattttgtttgaaggcttcaattttaaatgcaatggtataaacaaagtttattgttcatcagcaggaaaggttgcccctggttttggtattggagctcttgaagaacttgatgctgaagatgaagatgtctttgcctctggtttgtatcaacctttatatcatcttaaataatcttcattttctagtcctatttttattttactaatcaagaggcatgggttataagtgaagggaggtacacatgttgatagtggacatgactttatttaaaatgttttcgtgtgaaaaaaacaaaattgtctgaaatagtactaaatattggactgctcttgtatagtccaatccttagtcctttgtgccatcctttttcatgcatgttcttattattttggatacctagtgtttattttatatccaactacgtttaatctgcagattatgactttgaagagacttatgttcaagaaatagatgaaccatcaacaagattgatggtggacactaaacgaaagttgattacaaatgagagaggtgttctgcctggatttagaattgcatcaaatgctgactacctgccagaaaggtgaatattgttgtaaattcaagatgtatattatatgtctccagacattgttttcataaaattaattaagttgaaatttttatgagctttattgttccttgttcatggtatgcagcaaatcgttcagccattttacaatactaatggtcattagggtagttatattaggagaagatttttaaattaatgagttttgagtaaatgattatgatgatatgcctaagtttagctctttattgtgtttgtctctagggctgttttgttaactagtactatgtatactgtttctcagatttgatcctcctcttgttcctaaggattttgtaccccaccataaatttgctgggactcttgagactgataacaaggttcctgatactggtccgcctgaagtttcacctcccgaggatagcaatttgaaactcttgattgatggagttgcaactttagttgctaggtgtggtaaactttttgaggatctatccagagagaaaaataaatcaaatccattgttcagttttcttcttggaggaaatggccatgattattacaaaaggaagctgtgggatgcaaggcagaagcaaggcgatcagaaaaaacatcaattggatggaagagtatcttcaagcacacagaagctgacagcagagagtcgtggaaaaatcttaggagagagacctttggagcgaagctccaatgatgcaggtccatctgttgctgttacttcgtcaaattcagttaatctgcagtacaatctttctgatacatttaccactcctgcatcatttgtgagttgcatatatctgtc

SEQ ID NO: 50707 - DNA, 723 bp, Cannabis sativa
ggttgtttaacataattggtttcactaatttaaatttatttgaatgttaagaattctcttgtagtatgttatacgttttttttttttaattaaattaactattttgtatttaaatttatcattttattattttaggcttcttatatttttatttctatattagttgttagttttgttcaattagttatcaaatgtaactagtttgtgtattttttttttaagaaactagtttatacatttcaatttatcttttgattattttaggttgtattggtaacttgtttctgtatttagatattatttttgttattttacgtagctagctctacctttataattttaattaagttaatttaaataactagtttctcagttatagttaaactagttgattattgtaactgatttctatgtgtcaaattccaacgtctaacaccattgacaattcaaatgtctaactccggtgccttttcaataatgaaggcaactctaatgacttttttgatgattttccaatgatgataacaacttcggtgaatattctaattctattttctattttttttgtggctaatattttattttagtggataatgattgttgacctcaaattttgcaaactgacaatgaagtcgtatttattactgatgcttgccacgtgttacacaataaaaataaaaaagtaagacatgagatttcatagaagtttgacccctttagtta

SEQ ID NO: 50708 - DNA, 1289 bp, Cannabis sativa
aacaagatattaaaggacaccatggaaaagcgccttgaggaagccaaaaggaactggctgaaagaattaccaaaagtattatggttgtatagaataatttaaagaacaataactgggcaaacaccttttgcaatgtcctatggttatgaggcaatgttgcccgtagaattagaaccctcgtttgaccaaatattaacttataaccaggagactaaccatgccctccaggtaaaattacttgataaaattgaagaaaacatatcttcagtatacctaaaggtattggctcatcagcaaaaggtggctcagtacttcaatacacaagtgagggcatggaatatttttttgggagatatgttcaccgaaatagtgtttctaaaaacaagagacaatgtagctggtgtgctcagacctaattggaaaggaccatatcgagtaattgaagttacaaactttggagcatacaaacttgtttggtatgacataaacatggaactagttctagtaccaaggtacttgaatggtgaacatctaagaaaatactaccagtatgtgcacaaggtttgatgaccatacaaagtgcacaaggtttgatgaccatacaaagtgcacaatgctccaaaacttactcttatgtaggtggccttttgagtagaccttgctcaaaggtttggaagaacaactagtactcaggtcagttcaccacttctagagtgtagtatgttaaaactcattgctcttgagtaatatcttataaggggaatataccgttcaattgttttatgttttaattagctaaagatcacttagataatgtaatagctttcataattaaataaatataaattactacagtaacaatacatatagactaataaatgaatacatatattaaatatcattctaattatgtcaatttatccaattaaatataattatatttctaggatattacaactatcccctccttatagaaattttgtccttaaaatttacctgaataactcaacatacagctcctgcatctgcaactctaattcctaagtcgactccacaaccttgttgtttctccatatcaccttaaccaacaaaatggtcttatttcgtagcactttctcttttctatccaagatctagacaggtttctcttgtatgaaaacttcgtttgaagcttaatgtcatcataactcagtatatgggttgtatcagacacatatttcctacacattgaaatattgaacacattgggaactctagacaaagcaggggtaaagctagccgataggcta

SEQ ID NO: 50709 - DNA, 924 bp, Cannabis sativa
ctttttatataaagaagtgatccagtctgaagaagactaggtacaaactcttgtaaaagtggattaagtgcataaagctctgactaaacctataagttacttgtctcatttacgtttttactatttttatttgcttacttgtattttatttatgagtattcgctactctaagtgaatactcgtagctctgtacatgagtctcttgttaacatgaatactcataatttttagtgttatcaatatcaattttcttccgacaacatcttactttatctggtctagtttatccaatattttctctctccaaaagctcatccatatattatatagaagaccaactcacatagacatatgacacagcatattctcttgaataaagtactaaagcttaaaagagatggttgactcaaattgtaacaaaactcaaacaataggaaaaaaaaaaaaaaagcaaaagattaagaaaacaaaaaaaaaaaaaaaatgagagcataagttataatttataattgaatcattattaccatggattattaaccaccctcaccctgcgttgtggactctacagatattggctcacaaaatgagaatccctaattctacttcaaaaatcaacatcaaaagaccatgaatgatacatatacttattaaaacaaaagaacaagggtaacaaatcatatgagttttcactcgggcaacttcaataagtgtatccagccacatcaaatttactcatcaactacaattatcattacaacactaactcgttcttgaaagtgacagatttacatctaaactaaaatttcagtactatttactactggcaattaaaaggacaacattaaaaaattagaaagaaaaataaattagagaaatcatatcgaaactatcaaaattcaaaatatgtttctgactaaacttgaa

SEQ ID NO: 50710 - DNA, 3517 bp, Cannabis sativa
ggagctcactaaagcagttcctcacaggaggcaaggtgccttaggtgccagatgggtgagtcctccattcaagatcactgaggcacgcatgagggccttggacaaggatggttatcttggcagacttgagttttacgtcccttctccaaaccaatgagccactaacctgcggaaagggatgtgctcttggtcgggtgcccacactaaacaaggggcgatgctgcccttacacccgtacttcaagaaggtggcaaattatttctgcctttgtctgacctagtttactcccaagggcattaagtatctatctcccctattcatcctctacgtcattcaaaagtggggtgtgccttctccgcacgaggtcagttggttttttgacctgaagtctacccccaagcaaagtagggcagggtacttctacttctctcagccagacttcaagtggttgataggcactgtggacaaggttgtgagcaaacttgggggttttgttgatgagtattattttgtggaaggcatgggcaccacttatgctcggtttcaacaaatcccaatatattaccgtccaccccttacactggttcttagggacagagcttagaggattgtcccactactggatgctgctcagaataccactttgttgacctcggaggccaactttatggagtacaggctttatccagcagacttcatccatcagcttatgaaggagcttattcaacttaagcgcgaggctaagttgatgggaggagtcagatctgaacaatatgctcaagaatattctgagcaggaggatgaggctcaggaagagcaggaaaggtcgcttaagaggaagaagaccctcccgatcgggtaaaggcccatcaaacacaatctagatcagggagcccggtctacctgctcgacgatccacccctgtagatggaaaagggaaggtcgtcctggaggagcgggaagattcgccggatgacgatgccccatcaatacttgtttcggaaaatgcccctgccaaagtgcagggtactccattttatatttaactttcttgattatcatgcttcatatctcttatgctattttttgactatgttacttttattccacgcagacatgtctcaaaaaatgcttgaggccttgaagaagagagtgggaggaagctcaggcttatctcctccggccaagaagtccaagggcggtgagacaaccccgtccaaagagaatgcactgactgaatggtcattgaccttcctgaggaataaactgtcgtggaccctcctgcttcaaaaatgactaagtccaaagattcttgaggaggtagttcggacaagcctaaacaggcagagggcggatccaagttggtcagaagcgggtttgaacagattaaggcccctattgctcaaccattatgtgaatcggtcggtccctgaggtgaacgagcaactagctggggcgaacaacgatctgtctttggagctagttatgggaggaatcctgaaggagctttcgagggtaagtcttttttgacaatttcctttttttaattctttaattagttcaacttttaatgtcccctctctgtccagactggtctgaagatggcttatacttattcccgagctaagtcggctgctgctaagaaccttgccattttcaacacaatacaaatggaagtggacttggccaagaaggatgccgaggaagcccgggttcaacttggagctgtgcgcattgagctgggagaggtcaataagaagcttcttgctgctgagaacaaagtggccgaactgaataaggagttgcacgacatgccatccatcgagctgctcgaagctgacattgcctctttatcttaggaagtgtccagcctcaaggacgaaagagaaggcgaacccttcttcgtaggctggaggatgaaaagaaaaccaaggaggaggagcttgtggctgaggttgagaagcataagtcggaggctaagcaacacaagtctaaagtggcgaggcttggagggaaagtgaaagtgaatgccctagagacagctagtctcaagatcttttatgacttttaaaaggccaatcccaaggcaaattttgattacttgggcaatttcaaagacatgtttctcgactactatactgctcaagtggcctacgggggaatttgaggcgaccacttcgacctctcccactgatctaagtgttgaagtgccttctactcaaactaacgatcctccagctccttctgacccaactgacccatacaaggagcctagaactccatctgtttaaatgcttccttttactatcttttttttagatatctgtttggccataaggcctttttttaagacaaggtgaccgaccaagcggtctttaaacttggaatttatttttcatttttcagacaactagctgaccggacttttaatctcgggtttaaatgcttttgttatccttaatgaatttcattttctattcataatcatcatgcaattgtgtttgttttgttttgttaagtctttgagttggagccccaccttttcatacggtgtattgaacaaaatatttgtagaggctccattatctatcatggtttgtgctaccatcttgttggctctctggacttccacaaccaaagggtcgttgtgctggaaattaatcttgacagcatcttcatcactaaatgttatggtgggttctcctgcccgtggttttcgacggccaaaatcacttcttcttgctcatgctgtaatgttcgagcatacctttcctgggcttttcctgaatttccaactatgtgcggatctccaatgatgatttgcaaatgtccatctactggtggtggtagtaaatcttgattgttgttggccctttgattttggtcagccttgacatatttttgtacgtgcagattattctttcttatcaaaaattcaacttcctgcttcaaattattgcattcgttggtgtcatgaccgtaatccccatgaaaacggcaaaactttgtcatgtctctcttgcttgagtcttttttcatgggtgggggcttcttgtactgagctaatgactgagtagccatgtagatagtttctatatcttttgtcaggacagagaaagcagtaaacttggtagacttttctctggggacctatgtggttttgccaacgaactttccctttttcccattgccttgcctattgttattgtgggatcgtttaccactcgagctttaattgcttgggtactaagggagctggatggatgttccagtggagggagcctttagctggccaggtttatacttgacttttgctcacagaatagcttcttcaagcttaataaggccatctgcacggtcaaggaagtcactcatagaatctattggtccgttttttctgatatccttcaaaagttctccaagaactttgatgccccctagtatcacggacaatttcccatcttcggtcatccgtgaaaccttcgttgcctccgtcatgaatctactgatataagct

SEQ ID NO: 50711 - DNA, 4263 bp, Cannabis sativa
gcaatccactgctttagctactgctactagctctaccttactggtttgtaaattattatggttttcaattcaaattttggattttggtcatgggaattttttgataggaaaattctacaatgaaccttgctaaaaaggatgtatcgatacaccttttatctatttcggtatctgagagaaatttttagtccaattttagttaagatatcttataaaattttaagaattttcgagaaatttaagactctaacaatagagtaaatagggttcaaagagaatctgttacaactcttttattttatacgcttgtgaaatagactgattgaacactgtattttatattgtaaataatttcgaatttttagaattttgcaagatgtcttaaataacatacacaactataaaaataaattggactaaaaagtttttctgaatgtcgaaacagataagggtgcatcggtgcactctttttaagggtgtgtattgtaaaagcaccgatcaaagggtgtcaaaagcctagtccagctcaggtggagtggttattgttgtggacgtgaaaatgttaaattggcaaaataaccacaatgtaaaattatggtagcatagtgtaatagattttaggaagttattttgctaataaaacttatcataattgctgctttttgcaactcttgtgagtgtacaagggtgtcaaaagcctaaccgagttctacattgttcatgtatgtgtgagtgatttgtgaggtttatattacagttagtagctaccaaactttaatctgacgatagattttggtaattgagtaaatactgtgttagtgtgattaaatctatcaaagaaaaggccttaaattggcaaaataaccacaatgtaaatttatgatagcatagtgtaaaagattttagcaagttaatttactaataaaacttttcataatgactgtttttgcaacacttgtgagtgtataagtcaaaagcctaaccaagctctacattgctcatgtgtgagtgatttgtaaattttatattacagtaagtaactaccaaactttaatccgatgatagatttttgtaatataaactttaatccataaaaaaaaatccctagtcaaattcaggtggagtggttgttgtggctgtgggtgagtgtatgtgtgtgtatatatgtatgtatattcaaatatcaacagtgtcttcattgcttgattcttgttcatttggagtttacaggaactttatgaatggaatgctcgttacagggagaagtttggatttgtttttcttatatgtgcttctggaagaagcactgatgaaatacttactgaattgaaggtgcttttttcatttttaataagattgtacatttgttttctgtaatctgtataggtttgttctagaaaaatatgtagaggcaatggagaatgtattgcttctattaattggtgaggagggttatgctagaatttgcaaaaacaaatgaagattctgagattttctttttcttatatattttttttttgcagaaacgttacccgaacaggcctatagttgagtttgagattgcagctgaagagcagatgaagataacagaactgcgacttgcgaagctcttttcaactaaagaaaatgtttcttcaacagggggtgatcagtttcatcaaactgcctcaaagaaagcagaaggtaacactccttttgaattttaattatagaagaagatcagaatgtaagccgatttttcgtttataagaaacaaagctactggatttgagcttctttcaaaggcatacaaagtgaagctgttcactgtaaaattcatgttgaagtttaacaagcttgtgtccctatcaatgtctgattgaaaaaaagtttaaatttttcagaactacttttaaatcactgaatactttcttaacttttgctgattgtcccatccccatgttgagaattctattaatttatcttttgttatttgacttacaagatcgcgtaagcgttattggagggcatctaactgctactactgtttcagacgcatcagttgggaaaacaagtgcaaacccaaatccaactcgaacacgaccacccattacaactcatgtcttggatgtatcgcgagggtctccagcagctggtattgaggtgcagttggagacttggaagggtcctcagcctcgtcccttatttggaaagtcatacacgggtggttgggcatttctggggtcttcgacaacaaataatgatggacgaagtggtcaattgatgagcgtagttgatgatgtaaacccgggaatatacaggataagcttcaacacaggtaagtactgcccatcagggttctttccatatgtctctattgtgtttgaaatcaaagaaacgcagaagcgggaacatttccatgtcccgctgctgctatcgccattctcattcagcacttatcgtgggagttagaacttttgttgcaaatcataagggacatattggttcctaatgcaataaacatgcttgtcttgtaatgttagtctttaaggattatgtgatctggtttgttaagaagcatagtagagcaaactatatatatatatatagagcttcagaatccatgatgattcaaagttaaagcaactaacaaatttgtttttgttacattacacgatatttagcaaaatattccgcgctcttatgtaaatttactgcaaaaagggcttctaaagaacagaagaactaaaataagtgtaaactgtacaaattaatagcaagaatatttacaaggagaattgaagcaatgatatgttgcagcaatgagatgtaatatataaacgcttaaataaaaaaaaaattatttgaaatttgcttaattcaacgggacagagccaacatgatagggtggggttctgacttagacagggtggggttctgacttagactcgcatagttgtcctattttgtcttttttattataattataatctcaatttttatataagacatagatatagttatttaagatattttacataaaataaaattaaatagcggtaagatatttggctaaaaataaaattaaatggcctctttagcttacatatgtaaatgattctatgcatctaattgattgaagttattgaagtcttatgatcccacattataaatggacatgtctatcaaactcttacatcaagatttaacaagaaggtgtctaaaaatattgtaggagtaaaagattatggtaaactaaattaaattggtcatgtaataaattatacataagtatgtattatgttatttaatcgcattgaattacatgtcttatgtaacaacctactttaggatagatattatgaacttcacaattgcaaattgttcttgaggaaactcaaagaaaactcaaggaaaagatatcaatgactaccaagtgcttgtaagactttacactagcaaaggaaattctattaaggatgcaagaatgattgagttaaaaactcaactttttataattgctaaatactatttggttgctaaatttattatttttttgtgggattataattcaagagttttaaaaaacaaaaatgaaaaaaaaattataagaaaaattgtagaaagccgtgaaagttcttaatgttttctaaaagtaaataatgaaaaaaagtacataaatttgtttgcaaaaattaccgattatacattctattttgttaaatgataattcaaattttgtatttttcaaaataatacaaaataaactctgaatacaattttcgtcatttttttaatgtaaccaacttgaattcaatttccaacacaaacaaatacaagaaatataaccaatcttgtcatagcacctacagattattattatgttttaatttggtgaaaattaaattaaggtctattttgcaccactttaaaaattacagagtctaaattatcgtttaactaaacattgaatccaattagtaacttttgtgaaataatggtccaaaatagtatttagaaaaaaaaaatatatatgtggcatttagttggagataatgaaaaggaaatgaaacaaattttattctatttatttgtttagttgcattttgaggtattgggatgtcatccaatggaatgactattctatccttttggtaaaatgactaattcaaggaatgaccatctccaacgggagatgtaaaaattgtactatatttagcagaaaaagtagttttatggtaaatttataccaaattttagctttgtgctctaatgcacaattat

SEQ ID NO: 50712 - DNA, 540 bp, Cannabis sativa
ttatgatctgctatatagaaagaagtaattattacttttgatgaaagaccaaaataagcatgaaaagatgatgatccacattactgctgctttattaattacaactatcatgatccatattaattatatacataggacatttataaattcattacatgtgacaaaaatcacaagatttaaattattttgactcagtagatgcatcattaaattattattagtaattaagaagttactagtataataaaaagctttagtagattatcttggtgtacaatacaaaaaagaatctaaaaaatttcataagcttctacattaccacacattatggacaagtttgaaggatattaccgatgtcgcgcgctctagggatggcactgtattatattcttgctaaacataaattaatttaataaataatgtgtgatatcgcttttgctcttatatatcccagaagcattattttctattatttacactttttaaaaatgatattaattaaatttctcgcatctgattatttaacgaaaattattagtt

SEQ ID NO: 50713 - DNA, 1115 bp, Cannabis sativa
aaaaaagatatttttgaaaattttcctaaaataaataggttagattataatttcagaaaattgagtaaacggtaaccggtcccgctatgtagtatattgtaccacctttggaaaaataaataaatataaaatgacctaatttcacatattttccctcttcgacttcgattaccaaccaatcctcaattgcccccattctgcgtaaaccctagaaccgccattgtcgattctatttcattctctaaggcaaagcttggtattatcaatcaaccatggcagcccccgccacaaccagtgtggttccggcaaaccgtaccgccagaagaggtggcatgccgatggaggataagctcgaattcgtcactacggaaggagttgagcccattctcagtttcgatcaaatgggtattaaggacgatttgcttagaggaatctacggttatggatttgaaaagccttcggctatccagcaacgtgctgttagacccattattgaaggccgcgacgtcattgctcaggctcaatctggtaccggtaaaacctccatgattgctctaactgtctgccagctcgttgatacttctacacgggagtaagtcttacctttttttttttcttgtcaatttcgtttactgctttttgtacttttaaaccctagtttctctttcgcttgagcagaaatttgagaagttttctgaagtatatgaatttttttagggtttgtgatagttttccaggattttgtttctaattgtataacgttttgaattgcattgattttgagattatgtgatacattgttttgtcaattgggagaatttgggggatatatcgtgtggtagggaaagggtcttgaagctgaaggaaatcgcgagtacaaacaggatgtgtggactcgagtgtgttagagcttcaggatgctcttttagatagtctctgttttccagttttctatcttatttttagatttggtttacttttccttttagggttcaggcgttgattttgtcaccgacaagggaattggcatctcaaactgagaaagtaatactggcaattggtagtttcattaatatccaagcccattcgtgcattggtggaaaaagtgttggtga

SEQ ID NO: 50714 - DNA, 1778 bp, Cannabis sativa
caatatcgtgttagccgtgttaactcgaacacgacccgtttattaaacgagttagacgagtcaacccgaacacaatccgaacccatttaaggcaaacccaaatccactaactctcgtacgggttcaaatcgtgtcatcggccatagtcataggcataattaatttattttacattttttttgttcacaaaaaaggtatctctcaagttggaatcttacctttctcaaagtaaaaaaaaaaaaaaaatccaccatctcgaaccaccaggctgcacgagtacctaattagatcaaaggattaggaatgtaaatggggtgggacagcacgagatggctcccccttatacccatttaataaaatagttttttgtttttttttctttctaaaattgtaagattcatttaaagattagtagttaataatagtaataatttaaagatagtacaaaagattggtacttttctaaatggagtgggatcgaaatcggagtcatattcttcgactctgccccatcacagataggtacttgcgggtccctaccccatggattaaatttctattcctattaaaatacttacctcttattgtgatgagaaatcaatttaatttgtgtttgttgatttaacgagaatattcacttttcataaaagaaaaaacagaaatcactttgatgattgaaaaatataactggattttgcattaagatatataaatgaataaatgagttcatcttttgtaaattataagtatatatattttgtcttctcattaataatatactgagagatttactatcacaaaattattttaaaattttcaataagagtaagtttaatcatgctgagtggataatttaagttgttaaagcagatttttctactttcttaatattaaaaattatttgacaatacagtaataaaattggttattatattaaaatatatatataacttaaataacaatggaaaatttgaagaggttaaatgatctgtatctcttaatccccatctttaagcacaaaatatgaaactttttgtccgtgtctatgtttggaaaagcatgacttgaacaaattgaaataaacaagctttattaatggggatgcataaaatcaataaaatcctaaattgtaaagaattagactttattcactggaaatggttgctgcaaaattcaactgactgcattatacttttacttctctttctcacacacaccccactctccacagtccatccccccaaaggtaaacacataaaaacaaattcccatatcaccaacaagtgattcacctgattttactagcttaatagatgcaaaagttatagcataaatattcatttacagtagaaggggggctgcgcaaaaaaacccactgaagcaacacatgtatgaatcttcaatgaactctagcatcattggtcaatccagtccttgaaaagcaaaatcatgtaaagaggtatattcactgcagcaatgatggagagcattataaatgtgcgcaacaatctttggatcacaatctttctccaagatttggtgctccttagtggtaattttgtcatgtgatcaactccaatatctgcattattgtccacactcaaagagatctctgactcttgagatgtattttttcttgctgttggccgaattaccgcgctacccctgctacatcaagaacaaaatattacttaaaataacaagtactagattaaaaacataacacattgagaaagaaaaaactaactacaagcacacctttctggattcatctcgct

SEQ ID NO: 50715 - DNA, 3375 bp, Cannabis sativa
  modified_base (3311)..(3325): a, c, t, g, unknown or other
atttttctttcattttattgattaatagattttatgagtttctagattagcatctttttttcatcgtcgaagtagctgtcggtgttcgaaaagtcgtcaaagctgctgttggcaccgaaaaaatcgtcagaattagtattgtcgctagaaaacttatcgaaaaaatcaccaagacttagtgattttttcgataattttttctttgtgattttttcagtgattttttcagcgacaatgccaatttcgacaactttttggcgccggcagcaattccgataacttttccgataccggcagctgctctgacaatttttctggtgccgacaataaacttcagtaacttttccggcaccaataccatataaaactacctaaacaaataaaaatattaaatgtaggctttgaaaacccaatttacatatatatgacatatcaaatatcataaaaatacctaaaagtagaaaaattttatataaattggtcaaacttaaaagtgtcatatttaagtaaacaactttaaaaatctcttagtgagtataatttcttgatagtgtatattattattattggaatattatataaatttttgaaaatttggaaataattcatagtattacaaatgtaatggattgcttttattgaaatattaattgttttttttaaaagacccataaattttttatttattgaaataaagtagttttattttttattattttcttaaaagaaaaattagctgtaatggagtacactgatatcaagtgtacaattttttttttattcttattggtcaatttaacttccttatgacatgaggtaaaaagaaaggggagtacactagatttcccctacatatatatatatattgacaataaataagattatattgaaatgagttttatttaagacataaaatcacaacaaactctcacttgaatgcactaacataaaacaagaagtgcatttcaatcaatctattgtcttgatgtctatatcaagtgtagtgtgcttgactaaactcaaataacatgaactgtaaggttgtggtaagcaactactacatccaccattatttcttttgtgttcataaaatattatgcaatattgtttttgtatatgtattacttctctagggatactgaattctttactacttgactaagtgcatctgaatatacagaagacatatctctaattctatccaaaaatggaatatatatatatatattaaaatagttaagaatttttttcagtttgaataactttctggtgcttttcgaaagcaactaagttatttagcttcactggtggaactaaattattatagatgagtttttacatcattctagaataatttctccacccccagagtaaccaccatatttgatattaagttttgagttgttgtagacataaggattttaatatacacccctatcatctaacataaaggtcactttcagagattctttcttgattgtctcctaatattccttgtttgattaaatctttgatggatcccactcaaacgtaggtgtttggttaaattaatacacaagtgtacatttaacctcttactattggtgcttagggacctcttgttgtgacattttatcttcgtgtggaacattatgttccttctagactaagtcgtcaacatagcattctagtattaacattaatgtaaaatacttgcttaagattaagtaatcactttaggtacaataaaacatttcttaaggactaggaattatgcttaagtctttcgaataaacattgtaaaattttctatcttatcctcacaatactgatatgttattattatccatgtacatggttagattaacttttcttagttttatttttaaagttcttttcttaaacataacatagtagactatcattagtgtcatccaaataataataggttgtactttgaaaaccctcccactaagataaggtactgtgattatatgtccaagaactttattggtatcaattactgtagtaggagacactggaatattaacaggatcatgaataagttctactaatttgctaatttatatattatattatatccacgtctaatcagaatatgtgtgtcatagagattctgtagtgtattgagtatagtctagtgttcaaagagtttgaaccacatatatcaataatttcttccacccataagtgttatagggattctatggagttgtgaatataatctagagttcaatgaagaaaattatttaaacttcatatatcaataatttcttccacccctaagtattatagagattctgtggagttttagatatactctagagttcaatagatataaaagatctttgaactgtatataatacttcttaacttctgttaatgcagattttcgttagccaaatttgagcctaattagtgataaacttgcatagaaaaataaaagtagtagagaaataaaaaagaaaagaatgaacacgaaggttttttacgtggttttgcagttaaaattctgcatagtctacgagtcaatcttattagatttataatactattcttggactttttctcttatgaatttttcgtcccattttcagtttaacttgcctctatttataattacatagtcaggcagttaattacagagttgactgtaatctttacaacaattatcccctgaaatcgtgggattatgagttttctattttgtgaccagaatccacttgaatatttttaaaaaatctttgttataactagatctaagattcatcaaaccacaataatatatctatggaatttgcatcttgttcataatggttttgacaagatcagtctctgcaaagagaaaatatgccaatatccacctagaagtagaatcatctatattcaaacatatggatgtacactcaggggtggatatccgttatccttaaattcttaaaaatatatattactctagattatgccttgtaaaaagaaatttgaaatgtttgagaaatttcattaatttctagcaatggggaaaaccattaaggtttgtgattaaagatcttacgaactgatagggatggataaatatttggctatgaagttcaatgattattaagttgaacttcgaattgtatccaaacttacctttctagaaaattggattgcatattaattaaattgaaaggtctatgattagttactagtagctgcctgagtccctctagaaaatactaagtctaaattcatggatatcctaatcatgaacttatgaaaagcttgaactgttaagtaaggtttgcaagtttgatagctattctaannnnnnnnnnnnnnnaccatcctattgtcattaagataagaaaatgtttgtttcaacaaatacta

SEQ ID NO: 50716 - DNA, 1355 bp, Cannabis sativa
tacataattttatttaatcagagatgttgtggctactctctaattaattaaaattatttatataacatatatattctttatctcaaaataataatttgagatgtgaattatttcaccttatatcagaaacttttatcatcacttgcaaataatatattgtttatatataaaataaatattactcctactgaccttcttgtatataattaatttcataatgctcttttcaaacttagagaaaaagttaacataatgaaaataccatttgtgagatgtttattttaatctatatgtatatttattaagcttgcatatgttcacaactattagaaaaaaatctttagagtagtatgtataccttatccactaattcactgtttagaattgattgaatataaatgagaacaatgccattgttactaagacaattgagaatgtaaatctcctttgttattgagtcttagtttaaagtaaatttcttagcaatgaatcttgctttatatttttatttattttttcaagttgcctaatgagtatttatttatctacatattgctctttagaattcatttcttcattcataatatattgtactacaatttcaattttgtgcattccacagtttaatttgtgtctcaaatgaatattgtaatccaacacttattatacatagtgtaattactagaaactattgatcttattgttctaataagtcatcttaagaatgaatcaacaaactcttaaaatggcaaatagttcaatatccatgaagtttagcaattataaacaatttttaaataatatgacttattagaattttatcaatgacttgtagattattaatgatcaattatgtattatcaataaccattaatcttaagggttgttgtgaatcacaattaatctaatacttgaagtggaagttttaaaaaattatatgaagaatctttctcaaaaattatatatttctctatccataaagatattaaatactatttttttttcctttttgcctgtaagtttaatacattttagtatatctcttgaatgttattagagttagtcacacgttgctaatatgtagaaataaattgtgatatataatatgaatatgctgctcctcccattaccaaatggttttgaaatgaaacctcattcatcttatccccaaattctaacatggtatcaaagccacttgtgatccattgtgagtccaaaagtgccaccggtccaaaaagtcatttgtgatccattgtgaacccctttaacctccatttaggacctttcggccaatgtgtgccagtttccaatattggggtctttaacctgtttcaaaaatccacaaattttccgac

SEQ ID NO: 50717 - DNA, 1317 bp, Cannabis sativa
aaataatttcctgattatcataaacagctgctaatttccaaattaactaagcgggctttacagtgtcctaccttagtaaatttgtgggatgttacatccattaggcacctgtgcatgaagttcccttttgatgacagaagcgttggcatagtcaaaggtgaccaaagaagtgcaaggaattgtcacagcgtctctatctgataagaggtttatggtcagagaagaggtttatgttgctctcagaacagttgtacacgctaaagctgaggctatcacggaggaggttgaagataagttggatccctgagttgggatagagaaaatgatagaaccactagaggatatagaagaggtcaacatctgtgacgcatatcccaccaaaactatcaaagtggggagaaacttacataaagcggtgaaagagaaagttgtggcgaaagtaaaaaagaatgaagatatcctggcatggagtcgcttagacatgagaacgatcaatccaaacgtcagttgccatgctctaaaaattgatgagaattaccaaagaagaagatatttagacccggtaagagttaaagcagtaaaagcagaagatgaaaagttagattccattgagtttttgagagaagcactataccaagtgtggtttgccaacccggtcatagtcacaaagcccaatggcacttggaggatgtgtattgacttcacagatctcagcaaggcatacccaaaagactgcttccccctttaacaaattgatcaaatgatggatgtcacatcaggatatgtattgtttagatttattgatgcttactccagctataatcagattaagttgcatatcgcaaactaagaacatatcaacttccaaacggacaaaggtgtgtactgttacgtggtgatgccattcagattgaagaattttgaagtaacctatcagtatttgatcaataaaatgttcaaagataaacttgaaagaaacatgggggtatatgtagaccatatgcttgtgaaatccaaaacttttgtagagcatagtgatgacttaaaggaagtcttcgaagttatttggatgtatggcatgaaactcaacccaaagaaatgcacattcagagtcttctccagtaaattcttgggtttcatagtcagcatcgaaggattttaagctaatttggaaaatatcaaagcgtctgttgacatgccttctcccaaaaagcacaaagatgtacagaatatgaccagaaggattgcaaccctgagtgggttcgtgtccaaatccatggacaagtacatcaaatttttttcacatattgcgcagaa

SEQ ID NO: 50718 - DNA, 1198 bp, Cannabis sativa
tctggggtccgaggtcagggtccgggtctgggttccagatccggggttcaggtccgggtccaggtccaggtctgggtctgagttcggggtccgagttggggtctgtggtccgggtacgggtccaggtccagggtctgggccagggtccaaggtccaggtttggggtttgggtccggggtctgaggtcgaggttgaagtccggggtctgggccgggttccaggctagggtcccgggtctgggtgcaggttcggggtccgagttgcggtccggatccgagtccgggtttgggttcggggtttggggtccaagtctgaggtccaggtctgggtgcgggtccggggttcgggtctgggtacgggtccagggtttagactggggtccaggctggggtcccaggtctaggtccaagcctgggtccagggtccgggccggggtctggggtccggggtctaggtctgggtcggagatttgtgttgactccaaattctttgtaaatattataatacaagctaatacagaccatttattatgtatcaaataatacaacatacattgtattaaaaaatttggccgtaataattaatataatacgaccttgatacggtgtattaaacgagcgttaaaagtttaaaaaattactttgttaatgttttttattactaaaaccaaatcttttaaactgtttacagtatatgaaaatcctcttggattattacttttcctacctcatatatgaagaaataaaattttaaaaaattacgtacttttacaataaaatcatatgcacctcgcttacatatcatatttcaaagtatttttagtcacgattttgtttctggctgatggacaaagtattttttattgtaaactaatatacaacttttaatgttgttattcttttttgtctttctaataccttttttcttattgaaagttaattattcacagaattagcactattttttttttatatttgtttctttaattaatgttcagtttatttttgttgttcaatattttttatgactgttattctaattttatccgcatgatgtgacactacttacatagataaaattagtgccacttgacagtacagctcaccaacaaaaagactaagccaatacctcaacaaacggagaccccgacactcaaacaaccatcaactgacagactagcttcctcacagaagctggc

SEQ ID NO: 50719 - DNA, 851 bp, Cannabis sativa
aagaataaaatattttagttttctaagtatagaaaatcaaatttcccttttaaatttagatataattttataacttaattatcactaataaaatataactgcaatcgaagcgcggtttgtttcctagtttaatatatgtacatgtaaattttcctaatataaatgtgtaagctctagttttttcaaactaaactacacttgcaatgttataatttctcacaatgcaactattggacgtcaaaaccgcataaagcacaatgccaaaatgtggtgcgatatggacaatttacactatcagcaatttgaaattggaggcagacattctccttgaaatcgatgaggtggaaactcattatgcagaaatttggaagcaaaaatctagggaactttggtatcgcaatggggataggaactctaagttttttcatgctgctactatgatcaaacgcaagaggaattttattaatgcagttcgtttgaatgattctgagtggatagaaggtagacagccggttggggagtattttcggacaaactttttgtcgattctgtcgttgacttcccccgttgatcctcagcttgcgaacctgatttctcagtcgatcacggaggaagccaatcagttacttgttcggattcctactgcggaggagatcaagaaagtggtgtggtccatgcctcctctcaaggccctggggccggatggcatgccagggaaattctttaaagaccattaggatatggtgggaagtgatgtggtggccacagtggttcaattcttcgaaacagggaagtttgtgaaggagattaatcagacttttattgtgttgatccctaaaaaggcaggagct

SEQ ID NO: 50720 - DNA, 1144 bp, Cannabis sativa
aatgatgtatgtaaatattttttaactctcttttttggttgtaaagtgctgaattgtaacttgtaacttgttcttgtatacacaagaaagctaatgcctaattttccaatatatatacagaataattctatgataggcacattagttttgttcctatagcatagagacattttcttaaccctttcttttatatgacttttaagtgtacacattactaaatgtgtacttgtgtgtatccaattaaatgttaatttttaaatgtattaacacccaaaaaaaaatgttagattatttaatatgaaatattggaaagacatatatcagtgaccctaatccctaatttctatctcttcctctctagtttctatttctctatgatttttgaaaagtaagatgagtgagccaatgacagacgtgggagctcgcagctgaggaagttgacggtaagggcagaggtcactgctaaacagagcttttgggcaagtcgacaatggggggtaaaggctcacacatttttctaggtttcatacatgctcaacatcgtcagataagtaagggacacaggcctgtgatgcttcatgaagcctcctcttctatgacaatgatttggtgataatgccaaatgatactctccctccttatatcaattacctatttctattatagttcatgggtatgagacaactaaaacgtcatctatcttattttcccacaaaaaaaaaaaaaaaatcggtatttttggacaaaagaattactttcactttagcaaaaatggtcattgtgaaataatgttttctttcctttgcaattatgtattaatgtatttggtttttgattgcaaattgtatctgattgaagagaagaggagtgagagagagaaaggaaaacaaacaatgtattaattaattgaggagtcaaaatatattaattaattgatttaataaattattgtttaatttttaaaatattattaaataaataaatttacaaataatctaataaactctaaatattaattattgttatccacttatcaatttatcaccattatatctactatctatggacaaaatcaatatactttccatagatatgtcatatatatatatatatatatatatatatattgctcaagactattatt

SEQ ID NO: 50721 - DNA, 2287 bp, Cannabis sativa
gtcgcctatccttagtcaactcgactattttccactcagcagcaaaaaagcttcttattgacttcacccagctccattcggacaactctgagttccacccgggcatcatcagcatccttcctggccaagtccaccaccgccctcatggtgttggacatggcagcattcttggaggcagcagacttagctcgggagtaggtgtaagcaaacttcagaccagcctacacaaaggaaaaactttagaatctgagccaagtaaagaaggattaaagaaaattgtcaagaaagactcaccctggtaaattccctcaagactcctcccatcagcagctccaaggaagattcggtgtcagcgccggccagcagatcactcacctcaggaaccaactggttcatgtaatgagtgagcatcaccttgcctctcttggcctccgggagcactgacgaaggtggggtaggagcctacatctgctcagagccactcttggccagctcggatcctcaatttgactgatcaggcctgtttgagcttcctcctcgagaatctttggacatagcagatttcggaatataatccgcaacatttagctcctcggaaatatcaatcacctccccggccgatgccttttccttggatgtccttggatggggttgcctcacgttgcctcaccgcccctagatttcttggccagaggagatgagcttgagcttcctccaactctcttcttcaacgcatcgagcatattctgagacatgtctgcacagaataaaagcaacattgttagaataataaaggcatcagaagcataaagcatcgtaagaagtttacaaaacaagacggagtatcctgcgaagcgtttgtcggagcaagagtcgagagttcatcatcacctgacaagtctcttgcctaaaccagggtggccttcccttttcctagcacgggagaaggtggtcgagcaggtgaactgggttccctaattcgaatagaatgttcaacgagcctgggttgggccagaagtttcttcctccttttgagcggagtcacctgctcttcctcagcctcctcttctggattcaaaggctcatgagcatactgtttggcccttagacctcccttcaacttagcttcgcgcttcagttgaatgaattcattctccttaggagctccctcagcccagccagcaatggatttcctctttctctccttcaccggcttaggaatgaaatcctttgggtgaagtactcacaaagttgtcctcagaggtcagcaaaatgatatttcgagcatcccccagcagcaaggcaagcttctgagctctattccggagagccagtgtgaaaggagggcagtgatatgtggggatcttctggaaccgagtgtaggtgctgctcatgctttccaccataaagtactcgtcaaaaaaatgcccgattttgctaatggccttgtccccggtgcccgtcaaccacttgaagtctggttgagaaaaatagaagtatcctaacttaccttgcttaggggtggacttcaaattgaaaaaccagctaacctcaaggggagagggcatatcccacttttaggaggcgcaaagaacaaagagggcggacagatacttgatgccctttggagtgaattgggtcggacagaggcgggagaaatctgccacatagtatgggtgcaaaggcaataatgccccttgcttggcatgagcactcgaccaggcacacattctcctttcagggtttggggcttgattgttagaggcgggaatgtaacagtctaactcagtccatagatcccgtaagcgtgcctcggtaacctttgacggagggctcacccacctggctcccaaagctccttgccttctatgaggaaccgcagcagtaagttcctcactggcgtagtccacgccctcaaccaagacatcgccatgagcattgattggctccctagccttgttatatcccctaaagtttgggggtgcaacctcctcctcttcctccgcctcggaaggactgctaggatgaacattgtcctattcctcaatctcttcgacctcggcatccccttcataatcctcctcatcccagacggacggatctggttcagcacttggtaaggatgcatgccgagccacttgaggataagatgcgtcgattctacgcattgtcttttttgtatgagccgtcattctatggctggacaaaagacttaagctaaaatgcctgtcactcgaagaagttggactagaaagaaggcgaggatgatcctcgtgcaagagttgaa

SEQ ID NO: 50722 - DNA, 1686 bp, Cannabis sativa
aataaaaaaatggaaaatagtgttgtatgaggagcaaaacggtgccgtgctgaacacacgctttagtttagtttaattgttttatcgtggaaaatatgggtttggtattattattggtggttggcttttcaagctgtccaagttggaattttctagttctctagtcacccctcacgtcacaattttgaagggtcaacgtttttagttaacgacttttttttttttttcctatcttgaacttgtatataaataattgaatttatttttaagtatttaaatattgattttgttgtataacttggaaaataaactaattagattttattttgtgataattaaattataaaattatattaaattttaaatttagatatatttttttttaataatataagtaattattttattatattttcatttttgtattccttgaaaaaataaattagaaaaaaatattcataaaatttcttatttaaaaaaaaataattgataaatttagagaaattagacattaaaaaaatcttcacacaaaatagatttcttaaaataacaattgatacatttctaaaaaaaatcaatcacatgatttcaaaatgggatattagtggtaaaatcattcgaactttacatattttaacacttacctacaaaaatcgattttttgggcaaaactacttagatctcacttttgtcatgctatttactcctccacccaaaaatctcagttaagtgtcacagtgaacagttgaagtgtatactaatgtacatgtgacacgtttttagtggtccacgtaattttaattattaaaatattataaaaaaataatataaaattattaaaaataaaacaataataaaaaaaataatattcttttttttttctctttttatccctaaaaattgttcagattttctctctctccctcaccttcactctcggtggtttatcctccagattcgacaccgattttccatcatcggctgacaacacacgttgcacgaagagaacgaccaccctctgaaacctccacttgtgaaagccccgcctgactcgagtcgccaatgaggagaacgactcaattaaagtcgcggcccctgaaaccttcaatcgatttttcaacgagattccgataacattttggacagtgaatggcacgattaaactcgggatgtaatattttggaaatctaattgtgaattattaggatttattatatattatgatattaattagagaataatgagtaggattataatcttgataatctaattcaacataaattataaattttgccacacgtggacaaataagcttcatttattaagtacaaagatttagttggaatatgtgggtataatgtgagttatttatagaataaaaatatattcaaatttggctactttgaagacccgatcgtctcattgaaagcatcaaaaaatttattgagatttttggaaattaaataaataagcttaagaaagaagaagagatcaagatttttacgtggttcaagtgttaataaattctagtccacgagtcaattttattgagctagaaaagcttcaaagtatttattacaagtgtttatgccctagttgaagaccctaaatattagttcttctctgaagaatttaatttcccaccatttgcatgaagggataatgttctatttattgggaagaatc

SEQ ID NO: 50723 - DNA, 1829 bp, Cannabis sativa
tttttataaataaaataattcaaacggtaaaaataaaataaaattgtactaatgtattttgtaatttttcaaaattttaatatattatgtaaaaatttatatgctaaaagcaagtaaaaataaacatacataagataatagtctataaatttaagttgcagttattatattggattttcaacataaatgcccctttaattattctttattttgaaattagaaatctttttcagtaatcaagtccttcaattgaaaaacagtagcaataaattctattagttaattttaaacaaaactccaactattgttatggataacactttttttttttttcaaatattatactcttccaattactttagacatcatattatattgaataattaaactgtaactttttaaaaacattaactaaaaagacttgaatttgtaatgtttttaaaatattttcttaaaaatatatatatatatatggaataataatttatagataaatatataaatttaatttttgacgctaataatactaagttatacttatagaactttagtaggtacatgaacattaagtgtcaagtcaataattacgtggcagcagagttaggcctgagctaaatcaaattaagcccgcgcctagagcccacccatcccaggggcccaaagaaatattttcttttaaaaaaatatatgtattttttagtaggaataagttgaagaatatttattttttatatctattaataaaaaatactcccatattatatttcattaaaaagtacccacttttgtgagtgagttgtctaatatagtctcaccttttacttaagtctagcacataatttacattaacttaaatggtataatgaagacatcatctataaaagtgggtatattataaaaaatatagaaataaaggtaaaaattaaaatagctaaaataaagtgggtatacaatataattcctatttttaagtagatatattgtaatacaagagcctaataatttttattttcttaaggctcactcaatcggccttgtgtgacagttctcgattggggcaggtcattaaatttttatcttttattgaaaaattaatttaaatatacttaattgataatgacttcacaactaattaatatctatagagattctaacaatataatttaagtattattatagtcaaaaattaaaactaattatttatttgtaaataaaagaaaattttaaatatttacgacccaaattactcaataataattgataaaaacttgtactaatttttaacacccggatatgacttcttaattttcaaaatattgatcatcataacacataattcattagaaaaaacacacacatataataattatatataggtaccctgtatggtcgccatggggcactatggcatagtaacggttggaagacaatggatgattaagaactggtatgaagacgacatctttatgcaagtcatcatcatgctcaactctcagaattttgttctgaggtagaggcaagttcctgagtctatcgaagccagagcatccacaacagctctcgctcacctgatcatcataatcttcttcgttaaacattaccagataaccagaatgaggaccttccaattcgggagttattgacattgtttcagcctcccgtctatacatcgacataggccttgttacatacatctttttattttctctcttccacaaacaattgattgaattatgtgatctgacttttattctttaaatttggtacgtgattatatatatgtatatatatatagaaaaaatgacgatgattcttttgtacttaattat

SEQ ID NO: 50724 - DNA, 2248 bp, Cannabis sativa
aatgtgcaccaaaatgttatgttatggatgtagggtgcccatttgtgttcatgctaaataggtgtggtgttgagatttaggtattacaacttgcaagtaaatgttatatgattgacctaactcaatttgtttaactcatttatacgaagatgaataaattatacttaattataagtaatttgttaattcaataacatatttataaaaatttaacatgtttacaactttttttaagaaacatttatgagtaattaaatatgtccttatttaactaacttaatataatttacatataataaatataagagagttgcatcattttccaaattaggtgtgtcaaccttaaaataatatgtttaaatgcttcttcaatagtgtgccaaaaaattaattaaatttatattgtgtcaaatttagtataacaatgaatatatttttttattacaatattgcattaatattaattaattaatgagtgattctaataaatatgtctactttaaaaaatacaatagtgtcattaatttttcttttttgagaatatctaattgataactacttttttttttatctatttgtattttttttttttatatataataaggagggattccatctcttttatgtgattataggtataaaattaccatgttatgcttatgcattggagaataaatattatatttgttcatttttttgaattttttttggtcaaatttaacattttttaaatcatgcattttagattatcttagataataaccaaatgaataaagttaactatgtttttttcctttcaagctgtaaaatgttcttgttggtaagtaacactagttaattggctatgtaagcaattttcaaagttgtttaatttgggtttggtatataatatagtttgatgaaaagattcaaatgccaaagcaaattgtctatcaccaaaattttgattcttacaagttttgttattatttatatttttataattaaaattgtaaaaatgatggatgctttttaattcattaggattgaactttcatttatgacagacatttgttagtaaaattaaactaaaattgaataaaatcattaaatctaataattttgataatttggaaaaaaaatttaacagcttgaaaagttcaagtagcataatttttttattttattttatgaaataaagagcgtttatagattcaacaaagttaggcctccttatcattacaaataatattttgaagaatactgaacacttccaacatacgagcataaactcattttatgagctacaaaattaaaagatctattaatactaaagaaatttcaacctaaaaaatgcattagaactctttttacaatgtgtaatataagtatttatttcccatttagaaatttggtcgttaagggtttagatggtaatattggaattgctttttaaaataacaaatttacactaattagacacaatttaatatatgtaaaaattcataattaattaaacatctatatatatttatgtaatttattaatgataatataaacatgtatgcactaatataaccttgaccaaattatatataatacacttataaaatagtaagaaatagaatgattgtttgttccatttggtcaaaattattattggtagatagattttctcttttcatgatttcttcttgttgtgatcaatatttttttgactacatatgctaatctgttgacttattttgtctttctttgatttatttatatttagttttaagagtggttaacatctaatccaatctataattaaatttagccgatctaatacaatctaattataaaacaatagatatgaaattacaattagattagatgttaaaagttaaattctaattaaattggatcggttattggatgttaatctcaaaatcaaatataaaaccgatctaatccaattatatttatatatattaaaacattatttatatttatttatatactaataaatatatacatattaaatatatttttagtagtttttttgttgaatttgtaacacttaattgttttgtgtatttattttataaaattttagttctattttattacccgttaatgttgttgctttagttatttcaatcctttagttacattactcgtgtaatgatgatatttttatagaatattaaatttaaataaataataatatttcgattttacatatttttctttatttaagttaatattaaaaattaagtgtgtaatt

SEQ ID NO: 50725 - DNA, 1166 bp, Cannabis sativa
aattaagactatagaaagggacaatatcttcgtcagagcaattagtgcttcaattaaagctagaaatagttaatctaaaaggaaaagagtagttgagaggacagaaaccaccacaacacatctttgggtggaccagaagaactatgtttggtgccaaagggaggaagcacatgctagaacgctcaatttttgggatttctaattaaatgaacagagataaacatgcagtagggcttaataaagagagaatgtgaaatggtagtattcataaatgtaatgttgtaacaaaggtatttgttatctaatgaagttacaactttgaaaaaaaattaattaaataattaaaaagggttcatttcatgtcatcctttgtataatatttggtacgggacaatactaataaagttttatattttggagaaaaaattaaactagtaacatattttgacgtctctaagatattaagatcatatggccttgaatacatagtaataataatagtattatttagtttatcaaaacaataagaataatagtattaattctgtctttttatggcatttatttattggctaacaatttttaattagtggatcccactattcacttggatggtctccacccaaaaaaaaaaaatacaacactaataataaagcaaaaaaatttttgcaaaaaaataaaataaaaataaagctataaaaattggtagccacaatttctgaagtccaatccacagcgttgggaggctggatggcattgcctaattggtgtacttaattcaaaactccccttcctctctatcatcatacaactcaatactcatatctcacacgtacaaataattgacaataagttttcaaataaaaaattgaaacatttacacactttgatatttcatttgaggccctcaaaaaaaaaatatatttcatttgaacttttaaaggctacccattgattgaccatgactatacagtgacaccgttaacttaattttgtagagcaattttatgtgagccatgataattaatagttttttatgaaattctataaataataataaaaataataataattgtaggggtcactacatggtgcccaggtggcaatacaactggtacatatcttaaaatctaacatcactctcaattttttttactctattcttt

SEQ ID NO: 50726 - DNA, 1290 bp, Cannabis sativa
tggagaagaatatggatatttacgtcaatgacgtgctggtaaaatcaaaacccttcgagagccatcacaaagatttagaagaggccttgacatgatctaagagtacaaaatgaagttgaaccttaagaaatgcacttttcgagtttcttcatggaaattcttgggtttcatagtcagttcttaagaaatcgaggcgaacccggagaaaattaacgctcttctggacatgccttcacacaaaaaatagaaagatgtccagaagttgactggaagaataacaacaattagcaaatttgtctccaaataaacgaataagtgcataccgttcttcaacatactttgaggacacaataaatttgaatggacagcagaatgtgaaacaaccttctagtaactaaaagaacatctagtaaagactccaatactgtctagactagttgatggacagtcgtggttcttgtacttggcaatgtcacatcatgccataagtgccaccttagtgcgagaagaaggaaacaacttctagtatattatgtaaggaaaagactattgtgcacggagtcaagatatcctatgattgagaagctttccttttgcttactaattgcttcacggaagttaagaccatacttttaggctcacgccataagggtactatctaaccaccctcttcgttaagtactgcaaaaactgaagtcgctaggaaaactcctgaagtgggcaatggaattgagtcaattcgatatacaatatcaacccagaattttaattaaaggtcaagccttagctgactttattgtggaatgtatagggataaatgatgatcctgaaatgtcagtcccggagagagaaatctggaagatatatgtatacggagcatccaacaaaaaatgttctagagacaaaatcattttaatatctccacaaaacctccaacttgaaagtgcacttcatttcgagtttggagcttccaacaatgaagctgagcacgaggctattattgctggtttacaactagaaaaagaggttggcaccaaacacattgaactctacagtgactcacagcttgtagtcaaccaagtattcgggaagtactacacaaaaggagaaaatatggctagttacgtagtaaaaaatcaagagctattgtaatattttaagcattattctgtgaagcaaatcccaagggataagaatgcttttgtagatatgtttggcaaaattagcaaaaaactcagatatagagaaatacagactagtccccatcacacatctgatcacttcaaacac

SEQ ID NO: 50727 - DNA, 1056 bp, Cannabis sativa
acaattagtttttgaccaacttcacgcatattcttgagcaaatggacaggcaaagaatagatgatcaatgctctcctcatcattattgcataacagacagctgctttgagtgtctggtttgaatttctttactctgtctttgatcttcaatttctgcaacattaatagccataaaataaagctatgattgggctgttgaaccgccaccatacaacaggagtccatttaatcaatacaattataaagatatccttgataccattattggtttttatggtcaatatcagagttaaaaaagtacaaacaaatttaattaaaaaaattaatctaatatgaaccataagcccatagatctcaatataatgtatatagattaaatctagacaattaaaaagagagacaacacctcttctagcctattaggatatcctcgctatctttttcgtattattatcgaacatccaatctaagagcttgctgaagagctcacactataatcttccgagacatcctcaatactcaagaatagagtaggctattagattatattggatgagtatagttatataatcatagtatattctcaacccataagatattgtgaagagatagggatgaacacaaaactattagagagagatagagagaagtaaaaaatcaatccatattttctctctgaaaagtatcactctattctcttatttttctttggttgttttttatactgatatatatataatatatataaagttataaacaaacactttatttaatcttcttaaataaaagataatatttaacttaatccaaatttaaatataaatatcatataactaattaataaaaatcaatttaaatctttttaattaaatagattatctaataatatatttaattcaataattaaaagataactaattaattaaatttgaattattttataataaaataatcaaacaaaattaacatggacttttatatgtcacaatatacgtgtgggccatattttaaggtctagaattaatttcttgattttaccacaaataagatttatta

SEQ ID NO: 50728 - DNA, 1301 bp, Cannabis sativa
aggcaataactaaacataacaacacaacccatgtgaattcttggaggtttgtttgaatactctttctactgaagaattttcttttttctctatcctttattacaaattctagaaagaaaggaattcttggacctatgacgactattattcggatcctggagccattatggaatggggtgcttccctgttaagagatttccaaggatcaaagcacctagaggagaagtcaagttctaaacacaagcagaatccacctccagagaatttttggaaggttaatgcccatatgatggagttagtgaaactttgaggagctgcaatgcaaggcagttgcccgtaacatcagagaccaggttcttgctgcttcgtcggagattttctcaaagccttttagtcctttggttgtagagcttaatgttattcagagtggtgtgaagcttgctagtgtcgttgaaatgactaatgtgttgatggcttctgattgttctaatgctatcaacttaattattaataagattggaggatgaatgatgtggataatttattgtctgaaattttctttttgtgttgtaagtttggttatgtaaaattttattttgagtgtagagttgtgaacttttttgctcattgtttagctaagataactttagatattaaagtttcttctagatggaatgaggggaagagctgctaggcatctcgctgagatggaaatgcttatttcattgtaacaatccttggttcaattgactaataaattgaaaaaaaaaatagaataatataatttttatttgttaaaaagaaatgtagcttttgtgtttctattattattgttataaataattaaccatatttgaaatatgataaatgaaaattaatacaacattattaatgtggtttttatagatattatgagttttattttttatctgaaataagtttaaagtttcactaatattgctaacaaaatttaacacaataaggagtaagctatcaacatagttctaacccaaaacaaagtaaattagttatgttttcattgtatataatcaaatttcacaccatttcttaggtaaactttgaaattttcatacaaatcacaaaaacaacaaagacaacaaatcttccaatccaattatatcaccttactaccaaaacttaacaaaaatttgttgggtttgtttgtgatatctaaaagtggtccaaaatataaaaaatgatatcatcaaacacaatttttctttttatttatgaactcacaagctaatctttaccctcaattttttctttcaaaataaaat

SEQ ID NO: 50729 - DNA, 1180 bp, Cannabis sativa
attaattaatattatatttttaataattaaataataaaataacaaataaatattatttaaataattaatattatatttttttaattaaataataaaattacaaataaatattattataaaatacatgattaaaaacaaatattatttgtaaaaaaaaaaaaaatttgctctctcattgagaagaccgtttcctgtaggaatgcctaacaagcttgacttgacaatgcaggatcttcttgatcgcacgagtaacttaagggttgtggatgaagatggctgggaggtttatgaagacagggaaacggaggtgggaaaatcttgtcttatgggaagattttgctccaacaagaacgtaaatagatctctcattcgaactatcttgggaaggatttggagattagaggaagttgactggggagtaaaaatcaaacgagtcacaaccgaggccacttttatggtgttctctttcaagaacgagaatgacctgacaagaatagtcgacaaatcaccttggctgctgaataatggtgtcctgcttttgcagagattttccaagattccgacaaaatgggaagatgaattgactcgatttcctctttcagggagagtgttaaatcttcctacgaagtctataaccaggaacaatatgatgcgattagctggtctggcgggggagattattgaagttcagcaagaagacgtgactaagattgcgttaaatgtttttttctggttcaaggtttggatttcaattgataaacccatttgcccaggatttctttttccctattctgggggtcgtgtttggctttcgttcagatacgaacgattgccttttatgtgctttagctgtgggcgtgtgggtcatgatcaccgaacgtgtgcgaggaatcctgtgcaaatcacagatggagatggtaagacttcagcagcctatggagcgtggttgaaaattgaggagggcccttcgggggtagagaaagaaagacacatgggagtatttctggagatgatttgggtcgtagcaaaatctcgggtaaattatttgacagtgttggatcggggaagagcaataaagatcaatctttgggccattcgatcttgaattcagaacaatctcgaagcaaagttcaggtgggcgagcgattgcccaggatcaataatcagaactccctcagta

SEQ ID NO: 50730 - DNA, 1352 bp, Cannabis sativa
ttattaattaatagatcttatgatttttattaaaaaaaaaaattaaaaaatatatatttaaaaataaaagttaaaccccatgtaaaaaaattggaaagataaaaaactaagggataatatcaaaaaaatacaaaagcaataaaaaattacaaaaatacggtctatacagagttttaatatttttacggtttttagattttatttacataaaattcactcttctggtatatttttatattgtattcttattatttttttttgttaattttttgttatttgtatattattatttatggtgttttaatattgttttgatgttttttgatattgttttcttgttattttttattgttttcttgtgattttatagaatatcataaaaatcttttaaaaaaaacaactttaaaagtaaaaaatataaaaaaattacaaaaaaaaaaagaattaatattttatgtaattattccaacaacgaaaaccatattttatttaatttgcagttgcaatttagaaaaaaatattaatgatatgggcctaattgtatttgtttaaaacagtctcaaactaagacttttttattaaacccaattttcactgtggtttgaaaattcataatgagtttgtccttttaaaaacaatccttaacattataagcaatgggcctcagcccattgataagaccagctgagttagcctccactctctccacaccataacatatatttatgacaccattgagcagcaaggcttagacaaagtagaacatgaaacctagtagtagtgactgcatggctcaagcttggaacatgaaacctatttcatcaatagaagtacaactgttaatttcttggcccaaaatattgctaactgggctctttattgtaatgtttctgctcatattgatgctgttttagctatacactgaattgatcgctggacctctgtaatgcttttatagataagttgaaaaatatatatatatatattttttttttgtatttattaactacaagtacccttgtattatttttttattaaattataccaactttttaagtgaattgtctaatatacctttattgtctatttaagtctagcatataatacacataacttaaggggtttaatggagacattattcataaaagttggtatatctaaaaacaaattataaaaataaaagtaaaaattaaaacaaataaagtaaagtgatgtaattttctcaaaatattcccttgatttcaagggcctttcttttaattagaaaaagaaaaaagggaaattatagtaaatgaccccaaatcataggagtatgttagtttatgtcctcttttcaaaaaaatatagcaaat

SEQ ID NO: 50731 - DNA, 871 bp, Cannabis sativa
tacatcttaaacaaaaaaaattaagaaatttgtgataaattccttatttatttcgatatctataaaagttttttttttctaattatttttcatgatctaattaggtacgttatacttatttattagtaccaaatatttagaaaatttttaatagtttatattttgaaaaataaaatttaaaaaatgtttaccatatttataagaaaaaatagtcatacttgtaataaaatatttaaaccttattttcgataatttaaattattcgaaattttttaaaatttacaataatcttatataactataagataaaaaaaaaattagactaaaatactctcataaatatcgaagagtgtactgtagacttaccgaaaaaattgtgtgtgtacatagatgggcatatatacaattaaccttattaatatataatattgaaattatacttcattcatatataaaacaggttgtcgtgggtggtcctaagtcctaataatgaaagtgcatatatgctttctctatatatataaaatatatattattaatgaatagcaatagctttctcaaaatttagtgctccccaccaagcaattaaaaaagaattaaaattcttttttttattttgaaaataagcgtagttatatattaaaaagatattagactttatgctcattacacaaaatgttctccggtaaaaagttgatcggaatagaaccgtacatctgatagataaaagcccatttaatcatattataggccgcaaagttacaatacctactaatattcgaaaaattacaacatatgaaataagaagaagacttagtaaaaaagaattaaaattcattatataatgcatataacttttgagtgccaaact

SEQ ID NO: 50732 - DNA, 1289 bp, Cannabis sativa
caggttgtgtcgaaaatgaagtccctgaagcagatttttaagcgtattaacaaagaaggttttttctaatatccaaaatgttcatctgctggctaagaagcatatggagatctgctagaataatctgcataaggaccctcttaatgttgctctccttgaagaaaaactgaaagcccgaaacaaagtccttgaaactcaacaagcatattacttttttatgcagcagaaaacgaagatcacttggatcaaagaaggagactctaattcatcaatcttccaccaggcactcaaacagagaagagctcaaaacaacatctactctattgtcaacaaagaaggtattagagtagaaaatcaagctgaagtcactgatgcttttttgtcattctatcaagaattattatgctctaaactacaaaatcgaaagtttgtgaacaaaagagttgtccagcaggggtcattgattactgaagatcttattcatctgttgatgaaagagtatacaggagatgaggttagagctgcagcattcaacattcctagtatcaaagctcctggtccggatggttatggaagttctttctaccaagaaaactgggatatgattggggatgatattaccgctgcagttatttcttttctccatactggtgcattattaaaggagatcaactctactgtgctaacactcacaccgaaagtgaagtgccccaatactgtgagtgattttcgccctattgcttgttgtaatgttctttacaaaatagcaactaagatgatctgtgctagattaaaacgaatcctccctgatattgtttctcaaaatcaaggaggttttgttaaaggaagatatattgctcacaatattatgatatgtcaagatctcattaggcattatgggaggaaaacgaacaaggctagctgtatgattaaacttgatcttcaaaaggcgtatgatactatggagtgggaattttcagagaaaatgctcccaaatgttcaaaaaactactatatattgcagcggaatgcaagaaacagaaatacaaagagtactcaacatgtccggttttactaaacatccggttcctttcaagtatcttggcattcccatatgtgctgagagaatatcagctgctgaatgcagaagtctagtatagaaaatgactgtaagaatcaaagtttggagctcgaggaacatctcttttgcggggagagtttgtctaattaactatgtgttgctgactatccatacctactggtgtcagatcttaattttgccaaaaagga

SEQ ID NO: 50733 - DNA, 1794 bp, Cannabis sativa
gaacctcctccatacgtaaagaataaaaaaaatttacatagaaaatatatataaaaaaaataacatttattacaaaaatacctgtatagggtattttaaatattttttacttttctatcaaaaataaatatatttttacttttaaaaaaataattgtcaaattacctcttactcacacatcatacatacacgatgatgtcactatgtaatcattacactcaaacctttctctcacgtttccttacttcgttttcttcttctttttttttttttctagtttcaattttcattttgaaaccacaatcaaaatctatttctcgaaaaaaaaaattttccctaggattcctagcttcaatccttgcttcatttctcaaccatccaacaatttcttttcattttttttttctataaattcctatataaatagctattacgttttcatcgtcttctccatctcctgtcgtgaaaaaactctttctaaagaaactcattactaaaatttctaaagctctagtaatgagtgtgaaatcgatggccaaaaaatgcaaagggaaatgggccattgtggaagatggtgattttaatgaagattttgttgaactagtaacaaaacatgaaggtcgtcctatgaagaagaaatcgaagaggaatgaaattgataagagtactacatcagaagttaaaaggagaagaaacatgtcgataaattgactgaggtttcattatagcttctttttcattttgctctaatttatgtattttgtctctatttttaaagtgtttttatatgtgattttagttttagggtttcatatattttatttattttgttattttattagtgtaggtttattgatttagagtattgttagatttaagttgttttttaatttttatatattttagattttatttgtaatgagtgtttgtactatttttttattttttactttttattttaatcgttacttttttggcgattgtttagtatggtgttgtttattaaaatatttctaatagttccatattttatgtttagtcgttcttgcttgttgattttgttgttgctttttggaagattattacgtgtagtgtatgttagatttttttttttgttttgggtgtttggcatatgatttttatgtatggttgtaatatagtttacctactggttatgaattaggtgtactgcgtgaataactttttattaattttagtatagtttctgggtagttttaaaactatttgtgtaatcattatcatgtttatttttgtttttttatcattgcaggattgagaatacaagttccatctttctgattattttaagtccaagtgctactctacttgcacttacagtgttattgacaacattaagaaaaaaaaaattaaaggatgtgattgtaatatttcgtgctactcaattcttttgtttcttggaaatttatgtctgagatcaagcattgtttttctctgaccccatatatttcaccctaattttaccaaaaaccaactccatgtattataattttctaaatctacaatagagaatgataagaggaatctgtagccatttgcatcttatgtgctggttgagaacaatgtgcctccaaatgtaacttttaggaaaatttcatcaacaacaatgatttatctgcacttattctattttagtgctatgaacaagaacatggagttattatcttcttgttttttcatgtgtcctatgactcatggatttattttcttcttaattaacataatttattccttaatcaaaccgtccattgaact

SEQ ID NO: 50734 - DNA, 1303 bp, Cannabis sativa
  modified_base (794)..(796): a, c, t, g, unknown or other
ctccgttttccataatctgttccggaagggaaccaaaagcaagagaattcactcagtccctccgcctccgcctccaccgccgagaccaattattccgtcggtaacgtcatcatcgcgttcctctagaacgaaaaatcaatcagtatctccgcccgctcctccaccacctcctcagtccgaacatttacgcaggagaaccaccggccgacctccactgccagcgaagtcgagcgcttactacgaagataatatgaatagcggctgccagagcccgctgattccgatgcctccaccacctcctccgccgttcaaaatgccggagttcaagtacctggttagtggagactacgttaaaattagaagcgctcaaagctctcgttgcggctcccctgagccaatggacgacgctgattcatcgtcaattaccaaagaagaatcagagtcagtcaacgtgatcaacggtggagatggtcttgggtcagtgttctgtcccagccctgacgttgacatcaaggccgacactttcattgaaagattgtacgatgggtggaggcttgagaagataaactcgatcaagggaaaacggaagctgtgattttggactcaggcacaattgaccatctacgttttggggctcaggcccaattaccctacgcaaaatgtgaaattggcaactaccctcaacctcaagctgtttgcttatggggcttttgctttatttgaagggacacatctaatataacataatatattatgaagtagaaaataatattatattataatatatatatatnnntatatatatatatattgttggaagaagagtgtaaaagaaataggctctgattttggggtctcttttcatcttcgtattttggagcattttcttgcatatagaaaggatgaccaaagtttttgagtttgaagtgtcgtttggaagcttcatgagtgtgaacagtacatataggtatgtattatgtacgtagaagagggacattaggctctaactgtgtgtattctttttattcccacatattagagcttgttgttatcatagaatgaaaaaaaataagagagtaacatgtgagtttctatttgggttgatgatattgatagggagagttatggtgttggtctccaattgtgatttttgctcaccttttggagttttgaaataagaatagttgtatttcgtaaagtttcagtgtatgagattcttcagttgaatttgtttgatgatatgaaaaattggtacatattagattcccagagctcagagccatataatttttttttttttttt

SEQ ID NO: 50735 - DNA, 1038 bp, Cannabis sativa
atttttattttttaatttttcaatcacaaaaataaaaataaatttgtgtttttaaaattttgttttttaaaaaaattaacatgtgttctatagccacttttttttttattattttaaaaatagaaaacaaaagtgtgttctatatctttatttttattttttgattttatttaagttggggttggggtcgtggtctgagttcgaaattgaggccgaggtcgattcctaaggtctaggttgggattggagtccaaaatattgattaagaaaaagaaaaactgtttaaaaaaaatttaaaagtgatttgtttttgttttcaaaaattttaaaattttgattctcaaataaaaaattgaaaagtgaaaatagttttatagaacatatttttgaaaaatatttttacttttctaattaagaaaatagaaaactaattaaaaaaatattaccaaatgcacctttaattttaaaaattattttttatagaaggaaacccccaaagacgacctttcaagcaaaaaacttaaagagaaggtggaggggagactgaatagattaattcacctcatgtaaaatgagatcatagatacaaaaaggataatcaagccaccacgccttactaataacttatgataaggcatagttagctaaggtatgggcaacaaaaaaatgtctagaacagaaagaaacacttgtaaagttaaattcagaaaaataatgtctgaaatctgttaaaactaaacccaacgaagtagccaaagaaacctggttagtaaacttcaataacacattcaaacaatcagattcaaaaagtacatcctaaaagcccaatagatggcattgaatggtagtattttttaaagctaaagctttcaccatttcaagagagaaattacccgaaatgtgcctgttagaatattagctgtatattagttgtaaaaaaattaggataacttgcatttagtaatttcctaatttgtaattagtagtttcccatttagtcttctagctttgtatataaatatgtactattctatgaaa

SEQ ID NO: 50736 - DNA, 1047 bp, Cannabis sativa
tcttcttcatccgagacatgaagttgattggttttagctagcagttcttccatagtaatggcgaatacacaccagtccgatcaccggaatccctttgtcaccgagggaaaaagaatggccaaaccccacaccccgagccctagcagagaacgcgcgaaatttatcatctcataataatattaggtaacttagtgttctataacaatactcaaaaataaaagtataattaagaattttagtctcgaattttaacatgtaccaaattatattatttaaatttttcaggccgttaatttttttttaactattaagattaatgaattcacgaatttttttttaaaggaaacgtaataaattaaaagccaagaaaatacaagctattcaagagttgagctcttggtcattacagtaacaattcttagggatagaagctatgacacgtttactagttcaatagggacagaagctagttcaatagacccagtgaactcatttgtgagagcccatcttttcaagagctcagctcttggtcattatagctcttggatttaaagacttttgtttagttgcgtttaattttactaatgtgacgattgtctatgtactaaatcatgctccttgaattttgatatctatccaattttatctcacgaactttaacacgtagtaaatcgtgtcctttaaagtttcatacatattagaattcaattagtaaaattggacaaaagttattgaatctaaatagttaccctgcaaaaatctaaatagcctaatttcaaacataacaattagaattaaatttaaacctttttatttttttactttaaaaaggaatttataatgctattttgatcaattttaaagctcaggttagattagaaatataatctagtaattatacaaaactaaagttaaaatggtatttatcaaatcaaaagtaaacaaaatgagtaataataaacgagaaccacatacttacacttacaaataattacataaaacataaatttttgtaaattttttatattttttaagttcaattttttt

SEQ ID NO: 50737 - DNA, 629 bp, Cannabis sativa
tggaccaatccaagtgttcatgttattgatattcgaccaaacattttgttggtcacagctctgtgctgcaaactcttgtaccttccatttcttagtacctacatacaaaaaaaaaaaaaaatcattttatgtgataaaaaatttcagattaataggaatgacacttaatcggaaggaatttcttttcgaatcgaatcagtctttccaccacaaataaatgtttttgagtcaaaaaaatcatacctaataatgtcttatgagtaagttgttgaagaatgttgaccttattgctaaaaaaataaatcaaattggtcgtgtgcatgaatcatcacattagattttataaggtgaggacttatgtcacatgacatttatttaagtctatattatgattaaaaattccaaaggataaactagtggggaattgttttttcttttcaatgttttgtgtgtataaatataatataagattccaaaaatggttgactaatacatgcaattgtaatcaaagaaaattttgtacctgaagttgatcaccaagattaataacaaatgaatctgggattggtttaacatcaacccaattcccatctttaatcacttgtagaccactcacttcatcagattgc

SEQ ID NO: 50738 - DNA, 858 bp, Cannabis sativa
  modified_base (627)..(628): a, c, t, g, unknown or other
taattaaaaaattaaaaaataaagttatttttattatttttattccaaccatactatatattttaattaatatttgattatttttattacatcttaaagattatataaaaattatattcatatattctatgaaatattgtaaaagaaattgttaaataattttttatatttttatagatgaacaattaaaaactttttaagaaaattatatttatgttcagtttgttcaacgttattctttgaagtaaatgcaataattttaaataattactacaagaaaactcgccagtaaaattaggcataactcgccaatgaagttttgccaacgagcttatgcaccagcaaagtctcatggggatactttgtcagtataagttgttttgccgacgaagcacacataactttgccaacaaaactattcatgcgggcaactttgttggctggcataagtattagcgtcggcgtagctttgtcggctgaggggttcctgatgaagttttgctggtgaagtcagtcgctggcaaaacatttttgccttatttttttttctcgcaaaagttatgccggtgcaccttactttgcgggcaaaactttgccaaaaaagtaacataaaaataacatcaaaannacaataaaaaataacatacatataataaataatcaacaataaattaacataaatacaatataaaaataccgtattttctgtaaataaaataaaaaaattcttacaaataacattaataaggctacatttgaatatcgaaaacataaatgggtatgcccgtacatcttattaataacaattaaaaaaaaataaaataaaaaatgagagagagagacctaccttgcattatt

SEQ ID NO: 50739 - DNA, 2292 bp, Cannabis sativa
taaattcatggacttaagatgaataagatgttgatgtaaatatggaaaccaaaaacttggggttggtggagtaatgaggggccagtatgagagaatagttgttgctttttccaaaccacatgaatttcataagtgatgtgatggaagtaaaattgcaaatactaataactcatattgaaagggataattttcgagttttctttgttttatcttcaatatttaagatttatttagtttggttatcttttatttattttcctttaagttattgtctcacatattagatagaagacacgctaatcaagcatttaagttgctcatgaattaacaaaatatgctctaaaattagatagtgagttggataaaagaaattcttcatcttattttcaattttattgtaaagatttttgatttataataatattgaatctctctaaagaaaaaattcaataaatttaatgtgtaactatgaacgtgaatgtgatacaatgatattttatgtagatactcatgaatctatcttaaaatcttccctttcaaaaaggaaaagaaaaaaaaactcttgaaaccctaaatgtgatagaaactcaaaataaaacttctgttttaagtaaaaatatgtaaaatttataaatattatgggatcttcatcgtcatttcaaaatcaacttctctaaacagttttgtatttattgacatattttacattagattaatttaaataaataaaaaacatattttacattagactaacatgcctaatgtctattgttaatgagtgtaccaccttattctagaaaaagaaggctcgattcaaaatctatctctccaacaacaagaataaagaattgaattcaagctttgttggtgactttcctcttggtattggtccaacccttgctcatgatatgctagtacctagaggagaaactttctcattccatttgtagcaaggacaatcgtggttcccagggtgttattagtattcatgatgatgataagagcaatgcatctaagtccccttccactggtcaatttgttcgtctctcggcttgtaaggcaaaagcaaggctgacagatattgcaattcttactagaaaggagtttattcctgaggatgtgggctcacagattagtaactctgaacaattgttctccctgtggaggttggttgtgtgccactccaacgaacaccatgagaggcattgcttggaacaatagagagttggggcaaacttctacaattttggaacttcaagcctttattcgaatgtgttcacctgatttcatttttcttaccaaattaatagttgatgtgacattggtacgttctcttaacaaattaaacttttatagtaatattgttgttcctactgtggggtgtgcggagggtattattttagtttgaaaaattggctttatctttgagaggattagagttaaaaaaaatcacaggtattgtttactcgaatttggctcattatccttggcttctcttgtgtgtttatggcccgccttatttttatgagaaaaaaaaaagttttgggagaatttgatgattgttgataaacgctttggaggttcgtggttgatcatgagatgtaaattttgttctctgtcagtctgaagcagttagtttcaaagaaatgaccaatttattccattcatatccgacctgataaactccaatggactcattaatttgcccatcaaaggtgacaatctcacgtgagataatcactgtgacgacacaaccaacattaaatctgctttggataaggggctggccaatgatggtttgatcgacttgttccccaaggcagttatcgaatcccttcacacagtgaactcttatcatagacctttgtgtgtttatacttaaggcctaggaattgagttcaaaaatcaatttaaatttgaagcttggtggactagggatgagcgaagcaagttggtggttgatcatgcttggtcatctattgttcatggttgggctccggctagagtgttcaaagaaataggtgctacgagggtgatcttaagcttgattctggttgttggaaatcctctatggatcaagatttgtttaaaaatgtggaagctagagttatcatgtctatttcttgtttcttgtttgatagacaagataggcttacatgaaattttttggataacagtatttattcgatgaagagtggttattggagcactgtcttgagcatgggttgggaaaaagtttcgagctcctcaaggaattctcgttggtgaaggcttctttagagtcttaacctc

SEQ ID NO: 50740 - DNA, 1018 bp, Cannabis sativa
  modified_base (27)..(47): a, c, t, g, unknown or other
ttttaagaaggtgcattgtagaatttnnnnnnnnnnnnnnnnnnnnnttcttcccattcctagccaatgtgagactttggttgcattcctaacacagaaaacaccaatctaattgtatttaatacacaaaattttgatatacgggcagtattttacacttccacaccacaattaggaaaaataaaatataaatcacattttaaaatttaatcttactactttttttcttattttttttttgtattattttgggttaattttaataatttttttttaatcttgtttcatgtatatttttttaactttagtaaaatttcatattttttgttttatcttttatgtaaaaaagaaaaaaaatgaggagtataaaataaaaatataaaattttagaatacctatttttatgttttggaaatagttataattatgtatttttggtataacaatatacatggtagatatttagaatatcacacgaatttgaaaatattttatcacgccggtaacaagaatttgccttttttttttcttgagtaaaacatagaaataacattgatacgactaactatcaattaacattaccaactaaataagtcttgccagctggcatggttgaacgtctctctctctaattttttgaagtttttctgcgtgtgcgactggtttgttatcggttccggttggtgcggcttcatcggtggagcacggagtcgtctctcttaggcttccagaaggttcacgattgagttttgggattgctttatctcgggttttctgcgtgtgcaactgggttgcgactgggttgtttctgttctggctgtttgcgttttcactggtggggattggcgtcgactggttagatcgtcttctacgtctgtcactggtttggtgcggctgtgttattttttcttcctctgttttggtgcgatttttctggtggatctcttcaaggttttgatcgttcatttggtgttgtgcctggcttgttttgcgactcgtttattctccctttatgttt

SEQ ID NO: 50741 - DNA, 750 bp, Cannabis sativa
aaaaaatagtttattatttatactgaaaaaatatatttttataaataaaaaaatttaaagtgtaaaaatataaatatttctatactgacatatttttgtaattttttttaaatttttaatttattatgtaaacttttctttatatttatttgaaacaacaacaactaatctttatagtataagaaactagcaaatatggacttttttgacatggtatgaaacaagaatgagctcaagaggcacataaatgatcaggtatgaaaaattatatacttggacatgacaagaaaccatgttacaaattggtaagacaccagacgaaaaatacaagtttgagcatgatacgacatgaaaatataaacttatgtatgacacgatatgacacgacaagcctaaaaaatatgacccgtaagtacgaataatttatctaaaaccacaacatattaaaaaccttatatttgataatagtaataataatttgaatatttataagtaaatatcttaattttaatagttctaatgattttaatgtttttatataattttgtgtgaaaatggtgaaaaaattatataaaaataattgaaattataggaaatttataattttagtaattatctcattaattataaaataaaatgtgggaaaatagaatatgaatttgaacctgaataaaagaaatgggtcggcttgagtaaatcacgatataaatctaagaacaacatgaatatgagcacgatatgacacaattt

SEQ ID NO: 50742 - DNA, 1232 bp, Cannabis sativa
  modified_base (1152)..(1186): a, c, t, g, unknown or other
gagagagagagagagagatggatttagggtttgtgaaaatggtaatggggcgactgaaagtggttatatatgtttagggtaagtgaaatgggatttgcccatcgcttattttaatctttttcacgaaggagttattgcgtcagttgtgaattgacgcaatgttagcgctagtgtagatctgacgcaaatagtcttgcaactaacgctaatcttgcatcggtgcattgccgacgaaaaattcatgagttctttaataacatcaatttttaaattttcttgacgttagactcgacggaaaatcaagtttttgaagtagtgcaacgcaccaggtcaggtgtcaacctaggcgctgtgtgcttctcgggctctttcacagggcttgctttgatacctctatggaaatcaaaatcgcaaataaggtctcctaccctatttttcacaattttaagaggaattcccatagcaaagtttttatttgaggagccaaaaaatgcaaaccaggttgcatgtcaacctaggcgtacgacccaatgccatgtcaacatgggcgttggggccctgttcaggttccctcaaactctcctttactcctcgagatcacttttattttagttaattttgatggtagaaaaattctaggaacactttttagggaaaattattggaaatgtcaacgtgggtgctggatcaagtttctggccaccagatgactccatttaattcttggagacacttttatcttaatctttgtcgaaaaaggataatatgcctagaaaacttctaaaaaaatccttggaaattgcccaagcagacaaagtgtcaaccttggagctaggcccttcaccaggtaaacctaggcgctagatcccagttctgaccctcaaaaggatctatttgtttcccaaaagcactcatatctttatttttcgcaatagttaagaatatgtcgatagagttcatctaaagtagtgatggaagtggcccaatgccaaggtcaacctaggcgctgggtccccgttctagcctcccaatcgatttttttaatccccagaaagcacttttttccttattttggatgaagacaaggaaagttcttgggacaaatcttcagtattgtggttgaaatcgttaggaatattttaccaggatctnnnnnnnnnnnnnnnnnnnnnnnnnnnnnnnnnnnaatatgaattctctaaaacaatacaataaacacataagggtttaag

SEQ ID NO: 50743 - DNA, 1244 bp, Cannabis sativa
gttgtccttaaaagcccaaatctagttcattcttctacgaacagcagtcgcaacatgacagaatctagtatttctatttccaagtttgagccatatttccctccatttctgtctagtcatgtcctccttatgacgccacgcaatttgcagctgcatttgaatcctccttcctcctttactagattcattaaagcacttattaaaccatcattcaaagctccaaaagaatacattcaagcctctaaattcagcagtgtccacttgcacctatatcaaaagtataatttgtgactcatgaaatttcacttgaactccctcacaatggatggcacagggttacacccacatccactttgatactattcgtcttgctctaaattgttatgacaggaagagacttccagttaccgctcgtattggtcttcttgatacttgaatgagaaaatatcataatgcaaatatagctactattgaaaatactttaagtactagaacaatggtcatcactttgtatcataatttcaacatgtctcttagagacaattggctaactaatgctttcaaagtggaagtgcaaacaataagagtagactaagacccaacttctcttggcgccacactccattattatatggcatattgactccaagataatgttcttgatcttaacatccatcaaacacaagacactttactcatctcagttgattacaaacaagtatcgatctacacacatgtcataaagtaaatgaccactgaaaaactcataaaacttttacccaaattgtgtgtcacgaaatatgaaaagcttcacaaaccacaacccatggttcaaaccacaactgagccttcctaccacacaaaagaaaatggatttgttgaaactatttttaacagaagttaaacaaaatcacctagatgttttctcacccaatatgtcatcacacccatccagccaacagatgcaaagatcatgtacttcgattcacaaggaaagctaatatatgcctttgaatcctcaaacaggcataaactaggatgtttgtaactgccaaagttgtcttgaagatgatgagccctcacgacgtcccactccaagaaagcaactcaaggaaaagctaaaaaagagaaacaaaaacatttgtctagtaatatttccattaataaacaatggcacacccttcaacttgatcccttcctcaatagagatctccacgaggaagtttacatgaccatacctcaaa

SEQ ID NO: 50744 - DNA, 840 bp, Cannabis sativa
atgcctctaaaaataaacattgggcttatgccgcctacaaacataaaactttgggtacttatgccactatttaccctttttaaaattatgtatttagaaatgagaataaaaaaaaaataagttttgaaatttttaaacagacgaaacgtgtttggttattgttttctaaaataatttttttaaaaaaaaaatatttcaatgctttgagaccttcatatgaacttgaattcgacttggccaagactagtgactttgacccggacccaccccaccccagacctggacctagccccaaaccccaccttggccctgacttgaaacctagactcgaccccggccccaaccccgacacgaatcccaaacccaatactttgagacctcaatatgaacttgaattcgattcaaccccaactagtgactttgaaacgaacccaacccagactgcagcaccagacctaaaccaagccccggccggaccccggaccccgacttcagacctgaacccagccccaaccaggatccctcccctagcctcaaccccaattccaataactcctttaaaatagagatttaaaaaaaataaattaaggaaccatggaaaaattatcttcctaccaatactaaaaaaactcaaaatttccgaggattttacattgtcggataaagaattcccgacagtctataaaatcgttgtctatacgagtgtcgcgaatactggatagaatagcaacggttaaaaattatcgtggaaaagaattctcgacagtttaaaaccatcagctatagtcgatactgttgcccctgtttttgcccaatatacgtggaccaaccagacaagga

SEQ ID NO: 50745 - DNA, 738 bp, Cannabis sativa
ttgttaaccatcccattatggttgtatgagaaatattaggcacataattaatgattgtaattatggtattatattagtccacaaataaataattctaacacccgcctcattccctcatttaaacagagaggtaggtctccgcaaggtccatcctcataaagaaaatgtgcatccctatttaaaatggaatcaatcatgaaatattattacttttcatttttgcattgtcaaaaataacttttttgttactcttacttatgatgttgaaaacaaactaactagtaactttttcataaaaatactatatttttgtattatataatttgtgatatattttggctacttttaaaaatagaggtatctacaaatgttaactaaaattaaaaatattgattatttaaataatatttactgatcaagaacactgaatgctatataaaaatatttgttattgaacagttacatatgcaaatatttaaacaacaaataaatagtaaaataaataattattcattgtaacatttaagcaattataatgttcatcttcaacaataaattgactattttatcaaaagtaatgttcatcgtcaacaacaactgcataattaaattgtatcaccactaataattgatttacttctttgatatcaaataatttaaaagtcatcgatctttcatcttcaacaagtctttaaactctgcagcattggtcaattttattctgaacatagcaaataa

SEQ ID NO: 50746 - DNA, 2053 bp, Cannabis sativa
  modified_base (1498)..(1504): a, c, t, g, unknown or other
  modified_base (1823)..(1836): a, c, t, g, unknown or other
  modified_base (1942)..(1947): a, c, t, g, unknown or other
tctctctatactaaaagaaaaacttataaccatcactatcgacaaactccgacgaccactttcaggccaccttctgaccccaccatccacaccatcagaacctccagtcaccgacgatctcagcccccaagcagcgccgcctctttcgctgccgttagcttgggatcgcgagtcaaagttctgaggttcaaacattggacgcatttttcgatcacatcaggtgtctgtttgacgatccatcttcaccattagactcagctcgtcgaggagaaaaatctacacttataattcattctgtcgagctcgctacttttttcggtgacttttcgatgatcgcatgttgttttgacaaatcgttggcatgagtgtgatctactcgttgaggtgatcattttgatatatactactcctatttttagcagcatttttggtactccgatttctactgccaccaatagttaatgtgtaccacttaggtgaggtttcagaactccaaactttaaatatagtcatgttatatgtcattcgactcagttttgaatgtagaatgcaataatgataattatttagtcatttgatgatcataggtgaaagtgatatctaagattggactaaacatttagagctcgggacttgaaagcttatgattgccttttaggacaaagtttaacgacttgggagaggtagggaatcaacttgattattggagttaattttgatgaatagcatttgacatattccaattttattgatttatataatatttaaaaaattaaaaacttaatgtgtatattttttttggactgttctagaggcactgtttttgtacaattatctatgcaggttatgatttttgagttttatcaaattatagtcgttatgctgtcaaattttttaatataaagggaatatgtacttttgttatttttaatgtatgtattttattttactcatgaaagtcatctttatcatgtcttgcgcatattgttatttcatgatctagtctctatgtcatcataggtggattatgttagaaatattttactaggatctaaatttattaacaagtatgttgattaacatcctaaatatgaatatttctaaaacaataaaaataaaagagtttagaataccttacattgattgcaacaaaataatatgactcattccgccctctgaccctcgttcctttctatcgcagagtattatcaagatatgagcctaggtctctttctctccttcaggttggttaccaccgtcttcggcactatgattgagtacttgacttgctatgtgtgggcatgactctatcactattggccgaataggtgaagaacaataaaggagggttctgtatagaaggtgtctctcatctactagttgacagagaataaaaattaagtttggtttggttgaagtcaatagttggatgagatgagagcatcgtgttccttttatagtattttaactagcgcttaggtttgaattatatggattnnnnnnnaataaaatattgggcaaaaatcaccacaaatggtcggtcacttaagggaccattctccagttacaattttggcactttatttcaaccacttattcttctttcaataataccacattttccaattcaatcctatgaatgccaaaattatttatttaataattataattgattatcaaataaaattaccacttatattatatattaattacgtcatacaaagtatcttcattaataaattaaccctaaaacttcttttcttcacaattaagcccttgcttattgaaaattcataaataagacacagtctaattttagaatnnnnnnnnnnnnnntaaaactaattaactgagtctgctagcaatattatctcaactagtgaggggaccataggcctatataatcgagcttccaacaagtagatctagaatttaccaagtnnnnnntctaacttattaatttctccttacgctactttagattcagaattgcactctcaattatatagaatgctctatatgtaacaagatatagatacattatgattatcca

SEQ ID NO: 50747 - DNA, 1480 bp, Cannabis sativa
  modified_base (1295)..(1301): a, c, t, g, unknown or other
aataataattataataataaatattatttatcaattataaatcaattaaaataatagtaaatatatatttattgtagtgtactaaatccactagttatagggccagattgacacagttgtggaaaaaagtagctgcaattgtgatgtgagcaaaaaaagctacagtagaactgtggaaaaaagctcaacggagtgttggtaaattataaatttcaaagtaatgttagttgttaagatctattataataataatgataatgttataatttagtttattataatcataaatatatatgtaaatatttattttatataaatattttattttctatatatttttaatttttttttaaatataaatttatatgcacttgataaaaataatttattgtatttttatattataattcataaaatgtagaaaaaattagaaactagagtatataaaaaaaaattaggttattgttatttgttaatataatttttttttaaaaataagagatttaataattatttattttattataattaatttattttaaatatttttattttttagtatataataaataagtaaatatggttttagtacaaaaaagtttattgtagtcttttaattaaataatttttttaaaagtttggttggagcagctttagctttttagttatagattctccaaaaagttttcaaaaaactattttttgattacttatcaaacacatttttatcacaatttttttttttttttcaaaaagtaacttttaatttttccaaaagctgtgaccaaggagcccatagtctataatgtaagcaaaagcaagaccatcactagttttacgacatgccacaaaaaaatatgagtttggaatgacaatatgacacgacataaatatgaatatcaaaaacataaatataaaaaaatcctacaatttacttttaataataataataataaatattatttatataaattagttaaaataatagtaattttttttgaatatgtaaatatttaaattttaataattatatattactttttatacgattgttgatagttattgttggaaatcatataaaggaaattgaaattataaaaaacacaaatatttcagtgaataatttgcagcataaataattaagtttaatttttagttgtaaattaatatttaattaaacttaaatttttagcagtaatattacctaaattatatttctgaacctctgtaggtacctaattattaaatatcaagttattatccacatataattttttattggtatatttaaattnnnnnnnttttaaaaaaataaaattcataacttggaccaatcagggattgccacgtggtaatttacttaattaacatttaacaattaggtacctacaaagttttaaaaatataacttagatattattgccgccaaaaattaaatctatgtatttatttgtagctggaagttaaacttaagtattta

SEQ ID NO: 50748 - DNA, 1830 bp, Cannabis sativa
agtgtatctaccttatgccattaggcaataccacctcttcttccttctccacatttctgtcaaattaaataaaacaagttaatattggttttactaattaaccaaaaaaaaaaacacctaataaattttcattaacaagtggcaatctcattctaattaatcaggatccaatgtttaatttttgtgttcaaattcaagtccaaccaactaataaatgtcacattacttaaatttgataattaataaattaatttttcaaattgtatcatttttatttaaatactttaaataaagggtgtgtttgataaagaatagtgagtagattagattaacatatagttaatctttaaatttatattatggaaaaagtgataccagcttagtactaattctattaaaatacaagtaattaatggtgaaactttcttttttatgtgtagcaaagtaaaacttctttaaatttacttttttttttttttttttttgtaaatttaagccatcgattaaatattactgttaaataccaactgaatgaccattgtgtatacttgtgtatacgtgaaagtaaaattttactgtcaatacaagaataattcagttggtatttaacagtcatatttaactagcacttcaaatttacaaagaaaaataaatataaaaaaataagtgagttaagtataaaaaattaaaacataaaaaaaatttcgacataaataacccttaatataaatatttaaaccttgtgtttgcttgttcttgagagacttcaaaacgagtctttatctgttcagaaacaacaccaaaagctaaaaatccagcccaagcaagcccagcaccaagcccaaatctcctagttaaacttgaagctatccaatctgtggaatcagatcagcctttaaatttgaagaatagcccttttgttgttgttgttgttgttttttgattgggacttgttccattggttggctagaattattgctcaatgccttagatgatgatgatggtggcggtgtcggtggtggtggcggtggcggtgtcgggggaggtggtgtttgggatgaagaggatgagaagttgagagttttaggagttagaggatgagatagaaatggtggtgagccaaagaaagaagccatttttttatgtatgaaaatggcttaaatttttttggtatgtgtatgaatgaatataagtgttatggaaaatgtgttatggtattggtttgtttgtttggttggtcctaccttatccttttttttaaatgatgggttctttactttttagattttttggatgtgtttggctagaaaaaaaacacttcaacttaaatagataaatgaattaattaattaaatatttatgtttacaataagttttgatttattgttgatatttttatatattaaaaatgattattaatagtaatttttggtttaagggtgtttttttaagttaaatttgaaataatattctattatttaataaaatattattaactaatttttaaataaattatttgtaaaattcatttaaatgaataaataaattattaaaattttattctttaaaagatttttttttttaaacaataaatatattgatgaaaagagtttaaatacaaagtatggggaatgatattttaattgggattatttcataaatacacaagaataacaaaaaaaaattacaaaattacataccaactaatccattaagtagataataatttgaaaaaaaaatcatattactttggctatctgattttattttgttatttctaattttgtcaatagtggtttatatataatttccatcgagaaagtttttcac

SEQ ID NO: 50749 - DNA, 833 bp, Cannabis sativa
gttcggtaagtatgaaattgttcatcttttgcacattaaaaataagggtatttataggcatacatgtgagtaagggcatacccttcaccgacttagcatttgatactcaacacgcctcaagggcagataccacaacatgatcggactgtaagttggtaggaaaccttcccatcgtgtggtgtacagctgttgtaaggaattttgtgtgaatgaggacacacgtcactcaaaggtttcaccttgaaatgttgttgtctagatagtccattagataaaaagggggcttcagaggcacgtacatgtactaccatggcttgacgcaggggacaagatttgatttggtgtaagatgatatgtaattgttgctttgagctccagatgggatactgttaggtagaatctaggatcgttaggccacatccttcctagatcgcgctaacctgctaccttctcgggatactcgctattttgggggactctaatcctctctagtagtggatgaatagtgagagtcctggaaaccttcctgtccttgctaactatgaggaccttcgactaactcctggaatataatgccctgcgtgatattattaggcaaaagatatgtactgattgcagatagtctaaggcacatttccgtgattgctatgtatgaggcattcaggaatacggataacaatgtcacacttaaaggttctttagtttcaattataaaatgacaccaaaagacttgtttatgatttttaaacacgacatatgcctaaaacaacaattttttttttttttgtatttaacaaattttactaataatgcctaaaacaaccatattgaca

SEQ ID NO: 50750 - DNA, 1282 bp, Cannabis sativa
aaacgggcttggacagtaaaaaagttatgtttgccgtgtcccagtatatttgaaaacttttggtcaaaaagcaatatttatgtaaatttccctaaatattgcccatatcggcattaacgaataacaaagtgtcatccacgtacatcaaatgggatgtaggcggtccattacaactaacatttatactagaaatcaaaccacttctctccttgttaaggatcaaacgagagaggatttcagcacacataatgaacatttagaaggataaaggaccccttgtctcaatcttattttagaaaaggtcttagttaaactcccatttaataacacttgatagccgattgaagagatacaatgagaaattaacttcaggaatttttcattagaactaaaagaacgaagcactatgtcaatgaatctttattccacgcgatcatatgcttttgacatattacacttgataccaacgaaagccttactctcttgtttacgtttcatctcatgcataatctcattcgcaatgatcgaattctcagcaatccacatgcctttcatgaaagccgacggatatggaaaaacaagtttatgttgagatttatgccctaaaagtaagtaattaaaggataatatattagaaaatataagaaatatgattataaaataaatgacacattaattagaagagtataattattaaatatctaaaaattccttattcatatggataaaagtataatcttgtaataaggatgtacaagagaattaagattgtacgatatgaataaaacaagtcagtagtgtattaaagtattagaaatctttaatataaaaatactaagtacgatttactatacactatacttctggtgtgtgtgattatgattcagataacatatgtagatggacatgtagtagaggtactgtgtataattagattatgcatgattgaattgatatgtaataaaatatctttcattaacttaccgtttaccataaaagagtttatcatatcacaatgatgattattagtagattagcctaaatcctaagtatacatgaacttctatttgtgttcattgagctctttgattcacgtgttaaagtttctcagagaatatgattcttacaatttttattttaggagcttaataacatgagtggttgggaagatgttatataatagctaaatctaagctttcctaacggatcgaatattagttcccttatagtgttaattctaggagtgctaatagttagatctaaatctataataagttataga

SEQ ID NO: 50751 - DNA, 1162 bp, Cannabis sativa
gatttattttataattttacggattttttttataagtttttcatttgttttttttttttaagaataaaatggtgttttcatgttgtgtctctgtatcaataacgtgacaataactagaagaaattataaattttatgagtttttatattttcggtgcaaaaatatgatttttttaaaaaagaaaaattattttatggaatatttttgaaaaatatgagaaaattaggtaagggtaatcatgtacccttagggtaactatttaccataaggaaagtaaccagttactttatactatttttctaatattttttaaattttataaaaaaaaaaattaattgaataattgttaaaaaaatcacgttgttacaactttatactttaaaaattataaaaatgaaaattttccaaatatatattgtagatttgtaaaaatgtaaattttttgttatttttgagtattatgaaataattgtttgcgttaattctcatatcggttttttctttcagaggattccagcattctttgcaacggattatctaaaaagtaaaagtggtccaaaaatagagcttaggattccaagtggaaaaagttggtgtgtgaaatttacacatcataagcttaagaatgaaacaacagctagattttgtggtggatggagaaccttcgttgaggaaaataggttggtcgtaggtgatgtttgcgtcttcgctctaactaatcacaacaaacctatattcgatgtcaccattcaccgtgcgaaccaagatgatgatgacgatggtggtgatggtgatagtgataataacggtgatgatgatacatgctttattttctgatatatgttattggaaatataatatagtagtttttgatttttatttcagatttatgtaagactttttattgcatatgtaagttttaatttgtaggtattttaatggtctagcaaatattattgtgaaatggttgtgttggtctaagatcgtttgcaagtttgtaaatgagaaagcttaattagtttcaaaagcattgtaagatattattaattagattgtcctttttgttatgatcttttcaatggtgttgataaatattatcttaaggctcgtttggaacgttatattatgtcgtattgtattgtattatattatattaaatttg

SEQ ID NO: 50752 - DNA, 1741 bp, Cannabis sativa
  modified_base (1560)..(1560): a, c, t, g, unknown or other
tgttggatgacctctctcaacgagtcctagatcttcataatgaaagatgtttaaaggttgcaataccagaatatttagtgttgactgttggtgaagaattttctaatgagatggtggatgtaataaccacactaatagttatttaaataagatttataaaaggtgtcgttcttggagttgccaatttcaactgagaaagtacggccttcccttctacaggctcctatacttaaactgaagttaagacactaccgaagcatcttaaatatgtttacttgggggagaatgagactttttcggtcatgattgctagagatctcaaccaagtgcaagaagaaaagtttataagggtgcttcaggcatacaaaattactattagatggtccattactgacataaagggaattatcccttccatgtgcatgcatagaattcacctaaaagaatgatctaagccgacacatgatgcacaatgaaggctaaaccctctattatggaagtagtgaaaatgagattttgaagcttcttggtgtagacatcatttacccgatttcaaacaatcaacgagtgagccctgttcaagtggtgccaaagaaatctcgtatcacagtggtgaagaatggagataatgagttagtgccaacaagaatgcaaagtgggtggcgagtttgtatagattaccgcaagctgaatgtgacaacacataaagatcacttccttttgccattcattgatcaggtgcttgagaggttagcatgtcatccttattactactttcttgatggatattcgggatataatcagattgctattgctcctaaagatcaagagaagacaacctttacatgctcttttggtacatttgctttctagcatatgtcatttgggttatgcaatgctcctgtaacttttcagcgatgtatgatgagaatattttctaactacattaagatcatcattgaggtcttcatggatgattttagtgtatatggtgactaatttgataagtgtcttcacaatctcactttgatccatcagcggtgtattgaaactaaccttgtgctcaatttggaaaaatgccattttatggtaaatcaacgtatagttttgggccatgtgatttcatccaaggggatagaagtatataaggctaaaattgatttgatttgctctctaccccctctaataagtgtgaaagaagtaagatcattccttcggcatgtagaattttataggagatttatcaaagatttcttagaaatctctactccaatttgcaaccttcttaaaaaagatgtcaagtttgagcttaatgagaagttcttagtggctttcaaatttttttaaaaaaatctttgactttagctcttataattcaaccaccgaatttggtgcttccatttgagcttatgtgtgattcaagtgacttgggtaagagtgttcattggaccacatctaatacttttaggcctatccagattcggtccaattatgtattggatgttagattttaccattcgattcgatcatattaattcagtcatccaatcgatccaacanccattggatgttggattggattggctctatccattggaagtgttccatatatatttattggtttaatttggatttatccaatatttcagacctattatttcttaaatcggatcgaatccatccaatattttaggtctagtatgtattggattgggctggatccattcaatccacgaaaaaa

SEQ ID NO: 50753 - DNA, 1149 bp, Cannabis sativa
ttaacatctcaatactataattttgatctaccaattaagtaaaatttgattcacgttatactagatctcgttgcaagctttctaataatataaaaaagatttaattttgacatcagaattaaaagttatgccccttttacaaaattgaaaagctacatccgaaacaagggttagaatagttgtgccctaaagttgcaggtagtgccaagattacaaaaaaaaatatatagtgttttctattgcaaattgtctccctaattaaaccatattcgaattctgctcaaaaaaagtaccagagcagtatattaacataatagttcatcattaatttgacaacttagaactcatttcttacatccaaatcctacttagaacaagaaatccaaagatcaaaacatgaaaatttcaatttctacattttcctcaaaacatcaaaatcaatctaataacattcagaagggctataacttagtttcatacttgaaaatgtgtaaaataggtatatttcatcaataaaaacataaccaatctcttttactttagaaagtttcaagctcaacaacatatgaaaattaggtcaaaatagtttgattccaaatccaaaaattactaattaaaagagtattttcattaaaatagaaggtaacaataataaaatcttcctttgagaactattatcaacaaaaacattttagaaataatgaaattctatttttccatcagtttcttttcaatttgatccaaaattcagtaacaaaattatagaaataaagaggagtttaccttattaaattcttaagtctcacacctattccacaacaaaatcaatagttaacttttttctttcaataattaaagataaatgtttgttgacaaaagtattgggattttatgccctaaataaaaattaattttattgtgatcttatgtactttcagtaaagatcagaattcatatcttgaccttgccatatgatttgttcaaatgttttatacataattatacgtttaaaatataagttctattaaatcccaaacatatagttgaacacaattacaatgatgtcatcacaataaaaaataattgtgattatatgcttcaaattatttagtcccacgatttatcagtgtactaaatacactaacgtga

SEQ ID NO: 50754 - DNA, 1272 bp, Cannabis sativa
tgggagtccaagaaaccataaacatgccattttctttcgcagaaagctctggcgcctatgtttaaccaattttaaattttcaatcaatgtcccattaaaacaataactcaggattgttatcataattatataacagagagagagaaaaaaaagttttaccatatttccagccccgactgtacagaagccattgacgatatcgacaaggacaagaccagttttaacatccctagatatgataaagggttcttgattaacgagaagctcgtcctgaagcaaatcaatccgcagacatcactaaacaaattacagacattatatatcaagatttactacatacaaatatagatatacaaactagtatttggcttcttaattggatggtttgttaaatctttgacaaaaactagaattgaaagaaaaacagtactaacttaaaggtaagtccatctccaaaccaatacgctccagaagtttgaatccatccatgtctggcatgtgaacatcacttataacaacatcatacccatttttattctctcttagcaaattcaaggcatgttctgctcgattgcattttgtaactgcgaaattccgaaacaatttgagtaaatctatttcagtcataagaaatattcagaagaaaacaaaagagggccagaggattctaaatctacagagagacataaaaatgaaaggcttaaactttatttgttttatttaagcttcaaagagacaaaaatcaacacaaattttttgacccatttagaaccagttcaacaaacccatgatttaaatcttagcttgagtataacctaatcttaagagagtcaaattcattctcttttctaggggttttttctcaccaagattcaaaatcccatgaacaagcactgtaaccaaaaaattgcaacactcacaaaaagtctaaaatattatatacaaaaaaagtttgagctgttagaacaaataagtgataaaattaaaaaaagaagaagactttacccaaatacaaatccagaagagaattataattaccaagaaaaaaaaattaaaaaccttcataaagacatgttcgaagcatcttctccaagatcataagacaagtaggatcgtgctattgctttatcattcaagagtacatttttggcttattattcaattttaacaagagtactagtaggatattcatatatacaaatataaatatcgatggaaatggcttcgaagataatatatatgagtacttgttatcttcgaagctatttccat

SEQ ID NO: 50755 - DNA, 1096 bp, Cannabis sativa
ggacatcaacgaaacatcctgaggttgtcgagtagtggaagtttttatattgtagctttggtattggtctatgtagtctgttacctcgtgtagtaccagagcaggaagagaagagaaaccagcatgtagccaactattcttgcagttccaagtcttccacaacaagcatacaaaatagtgataatttctaacaataaaagtagtggcagcaaggtgtaataaatcaaaacaagttagtgaaatatttttatccaaaaaaatgaatactagttaattcccatacctcctggacagaggggcatctgaagagagcgtgctctagggtctcatcatgatagtgacaccgtggcaacaatgtggagaagggagagttttccgtttaaaaatgttgtgattggtaggaaggatatcatgacaggcacgccaaagaaagtgtttcagcttgggaggtaaaggaagtgtccacaactatttacacaaagcattgagagtttgcaggaaaataaaaatgagaaattgtatgcgacttagtaaaaaagtcagcaagctgcaacgatgatgaaggaacaaaaggcaaagtaatggtgcccaattttaaatggtgacgagtaaaatgacaattaatctcaatatacttggtgcgttcataaaaaaactaaattgtgagcaatctgaatgatgctttgattgtcacaatacatagaagtaggataagagtgagtgcactcatatctacaagtaactatctcaaccaaacaatctctttagtagtagacatcatgacacgatactcagcttctgtagaagattgagaaacaacagactgcattttgctcttccaagaaataagggaatctcccaaaaagatacagaaatcagtgatagatatttcagtctgtgggatcacgaccatgatctgcatcacagtaagctcgtaactctagagaggaggtggaaggcaatagtatgctctgaaagatggtaccccgaagataccatggaatgcgaagaatagcagcccagtcaacagtatagtaggagaagcaaaaatttgactaacaatataaacaacatctgcaatgtaacgtcctactca

SEQ ID NO: 50756 - DNA, 1769 bp, Cannabis sativa
agtaaaccagtagcagaggaaaaaagcagagagagaattaggttcatttcttcacatcccctctcaaatgcaggggtgaaatcatcactccaagtttgtcgattaagaaattgaacctggaactggacagcccctttgttaagcaatctgcaacttgatcggatgatggaacatatctgatgtccaactctttacttaagactttgtcccgaatgaagtgaacatcaacttcgatgtgcttagtccttgcgtggaacacagggttggatgccaaggcattagctcccatattgtcacaccaagtgatggctgttggtgttttaaagttgagttctttaagtagtgattcgatccatgaaatttctgctgccacatgagctaaggcacgatactctgactccgtacttgatcttgcaacaaccggttgcttcttggaagaccatgacacaagtgtgttaccaaagaagacacaataacctgctatagatcgtctgtcatcaggacaacatgcccaatcagcatctgaatatccagtcaagttcagtggctcatcacaactgatatgaagtcccttgtgcatggttccctttaagtatcttaggactctcttggctccattccagtgaactgtagtcggtgcttttagaaattggcttagtttattgaccgcgtaggaaatatctggccttgtgtgggataaatattgcagcccaccaattacacttctgtaaattgtgggattagatagtagttcaccttctgttattgacattggccttcctgcagttgcaggtgttggacatggcttcaggttggttaggttgtgtcttcgaagcaagtcttctatgtattttgtttgtgtcaaatacaagcctgttacatccctatagacttcgattcccagaaaataatgtagagacccgaggtctttgagagtaaatcttctattcaattctgaaatgaagcctttcaacttgttgttattgttccctgtcacaacaatgtcatcaacatatatcaacacaaagattacatcagtaccatgtttgtagaagaacaaggatgtatctgattttgagttcttgaaattccagctagccaacgtggattttagcttgtcaaaccacgctcttggtgcttgttttaagccatacaatgacttatttaacttgcacacatagtgttctttccctggttcttcaaagccttgaggttggagcatgtaaacctcttctttgagagtgccatttaagaaggcattgtttatatccagctgcttgatttcccatcctcgagtgacagcaatggtcaatatgatcctaactgtggtggctttaataaccggactgaaagtctctccaaaatcaattccaggcctttgatgaaaacccttagcaaccaagcgagctttgaacctttgatgtgagccatctgaatttaatttttcccgaaaaacccacttgttgcctattaaattctgatctggtttgggaggaaccagcacccaggtgtgattatccttaagagctttgttttcactttgcatcgctttgttccaaccgggatgagagagagcttcctctacactgccaggttctttagtttctgtgttgcagtgagtgtgtcccatgaatcccgaggtttgaatattccagcttttgctcgagtaatcatgggatggccagctgtttgaggatgatctgtagtctgaactggatctggtgaaatgtttgttgagtgttctgtttcagcaggttgtataataaaat

SEQ ID NO: 50757 - DNA, 1633 bp, Cannabis sativa
catgaacaaaatggtttagttgaacgaaagcatagacatgtggttgaaaatggtctcaccttacttgctcaagcttccatgcctcttaaatattgggatgaggcttttagaacttctgtctatctatccaatagacttcccacacctgttcttcaaaaccaatctccaatagagaagctattccatatttctcctgattacactacactaaaaacatttggttgcaagtgtttccctaatatcagaccatataacaaacacaagcttgagtttaggtcatctccatgcactttcatagggtacagcttaaaccataagggatatacatgcttaaactcctttggccgagtatacatctcaagggatgtcatatttgatgaaacatcctttcccttctcttccattccccaagtggccaatgattcttacatgtattctgaatttgctacacctgcacaaattcctttgtctcatacatataattcatcttgtcttgatgttcctactgctgttactactaatgttgtgccatctgtggcaagcttttcatgtcctatacaggaatcaagacctggtgcacatgttagggataccactgctgctatcactcaacaggaaacgaatattatgggaactccttctttatacagcaacaagatcaggtctcaacctccttcaatcactccaaatgctgatattcatgagacaacaccatctgttgctgctgaaccagttgcaccacatactaccactgctgtaactacacctgccactgatgttactactgtcactgcttctaaatcagtagcatcacaagcagcaactaccaacaagcatgctatgcaaacaaggggaaagtcaggcattcacaagcctaaagcttatttggtttccaaaattcctcgaacagtcaaagaagctatgtagcaagaacaatggaaccaagccatgatagatgagatgttgggtttaactagaaatgaaacttacactttggttcccctacccgaggacagaactcccataggctgcaaatgggtttttcgagaaaaagagaactcagatggcactcataatagatacaaagctcgtcttgttgccaagggctttcatcaacaaccgggatttgattttactgaaactttcagcccggttgtcaaacccgtgacaataaggattgtgttgtctcttgctatttccaatggttggcaaatcaaacaacttgacgtcaataatgcctttttaaatggcacattgaatgaagaagtctacatgctccaacctccgggtttcgagattacctctcctcccaaccttgtatgcaagttgcataaagccttatatggtttaaaacaagcaccccgtgcttggtttgacaaacttcatcattgtctactccaactaggctttgttccatcaaaatcagatcattctctcttcatacaacacacatccactcacaccaccttagtgttagtgtatgtcgatgacatacttgtcacaggcagcagcaacaaagctatcgatgatctggttgtttctcttaacagcaagttctctctcaaagatcttggagatttgcactattttttgggcattgaagtgaagtctacaccttctggattacacctct

SEQ ID NO: 50758 - DNA, 2187 bp, Cannabis sativa
tgttttataaataagattttctcagaactttgtttctccattgatgaatttaggatttaaaatcttttaacgagaactgttctttttttttttgggaaaaatgttttttacaatctctatttccccaaaaactcactatccttttttaaattcattgccaaataaataaaaggtaaaatgtgacactgatttttgtgatgaaaaaatggcattactttaaaattttatgatattattaaaatgtcactaataaaatatcacatctcaagacaatgaactaattgataatacaaatccgttagctatcactttttttaatttattgtaaaataataaattggatcaccttttcgcattcattgcaaataaatgggacgatttttatggtgaattttaatgtgatgcaaaaatggtaattttttaaaactaaaaagaaaatttattatattaattttaatgagaaccaatagattctcacatgctaaaaactgaaactttcctagttttactaggccaaaattctttcacgaatattttcacaaatatggtaagtatcacctttccactttcattgcaaataaataaataaatgggacaattttaaaggtaaaatctaatgtgctgcaaaaatgaaattactttaaataatttatgatattattaacatgtcactaataaaatcctttgtctataatcaactaattgagaatacaattatggttagtattacctttctaaaattatagtttcccgtttcataaataataagggatgcctaaataataaaactacctcaatgttattaaattaattatggaaactacttaatttagtgcttcccatattctcctgtagcacattcacattatatatagaatataaaatcgaacaatcagtacacacaatttcataaaattttacttgttcaatcattcacaagaaatgtatgcgaaaatttcaaactcttataaatctctcatatgtatttaatttctcctctaatttgtatattacgtattttttttaaaataaaaagtttacattgcagatgtattttgaccaagaagagaagatgtatgtttttcaagcaatcgaacgattggagaagaatgtatcatcaattaaagaggatgttgaagaactcattcgttttcagcgggaaaaagagagaagggaaaaagatgttgaacgagaacttcatgagttgaagttagaattaaaattaaagagtttgtttactaaaatgaaaaaagatttgggggaagtagatggattatttggaaggatcgatgaagtatttgaaaagagctcaaacacaacttgtggtgatctttctatcaagactccatctactgaaaataaaaagactaagcttaatacaactcttgagtctaattattatgaaagtggggtatgtaatctaatttatatattggggaaattatctttccttggttttggttaatatttttattcagttaatatattgtctatttttttttttttgtaggatgattctaacgaagagagaagtcatgataaggctaccaagagaaaaataatttaagcagatgtgttttggacgtttggatggggagcgttctaatttttatcattttattaatgcttttcttttacttatattgttctacagcatagttagtgagtactttcagaaactactattattctgagctctttatttttatttgtcaatttctctttttctcctcatatatggaataagttattagttattattttataaagttttcattacaaataattttttcgttatcgcaaacttaaacccttattcattgtatagattgctacaaatcatacaacttgcattcatacatttactccaatttgttacaaaaagaataggtctaaaaatgagaacacaatactatttttccattgcaatctataataaagatacaactcttaatatcaacaacaaggatgatatgctgagtatttattttttcaatcataaaggaatgaacttttcagagtagtatgataatatcaagagcaagaattagccacaaaacatttcatgcaactacatccactcaacaaaatgtctgaattggggaaagacaataaagtattattcgagcatgaaatgatacctgggttgcaaagacctcaaagtctccacttctaacaacatagcaa

SEQ ID NO: 50759 - DNA, 2865 bp, Cannabis sativa
agctatggcaaaaagggcgaaaataaccgggaaaggaaaaactaaagggaagaagactggtccatcttcctcgaatagagtcatcaagactagatctatagacgcagtgttaggaatacaggaactggagattgaggaagctactgattcaatggaacagtgtcatgaggaatacgaacactacgctgagaaaattctttcacctggagaatcggagctaaccatcaggaggcagagtgagattcgtaatgacttctcagattggctctcgatcgcaaatcgaactgctcaagacattaatactgggaaaaaggtatcaccccctattctcagatctaatattgtcagaaacctagaaaactcgtttgaactttccgataaagaggctgaggtcactggatcgaagaagaagattaaaattgagtttgaggatatagcagaggaagttaattacttgcaaccttcattagtttgctatgtaattggagcgaatcctcctataaacattcttgaaggttttatgcgtaggctgtggaaggaagaagtggttaaagttggcctacttgctaagggaatttttatcataagattccagaacatggagcaacgagataaggtgatgcagcagggatacgttttctttgaaaggaaaccaatggtgatgaaaccttggaatccaatagatgatttcaccaaggaggaggtgtcaaatgtaccaacttggatccaattgagagggctggatatcaaatattggggggaatcatctctgttcaaaataatgagtcaattgggagaaccattgcaggtggacaatgtcaccaagaacagagataggctgcaatatcctcgaatattaattcaggttagtttggcttaagattttcctgaaaaaattgatttcatagctgagtttaatcatgaggtggaattagaagtgaaatatgaatggattcctctggtatgttacaactgctctgggattggacatagcactaaagaatgtaggaaaaaagaagaaaagcaggaacaaggcaaacaagtgtgggtgccaaaaaagaaaatctcagaaaaggagcggcagatagttgatgaggggttccaaagagtgagtaaaggcaagaaagtgatggtgaacaatgagaaagatgagactactgtgcagaacatgtttgaaactctaggagaagaaggggtaataaggacaacacaggaggggagggagatccctcgtcctcaaatggatagatttttatgttggaatgtatgggggattaatagccagcaaaagcataatgaggtcaagcaattgatcttttcgaagagagttgggttttttagtctcttagaaacaaaggttcaaaacaaaaatatgggaaccttatatactagtcttttttaaggttggtgctttacaaacaataatccttggttggataaaggaagaataatagttgcttggtagcctagtgtttactctgtggatattagatattgctctagccaactaattcattgctatgttcaatcacagcagcaagtggggaaattttttgtgtcattagtatatgcctttaatgatgaaaagaagagagaagatttatgggctgaattagaggaagtggcactaaaaatagatgagccatggataataatgggggatttcaatgagattttgaatgctaatgaaagagttggaaaaagagctcaaagcctaccatctcagagattccgagacactacggagaagtgcaagttggctaatttgaaattttcatgttccttttttacatggaacaataaacaaaagccagaagagagaattttttctaagattgaccgagcaatggtcaacactcaatggctaagtaattttccttgttctgaagctgttttcctacctgagatggcttttgaccatagtcctatcttggtaactatctacgaagataaaagctatgggaaaaaaccatttaggtattacaatatgtggaagatggctccggattattacaaactggtgacaaaatcttggaaggaagaaagtagaggctcgaaaatgtttagcatagtgcacaagctgagaagactgaaggcagttctgaagtagattaacaagacatgtttttctgaattacaaaagacagagattacgacaaagacaatgctagcagagatacaagggaaactaagtcatgatccaggaaatgaagagttgatgaagcaggaacatatggtaaggaagaaatatgcagaaatcagcaaggcttttgctagcttcatgactcaaaaaaccaaaatcagttgggctaagtttggggatgacaattcccaccttttccatgcttctctaaaattgaggagactccaaaacaagatcttctcgattgaagatgagtatggaaactggtgtgattctccagataaagtccaatttgctttccttgagtattatcagaggctattgggatcgaatgcaccagaaagaaggaaggtttttcaatcagtagtagatcttgggccgttacagagtgtcataaaaaactattactagcggagtacacaacaaaggaagtggaattagctatattctctattgataaggacaaagcacctggaccagatggctatgggagtgctttcttccaagataattgggacttagtgagacctgatttagtagaagctgttatatcttttttaaactctggaaagattttgaaagagattaacactactactatcacactaattcccaaaacttcttgtcctaaaagtgtggtggacttcaggccaatatcatgttgcaatgtggtgtataaagtggtaaccaaggtaatttgtaatagattgaggaaagtcctt

SEQ ID NO: 50760 - DNA, 962 bp, Cannabis sativa
ggaaactcgacagagtggtcagaagtgtcacggcagtaaaagttgagatatataggaaatatatcagactagtttagaatgttcaatattcggtttagtcggggtagttagagaatgaccaaaataccattaggctttatttaatttaagtgttttaacgaggagcaaaatagtcttttataaggtagtaaagtgttttgtctttagtgattatctaggctaaaatttagagttttaatgttaggttatactatttaattaaaggtttatttcttaagtttaattgaagataaaaatcaaaactaacaaaatgaaaattttactctttctctctctcccttccttcattcccttggaatcatagagctagcagctggaaggatgatttctccatcaaattcttcaatttctagtagaatttaaccaaatttaaggattctttaagctttgaggactcgagatcatcgagcgtagttccactcaaatcagtctgcacacctgatattagatcaatgtaagaaaatttatttgcactactaagcatgtcatttgagaaacgattatttatcgtttgtggctcgattataatccaggtaaagatacggtccttaccgttgctgaaatgagtaattacacaccttgaaactgcagaaaggtttcttacttatgatgtgctttatcaaacaacgatagtgacatatgtagctcgtacgtaacgagtggtaaggatgctgtatgaggcatcaaagtcgattcgtcttataagaaaaatatttgctcatgtaatgtttgatttgtattgaataaatatctatattgaatgatgagattattggttatgcattgttacaatttctcgtattatgtgataattttactttacatgcctttcttgttgggtctttgtcactcacgggtacttcgtggtgcaggtaaatggaaggagaaagtggaccaactat

SEQ ID NO: 50761 - DNA, 588 bp, Cannabis sativa
aactaggggagtagtgatggcacttggcactatacaaaaaacagaagccatcttcctagctaattgtcctaagatcatctaaatagaaaaaaattcacattgttgtaataccctgtgcattgtagcccatcccttccggttgaacgtcgttgggggatgaatagtcttagaaataatctgaggcaattcttgtgggaaagacgaggcagagatgcaaaaatttgatgacgattcaccatcatcaacaataatttcaagcttaggcactaaaccaagctcaaggtaatacgcaattgtagtcttggcagagctccttctgctctgcgccctcttcagcttcctcaataggagcaagaattatagggatgatagaaaatggacatgctgctaagggttgtgctggctccactcgagatgaagtatgagttcctaagttaaaagaaaaatgttcgaagcaaggacaactacataccccagagagaggattgggggaataggaatgggctcgaaatctcaaaaactcgagaaaggatttatagataacaatgaaggattcaagggctacaaacctaaaaaaatgtttgaaga

SEQ ID NO: 50762 - DNA, 1065 bp, Cannabis sativa
ataaattaaacataacatttatacataagtagatttttttttatttattttttttttttttgaggaaaacgttctcaaccaccaaacacctaaagtaacagacactctccaaaagtgggggtagagatttattcaaaaatagcatcggctattaataagttttgaatacaagtaggattccttaactatcaaactacactttttacaacagtcaaagtaagtttggccaaagcatgtgcaactccattacaagatctatttattacaattcacaaaattaataacttagagcccattaccaaggtcaacaacatcatctaaaactagacccaaagaagtaataataaaaaacattgtttttcaatttaagtacaatattcaaataatcagactcaaataataatatttccatactcaagaaagatgcattggatcagcgccttctgaatagtcaaagcttcaacaactttaggaataaagtagccatccacagtacgccaactcgcaaaagctacaactatacccaagtgattaagaatcaccataaccaagccattacaattgcccaaagagctgataacagcatctatattgactttgagagaatcaagcgagagaggtttccattttgggaccatctgaaaagggcctatccgagacaccatcccaccagtaggacgttagtcgtctacaggggagccgtcgtcaaggcctgtttgttgtgaaacgtcccagataacacaagtccaatgcacaataagcacaagagtcagcacaacgtttttatggaccattttaagtcaccataaccaattcagtcaactcatttaaaaggggatcaataaccttgtgaatgaaattaagaaaattcacacgtcaaaaaataaacgcaaaaaaatactatttaaattattgttgactctaacttattcaaaaaaataaaaaaaaaaaaacaaacaaaaaacaaaaacaaaaacaaatgtgcaaaattgcattataactacaataaacatcattataataatgtattcaaaattttaggtttataattaatatagacttaat

SEQ ID NO: 50763 - DNA, 1371 bp, Cannabis sativa
cttggcatttgatagtgtagaacaatgagatactcatttatctccttcccgcatttgaagaatccatggctcaacagcctcatcctcaatatggttaatctcaatcttcgggttgacccctgctattcagaggcactctagcgtccccgtaagagctagagggttgccctggatcacatcacactctttagggcacctccgagcagccctaggctctgcttcaggctaagcatgatcaacttctagcacttcttcctcttgatcggacataggctccttagcccggctagcctcaagtttttcagcttcctcaacttgatgaactctcccccttgccataagttcggtaacgtggggatcagtcagaggtgccttgcgataagtttgcttcgccctctccaggttttaatgttgcttagcgtactggacaatagtcacagcaaccgctgctgtaggaagatctctaggcgcaaaagatgtccgtccaacaaacaatgtgtcaggcacaccctgtcggacaatgtacgtccaagacttaagcatgaactatctccacccttgatttcgttcctagatgaatctcccatagatctcaccacctattcttagaataatggtgatggtgaacttcaagtttcagagaaccactgctcgactcaaagtcactcaaagagctacccgacgagctctaaaaggaagaactagttgagtgatagtattcatacaaaagaaagagtaagtccccgtcgatcctgttgtcacctcccaaaaactcatgcgggttcatctatgtagaaagacaaagggaggtgaacaactggagatcacaaataagacaaggatgtaaacatgggataatagaccaatacttgtgagtaataacaaactagcccatgaaatgtcaagccatgaaccgaccaacttctggaaagttcaccaagaaccagccaggacagatccagcccttaaagggccagatagagttcctggaaatgaactaagtatcggccaagggtcttaagatgagaccaagaaccgaccaaggtctctaacaaacccgaagcaccggccaggttcctaaatgaatcaaaaattgtattttctaaaaatcaaagctctgttcttcgtgttcttcgaacctcaaagatcaaagtgtcaaaataaagctcaagattcgatatttttcatcaaggagttatacattatgcatccgaaagctattgaatggattataatgcataaaaactatcctaatacatgagattcaagaagttcataaaagtctaaactcaacaatggaagaagcctaaagaatgaaaaagagagagaaagcttcaaacttacccactaaaaagatgcaaggaggctcga

SEQ ID NO: 50764 - DNA, 1197 bp, Cannabis sativa
ttattcaattccaaacaaatacaagatacaaaatcgtcataacattatttatctaataatttaatatcaaatcttacatattttaatttaataaataatataaaatattgttaactcgtatagagtttaccaagcgacgaagaaaatcttgcttttctggcagttctcgtcggtggtgaaatcaaaatcatagacagcatagagttgtaacaaaacctcatcatatcaaactttatttccagtaaatggaagatgaaaattcaacactacaatacatcaaaacgaatgcctgaacagaatagaatacatattatgcaataataaataagaaagaaataataatatatggtatatgaaactaaaatattcttctatgttttgggttttaacaaagatctcaagtcataacaaaagacagtaaaactgaaatgaaaaaaaaaaaaaaaaaaagatttatgtgtattcattttgattcattatgaaagagactgaaatagcattcttgtttgaaacctcaccttttcattgactgaaagtgcagcacgaacaaattcgcttccatacgatgatgcactcacagcatccttgattttattaaatcaccttcaaatttacaacatgatgtaataaagtctacagagccaagtgatactttcagcaatttacaatctcccctttctatttgcaataacttgaaacgaatgttaaacacttgatgaataaataaataaataacatgtaaagtaagtcaagagaaacaatcatcatcataataataaatagagcagagtctaatggataaatgtcggcacatctatcaattatacttttatattggttgattgatatgtgttcattgccatatatatttagacagaaaaatggcacaagtgtcactattttgaaaaaccaacaagaatttgtgtgaatctttatagacttacctcaaggctattaagtgtagcaatgagaccttttccaggaaagtactcaccaccgttacattatatgtgtgtgttcctgctaatgactattataaaatcatcaaaggacagaaactattatttctactcatcttgagtttgacatttttgctgttaacatattcttgtgcaagaaatcaaaacgaagatatctcgttatatgctttaattgagcctttatggattctgagtaagattttgtatatgaagatct

SEQ ID NO: 50765 - DNA, 1156 bp, Cannabis sativa
gtcctatgcaatttgaatatttatatgtatttgttttaaaaacttagtatatatatatatatatatatatttacagaaattgggttggaattgaatggtgggtctaataagggttggtttggtacagctaaggaatgcagtttccacactttcaagcgaaggatttgtatctgttcatggtgacagtgtaaaaagagtataatttgaagaagaaagggaatcacaagagacaaacccaaatctgaaattatatttatgattattctataccaccgtattagcactaaaataccattcaaatccactttttttttttaactaattatttagttgagagatgtattagtttctgattttatttttatttttaaccgtagttttggatggcatgggcagactctaggtttactataatctttatgataaaattttgtgatgttgtaaatgcttttgttcttttagttatttatatctaattttactattttgaatcacaaattcacaattaagtacggatgccaaagtcgaactacataacttctgattttacatgacttggtctgagtgttaattttagtttaagtggtaatattgctatttgacattctatatggcatttcaattaaaatatggtgtttgtgaccataaagaagaaacttggcacttgatgtatgggcataattaaaggagaaatttacaaaaatactaaaatttgggtaaattatcacaaaaatactgttacatgaattttttttcaaaaatactatatttttataaaataatagtggaatacaaaacagaatagcataaaagtaaaaaagtttgattatccttaattaccatttatttttagattgattaggatttttacttttaaactttaacatatatcaaaataatgttctttgaatattttatattattaattttttaaaaaaattatttagatttttgaatttaaggattttttgtctaacatatatactattttgcaataaatcttagcacatagggtgttcaatgattattaattatcaaatattgaatatttagttttcagtatatataaatatatattatggtggattgaagggctacagatttatgtggtgggatttgacaggccaggctatggagaaagtgacccggatcctaa

SEQ ID NO: 50766 - DNA, 1466 bp, Cannabis sativa
  modified_base (1371)..(1371): a, c, t, g, unknown or other
  modified_base (1416)..(1420): a, c, t, g, unknown or other
tctcttttaaatagattaattatataaacgatgatagatattgtttcttgagattttcgaaaaccaaatataataaagatgaaaataaaaaagaaaatgagacgaggtttttatgttattggggtatttgcgagttttagtttacaagtcactatcattaagctcttagttattgagtttacaatgtattttttagtttttgaacattagaagttcaaaccctttgtatggaggaataatactatatttataggcatatttccttgataggtcggactaatctagactcattaggcttatttgggtgtaaaagcccattgttggggtaaacacaattatttattagtataatttgagctattaggtcgggtaggtgaagctcaagttgagttgagttgccttccgtacgcggtcatgctgttaagagtgacaggtgaagcgtgagccgttgtcgggagaaaggaatgtaagaataatggtgtttactgaaatttttggaaaccattaaaatatttatgaatattaaagaaattgttcgaaaataaagaaatcacaatacggtttttaagtgcttagatattaatgagccttagtcgatgagttgatattattatgataagactcgaaaagtcttatgattgaaagaagtgtttgaatcatagatttttcctgagcacctaaggaatgaaattctaaccctttgcttgaatgggtcttcttatatttatagttttagggttcttattcgttagaccttgcccactgatggggtatatttatagctcagttttgcaagtaccaaaatcaattaattggcaagcatctattacctccctgaaatcctccattgccctggcactcttcattcggccaccaaccttctccgataaactaacgatctcattaaagtccctaatgcatagccacggtccactagtctcacccgcaatattttttaacaactcccatgaaaacttcttttattgtttatccggatgcccataaaagcaagttaaattccatggaacaaattctgccccagtaaccacagccgcaatgtgacccgaggaactagaatcaactctaatatccaactcatccttccacatgagcatcaaactgccactcaaccccaccagatcaaccacccaaaactttgaatattgtaacacagcacataacctctccgcttgatacctcactaacttactctccatcagaaaaataatactcgggttaaaatcccgaacatgggactatagagcacgtaatgtccaaggatacccaatcccttgcacattccagcttagcagatacatcatgctcggcggccctgctctacagggctctgttggattttatgccctaaanaaaactcatttcaaaataatcagattacttattaataaagatcannnnnaacatttaatgttgcatggttctcatgatttatttcatgattattt

SEQ ID NO: 50767 - DNA, 1186 bp, Cannabis sativa
taatatttcttaattattacttttattatttttggggggctgaggaggacattttattatatattatttatgtttctataaatactataaaagtcacggtgttgtactttcttgtatattaatatattattatatgtctaattaaatattaaattttatataatttaatgtaataatttttaacggagcattactattatgcatcagtggtgccttgcactttctcgacatgttacgttgcgatttactagcgatacttcctaaaaattattatattaaactatgcgggatccaaaattagttgaaccaataacgatactgacacataggaaggtgctagacattattagtgccctttatcatttctctttttaaagaatctcgctacttagatatatttaaaggtgttagatagcactgtccaataataatactcttaatcaatatattatattgactttgatgtagtgtttatagtactaaattattttttttttttttgataattatactaaattatttatttggttataaagaatgagcttggaaaataggaagctaaataagaataaatgcaatacaaaataaaataatgtaaatatgtagagtcaatgtgagtgtcttaaatgtcgtcaaagaaaagttagaagagaagaccaagactagtagttgcgtgttaacagcgcggaatgtgactgaaaagaaaataaataaataaataaataaataaggaaacctaaaaagtgagtgcaattttttcaaacaacaattatatagctaccattataatttggcacccaacaatatactaatctccaatttgattattctttagaaattttgaatataatttattaaattaaaatgacactattttcaaaaaaaaaaaaaatcaaaatgacactacacaaaatcttacttttagttataataaatttgtgattaaaagtgaaaaaattgtgattaattataaattattatttttatattaaattataatttgttgtgtatttttaatcacaattaatagttattgtaactaaaattaaattagtaacaacttacaattaaatactatattttagtaacaagtaatattttgttgtgattaaaagtcacatttagttgtcactaagtagtaatttttttttgtagtgtgagattactttgttaaaaaataataata

SEQ ID NO: 50768 - DNA, 865 bp, Cannabis sativa
tctctcagtaaatattacaaagggaataataattctctaacaatctgccaaacaatcatttaaagcagctcagctaatgattgcttcagtgtttattcattttgaaagttgttaattgtactttaaaaaaataataagactagttgtaacatgagaagtaataataatatagccacaaacaattatcagatatcacattattcatcaaattcacataatgcttacaatggaaacaattattggccaaaaccagagaaaatccttttctttcttttttttcctatcttttaacttttgttcttttgctttttgtattcacccaagttttggtttttcaagactaatagaattttaaaaagtggagaaacgtattccaataattgcaaatttaagttagaaaaattgataccataaccattacccgataattactttattcttcttgtttctttctcattactctttttcaggaacacaatcaaagctatttttgaactccaaacaccaagtggatcaaagtttcaacaagtcaaacaacaatagtacaagaagtttctgtaataactctagccgccaagatctgaatttttataacacgagttacacacaaaatcacaaatacatatcatcaagttcagcaacaaacaaaatatgcaagagcgattaattctaataattaaccaagagttacacacagattacaagacacaaactaagaatggtgatacacttagtcacttagtttgtcctgagtctttattgatcaatcagcaagaacagtacagacatttgaagtacagggaatcaaaagtttcgtttacatcatatctcacatgagagctcttgatcaaacacacaagacact

SEQ ID NO: 50769 - DNA, 857 bp, Cannabis sativa
  modified_base (423)..(435): a, c, t, g, unknown or other
tatcccataccacctggaagactaaaggctcacgcagccaggtatttttgaacctaaattgacaaactggaacaaagaaattctggacagtaggctgaagcaataacaagcagtggtctgaggtagaaatttcgagattagttaactgagtaggaccaataatggcttaccaaggctcggtcaagatggactcaatttgatgtacctcgacctctctcccatgtaaacggatagccaagaagatcgagatcaacaagattgcagtcaatgaacatttagttaaagctattgactaacgcttaagggtagttgttatcatctcacttatccgcctgactagtaacgttattcaaattccctataatacaccaagggagtgttgatgtttatttcagagtttcgaataaggttccatgtttggtnnnnnnnnnnnnngttgggctcaccataaaggcccgttagtctccatgggattgaactagactcgataatttgaatgtcaaagaaattaaatgaaaagtttagcaaatgggcttcaacactattcttctaaagcatggtaatacccccactatgaccccttgcatccacaaattagaggccttcaaagctgaacttcacacgtagcctttccaaaacatcaccatgccttaaaagtttcacaaagaattaaaaattgggtttcttttagatcacaagattcacaaggacttaaaaaacccatgggttcccaagcccacgctaattctagcttagtactcatggttgtgggcccaccaaatagttatttccatgcacaacaaaaatactaccatcttcttccataatttcaaaattaagcccacaagaaatagatg

SEQ ID NO: 50770 - DNA, 1285 bp, Cannabis sativa
acactatgaataatgttcttgacaagttctgattatctccaacctttcccaccaagattatggctattataatctgcttgatatagaaaacaaagaacaaagttcagaacaaaaaagaaatcatggtaagaaataacatactgaaatttgattctttaagttctttcgaagatttacctggcatataagcattacaagtccaccactaataagtagaactctgcggccaaatctgtcaactactgtcatagatagcattgttgaaagaacaagagttgctccaattatgactgaagaatacaagagagactttctttcgtatcccatgtttaaaaacaagagtgatgtgtaataaagcagagaatttatgcctgtaaggctttgaaacataggcatgaagattgccaagacaagttgcggcctgttctttctccaaaaaatgcttctaaaaggagtcttaactgtactagcaagttcacttgcagcaaccatgtcttgaaactctgcctctacttgttcagttcctctgagtttctccaacacttctctccctttctctttcgatcctcggtgaactaagctattgggtgtttcagtaaggaatattgctgtcactatcatcaacaacgcgagtgctgcaacaaaaccgaatgagactgtatagcccttgtagatatccaaactccacggttcgaggtatctagctgcatagttgacaatgtttgttgtcaacattccaatggaaatcgctaactgaaacatgaagtttgagcctcctcggaaatgtgttggggctatctctgatagatacaaaggaattgccttaacacaatcaagaaaaaaggattattttagtttagtttggaataatatctctaatatgtatcatacaaagataataagataataaaatacctgagctccaaaaccaattcctagaccaagcaagacttggcctatgataatagtagaagttatttttgtggaggcaagtaatagagctgctgagacacaaaaaatggctgcactgactattatactctttttatgaccatattttcttgtaataggagaagctatgaatgcagctcctataccagggaggtatactatcaagaacactccaaatgtcattcttgcatcatacttgcagtaatattcgaaattgttttcttttatgtatatgtattcaccgaacatttcatagtatccttctgttgctgtaaccaaacctgcttatataatgttagagagtcggaaagataatagaatatatgaaaggaac

SEQ ID NO: 50771 - DNA, 1135 bp, Cannabis sativa
atctagaccacataaatttgacttatttatttgatgacccaacacacatttcatatatacaattgtgaccccaataaatttctaacatattgatcttttaaagttgtacgatgttaaattgtctaatgaatgaacatcaactacggatgaatctcattaaaaataataaccatgtagaaccaaaaatggagatcgaatttcttatattaaattttattatttttttaaaaaatgtatttttttatttactatttattttaattaattattactgaaaactacttaatataagttgatctaaaattacttaaaaattaatttttaattttaatttaattttcaaataaaattttaaaattctaatctataaaaaaatatatatttcgaaataataattaaaataaaataaaataaatatctgtaaatattcatatttaagttcaaaaataattaaattcttaacataaaaataattttcttatttcattaaatatattaaaataaaatttgttaattaaatatcttcaataaatcaacttaataattaatttatattaaaaaaaattaatttaaattggtttaaaattaatcaaaaaatcaatttttaacttaaatatatttttctaataaaatcaaattaattaattatcaacagtaaatcaagttaattattaattttcttatttaattaatatctaaaaaatacatatagattttctagaaatttactatcttgaatttattccattaaactaagtttatttttcttaaattaattttaaaataatctaataaaaactttatttcacatattttaaaattaagtatgttgctaataaatttgaattaaattaaactaatataactagtcttatacaattattttaataagacaaatgagccttcacagttggggttgtgtgagggagagctggattcgctatgtgatacccactactatagttccataactctcacacaaggccaaaaataggaatttaacctttaaataaataattattattaattaaataagtcccatgctaattgagtctaaataaaattatcaaagtgatctttttatgttagcaacctagtccatttgacttttcaaaaaattaaatgggctcctata

SEQ ID NO: 50772 - DNA, 1130 bp, Cannabis sativa
atgtaaaaatataatagaaaagatgcataaattatagtagtttagtaggagctcgagctcgacttgtttaatcaacttttgaaagagatctcttgctctgtattttattattcatatcacatcagtccttctccaagtataaaatatatgcaagtatgtaaaaatataatagaaaagatacataaattatagtagtttagcaggagttcgagctcgacttgtttaatcaatttttgaaagagatctcttgctctgtattttattattcatatcagatcagccctcccccttttgaatagagttggaggtacctacttactacttataggtagtaggtgattgttacaaattgtggtcattatgatagactattacaaacttacaaccataattatcatattgattacatgagttataaagtaaatgtaagctcactttaatggtactgaaatatttggctattattttagttgattgatagcgccttttcattgacattgctggtcttaataccgcaaggtccctttattgatatcgcaatctctccttaacgaaatccttctcgcggggaggaaaattatcctattaatagaatgcaaggaaagtttaatatttgggttaagttgaaagaggcttttgaattttgataaagataaataagcaagcagccatgcaagtaactgagtccaaatccctcaccagtatatggcactagtaattttggaaaatttgtggctgtagcttactttcttgagtctttttcattgtcattttgtctcaatctcgatctcagtagttacactaacatggggctcttaaaggcagtccatccacgttatatctgccatgctgctagaagtgccaaacatggctactaacatctaagatggaaagcacaaggacataagtaggagctttctgcggatgtttgagttgtttaagtgagaggcacatatgcacagaaccccaacaaaatggttgtcaagagaccatgcggtggctgcaatcaggagccttcttaaaggagactacaagaaaacttttcataacatcatcaagtatacctgcaagctctgaggacattttatagatattgaaaagcaaaatcaaaatcaaggaagatgctttga

SEQ ID NO: 50773 - DNA, 3044 bp, Cannabis sativa
  modified_base (3014)..(3018): a, c, t, g, unknown or other
attttgaacatgtgttcttgataaacttaacaactgatgttattgatattattggttctcgttaacaaagttagtacatcatttgttggttattaatctcgaatatgtgaactgataaaatatacatatatgaagttggttatttccaggttatctctaaaatatgtaacttaaagatatatagacgcaattgggagtttagatatgatgtataaaccatgaattctcgaatttagtgattaattattcaaaaaattattttaaaatgggtgaaagtttaatgtttataaaataatagagttatattataataaaatgacttaattattgaaaaaattataatagaaacttaaatataaaaataagttattaatattaattgctataaatggtcatattaaatattcaaattaaaaattaaatattttaaaaaattagttaattataattaatttaattaataaatttttatttgttggtaatctgctattacatgtcaacaaaaatataattatcatggttacaataaaaatataacatgttatcttgattgcctacctaacgtggcatgttcacgtggctgacatcaatgccgcgttggagtacaactcgccaacaagaaggccaagccatctactcagcccttcaaccaacaaggggtccgagtacttaggagggacgatgaaatgacgaactagccacctcaaggggattggccggccacccctagtcgaccctatggccagcataggccggccagcttctggacatcgcttggccgaccagcatgcactctgcaggtgcatggccaacaagcctttggtctgataggatcgcggtgcgtagctttcatatgtggacaacaagctagaccatgaattaggccttaacaacccacgaaaatagagggaaatatctatttttagggacattttagtcatttgtattttattaatttaatatgtaaattatggctttattcacctatttttaaggaattttagggatgtaagctctcgtatataaagagccttagtcaaaccctaaaaccctaaatctgaagtctcaaacgttaagccttatgctctaagtctgaaaactcatctctctctctctctctctcacatgcctactgttatactcatacttgagatttgccaaatctgattcccacatagtaatcctaagagagctacttcagaacccgttgctaagtgatctaagtagtaaaatctctcgatatcaatacaactataaggggagtaggtcattacccgctaactaagggggcctaacctctataaaatcctgtgtctatttattttattgttctaattgtgtaaacgtggcaagcatcaacattaaattcgactttgctgtcggttggccaaatttgaggtcaacaaaaggtaacaataattcctaatgctattacgattaagaaaaaattgtagaactaaaaggaaaagataaatgataagcaaaaggccaaaagtcttttcacttcgtcatttctttctctaattttgaatgccacatactaataggattaggattcaaatgcaattagacctaatgccataatgaaaaataagaaaatttcaagtttttcaaagaaaaagataaaagctaagtgaaaaaagaaagataagttttttcctctttgtctttgttatttatttttcaaaattcccaaggactaagaaaaagtgttcaaagttctaacaaatttgagatttctttaagaatagatacaagtgcttaagaatgtcaaaattgatgcccatctggtagtttcaagcgaaacgggctcggttcacatcaacaagtcaactccaaacaagtataaagttgacttaggggaaatgttaactcgaaaactttccctggtgatgtggacataaatcttttaaatatggcatgaaggatgacatcacgaagttgagtagacccaagttatagtagtcgacctgggaagggaacctagccctgcgcccaggttgactttgggatctccagaatggaacttcataattcaataacttgaatacaacccactatgattcagtagtctgtaccacgaagacatggatcaaccggatctaaggcttgcgagctgaaattacatgaacctgcaaaccggaacccaacctgggtacctagggtttcactcgacacccaagttaacatcttcaactagggttttagtttctaggaccgccttagtgcaaaagggtcaaaacttgcattgagacatcaactcgacataccacatccatatttgatgcatccaaattagaatcggagaaagtttatttttgagcacccaggacctcggggcccgagcacccaacgctcaagttgacaatctgtcaatctgagcaccttccaagtacttgatcagaaatttgacttttgcatcttcttcattttcattaaaaatagggaaatgtgtcctttcgcagaagaaacaacatttcatggctacaaatattgggcctcatgccaaggttgaaacttggggctaaccttgtgtccaagttgacatttttttaaccttatccatttcaaatggattttttcaagaattattttgagcatcatcttcattttcagaaaatatttagattaactatttatgaggaccaaacaaaatttttggagggccaaaactgggacccaacacccatgttgacacttggggctaggcctaggggctaggttgacaaattttcgacatgcattatttctgatcaagttaagaaaaaagtgctttaggcatgttttcagtcataaaaaataataaagattcaagcagacttggggagaaaaccacaaacctgggcccttaaaaatagggcccaacgcccaagttgacttggtgctgggcgcagtgcccaggtggacaatcaacgtgggacgctgccttcaattagtcaaatgccaaaatagatgtgaccgttgaatctggaatggtcacaaacggtgtaggagactgttgggttttatgcccnnnnnaaaactctatttcaatgtaatccaga

SEQ ID NO: 50774 - DNA, 931 bp, Cannabis sativa
agattgtatttttctaatggagacaaaagtaagtaaggaaaagatggaggatttgggccgtgccctgggattttcaggaggcgtttgtataggtgcacaaggtttggcaggtggttcttgcttattatggaatagaaatattaaccttcatatcaattatgcgtctgaagggtactatgaagctacgatttgggactctaattctcagtttcagtggaagttggtggcagtttatgggactccttatgctagagaaaaagagtttttttggaactgctaggaggcagagatcaaccttttccagctaccatgggtggttataggtgatttgaactgtattgggagcaaggaagaaaagattggaggctctaaagtgacaatggctgatttgcgatggttgagaaattttcaggataatacgggttgtgtggatcttcggtatattggtaacaaatttacttggcagaacaagagatttaatggtggtctaattagggaaaggttggatagagctctgtgctctggagattggatgaataactacgacttttcgggagttcttaatcttcctatttctatatcggaccatgctcctattatattggatacacatttgtttgctgccaaagggtttatcccttttcgattctttgaagcttggacgtgggaaagctcttgtagggaggaagttgtcaaagcttggaactacccgagtaatgaagcctcaaaggccttggttaggaatgttagtaacacaaggaaagccctccaagtttggaagaaaaagcttcaaggagtctctgagaaagatatcaaaggaatggagagaagacttgaatggattcaacaacagcccatctctgtcgagttacaaaaagaagaagcattgattcaagaccaattagtaatctcttggtctaaacaagaaagt

SEQ ID NO: 50775 - DNA, 2268 bp, Cannabis sativa
gcactatcccatccaccaattttcacatcttcacacttgtttttggccaaattatagctggatgaacaattggtttggtttggtggtaaaactacattctcaaatgactaaactaaagttgcaccacatggtgaaattgaattcattcccttgaataaatacgagcagaattggaatattcttatatatcttttttcacatgcactatgttaatttctcattggctcttgtaattttcaataccgaacagaaaactgtctgtctttgacaattgggaaatggggtaaagaatgatttttcatgggatttgaactcttattcattaagtatacataagatgcaactttgagacttaggtttgggccttaagagtcacctagttttgtgtgcatgggtgaggactcacacaccggactaccacacacgtacacatgtgatagtgcaaagagtccattttaatggagtactctcactatagaagtggttgaagaaaggatttagatgatgcttatataaatttatcatttgatcttctttaagactttggattagtattccttccttattatgttaatggagtactctcactactctgaggttacattttaataggtgttcaactcaacaaaatagtgttgttttttataaaataaagaatgtgtattgatcacttaaatatattggattttatgatgaagcttgtttgaagaagagttgtaaatgtaataagattacaaaacaaacttgggattatgatattgattaaggtgaatgggatagcaatttaattagtgacaggtgtattggtgtggtctgcttgtaattttcaatactcaaacacaaaatagtcttgtctttgacaatcaaaatccagcttccttgtgtcttgtttgaatctctccataacaaatcaatatctgtcaaccttgatacaaacattataaaaagaaaacatttgattcagtccaaataataattagtaaactgaaatctaaataatagaaaagactagttagttaattgcctctttctatcccatttgtcatagtttctcacatttacatgttcttgtgatttcttcccatatttcattgcttcaattgtcagccaaggcaatcgatctgatcaacgcagagcatttaattgatatgtttctcatccaatctcacttttttgatgtgttgaatctttggccaatcttctcctcctttctcacaccgttgctttaccaaaggacatctctctatagttaaagaataaagggaagtagggagcccttcttctggcaagcactgaagcctttcacaatctcttatagtcaatgatataagggatgtgagttgttcaaaggcctttccatttagggtttctagcttatgacattcccaaatgtcaagttctctcagagtggttggaagcccttgcccctcatatggaaaagaatcatcttcccaaccgtcaatatataatgattccaaagaggagagtctatgcagatcccattgcttatggttctcaatcagccttttggaactcctacatataagtaactttactttggagtgtgatccccaatctaaaagcgattccaacacaggacagtgttgtatacttatctcgacaagagagggaattgtgcctgtaacggtctgttgagtagttctcgagatcaaacccaccatttgctcacaagtcctgataaccaaagtttccaaggatggaagataacaactcggtagcccaacatcaagctttggacaattcttcagataaagttttttaagaagagggaataatatttgaccttcttcaagaatggtttcactactaaatgaccattctttccactccaacatattggaaatagttaattctactagacaactaaagagaggacctttgtcacgaggagtctcattacctattgagatcacattgtcgcatccatcaattgtaagatctttgagaaatggtagttgcccaagtggaggtaaaataaaacaatttttacaattgacaaacttgagtgattgtagcttagaaaatgcaaagtctccaatccactctgacagtattgtacctctgtaaccttcaatcacaagatgctccaagtttccatgtggtcgaagtgcatcaagtatagtgttttctttctctttttgtgaattagcaaccacaccaccattatttttccacctcaaagtcagtttggaaacacacttcttatccttcaaattagcctctgaagcttctcttgcatccttgata

SEQ ID NO: 50776 - DNA, 933 bp, Cannabis sativa
tatttttccactcttatatagtacgtttagataaatttcaataaattaattgatatatatttcattcatgacctatattataataaaatattaaatgtttatgtttgttttacttaatccatttgaagggaaatagagaaactttaaaaacatatttaaaacactttaaagcactcatattatcaaatgcttttattaaaatagagaacctgttaaaatattgaactaattagactaatgctcaaaattcattatatatttaaagtttctttaaaatttattatattttgtattctatatttatagaatactatttattggtcaaaatatattttactaattattttaaattttaatatgagaagcattaattacaacctcttagtcaacctccacacctaaaattacatgtcgaaataattctttgtaaaaatttttatcataacaatattcgttatagttacaattgaagcaatgggtagtattctcaaaggagaatattagttcttcgataagaagtcactaatcatgaaagcttgcgattcagaagtctacttcaccaaggaagaggttaggaaagtgtcagtttaggttcaacttagacaattagagctgaaatattagggagaacgatccatgacaaaaattgtaagtacagttgggtgaatgatcaagcaacaatgaacagggacaaacttgagtttgccatggtttttaatagagataaatgtgatgaatgattttctaaatcatctcaaatttgaagatgagaaggggaagaaaggttttatggatgtctcttatgagtaaaaacccgagaaatgttatatttgcaaatgtattggacactccagtattgcttgcaaaattataaaaatggtggaaaaagttaagacaatgtggaaactcaaaatggtagcttaaagtataaac

SEQ ID NO: 50777 - DNA, 1182 bp, Cannabis sativa
ttaacaaaacacaaggtccaattggtaacttttgtaaaacagagggtccaaaatggtatttacccttatttataatattgcacatataattcataatctaataataattactaattagttactgatatctatgtttaattatgtggtcattataattattctctcattaaaatgattttttctttaaaatttaacctgaacaactctgaatgttgtgtactcatattatactctaactcctaagtagcttcctcaactttgatatttctctaaagtactttgactagtgtaattgtcttattttcattgatgataaatataaaaaatattttggatgctattacaatacatccttaaattaaagagtacactgatgcatttttaactgtttcgtcattttgaaaaaaaaaatagtctaatcttttttcatgatcgtgtacgttatagttatttaagatatcttgtaaaatttgagaaatttgaaatagtttataatatagaaagttgtgttcaaacagtctattttagacaagtataaaataaacaagtcacgcttacagcagactatttgaatcatcttttcggcatgataaattttttttgaatttttcataattttacaggatgtcttagctaactataactaaggccggccctaagcataggcgggctagacccgcgcctaaggcctattcattggcccaaataaaaaaaattactttttaaaaaatatgcatatttttttaataatttttaaaaatatcatttatatttatagtaagggctaatttttttttgcctatgacccatttcaattcaggattggctgattataacgtacacgattataataaaattagaataaaacttttgtctggaggaggccaaaacaaataaaaagtgtattagtatatcaaagtgtattagtatattttgttaagaggagaaacaacaaattttctaaatattattgtttttttaatcattagcacatttggtgcttaattagcctcaataccaagatgtattgaattttattttttaatcatcccaatttccaaccaccccctcaacactaaaccaactttagtgacttttatatttctattttttttttgtcaggtctattttcttaattttcatttccacataaaagccaaaaaatattcttaataatgtttc

SEQ ID NO: 50778 - DNA, 1073 bp, Cannabis sativa
aaaaaaaaaaaaaactgaaaaaacttaattaatgactaatttatcatttcagttagaaaattaacttagaatagaccttaattatgtgatttattagtcttaaaataagacaataaacacttctaataattttataacgcaatctattgctaaaaaaatgtaaaatgcaagatttattagtacaaagataaaaatactttaaagttatggtataataattattaaaatataacaaaataaaatattaaattcaaatcaaatgttttaacgtaccaaatgtcaagtagggatagagaatttagaaataattaacagtcttagaacatatgaatttaacaataatttttattttatttgctcattaggtataaatgttaaaatggtattgtacttcacatactatgatgctaaataaattttagtagttgcctataaatgtcatattaaggctatagcaagttttagaattattcattttgatgatttaaggaagattacttcatgatcctaaaattacgcatatacatttcataaaaaagtttccaatcaatatttaattacatcttacattttattacgaaattagttacttttcacgtattgacatttgacagtgtaatatctatatctatatgtatataaaggaggcttttgaagaggtgaggtgacattttctcctttcatttttacaatttctctaatttgagatttttctaaactttttaattgaaaatactaataaaaagaaaagtaaccgcactattgatagtaatgactaataaaaaggctagcctaaatatcatttaattcatattaatatgttagtataaaaaaagaaatgtaacaaccttattttaatacaatttactatctaatttattaaaaaagagcaaatataatgtgtcattgtcgtacataatagtactactctttcatattctttttatcaattaattattaataaattactaattaattaaaattaaaaatcaatcaatatcaatatctatatctatatatatatctatatactaggaaaaaaactacgtgtgaggcacgtatactaaatttat

SEQ ID NO: 50779 - DNA, 1466 bp, Cannabis sativa
tgattatttctttccccacaattctttatagggtcttcgtgttggtgtcaacttggccctggcgatcgctttgcacaacatccccgaggtacagaaagtgaattgctcactgttttatgacacatcaaactgtgtttctttctctttaacctcttgtttttcttcagggcgttgcggttgcacttccagtttactttgcaactcaaaggtgagtttatgtattttgtaagctgagttgcattattagttatcgatacactaatcataggttggtatctccctagaaagtatttcactttccaaaaatgtgttttgaggttgttgatatgttcattgtttttggtttgaattgtgatattataatctgtttttacaataaactaagatttacttatttggtaatctttcacagcaaatggcaggcattcaaattggcaacactttctggttttgctgaacctttgggtgttataattgtgggtaggtgaaattctttttgaatcgaagcaaggctgatccttactcggggcgttctataattgtttcctttacttgcagcctatctattcccaagcaacttgaatcccgaaattcttgaaggtcttcttggagcaggttagtgatgatgataagacttgctttaattactaacacataaacatgagatagatgcttggattttcttacaatttttctctaacagttggtggagtgatggcttttctaactctgcatgagatgcttccattggcgtttgaatatgcggggcaaaagcaatctataaaggcggtgttcttgggaatggctttcatgtcagcaaggtaagaaaacataatttccatcctttgaaagaacgagatttcaatatagtttgagggttctcattgtgtgttattttctattttttcgggtttttgcagcttatattttcttgaaatcagcttgcctaaggagatgagcttgtagagtaaatggtcaatttgtatcaggattctgcattgaataaacttacaattatagccaactttcttaattgattttattaagatatgattcaacaccaaacttgattttttttcttttttttttttactttgcactttttatttctaattttctatcttaatcttgtaaataaataaagaatatggaccttgttgtgcatgttttataccttaccaaacaagcttaatactccaactagtaaatattatataagaacaattgtcaaaactatttttatttatttgaaaaagaaaaagaagagtggactttattaaagtaaatagatgataaaaaatagttatatttaatctccctattctgtctagtttactaggtcctttttccattgggagatctagtttactaattagaaagcttaattagtaattattatggaatatatcttaaaacacttttacaatttagaacatcttaattaatgatgttgttacacccttgtt

SEQ ID NO: 50780 - DNA, 980 bp, Cannabis sativa
  modified_base (950)..(954): a, c, t, g, unknown or other
atataaataatagttctaatagttggacaaaccatgataaaagttcaataccaacatccaatgctcaataccataatgggacaacttcctcaacagatccttcaaatattctcaagcatcatacaatgattttccatcattctgacaaaagttattaaagtctcccctcaatttagcaacttttgaaggagggaagaaatttgataagaacttttgtaccaaatattaccaagtaacaatagagttgggtcgtagaaaattaagccaaatttttgctctttcccccagaaagaatgtgaaaagtctaagtttaattgcatcatcaatcagtctattgtatttgaaagtaccacacaactctaggaaattagttaagtgagttcgatgatcttcagtaggcaaaccactaaattgaagagtggactacaccatttgtaaaattgctggcttgatgtcaaaattgttgacttcaatagctggtggtcttatacagttttgtacccccatgagaggacagtacatagtctcttaggcttcttttagcatgattttgagcctgacccccttctacgactttagaaattagaacattcctgtcatttccatcattctgcgccatctccatagatttttcgactaacctcttgttctttctattctatttacaagatttctgtatctcaagattcaaaggaacaaggctatctactcatcttctgatatacatataacaaattcacttgaaattgacaaaaagtcgagcaacaaaacaagttagaaacaagagaaaacaaagatcaaattataataaaaattaattagactcatattgataattttcagtccctaataatgacactaaaaacttattgcgaaaattaaagttatgcaagtgcatattaggggtgtacatcaaaccgctcaaaccgcccgcaccacaccgcaccgcnnnnnaaatgcggtttgaaattcttcgcggt

SEQ ID NO: 50781 - DNA, 1461 bp, Cannabis sativa
tgcagtaacacttttttgttgccatacgacatcatttcgggcgttccaaatggcccaacaaaggaccgggagaagcagttttttttctgcatcaacagcagcgaaactggcagtaaaccagtccagaaaattctctggtgcagctgctaaaattagtattttcatttagtttgaaaggaattagattttatattattatatgtaaacgatatatgtatatatgaaaaataaaaataaaattttactctttttttttcttaaatttaatggatttaattataaatataaatataaaataaaacaataaatatatataaaatagacacaaccagtgcaattcaacatttaataaatattggatcgattgaatgattaaaattaatcggatcggattaaatgataaaatctaatatacaatatataattagatcaaatttaaataaacttaaaaatattgaatgtgtccaaataaacattcctaacaataataataaaagaaaaatacttaccagcaatcttagactttttcttcttcataattttgcacccctttccatgtcgatcaatactgcacttcgcagctatatgaataaatagaaaaggagttataattagtgtggtggcattattgtattatattattaaagagaaatcatataagagtaatagtattttccctctaattataaatctggtggaattttaacttttttttcttattatgttatgaaaattatcatcaagctataaaaatcttaataaatgtccaattatattatattctactttttttttttatataaaaagaaaattatttaattatgtaattacaggccacatacatagttgctccaatccatttatttatttataaggctagctaaaatattttaatacaattgattcacactaaatatataaatattagctttattataaatatatactcagaatttgtgaacagtgtgctatttatacataaatgttttgtcaattctaactacgccaaattagctagtgtcacattaaagccatatcaacataaattgttgagaaaaatagaatgtaaccaaaaaaagatgtttgcaagttttccaaaaaaaaaaaaaaagataaagaaaaagatgtttgcaacaatttctgtagttaagactacaagaaattcagcattaaattaaattttatttattcatcattttctcttaggcaaatttgattttctatactaattaaatttatttttttttaaaccaatacattttacactacaaaaaatatgccaattttttgaaaactccaaaaataccccctcatgaattaaactctttctctctcctcccctctcagccgactctctcaactcaccaacccatcacccacagcacccaccaccctcacccacgacagccaccaccctcacccacgagcaacccacaccaccctcacccacgaaaaccccaa

SEQ ID NO: 50782 - DNA, 637 bp, Cannabis sativa
tattccactttgctaacatcttcctggtattcccaagcttgtacaccaattgaaagcttttacactcccccaccgtaatattccaagcttctttcactacatccttacacgcaagatcccgattccaggcttccaaataccgaaacgggcgataggaaccttctctcaccagcaagagatctaacaagacaggcgcgtgatcagaatccttaatcggaaggaccttgaccccaaccttaggaaagtcgataatccaatccgagctactaaccacacgatcgagacgttccttgacgagattagagaatttcctcttattggaccaggtaaaaaaattccccaccgaacccagatcaattccaccagagatcataaggaaatcagacaaatcagagaagtcaccttgagagcacaccactcccccaaatttctcctgagaattagtcaaggaattgagatcaccaatcagcgcccacggtccctgagaagaactaaccgaaagagcaagctcttcccagaagattttcctatccggttttgaagggggaccataaacaaagaaacccaaccatttagcacatctcagaatgttcgaaaaagacacagaaatcaaatgttgttgaatgtcaaccacctc

SEQ ID NO: 50783 - DNA, 1658 bp, Cannabis sativa
tgtaataagtcgataacctaaggcatgcaaattgggttattggggttattgggtcatctggaccagctcgcagagtaaagaatcaacccttactattcgcaggaggatcttggtagtcttcgcgtatatctcagtatatgccagtcttgaaccgatcctcggtcctactttgtgcgaactatacgaatgcaagtagactctgtcaagatcacatcatccagttgagtctagttcaagcaaggtttacactcaaaaggtctctcactgacatctagctctcctcgaggagagtgaatccacgtgtcatttttataggagtctggtctcgagtttctaggtgagaaattctcactataacaccttctttaatgcaactctaggaagctttatttggaagagcatttttaaaactcaagccttgattaaagcttgagcccattgggcggtcggttgggtctagttcaaatataaatattctaagggatcaatggcttcttgatgcctcttttccatttattacctcatctttaattggtattgataattgctcagttttagatcttatggtggcgggttcaagagcttgggatttggaaatcattgcagatttgtttaatgagagagatcaagaattcatcttctatatttatcttagcccttcagttgatgcagaccgctggtactagtcttttgatattcatgggagtatttttattcaattaaggaagcttataagtattttttataaggattatgttctttcaagtaatgatgaggtatttttgtgtaaaatttcttggagtttgacggtttctcctaaagtcctttagtttttatggcaagcattaaattgggtattttgtagtagtggaggtcgaacttctataaaaatattgtggctcattatttacatgatcttattgtgtatacgtggtgatatcagtcataattacgattccgctatcagttggccaaatttgagatcaacaggaataataatgatttattttgtttattttattagaaaacgtaattagaatgcttaaattatctaaattgtcctttataataaattacaatatatgatagttattttgtaagacatattttaaaatacaaaattattattgtatattttaatattaaaaaataaaataaatattaaataaaaatcattacctttacattctttaaaaaaatatcgggagaattattcattttcttttattatttaacatccccttttaattgtaataatataagtaagtaaatataaataaatgtctacttatcattaatttttattatttattaataaatatgctataatagtccattacaacaagagacaaagaagttgaatgattttttattattattaattttttttttttaatttcatcccaagcacaatgctaagcacacactaagccaaacattccctctagagacacaacacatgaacacgtataaaacaaaacaattacattgaaactagcaaatgaatactaaaaaaacatacggcacacataaaacaaaacaaatataatcattctaacaacaaaatgttagtatgacaactcacaaataacaagcaccaacaatgaacataatagatcaaacaacaaaccacacaatatgaaaatatactaaagtat

SEQ ID NO: 50784 - DNA, 3136 bp, Cannabis sativa
aatcctaaatacagagaataaacacattccaacagcaactatacacatttcaataacacaatatatatagacaagaataaaaaaatgtttgcattgaatattattatgttatgttgtgttgttttatgttatgatgattctattatcttttaggttgttaattcatgaatttaatagcaacaaaaagaataaaacaccaagaaactcagccgaaacaagacagcaattaagtaatcaaaaaacagagatgaaacaccaagatttgatcgatacttggttcagactcgaaatgtgattgatccatttcaatccaatccactatacaccatcaaacctctcaaaaagactttatatagaaattgtattaggggcaactaactaactaactaacagacttcttagagttctgattggctgagggatagaaagacacaacacctgtgtggattagcaattaaaactgtaaagttttataaaaattctttacaattgaggaaaaaacagcacaaacacctattattgttagtgctgttaggttgtagattaagtgttgttagtggttatgtttgtatagtctgagataatgaaacttttgtgaactgctgcaaattattcaatgtaatatataagatgattgactgatccaatttaataggaatgatttgatcttctgtaattgtaattaatatgtttccttaaggggttgtgtgattagaatataaaatttctaaagctttattttaatttctaataaaatgacacctgaattggaaaataaagaaagaaggcattcttataaagtctgaattcagatatgtatagaagaaaaataacaaaaacatctctattgtaaataacagattagaagaacaataagttaatcaaacaaacctgagatgtggtaaatgcaagctcatcattcaaatttgacattgggtatgtgactaatcttggtccagtactcctcattcccactctcctccatgttgtactttttcttcaacagaggacatttagctatccataaagaggtgagggaggttggaaaccaatcttctgacaatgtttgtaacttagggcagttgtagatctcaagtgtttgcaaggagatgagttgtctaagcccatttttatccaggcctttaagttttgaaaatccatcgatataaagataggtaatagtagtaggcagtaggccttcctctggaaatgattccacatcttcattattaccagatataacaagagaggtaagatggggtagtgtttggcaattccatctcatcctaaaaaatacatctgatatatcaagtgtatacaaactaataggcagattaccttcaccttcaccttttgggaaaggctctatcaatggacaatctttaattgtcaaggactctaaaaagatgagagagagggaagtcatctttctttggcaaccacttcaatttaggacaatcacgaatgataaactcactcagcttgggagcaagaagtccaccatttgggaaagatacaaaactactacaatgctcgataaataaagatgatagttgctcaagagatttcacattggacattgagagggcttcaaagtagtggctggattgaatacgaagagttttgagattgggaaataaatccatatggagggatctaaaggatgatccacaattccacaaacgaagcacctgaagaggagggtaatggtagactggagtgagagttgtaggcaagcatccacttgtagaagtggaagaaggattgcttggctttattgcatgtacaatgactttaagttctccaagtgccaaaatctcatttctgtgatacatggtaatcttggtagacctaacaatgcacactccttatctccttcaattttaatatatgttaatgaaggaagaaggcgaggcaaatctccgatgagcttataacagttaataatctcaagtgttatgagcttcccatatgttgctgcctcttcagtttgcattgaatgccatttctcccatgatgacatgccatagaaacataatgtttccaatgatgcaaatggctttctcaaagaactattcccgtaaaactcagcaccaacagtcactaccaaagttgctcttgagatgtaaagatgttttagcaaaggaagttgcccaaagggtggcaaataagagcaatgcttacacccataaagacttacttcagcaaggttgctaaacgaatcattaccaacccaatttggaaattttgagcttgggtaattacgaattatgagctgcttcaacactgtgttaggtgaaagcatttcaagcacaaattctccatgttttggatcaacaataacatcattaacaatccattccatactcagtttctcaagttgattcttttccggtacattcacttgattcgttgctttcgtaacattgaccacattttctaacttcttaatggaaagctttccatgtacactttgaagtttggccaactcttccaatttagcaccactatcctttcccacaacaaaagttgtcaacgtttgaagattcctcaaattacttatttgacttggcatctcaactaggctatctccactgataataagatgtctcaaattcatgagatgatgcatatttttgggcagagcttcaagttcgtaacaattttctaattatagcgtttgtaaattgtataacacagttataaattcaggcaaaatcactatcttactgccagaaagatctaaatagcgaagatgttttagtttaccaattgaatcagataactcagtcatatgaagaccacaaaaagatagagctctcaaagatttcaacatggatagcagattctgcactacttccttagaaatacttatttcagatgatctcaaacctaatgttaaaaaggttcacaaacgtgtaatctcaaaatctagactagatactttgttatcacgataaagctctgtgacacaaccaaggtgacgtgtcttcttctcaaacctaacaatatctccattgtgctctaataaagaactatattttccagaaacaattctagccaaatcaacaataagatcatgcataataaaacatgtggcacctgtccaggtcgtggaatttacaaaaatgacata

SEQ ID NO: 50785 - DNA, 1459 bp, Cannabis sativa
gggtatttattgcaattcttataatttttgacttttaatgttagagaatagagagcctactatacggacacataataattgtttttagttctattttttttttttttttcgaataataagcttctagatgttgaaggtgtgttgggttaggcgttctcttttgcttgcagttaccaggacgtacgtcaccgccgtatcggcgcctccatgagaccacacctgaaggggtgcttaaactcaacacgaatgtcattgtttctgattgccgcgtgggttatttggctctctctcttcatgatctgagagtttagtggccaaattttcctgagtttatgtaagtttttagcctgataatatttttcatttatttagaaaaaatcatctcttaattttgtcatataaaaagagttttgaaatgtatgtaaaaagaggtttaatggctcgtttttcctgttgtggccgaagctattggagtccgatgttggatcaaagatcatgcgtggcttcatgtgacattggaaatggactgtcactcggacgtggttcaagctattcgaagcattacagttatgctttttatgtttgacaaaattattagtaattgtaagaccttattatgtactttgcgtaatgttttttttttattttgtaaaacgatcagcaaagcaaatgtagtggctcactcctttgcgagagcctctttattctactatgattacctttttaacttggccactgttccgattagtttgttacctagtttgataattgagttactcgtttaataaaatgatggctttcattttaaaaaaaaaaaactaaaaatattgttatgttttttttttcttgtcagctatattacaaatattgtaagaatattataatcaatacaaaatagtattgttcaaaactgttcgattttgttaaaaaaaaaaaaacaaattgttcgactgttgagcttgtttttataatctacaagctagaaaaactataatgtgtaattaaatttaaataatgacttacttgaacaaaattttatgatcgaattcatttttcttttaatgtataattagtaccacgtacgtagattatactattggttaaaaaaatgattaattacatttttattataattttttaaaattgaatttgcaatactgtgttgttttgtttattttttttaataatattttattacttagaaatgttattgttttaaaaacttataaaatttttggctacattacacttgtaacgatagtatatgtttatgaaatattaaacttaaataaaatgtgatacttagtttttaggaattttttttcatatttttaagttaatattgaaatttaggtgaatcattggatatatatatatatatatccaattaaaaaaagatcccataacttttgttcaaccaaaaaaaaaaacaaaaaaaaaaaaaaaagaaaaagtcttg

SEQ ID NO: 50786 - DNA, 1580 bp, Cannabis sativa
aattactatttagcctaatttaatataataattttttaaaaatattagtaacttaattataaagtcactagtttaaaattattagtggacattatgacataaaatagaaagtccattgtcgaaactttgataccattgggaaatggccctctctcgagctctctctttcatatttcaccttttgaatttgtcttgtctttacccacgtacccaaccaaccaagttgttggaaataattggataaggaattccttcctcaaaaggcatcaatttttacaaaagcaacaacatagtaaataaataattattatttattatattttgaggtattcaaatatttttacaataaaatatatttttttcaaatacaaggaaaaaatattaaaatatataataatttatgtcgtaattaataaaatttaactatttaactctcagataatttttttttgaatggttatagataaatttttaagttatatttttagaacatctaatcgactattaagtgtcaagtcattacacacatgtcattttcttattgtataattaaattaattttttaaataaaataaaaatttaataactttgactaattataaattatcacatagctattgacttgatattaatggttatgtacatagagaaatttcaaaaatataatataagtattattattgtcaaaaattgaacttaggtgtttatctacaatcggtagttaaatttaagtaaaactattttatttaatgaaaaaataaataagcgaggaaggtctcttttaaaaattcattatctatcttaaagatctgctgagctaatgtcctaatatcctaataaggtaaaataaaaatactctaatactattttttttatataaattttaaaaaataaagcagggaattttgtcaatttatcacttactccactattcatccgaacaataaattaaatattataattaattctcaatactatttttattctattacattagtattattattaccattatcgttacattctactaaactaaatatcgatcacctaacatgaaagaaagatgtcctacaaaaactagataataaagctttcggtgcttctacaatacaccccttaaaaggaatatatcgattcctatttgtttggatatctagaaaaaaatttaattagtctaaactttttttatagtcgtgtacgttatagttaattaagacacttaccaaaattttgcgaaaatcgaaataatttacaatatgaaaagtaatattcaaacaatctatttcagatgcatataaaataaaagagtcacgcgtgcaatagactgtttgaatcttatttttggagtattaaatttatctaatttgtttaaaattttgcaagctatcgacttaaataactacaatgtatactattatgaaaaataatagaactaaatttttttcctcgaatgccgaagcggataaaaatatatcaatgcactttttttaaatagtgccttgtaaaattttcttaaaattttaatgtcttaaaataaaaacaccttaaacccatcctaattctaccaataaagtaagagc

SEQ ID NO: 50787 - DNA, 2305 bp, Cannabis sativa
agtcttacaatatggccacttcaggccaatattcaaatacacttgtgtgcggagaaagaatagagacgaaaaggtgtgacatgagtgtagggtgtgttgtgagagatgttggctcatagaaaagagaaggctgagttagttttgggttttgtaataaagagtggagtgcgtgataaaagggtttacgggaattttggtgggttgttaggagagtccaagctctcgaattccaggaattgtcttctttttgttgttttattgtttccctgagattaatatgattgttggtttcaggcgtttcttcctttttctctgcaattttgctgcacaccaggcttagtttccacaataaacttaacagtttcatagcactagaagtgagcattgtgcaacaacgataaacgcttctaattttgtcttttttactttttttttttcccattttatcttttcgttttgaagtcactgtaagggaatattccattttattaccttgttgtttgtcttacgaacttgatagcatttaatactttgtatatagtacatcaatttaaagttctacatatccctcaattctaatttcttgttctttttttgttcataaaaaatttattaatattttgtagattggtgtaaaggtacattgttaacatccccaatatctcttaggaaattatggacgggttttagcaataatgagagagcaagagaaagattaagagaggagagaaaaagacaaacacattgagctgaattacttctttataaattggtgagaatctggaagagggaaggcaactcaagagacattcaactctcccgaactaacttaatgtaacagttatctaaatttacaaaattaacctccgttttgtaaaactttatcctggtttgttttatttctagaataagttgttgatgctgaaaagtgactaacactagctcgttagattggcgaaataaataataaatttaagtatataatttagagagacatgcaaaatttatagtagttcactcttcatgtcgcgatggtagttaggatggtataggagctacatctactttggctttttatttcttacaagagtttttttttgaaaaagagaaagaggcctttgtctaagaccgacccctcccccgttatacatagatagcctcatttgtggcggaggaataccattattacaagtgttatatcaaaaacatttaaaacatttgaaacaaaaccaaaccaacgagacattaacaattcaggtgctattaagcaacattactcaacaatctccaatctttattcaaatctaaggacgaaaactgctcaaaacttttagttttataaacccaaacagctgtccaaaatctgacttttttctataattcttcaactgaggcttcaatcccttcaaaaattctgttatttctttcgagcaaaataatccaaatgattgctagaacagctatcttccatagatatgatctacccttactaccacccaccttgctcacaatcattagagggactgaatcaggaagtacccattgaatctcaaaggcattcaacaactttatccaaagtttttgggcaagacagcatttgccacttcttcgctacttttcttacaacaaacacaccatcccggggacaaacaaataaatggtcgccttttttgcatcataggatgcacattaatttttcctaatgccacaagaattacaagaaaatcggctaagtctgaaagctctaatttctagagagagatgttctgatcttatgagtacttttctaaatgtaaaaactgagctagaagagctctctttttatagggaaagaagtcctattaaaatgataaaaaaaataattcaaaaaatatgaaatttacatttaggctatttgttaccgtatatgatgatctaacgatgaaatcgactccggaagtcgctcgtcaattttcgaaggttgagtcgtgtctgcagcacctgctttgggtaagttgtaccttaaattcgtaactctctcacggtgaaatttggagtcaatagctttagaattgcgattgaagtgagtcaagacttgatagagcactgaaatagcttcgcaacacaagttgaattacatcaatcggatcaatattgagtgagttatgaccaacttaatgaaggttgtgttacaccaccgcaactaccacttaaagtgtattctaaaagaaataaatgttggaatttatattaccaggatgttagatctactcacaactatgttgtttaacgccctaaatacgaactttctaaaacgataattaaa

SEQ ID NO: 50788 - DNA, 859 bp, Cannabis sativa
tgtgtatatgtgatcttatcaaggattaaatataatttagttagttaccaatatgttttacaactaattcttgaagtctttctaggattagagccggtaaaaggctaggcctttgggacaatcaaaagctcatatatattattacttgttatgttctctctaaagctttctagagttatgtactgtgaaactttatttgagtgatgtaaggatctaaaattggggtttttgatttcagttgctaaagatttgagtgtattcactgtcaattgcactagctagccagtgcatgtggtttggactaaggtgtaatttgcattggatgtgtacgccacttttatgtaggttgaaccaagtatttatttattttgtaatcttcattctcgcagtgttttttgtcatgtattggtgttggtcaagtcaacaactatacatttacataaaataatatgcaagtaactatattgatggtttctcttgacgccaacttaaatattccctatagatatataaaaagaaaaaacataattccctatttgtttaaatatttgtatcaatagctaatagaagatgaattggtttatattacatatactttcctaccaatttcggtaattattctcaataaacattataaatatattttaaattcattaatttaatctttttcttatattttgaacatatatataatctttttttttataaaaaaaaaaatctttaccaaaatcaacaaaaggaaaaaaatatggtcataggaataagtggtgatttcaaactaagaagaggttcaagtttgaatctctctcccctaatatcaaataaaaaaaaattaattgattttcggacaatcatatag

SEQ ID NO: 50789 - DNA, 1313 bp, Cannabis sativa
ttctttttattacttaacaccccggccaatatttttgagcaaataaactccctcccaaatagacctagctccctctctctctctctctcgccctctatctagtaactctcgcaaccctctctctctccgtcgacgagggcaccacgacggcaccgcgtcaatgaggccggcgcgcgaccaccaccattttccctctccctctcgctcgcacgaaggctggtcctccctagttctctctcgctcgcaccaccggtacgtccaccctcgctctcaccaccaacaccaccgactggatgccgtcggagcaccaccaccaccaaccgccgtgaaccgtgaacgtatttatttatttataatctaaatacatatatttatatatttatttatttatatatatgtttaaatctaaatatatatatacagattttttctccaaaataaaaaatctgaatatttatatatatataacaaattattgtaaaaaatatttatgtatataaaaatatgaatattatatatatctttgtttgttggtaaaatagccttcaagatatgaaatcaaatttgagagaccgagtaaggcaaaagttcatggtcattaaccatgtcaaatttcctccatcattgtcttttggaatatcgttagaaggtggcccaagtcatccataatccaattccatgttgataataattaactatttcaggtcgcagatgactctatttggcttgctaagagtgacattcaggaattgtgcaccatacaaattgggagcccaacaaataggagtttggtgcaagtataatttctaactcttaataataaacttgacaatgttattttgacagaaacggttattaatcatgtcactttagggaataacgttgaacaagtagatacattattataaatttcttaaaaatttattaatttttcatccataaaaatataagaaattattcaacatttctttttacaatatttcaaagaatatataaatataatttttgcataatctttaagatgtatggagaatttgatctttgataaatgtcacatgcaataatttataatataaacattataagtaataacaatgtataataacatgactaatatatagaatacgaatactttttaaaattaattgaattctattcatatcattctctacagggaatgatgaacaataaataaatgtcttgtgtattaaaataacattagtctggttattcttatactttgatgtttcaatgcaattttcttatcattctttttgggtattcaaaactcactataaaattgcatcaataat

SEQ ID NO: 50790 - DNA, 1047 bp, Cannabis sativa
aaaattaaacttaaatatttacgcgacaaattactatttggaatttccatgttagatctagttcgaatcatgaacaacggttgaatgttgtttgcaagcaatctcgttaactaatcttgccctacatttcattgtaactcaatgaaggtgccttgaattctcagcctgtcttccattttcaaacttcagacatagcagtgtcctcagttgagcatcatgctaaatttgcattggagtttttgtatcttgttcttaactagttttctttagtaatttcggtgtaaaatctaaattagaagtttagtggacacattgtgttgctctagcaaagaaataaatcttgaatataaaaaaatattagttaattagattttttttttctttaaactttggcatgtaccaaattatattttttgacttttttcattaataatttcccttaattattgagattgttggattaaggacttttgtctaattttattcaattttattaatctagtgattgtccatgtactaaattatgctactcagactttaatatctacaaaatcatacctcttaaattttgacatgtaccaaatcatgttaaattattattcaatataaaacataacttataatttataaaaaaaaaatactaatatactaaaaaaaatacaaacataaattataaattataaaatatattaaaaatataaaataaaatactaaattggttctgaacgagaagtattatcctcgtcctcatcccatttaatgttcgagaataaaaaataatccttattctcattttattttttatttagacaataaatttccacctattaaaagcaaatttttttaatatactttaaattcataagagcatctctaatggtaatattttggagaatgcttgatgaggtggaaagcttatgtggcaaaatatagaaatgctatattattggagataaatgaatgttattcttgaaatttgtattgatgccacacaatggcattgatgctatgtcttttttatataataaaatattaaaagtgcaatat

SEQ ID NO: 50791 - DNA, 561 bp, Cannabis sativa
actctcacactcatctccctacccctttgctgtgcctcccttccacttattcaggctctagctccagcagtgttctcctaccttagccgcacgagcaccatcgttcagatttccatccgcgccagccattcgcatcgttcaggttttgatcttactttttttgaccatatattttttataaatataatatttgtttatgtatatgaagttttagtttttattttgctactgtttacatatttatttattttttcttacatattatttggttccactataagtttttgctaaaatatttaaatagtatgttgattataatttaaataaaaataaatttgaatataaattgattcttagctactattgttttgaatagaaattttggctaatgtaatttgctactataatagtgtatatatagcatatgttttactctccatattatgcttttatttaattactaatactatgtaataaagcttctttgatttgagtgataaaataaaactgtatgatatgttgtgatacataagtttttttattgatacactatgtaataat

SEQ ID NO: 50792 - DNA, 1532 bp, Cannabis sativa
aagataaaatagaaggaaaaaaaaaatagagaaattgatagattttttttttttttttttgacgaggtaacttcaaaagaacagagaagttacagaactggaacagaaccattccagctgatctccttatctagcgctaaagccttccttgccaagaaatgagcattccgattatgaactcgagcaatgtgtcgaatggaagctgtagggatgttagacaaagagagtctaatgtcttgaataacgtcagagagagcggagaggtctgatttcgcacttctaactctctccactaatactttggaatccgtctcaataaccgccaacgggattttgatattggaacaccacaggagacttgatcgaagagctaaggcttcagccattagaggatcgacattgccagcaactggaatagagaggcctgccacaattctgtttttccaatctctgataactgctccaaagccaagcttacccgaatttgcatccaaagctgcatcagtgttgagtcggtaggagcctggggaaagcccgctgctattattctggtgcgtgaaagaggactgcagaactaaagccgactgcttctttgattgtgcttcctgaaaatctataagaaaagccctagtccaagtgacaacatcagtaggcgacatgtaagagttagcaaataacttcctgtttctgttatgccaaattgcccaaagaattccaaacagtaacacaaggtcttcttttgataattcagtaaaagcagtaattagaaaccacttaacatcctggtgccgattggaaagataaaaggttctcagggttgaggatttccatgttttagcagcactggaacaatctagcagggcatgactaacagtttcagcaggacaattgcaattagaacaagccggagtaggaagagcttttttttttcagaaaaagactgagagccaccggaagaatatgatggtagactctccaggtaaatgttttaactttaggtgggaggtttaaagaccaaagagtagtccaccatttccttaagagggaggaattcgaagatgagggaggaagggagcccgcattagcaagatgatatgcagttttaacagatagaatactagaaggatggttattccaaatcaaaaagtcctccttgtcacaacaacatataggaacttgtaaaattgaagagacagtttgggagtcaaaatatgtgtcaagggcctcacgattccagtgtccctcagagttaagaaaaaaattaactttagcagatggagggataaaaccagctttatattgaagatgtcttaccccaggaacccagtattcatcaacaatgcgaatggtttccccattgcccactttccagagtagtctttccttaaggagatcccttccccagataaggctaagccaagtgaaggaaggggaatgaccatgaccaacgtcaaggaaagtattatggcgaaagtactttgctttgagaacggcagaaagtaaggagttaggattggagtaaatgtgccagg

SEQ ID NO: 50793 - DNA, 1527 bp, Cannabis sativa
gtttagccgccaatatcccataaataaataactttcacaactttttttttaatattatgtgcataaatatatctatatattttatgtattatttttatcaaataataataattataatattaagattgttcgagatcaaaattctattacacctatataataacaagggtaatttataaaaatttatgactctactgtaatgacaattaaattatattattatgttgctataaaaaatgttatatactgtatttaattatttatttatatagtcttacaaatttatatatttatttatattctatatatatattttaaacattatttttttctaatatttttcaaatagtgtaattttattcttactttataattaaatattattcaattattattatttattttttttatataaaaagtgctatatatttcatttttagactcttcattaattattatttatattttaaaaaagaaacattaataattaatttatattaatataatatgtattttttatcaaaaatttatataatttaatttttaagtgaatatattttagttcatttactttttataatttatatcattattgatttaacaaaagaataaaaaaaaattgaatacctccaacaaattatttatggtatcaatcaaacatatgactatttttatgatttgtaattagcacataaataacaatgtatactaatataaaataaattaaataattaaattttaaataagaaattattttaatagctaagagctttaagaaaaacaactacattatcattaatggtcaaaataattaaaaattatgcttttaatacaatgtttttattgggaatagtatatattattgataagtttttacaactttattatttttttatttaatatatatttttcttaaaaaatgaaaattgttcatcaatgacttcaaaacatctatacaaggaaaaagcaagtcgagtcgtaaagtagggaagcaatttaggtcatgatacgcaagtttgacaagaaccgactcaatcttttacgggtttgacatgacgatacgaaaattttgctacttatgtttgtgttttatcaattttttatgttacgagtcgtgttcgtgtctgccatctaaaataaattttaaaattcaacataacatgaacatgacataatgacattaaaatcaacaatttagcttacaacccgccaacacgacatgcgattttgtgggttcgacacaacactaatttattcagtcgtgtacgtgttcgtgttttataaatttttcgtgtcacgtgtcgtgctcgtgttagcaactttttaataaatctaagacctcagcataacatgaacacaagacaccaacactaattgctaccccaactataaagcatgacaagcacaagaaaattcaatcccaatccaagtagcacatgtaacattatttattaatgcatgattggctaccgtatgtgctacttaattagcatccctacaaataaaattcaaaccaattacacaatc

SEQ ID NO: 50794 - DNA, 1000 bp, Cannabis sativa
atccatatatataccatacaaaattgtatattctacagattcgcaatgattccatacatgaataattgtaaatgagatagtagatttaaacatcaccacagaaatcactaaactctacaagtaaaaaaatttgtagagaaaatgtatcgaaatgcacatttttataatattgttctcatcctctttgataagcaatgtaaaactgaaccaaagacatttagactccactccgcctgaccatataggatcaaactgactgattagaacaaaaacagaaattacctcaaacaagaaccaatgggtttccaaaaatcagttcgtaactcaaaaaaaaaaatcaattttttacatgctgtttcttttcagcagcacaaaaacttggcagtaataacaaaacaaaattatcattctcacaccaaaataaaattcattccttaaagttagagttttttgtcaaaaatattcttgttaaagaaaaaattcattggtaaaacaaaatctctcattgaacattcagtaaaacccaaacttaagcaagggaaaaaaactgcttacagaattcaaaagtgaagcatccgaatataattttaaacatatttttatgtatatttttttttaaaaaaaaaattaatgataaatctatatagattactctaaataattttttttaaaaaatatcatctacaatttcttatataaaaagaaagtatataaaaaaatattttcaacttaaatattatcgtcatatctcatttgtagtcatcactacatttaaaattgatattatcaccgtattttacttgtgatcatcattaatatatactgttatatattttgttaataattttaaattaattaataatctatatttttttgactaaaatagtgatctttaattaaataaattggaataaaaaataataaaatgatgatttctcattaaataaaaaagaataaaaaatgagaaaattaaagagaaaatttaaagtagaataaaaaa

SEQ ID NO: 50795 - DNA, 1026 bp, Cannabis sativa
tgtaacaaaattagccttttgaattttgcccatgatagtttattcgcgcttttcttatcctctcgtaatatactcactgacactgtatagagttattattataaaagggacgaaatatgatgtgataaagcttcaaactatttttactggtgaagatgcattatgcatatatttgcatctgaaagaccatatgccaaactgctggaaaaacatgatttagttttaggacattggagtggggattggtttctaccaaatgccaagggtctatgacttgatgtcttttgcaatggctcgtttgtgaataaaatgatacttttattaaaagtggcaacaatgaaatgattatttaactgtgttaagaacacaaaattaactatttgtgttttattattattagttcttgaaaataaaatagatttagaaaaagaaaaaaaacaaattatataagtttagatataaaattcttaagaaaacaaaaagataagtagatttgatctgaataagccgggtcaaatctgatctgatttagtggggcaaggcgagagtagatcactacatgatacgaatagggttggatcatagccgattagatccgacctgatccatttacactcctagatataacagaaaaaaaaaaatatgaactgaaaattaggaggtaaatgttagattcaatttttaccaaaatacgtggcatgcacatgaagctccacgtggtagagagagactcatgcataggaaaattagcaccccttgtcgattaaattcactcccgcattatatgagtgaggggacacccagaagtggccttctcgttgccaaggaaaataatagagcaagcttctagttgtctgagaggcgccaagcccccgaattacgggccctctgggagatcatcatgagcctaacacagattctgaagcagattactatatatgaccacaatggcgcatgattaggacccattcaccttggttgagagaaagtgacagctatgcactgtcatatcaaccgcttgagatt

SEQ ID NO: 50796 - DNA, 1909 bp, Cannabis sativa
ataatgtcactccaccaacttcccacaaccaactattcccctaaaccaaataagcatttcaaactaaattaacaaaacccttccatagtattcaattttcagaaggaatagaaaaacgaaaacccacctctaagtaagtgagtttgaacacatcagtgcctgaagaacttgacccagttacgttttcttgagaaacgacagcagaaacagtgccactcaacctgcaaccgaaaatggggggaaaaattagcttaaactttcatcttaaaacaaatatatgtggaaaggcatacatacatgggagaaaaaacctgggcgttgagaggttcaacgagtcgaaacttgagaaaactggcttggtggtggtggttctaagaaaagatagagaatgggagaaaggtaaggaagcagataagggtcttctttttccacaaggtttggaagagaaagcgaaagaaactccgggaatggcagccattgatgatatgattctcaagctctgagatttcgaaacctcgactcgatcagtctgattgtactgaagcactgaaacttgaaacgaaacctattcattcgttttgcgttcggaagaaatggatttggttttgccacttgtctcgcgccatatccactatttctttctttatttttcttaatttacgatttaccccctcgttttcaataatattgtcctttggcactcttttttcttttaatttgtaaaaactaatgagccttgcaaaatacaccactcataatacatattagaaatttatgttattatggggagattatttgttgtgtgggatttatgcatgcaaactcaaattttccatgtaaaatagctagaaatgtaaaaatatagcactctcattagcttcaccgctctatccttcaaattacctcacctaaactctatttttctattttacctcaaacttttacattataccatatgtcagttattatagtgcgagttttttgtctaaaaatactagtacagtctcgtatatatttgacatgtgaatctagttcctagttgaaaaaggatggcgtgtcaataactgctccaatagagctatccttgtatgataagaactcgcgagaaggtgtgatggtaagatcctattaggctctaaaattattgatttctctatatttaaaggatgttgttacttagtaattttagtatttttcatcatttttagaataattcgggtcctgaaagaaaattgatatttatgggtaaaatgtaatggatttggtgttttttatgctaggtgatgttagaggatggattgacgtgcaaaacgatattttcctagagtttcgaaagtccaagaagagaaaaaaaaactcgtggattgtcgttgcagcgtaagttgaagcaagcaaaaaagaaaaaaaaaattaaaagatatagcatatctcatcggctcttatttcctatttcaacatatcgatgtaggcttagcctatatatgcggtgaggaggcaaattttggccgattttgttttttttaaaaaaaggggatatctttttttagtgagatattttcaagcactataataagaccttttagactacgaatttgagaaccctagagctacctaattgagatagaaacttagagagagagcaaagaagagacggaaattgcggcttcgaagtgttcttcatcatagttcttttcttctccttaaactcttactatttattatgattttcattataatgtctagtttcgagtaattccgagtagtttcctttcagttaagggttatttcaaaacacaagacatgggtttttaatttcattattaaatgttaatttctagttttcattatatcaaattgcttctattcttctatgttcaatgtcatgatatctattttaatcttgtttaga

SEQ ID NO: 50797 - DNA, 1477 bp, Cannabis sativa
  modified_base (370)..(370): a, c, t, g, unknown or other
taattattatacgtattttatattgttctctatatataaggattatattagaaaaatattttgacaaaatttgaatttaattagataattaattgctttcaaaatatatattatatattatgtccaaacatatattttaaaaaaataatgatagtgatagatacagtattttaatttgtagttaggagttataataaagtgtaaaaattattagaagcatgtatatatatatatcattagtcatttttaaaataaaaaatttaaatatatattttatatagatgtgattatatgtagatgtgatttttatttttaaatatatctataattaaattaatttttttaatataaatattctatataacttttnattataaaattaataaaaattattctcttaattaattgggatattttgttaaaattgacgtaaaaaatttaaaagtttcgttaaactaaaaattctgctaaattatgtctgtcctagaagttggttagctacttctcattttatgttagggttcttcctattcgtaggtcatttatggcacgcaggaagggctcgtgcagctacagcgggatttgaaaaaggaattgatcgtgatttagaacctgttctttccatgactcctcttacttaagacaggagacccaatgcttgaagtaggaatcaattggattccaccctactcttattaagtaagttaataatttgggcgagtcggtaatatttttaaagtcttctctttttctgtctttttatatctaatctgttttcttttctgcgctcggctaagtggaatagtcaagccatttcacttataatactgaaatcaataaactaacgaaactaatctattcactaagaaaaaggagaggtaaccacacattttatatagaatcgatggatgaattttaaaagacaatccattcttttattttttctaaaaaaaaacctaacactactaattattataataatatattgacgcgataatatacattaattaatggaaaatatatattaattcttattaacaattgaaaatatacattctttaaaacattattaacaaattaattactatacacgactgatcaaaatatcataaaatttatgcaaaattgacacgaaatttaaatttgtgtggaataataataaatatttcatattcacgttgtgtataaattatacttatagtatgcgtagttatatatcctcatacgttacacatgcacatgatataatggagtcgggatgtagtaataaacctcttaatatatttttttttcctttgatcaaatatagactactttagcaatagtacttaataactgtaaatgtactaaatatatacatatataaggatatgattttgttctgtgatgtactttcacggaatgtattctgtgatacattagatagtctcagggtacattagagagtgtcaggatatgttactattttttaacctta

SEQ ID NO: 50798 - DNA, 1081 bp, Cannabis sativa
accctaataactacctagcatcatagaagaaagagaggagttgagggtcctccctcatcataataaattgcttggagaggtcccaactagactaactatcaaaaaacgagaattcctaggaagtacttgttccagatagaaagtcacgaacaacacaagaaggaggataacaaaaattagcatcaaacccaaaaatagaaggattttgggcgaaaggaagaattttccagcacctttgccacaattcgatttactccaaaaatttcgaaagattatgcagttcatggtgcctaaatctacctaagatggcaattggacaatcaagaaatcctaatttcatcccaaaacagagcatgcaaatgcaatttgaaatgatgaattcaaaaaacacagtccatagacaagaagcaatgtacaatgatgataatggagatgttaagctaattgtcactggattaggctaggggttgatcgcacctttcgtgaagatgagatgctagagcgatcaatgaataaatctttgcgttgaaatccagactcgcaatttctcctgtcgttgaagtcctgattactaggggtcgattatgtgggaactctcgtgctccaatcctcatcaacattcgaagatagaaatctacaacgttttccaaattgaagaagaaaattttgatttgaattcagtccatggttttggagattgcagggagacttgtgtgcttcgaaggattgaaaatttgaaaaagaagtaaaagtggtaactataagttaccaggggtatttatacccaagaaagcaatccacgtgaggaggatataaaagaccacgatcttctctcaaaaaacacactttccatccaacgatcagggagtccaacaatccaagcatatcttagcatttaattcattttagaatcaagatgccaagtgacgatgaaaatgcccctttctcgatgttcccgcaaaaaattgaacatccgtcaaaatgtagccgctcctagaaagtgactcctcaatggatgtgccttgtcatacacgcgcgactgacacgtggatgcattatcatcacagacggaagctagctt

SEQ ID NO: 50799 - DNA, 1071 bp, Cannabis sativa
caaacaaggttggcacctcattcacaaacctcactctcttttagcaagagtgttgaaacatagctactacccgaattcttcctttctcaatgcaaaatgtccccaaaatgcatcttgcatttggaaaggaattatttggggtcgagagatcatatatgaaggtgcccggtggagagttgggaatggtagaacccttcgagtttggcaagacaagtggataccaaggcctaatggcacaattgtcaaccggccttgtgaagaggatccgcatataacagtaagtagtctactaaataacaaagatgaatggaatatagatactctcaataatcactttcataaggaggatgtcccttggatactaggaatccctatagatattcactcggaggacatgcttatttggcctttcacgaaggatgggaactacattgtaaaaagcgggtatcgagtagctagggagataaaccttactcctacccgaagctctaatatggatcaaactcatgcttggtggaagatgtggtggagtctgaatttgcctccccgaatgaagctcttcggttggaaaatgtgtcgaaattggctcccggaaaaaactaatcttgttcatagaggtatgaaaattaatccaatttgtactaactgtgacagatttgaagaaactctctcccatgctctatggaattgtgaaaaggtgaaaaaagtgtggaaacttatgccttcttacaaactcattaaagatagtagagggaattcaatgatggacttgctcgtagaattcaaacataagcttgctaaggaagagtttgaagatgttgtcaaggttctttgggctatttgggagaatcgaaatagacaatggaccaatcaacatactatgcatggtgctcgtttgctggaatgggtgtttaatagctacccgagagagactcatggacaagaaagtctagcaaagatgcactctgctaccgagaataatcaatggcaaactcccccggatggcacatattgtgtgcattgtgatgcagctcttaaaccgaacccagaaggggtggggattggctatgt

SEQ ID NO: 50800 - DNA, 1321 bp, Cannabis sativa
  modified_base (928)..(928): a, c, t, g, unknown or other
cgcgggggtttccggctgtggcgccggagccgtagtcggctaagcgcgtgacgttggaaacgtaagccgccatgtgttttgtcttggaaaggcttaaggatacggcggcgcgtgcgaggtgagccgggtcttttccgactacggcggcgtagcgtgagagagaggagaaacagaggtctgggtagagagttgttccgcaacttgtacggatgaaatctgagccgttggtttcgttattagcgttgttgttgtagtagtattcagcatcaacggctatgattaatcggagagtgaggatgaagaaaatggagagtagatttgagcgttgaatttccatttttttttttttttggttaagagagtttttgttagttagaactgatttggctttttgagtgtttggggtttaagtaggcgcgactcatcgtgagagtttaatattgcattttagtcctcctattttataataattacaactattagtgtaattgtttttggtggggactcaaaggtactttaatggagtgtgaaattgtacagagaaaagataaaagggcaaatgtgaacacattgtgattgtgtacgatatcactaatttgtaccaagtagtacttaatttagataccaaggttaagaaagcataacaactaaatatgtccaagaaaaaactaagattattcagtttgcattattatattaataggagaaggaaaatggaatttgtcctcttcatttaagttacttaattggtgattgttgaaataaatataattaggagaattatcaaattatttaaacgtaattggtaaaatttgttgggaaatttacatggtacactaatttttattatttttttataaaaatactgttagacagtattttttatttttttattgtatttttttataaatttcatactgcagtatantctgttaagttttcactggtgttctactggtattttttagttattctactgcatgttttgagttgttctattttgtgttctactggtgttttatagaaacacagcacttttgaaaaaaatttcgtgtgacgatatttttgtaaaaattatcccaaattttaatatttttttttgtaagtttctcaacttgtttagttaatcttatcaagtacgcattattttataaaaagacataaaagtaaatctatagagtgcaattatcacaaccttattaaaatatcagggttttttttttttttttaaggaaatgtgggattttattatttatatttagagatattttttatatacaattcaacaccatagatattgattaactgacactaccaatgg

SEQ ID NO: 50801 - DNA, 1188 bp, Cannabis sativa
gtgtacacctataaatttctcgatttggtcttgtaggattctttcaaatatcacgttttggctctgtggtctcttaaaagtcgttcgttatacctacactttctagacccaaacgtgatgagaaggtgtaatagagttagtctcacattgttaatgtgtgaaaataaaaaatatcatatacaagatgaatgaactactctttctattgtcaattggttttaagatgaaaccttactaaatctatatcatataccatctaagaggggttggtatgttttggttgccatcctatctattttggtctctgtgagagtttaaacaactgtttttttttcttatacgcttgttaagtaactgtttgaatattattttcgatactgtaaactatttgaaattttctaaaaatttaaatgtgatcctaaataactacacgatacgcgatcacagaaaaaaattaattaaaaaacttttttggataccgaaacaaataaatttttactagatcttgtattaatattattattatactttataagatttatttaattctaagtctttgtgttttctaaaaaaaaaaatctgtaattcttttaatattaatttggattcatttggtggtaacctaacctagtggtaggtatgaagtttgaatcctcccgtctcaagatattaatagtttaataatggatgtttttgcaatgaaaatttgtatatgggtacaaaacaagagaagatgaatagtttagagacatatttgcaattcatcaaaaaataaaacaataatatatgtaagttttttttatctgctggtttgctgtaaataattcaaacatatatttatatttgaataaataggttggacagctgtgagggttagatgtttagcagacaaaaaaatggttcaaagaggtagtcatggggaggtgtgtattttgttcccaaaaattgattttcaaccccaaaaagcacgctgctttgctttccttgcacgagagaagagccattttattttcacacttagctattttaataataataccaaaagatgtatataagaatttaagtgtcaacacgcttaattacaaaagaaaagattaatgtaatgtggtcaatgaaaattcactttcaccttcattttcggatatgtttgcatggggtatgttttgctcatattcaatattcattaga

SEQ ID NO: 50802 - DNA, 1492 bp, Cannabis sativa
gataaagaaacattctgaggcagaccattatctctcaccatctcgaaccatatgaaagtctttgttttcccttatagaaagtactgtaagcatagaaactcaacaaataatttttccttttcatttttacagatatctttgtctttcaattttttccctgttggaagacatttattaatttgttgagagttgatattgaagtgaatttatgtagcttttttgtcctttagaaagtgcaatctgaatcgtggctgacattcacctttatgttatgaattttgctttttctctggcaaaatgcagaaaggtggtgtgatcatcaagaccataaattaagcttgaacttaataatattatttatcttgtttttagatggccttaagaggatttccacggaactaagattttagcttttatttttcatttcgaaagcctattattgattactattattgttgttagaaacctaagattgtaaagggccaaaggacaattctatactaaagataaaaattagtacaaagaaacggtgtctctactgcatcactaccaaacgactatgaagccaccaggcaaccaaaaaaagaaacaataaacaatcctagagtcaactgctgcataattaatgtcatcgattcatactggttcttctgggaaaacacagctgctggtagctaaaatgattaatctttttggttaatgcattcagaaattacaccgaagccattgaaatgtctctcctcctgcagtagtatacaagtactttgacactcttttctggtaggttagtttttgggagtgagttctatccaagtggtaaacgagtagagaagttaaaaaaaattaaggaagttgccaacatgcaaggaggacttctacatcaattgacagaaattctcaacaagttgacatcagaatggaggagatagcaagcaagacaaataagtttgcaaggaacacattcactaaaacgaataatggatggagactagccttctacggcattatgcacaccaaatgctcatcaaaatactagagggagttgggtgcatcaatccaatcaattgtacatgccaaaatctttgaaaatcaatttcccacactttgatggacaaagtgacctttctattggctgtttaaagcaaagcaatttttccaattacatgacatttctcgtcatgattgagcggctctggcctcctctcatttggagggtgacacacacctatgataccaattactacaataagagattacaatagtttcatgagaagagttcactgaagggatgaacacgaaatatgggcgaaatcaatatcttgatttctttggagagcttacacctttgcaacgaatgggatcaaccaagaataccaagacaagttcaagaagttattatctaaaactggagcattagaacaggctcaagtgagttttttcattggagatcttcaagattctatccgcgccaatattagagccaacaaaccac

SEQ ID NO: 50803 - DNA, 1495 bp, Cannabis sativa
accaaaacagaataagaagtatctatactctaatagagagagcattctctctaatttggcgtttgatcgatgttttggcattcttggcagagacgcctctataagcgaaataactccttgaactttcatacatgtaatcactagcccaattacactagtccatttttgcattagtatctacccactatctattagcaaagacagaaaaaagaaagagagaagaaaatctttgtgtattcatcaatcgaggaaaaatagagtacaataccttttatagttacaatgctcaatcgagagactaacaaaattaacagaatctaactaactctaacaacttctatcaacttgtactaattaactcaagacagctaagcaactaacttcttgatactccccctcaagatggatgatatatattcaccaatcccatcttgtctttaagtgccttgaattggttaggaaacaaagccttagttagaatgtctgcaagttgttctctcgatgaaacatgatctgttttgacaatcccttgctgaactttttctcttaccaaatgacaatctattttaatatgttttgtcttctcatggaaaaccgggttagctgcaatgtgctgtgcagctttgttgtcacagtacatgatagctggtcctttgtgttcaattcttaattctttgagcaaagataacaaccaaactagttcacttgtagtgttggccattgtcttgtatttagcttcagttgaagatctaaaaactatttgttgctttttactcttccaagatatgattgagctgccaaggaaaatacagaaaccactagtagatctccttgtattaacacaggtagcccaatctgcatcagtgtaggctcttagttgtattctaatgcagcaaaaaggaatatgccttgtccaaaagtagacttaacatactgcaaaatcctttgagtaacttgaaggtgtttagctttaggcatggctagaaactgactcagtttattaactgagtaaaccaagtcaggccttgtaattgtaagatattgaagcttcccaattattttcctctacaatgtaggatcagctggcttgtcagcaagtttgtcattctcaatctgtgaattatttcaaatttggctccatatataggtgtactaactggtttgcttcctaggtaaccaaggtcctcaagtaattgaagagcataagctcttcgagatacaaaaatccctttgttagaccttgccacttccaaaccaagaaagtacttgagatccctaagatctttaagtttgaacttgttatgcagcttgattttcaaagcatttagctcagtgatgttattacttgcaagtataatatcattaacataaattaataggatgataaaactggttaaagagtgtcttatgaacatagagtggatctgttgctgaataagagaacccttcttccagtagagcagtagaaaatttttcaaaccactgcctggatgct

SEQ ID NO: 50804 - DNA, 582 bp, Cannabis sativa
atatttcttgcatcccaaatacaaaaaattacaatttttactgttgctatagacctccctgcggaacttggagtgtccacttctctctctatccatttcaaacaagtgccaagcttcatcttcttactaagcctaactcagtcaaaaatctgtttacaaaaatattatgactataatcacaagtgaaaaacaagtaggggtgggtttctttctcaagatcacacaacaaacaagtatcaacttgtatgcagccgaatctcattacctgatcctgagtttgtaatctttgcttacaagttaactaacaaatgtaacttgtgttttgagtcactataccagtttcaaatcagcgagttctaaactctaggattatcaatctgaagctacattctatcacaaagtttggaaatcgaaaaatccatgcatgccaagaaattcattacagccaacaagcctctttatcatgtccttcacttttattataattatttaatagtcatgaatatgacaaattaatataaattagtaaaaaaatatggtaaagaaaccaaaatataattcataaggaaattataaatatat

SEQ ID NO: 50805 - DNA, 756 bp, Cannabis sativa
cttctggacagttcaatcaaaggattatgattcgggcatttggaaaagtatagtcaaaggaagaaatacaattttgaaaggagtctccacaattttgggtactgggcgctctgtggatttttggcacctaccctggattccctggttaaattataatgagtttaaagatctaatggggagcctcaaaggtaggggctacactgcgaaaactgtggcagatgtatctgaaggtaaggagtggaaccagcaaattgtcttgcagatattcggtgaagagatggggaaaaaaatactctcaattcctaggctatcacaggaacatgaagaccagataatttggaagaatacacaaaacggtaagttctctgtcaaaaatgcgtacatagttgatcagttagaccgatttcaacctgtgtgtagaatgtggaaatggatttggcaccccagtatacatcctcgcattgctacctggttatggagagttctgaatgaggctctcccgctcaaaaataggctctctttcatctcggataaaacttgttgtctctgtggaggaaacaatgagacgtctcttcacttattcagagattgtccgtttgccaagactgtttggctcttgggggaatatccaatacgagttgaggcgattccaggtaacactattattcaattcattgagaatttagtgtctaatcttcctattcataagcctcaagttactctattgtatttcggatgtgcctcctgggaaatttg

SEQ ID NO: 50806 - DNA, 4505 bp, Cannabis sativa
gtagtattttcttaaatattccattccaatactgtggtactaaagggaagggttttctctgtatttgcgttcttgcagctgcgatcagctggggctatggcgaaaactcgatcgaaggtccaggggaaactcaaaactgcaaccaaactcgcgaagaagaggggatcgaaaggaaagaaggatgcaaataactccatttcgatggagcaaatttctaaaattgaagctttggaggtctcggaggaggaagacctggtggagaatgatcctgccctgaaggatgttttccagccacctctctctcctaaatcatccctagctaggattcaaaggcaagaagaagtatgctctgactttgtccaatttctccatgccaatgatcaatgtaacagtgccattgctcagggtaagaactcaattccccctgtactacgatctacttcagttgttcggaacttagataattcttttaagcaatctggtgctactggtaaggtcaagatcactgtatattacatagaagatgagatctctttctggtctccctctattgtatgttatgttctaggggtgaaccctccactccatgttcttgatggctttgtgcataggatttggaagggtaaggtggaccgagtgaaatagctctcttatggagtcttcataattcggtttcactcaattgaagatagagattagcttttgaatggcggctttatattctttaataggaggccagtgataatgaaacaatgggatcctaatgtgaacttcaagaaagaggatgtgaagagtgtgcctatttggattcaattggaagatttgaaattgaagtattggggccaaagatcattgttcaagatagttgggcagattaggaagccaatttatgttcgataatgttacaaaggaaagagaaaggttgagctatgctagagtactcatcgaggttttgatggatcaacccttgcctgatatggtagagtttgagaatgaatttggttggaatacttcagttgggattaggtatgaatagaaaccggtattatgctcgcattgtcaaggtgttgggcatatttctgtagactacaagaagaaaactactgttgtacatcagtgggttataaagaaagacaataggaggcaagagcagcaggtagatggtgaaggctttacaaaagttgtaagcaactgaaaaaaagactgatagaaagacttcattaacaacagaaccaacagagacagccgtgcaaaatgcttttcagattctttatgaacaagatggggctgctgaaataggggagatttatgcagattgatttggttaatacaggagggggggaggtccctctctctctaatggatagacttctatgttggaatgtgagaggagccaacaatcaacacaaacgacaattaataaagcaattcattaattcctaaaaggttgatttttttggcctccttgagactagagtcaaggctccaaaacttggtaccttgtacttgaaattatttcaaaattggtgtttttcttctaatatagcttggcatggaggtggtaagattgctattgcttggaacccatgaaggttcaccgtagacatccttaaatgcactagccaacttatgcatttaaagttgtcaacagttgaaggttttggcaattttttaactgtagtttatgcatccaataatagggttgagagaatgatattatggaaagatttaatgggcttgaacactactgataactggtttttaatgagggacttcaatgacatcctttcaaaggaagaaagagtggggcatagagtcaaattccaccccgataatgagttcttgaattttgtaaaatcatgtcagttggaggacatcaaagctagtggaaattttttcacttcgtctaataaacaacatggtgatgagaggattttttacaagattgatcgagtacttgccaacaaaacttggattgacaaatatgatcgggcagaggtagtttttctaaacgaagggctttttgatcatactcctgtgatcttatctcttcatccagaagtagtgagtggaaagaagccattcaaatactttaagatgtggaaatcacatcctaagtatgagaatggtttgaaagaggtttgggatagacctattgctggcacaaaaatgtttcaagttatctctatgatgaaacaactcaaacataagctgaaagagattaataaggaaagttttcatgatttgcaggctgctgtaactagaaacaagctggatttagatactctgcagcactagattcatcaaaatccttttgattttcagttgcattctcgagaaaaaaatgccagagagaagtcaattaagtctcaaagggattatgcatccttccttcaacagaaacctaaagttgcttggttgcaaagtggagattataatacagccctatttcatgcgtgtataaagcaaagacagcggcaaaataggattttatccattgaaaagctggatgggattagggtcaatgaagcttctaagataatagatgctttcctggaattctataatagcttacttggcactagaatggaaaatagaaggaaaattgagaaaagcatattgactagaggccccattctcactgttgataatggcagaattgcttactcaacattcacaagttgatgatgtgaagaaaccctatttttagtatgcctaggaaaaagtcacttggacctgatggatactcaagaaacttctttcaagataattgggagtatattggagaggatatcagtgcggctgtgctttcatttttggaatcaggtaacattcttaaagaaatcaactcaactataattaccttggttcctaaatgtaaatgtcctaactctgttaaggattttagaccaattgcttgctgcaatgttatctataagattgcaacaaagctcttgggttctagaattagtaacattcttcctgttataatatctcactcccaaggaggttttataaaaggaagattcatagggcataatattatgatttgccaagatctggtaagacattatggaaggaaagcgaacaaacaaagttgcatgatcaagcttgatctccaaaaggcatatgacactattgaatgggactttattgaggaagtgttaacaagcttaaatttccctcacagcatcatccgaatagttatgaactggatctctacccctaagttctctcttatgctcaatggagccttgcatggtttctttgaatcaaagagagggcttagacaaagggaccccatgttccctttgctgtttgtcctaggtatggaatatctgtctcgattaatggggaagattggagagaaagaggatttttattttcataacagatgtgctagtcttatattgaatcatctggcttttgcggatgatgttcttctgttttgtcatggtgatctcaaaagtgtgatgtatatgttacaggctttgaaacttttctctatcatatctgaccttcatcctaatccaagtaaaactgcaatttattgcagcaacttggatcaaggatgcgtaaacaagatcttgcagctttcaggatacatgagacagaatcttcctttcacatatcaaggtattcccatttgtgcaaagaagataccagggaaagaatgtgaaatactagcagagaaaatgatggctagcatcaggagctggagttctaggaacctctcctttgcagggcgaatcacattgatcaactcagttcttataaccattccagcctattggagtcaaatagtgattttgccaaagaaaattctgaaggcaattgaatctatatgttgagcattcctttggaaagggcaagccatgttacacggtgcaggagctatagcttgggatagagtgtgtcaaccaaaagctgaagggggattaggaatcaaaaagttggaagaatggaacaaggaagccatgagcaagtatgtgtgtgctatctcgagccacgaagagagtctttggcttagatgggttcatagtgtctacatcaaagatcaaaattggtggagttacaatgcttctatccatgcgagttggtattggaagaatcttgtaaccattcaacaatcaacttaccaacttaactgactgtgattcatttcagcatggaaaatagacaattgcaatcggttacagtttgtttactgctccacagccaagagtgaagtgggtgtaaggaggtttgggcacgtttgaacacaccaaaacatagtgtgattctttggctagcaatgcttaaccgactgaaaacaaaagagaggctgaaaaagtatggcatcttgttacaagatcattgcagtttatgtgattctaacatggaaaatgagcagcatttattttttgattgttgtttatcttcttactgcttggatgaaatcaagcattggcttgattggaaggcaataaacatgtctcttccacaactagttcggtggattggca

SEQ ID NO: 50807 - DNA, 802 bp, Cannabis sativa
actagatgttgacagaattttaaccatcccactaagctactttagcagcgatgacacccttatttggcatcaccactcttcgggttactacacggtccaaactggttatcacttggctgcatcacttgaagactctattcttagttcgagttctacatcaacgacctcttggtggaaattcttttggtcgcttcaacgtcctccaaaagtaaaaaaatttgcctggcatgttattcacgatgctcttccagttgccacagcccttgtccgaaggaagataatcacaaattcaacatgctccgtctgtcgacaagcctgggaaataattggccatgccctctttggttgcaaatatgctaagagagtttggagatcaatgaatgtacaattcgattggcatgctagctcctccatgaagaaaggggattgcttacatttcctttcaacaatccattctacctctgaaatggagcaaatcttttgtaccctttggtctatttggactgaaagaaataaggtagttcatggcaaagttgcaaaaccaactgctgttactggttctactgctgttactctactccagaattttcaagctgctaatcaaaaatatcagcacgtcaaaccagttgttaatccagaatcttccactgctccttcggttgttgcttcttcttcacatacatcagttgctgttgcacctcacacacgatggaaaccacctgctgctggtttactaaaactaaatgtcaatgcggttgttcaagcctcaacaaacataattgacttgggtgctgtggtgcgg

SEQ ID NO: 50808 - DNA, 2547 bp, Cannabis sativa
gacacgtgtcacttgtgtattctatcacgtcgttatgcaaaaaaaatgggataacacaaaggctagctattatggtgttcactttctttttggagaaaacttatttattaaattattactttatttaataataagatgtactaagcaaggttttaagtgtacgatttagaaaaatgactttctttctgttagaacttattttaaacaggatcttaatttattaagcatgtatgtttaattatcacataataatctaacatcctaaaatataaaatacttaaaatgataaaataacacataagagattagaaatcttaatatttattgcagtagaattaaatgtctattctattcaattatctaacccttgattcttgttttgtaagaattaaatgtctattctattcaattatctaacccttgattcttgttttgtagcaaggtattgcctagatcaacttcggtagtgaattttaccaaaaacgacgctaaaaggctttaaaaactgtttctaaagctcaaatttgtagttgtgaatagagggttcaagattaatcatttccaaaattttaaacttttgaaaatgaaatttaatatttaatattactacaatattaaataattaatcaagagaagtgaacttgaaggaaataaaagaataaataagtaaaatatacaaaattaatatttgtatatttgtcaattgataatatagtggcctccgaaatctgtaactgcattatgcaaaaagccttaagactcaacctcaatagtcggataaagaataacatctataagatttatgaagggtgttgtacttacttttagtgcaagtgagagattactagagtttatatcctaaaagcaagtatttaatagataatatattagagaatatataaaatacaagtataagataaattaatatgttaattatagaactataattaataaatatctaaaaattccatactcatatagagtaggtatgatcttgtaaagcagtataagagaactaagatcatacagtatgaataaaataagtcggtagtgtattaatgtatgaaatctttaatatgaaattctcaaatacgattatctaagaactatacattagtgcctgtgattttgattcggatcacatatgtggatagacatttagtaaatgtactatgtataattatttgattatgcatgattggagcaatatgagctaacttcttttatcaacgtaccattcctcataaaagagttatcatatcagaatgatgatgatcactagtagaccagtatgaatcttgaatattcatgaatttctgtttgtgttaattagattctttgattcactcaataaagcttttcagagaagatgattcatacaatttatattttgggaacctgatgacatgagtggctggaaagatattatacaacagtgaaatttaagcttttcaaaaggatcgaatatttgctgctttatattgttaattcagggagtgctaacagttggatccaaaactataattggtgttatagattaactcttcacattgaattgatgtacataaggaattcaagagataattagaagagtaacacagtaatcttgacaagctctaattatgagctaatataattggaggacaaactacttatattgattatatcaatagactactagaaagaattttgtagatataattataatgaagtaacaatgaaattaataaacctaattaccttattgataagtttcaataataatcatgagtttattagagattctaaatataggttcatggtccctagatcacttctatacaacactgtataggggaaggtttaatttgaggaataaattgagaacgagttagaatctatgataaatgattcttgaaagaaaattagtaattttgtatgaaatagtataattatttaattatgttttgaataatgaaaatgtatttaaataattgcttttatataattaaaactatatataagttaaataaaatattattattgaataatattatgagagagaaacatattatattagtggaaaataatatttagataatctagattaaataagagattaatgagaattaattaattattttttattaaaaaataaataaaaaacttatttagcacaaaattaaaaaattaattttaaactttaaaatataacaaacaagtgtagggtgacatattaaagtccatgaaatttgttttggttattttattataaaataagattatgaaaataaatatttatctatacttttaattatttaacaaaatattttattgtataagatatttataattaaaagaattattaaacaaaaatgtaacttatttagttatagatattatcatatttaaaactcaaataaaaaaatattatatttttattttattgggttaatttttaatcttatatatgtactagatagatgttacgtgccaagtcatgttaattttattttagttttttttaatattataattttaaagttaataatattcaatgtagtgata

SEQ ID NO: 50809 - DNA, 898 bp, Cannabis sativa
tttattttgaaaaataaaaaattgagagaatttttttttttttttgatgtgaaaaggaggaagaagaaaacttacatattgattcttggatctggggatggttctttatattattttttttttttttgtgtgtgtgtacgtatgtggtggaccatttcattggatgaaatgaagctttgataaatgaattagagccgttagatttgatgacagtagtagtggatattaactatgaggaccactgaaatgttactttcaaccaaaaagtggtttttttttcttaggttgcgacttgtgagtaggcccattctgatataaactgttcgaaaaacaaaaacctacagatgaaattgatcactcgaagccctatataaacatctttggtgtgagggttcaccaactagtggtccctttaaacttatcatcataacaaatgatgttgcccattaatatttgcactccacactctaactctctacttacttgttcttataagaatttaaacatcatttatttcttgccatttattttcaatacatatctgttttttatgtgtattgcatatagtttttgaataattaattcattgaggatgatttatggtaattagtttgctaataaatgcgttacactctattgtatatataattaagctttatattaatgtcactctatcatacatgatacatcccaagtgacattattaaacgaaaacgactgttatttattaactatactagtgttattacatcactataatgaatatggcgtacgtaactgtatatattaacataaataagtattatacttagtccctatcaaacacatgtattgtagttaaatacatatacacaccatattcatatataataaatgaaaattgctaaaaagtactact

SEQ ID NO: 50810 - DNA, 2945 bp, Cannabis sativa
ttctgcaatggaacacactagcaataagcattaagcaactgttacaagcatgtcaaagcacgaagcatttctctgcagctaggaaaagtatggtgaaaactgttcttgcaagtcttgtgtatcacatatggaaggctaggaatgaagtactatggaatcaacaagtgtggctcattaatactacggtgaagaaaactcagcaaatgagcaagctgagaattaaggggttgctgcccaagaaggccaaggaagaagataagaaatggattttgatggtttgattttgtaaaaatgttaagttgtaagtgtaaatttgttagcaaaatgtatagattagtgatttaaaaggttggtttagagcaataaaaattcttattcatcaaaaaaaaaaaggtgaccgtgccacgtgtcgtaactcttgccacgtcatcattgtccaaatttaagtaaacaccttcatgcatatagatatatttattcaattaatttttcatctaattacattttataaataaaataaaataaaattatttcaacttttgaacaaataaaatttagagaaaaacgcttatatagatttacttaaaattatttcatttttaaaaatcatttgtaacttctgaaataaaaaagatatagaaatgcaaaatagaaaaaataatcttaaaagaaatttaatctataaatatttaaataataataaaaatatttaatatttatttataaataaatttaatctaagtagatattattttttaaaaaatattacttctaaaaatataaataatatgctatatataaaatatatatatattttaagaaaatccttattggataaaatatatatttttttttgaaaaatagcgtttataggaaataaaaaaaattatacctcacggtcattatataagatattttctgatatagaagatagctcgaccataccagtaacatttttagcaaaagtccacctagcaaaattatgagccgctaaattacaaagtctaaaaataagcgaaaaattacaactaaataaaagattagagagctttttacattgatggatataattatcaataccctaataagagcaatttcctttcagggcattgataactgtctttgagtcactcttaatcataacaaaatggtgatttatcataatcaccatctccaaagctaactgacatgttgcagcttctccaataagcgggtcagagaaattaagcatgttggtagtcattcacaaaacaatccatgtgtgatccctagctaaagtcaccacacacatgaaacaacttcccactttaacgtcacaattgattttgacccaatcctttggaggaggggaccaaacaggagacacaacagccatcgtcgaagcaaataaacacatcgtaatctgcgtaataagtagagatagaatcaatacagtgctgaatgttacccagagaattagtgtgtaccttgtggttgcgggctttccaaatcgtatcaactataatcaaagcatatagaaacaatttgttagtatccacccctttcgatctcaaattccaaagaaattttagccaatcccaaacacgagcactagattccaggacatgcataaccccccaaggggatgacctccaaaggtggaaagcaaaattgtagtagaggaaaagatgctccatcgactcctcaccatctccacagagaggacaagaaatctcatcaacttgaattctcttagcaaggaggccacgaataggaagagcctaaaaaattatgcaccaccagagtaccttatgacgctccaaaattttagtgttttagagtttgttccacaaggtgggggcaaccacgtaggaagtggctcgcttaagagcttgaataagataagtagatttagtagtaaataaattattaggctcttttgtccacacccacctgtcactaccctgaccacagggtctaccacctttaatgatatgcctaatcgtttctgggtcaaaaatcgttcgaagctttggaatatcccagttcccgttatctaacagtagttacacaaccttcgttacttcccctggcccagccgaagttggctttgggtaaaaatcctgaccatgaataacccaaggatcagtccaaatgttcgtctcttccccatcagatatcagcttgcatgcatctttattaaggatttccttagttttcacaacattcttctagaaccaagaatctgagcttttatcggaacaatccaagaatgacttgcctctcagatacttagttcataaaactttgcagcaaagcctgattaatttccaaagtctttcaaaaacctaggccaccccaggacttaggtaggcaaagatgatcccaagcttttagatagatacctttgttgccctattcacaaccccaccaaaaatttctaacctaccatcaattttagatgtgaatttcttagaaagcttggtagtctgcatagtgtagactggcatagtaagacccaccaatttaatcaaggttgcacgtccgaccttagatagagttttcaatttccacctgtggagctttgaaacacagttctcaataatgaagttaaaatcaacatccttttgatgggacctaaataaggggagtcccaagtagttaatgttgctaatggcaatgttgagcccaagctcttggagaatgcctcttttcatccctcactagtgttattactgaagaagatgtaggttttaagattgtttatacgttggccagaccaatcataaaatttctccaggcattaccgaaatccctttgcttctgcaatagtcgctctacccacaaggataaggtcatccgcaaagaacagatgggagagtctagagccatccctactcaaagtgatacctctaatggaaccagtctcaagggcattctcaagaatacgcaaaaggatatcagca

SEQ ID NO: 50811 - DNA, 713 bp, Cannabis sativa
attcttaaagtggaaattcaagatgcaaataataagactattaagactaataatataagcggggtcggtcttaagaatatatagggtttaaagttgggatttgaattcatgacattatataatatgacatacatttcaactaattaagctataattatttattgtttacaatacacttaattttactttaataaaaacctaatgatttttttatttttttattttgggtctccaaaaagagtagacactaagcacagacctaacctgcttatgccaagggccaaccctgactataagcttccccctttcaactcacacatacactaagctttttacaaaattaagcattatcttatctttttttgataactttttctcatcaacaaataaaatcgtagtcttaatactttttttaactaacgaatcaacacaatgaggagccaaacacctaatttcaaatgcacataaatttctattcaactaaattttatatgtagcacatgttattgttgcatttatcaccttgattaacaaactttcaggtcgctgctcaaaaaattataattattttaataaatttatttaatttataagttttttgcactattttatagtatacttatctttaattaagaggaaaatatttaattttttaagtatattttctatcggaggtacatttaaatatatattttaaatgtatttatttattt

SEQ ID NO: 50812 - DNA, 1148 bp, Cannabis sativa
tgagattattggatttaagagctttcgtccaaatttaataacatgtgtctaacgttgatgaaaattcaagtagcacgattttgtacataataaaatttggggacacaatttagtacgtatcaaagtttgtcgaacaagatttagtacatggacaattatcatgctagttaaattaaacaaaattagacaaaaatctttgaatctaaaaatctcaatatagaaccacaacatatagaattgcaaaaataaatcagaaaaccctgacatgcattgaaagaatttgtatcaatgttaaggcattgttcatattgataaactcaattatcatcatcataatacactatattgataaattcacagttatcattttcactaatatatattttaagataacttaaatcgttaactttaatagagagaagaataaaaaaaatgttcaacccaaaattgtgattagatagttatttttatataatatattaactttgtgggggtatattcttgtattttgtagatggagcaattagagcatcttcaatgacgtaatataaatgtggtatatatctattttttagcttatatttataaaattgaactccaataattatgtataatgtgatttaaatttagcacatatataaaagttatgccaaattttgacacaaaataagcatgagtaaaattttacaccacaataaatattttttttttatttactctattatcactcgttaatataattaatgaattttatattttcggttatatatttaagatgatttatatatattttcaataaaaatttatgtttttgttgacttttttttcacatttttattaaaataaaatctactttactcttaatatgttagagtataagtataaaatttgaaacaaatataatattcacttatgtttttttgaatcaatttaatacaaaatttacacatcatcagtatagattagtcataccttgaaattagggataaaattgagtggaaataagcgggtaatgcacctcccaatcccattctcgttttccatttatgcctcctatcctttctcccatcccacttaatacccgataggttcggggtaagagaatatccattgggtaaggagctcattgggtacccattaagattaaa

SEQ ID NO: 50813 - DNA, 1053 bp, Cannabis sativa
aaaaaaaagagaaactgctgctgcttttctccttatttttagttactctaaaaatattattttaattcaataattgaggcttacgcctagcctcactgaaaaaaaacgctatgaggcttaaagccgcaattttaaacaattttcattaaaataagaagaaagggagacagtaaagaaaagatagagaaaaaaaacatagagttgatcattgataaagagagaagaatacaaagagcactagatatcaacgccattttggtacctacaaatttcaacaatatatctccctgcattaaagaaatctcttcagcccttttgatttaactagttctttttcgttgtcaatcaatatatacactattcattatagtatcaccctaccaaagaatagcttacgcctctgttcaatgccatataaataaatattttcacgcaaatcaatagttcaagtccaatgagtccaaacacccatgtaatcattccaggattttggccacaaggctttcaatttaccttgtgattgttgttgaacatttccttctgctgctgctgctacatctgatgtgcctgcagcagagcctgaattttggcaagcagatcctaatcgtaactcattcaaacttctaatagctgaatccaaatcatctccacattcttcaactgctctctccagaagctagattgataaaattccaagtgtcagaaacttttcatataaattaaaaatctacaagatacttcatacactatggataaaaaatatcaagagaaagggaaaaaatttatagacgacctagaaagacacattcaagtcgaatagattccatacagagaacatatattaactccaaagcaatgcggatgaattctaaataacagcctatcaatcatatgagccagaattacccaataacaatatatatacatacatatacatacatatatttgaccaagaataagccaaagccagaaacgaaactgaaagagttgtgtttgcaaactacacccaacacaaaacttctaacaataaattagcacttaaaccctctaagg

SEQ ID NO: 50814 - DNA, 1554 bp, Cannabis sativa
  modified_base (443)..(447): a, c, t, g, unknown or other
ggaggaacagtgagatggagcttggcagtgattgtacatatcgcgacagtgcaacctggagggtctcggtctttcaatattttgaaatataatttaattgccttttgttcgtaaaaaaaaattaataataaataatatataatacttttaactatattttgaaattcgggatcccgacccattgtttatacagtgattatattatgaaattatcttagaatttagtaagtttcaaagcgggcattacaacatttacttagcgtgatttgtaatccagtcccatgatttgagggagtaattgctgtgaagattacaatcaacttttgtaatctactgcccactatgtagttataaatagtggtagacaagatgaaaaagggggacaaaaaaactcatccaagagagttcctaaaaaaacaatcaaaaatctaaataagattgannnnnggactatgcagaattttaactacaaaaccacgtaaaaaaccctatgttcatatttttatttttatagcttttatttttctgtgtgaaatcaatattgtgaggctcaaatttagttaacgaaaatctgcattaacaaaaaccctttccaaatgcttatgttattggttgcggccgacccattagcctccaatccatttaaatctttctcaaaagccccaacttatgaataaattggctttgaggccccttcagcacactcaaatcatggcccacatgtgtttgaatctctagtaactccttttgtgtggtgttaactaccttaacttccccactcttccacgatcccatgcagttacactctttgattgtaatggcctctccactgctctttcgaccactacacgctgtcccacattcctatgtcgcccccttcagctattactcctccatcacgatagactgctgttgtagcatcattctattcttgtcatcaatcattgtcggcctttttcttagcaataggagttagcaataagctacaatgcaatttggactagggtcattctcctttaaccacaaccctatttgggaacttgaacgccatctttgtccacctcgataacaagatcccaaatactctttgtttgctcatgaccttaaaatccgcaagtgaaacacagtagtggtaacttgtcaaacttaaattgcacccagttcttttatccatcaaccggaatgtatcacccaacaaatactctttgttctattgaaaatccaatcctaacacacacagatccatttagaaatactcgtggaggattgctccatcgaatctcttcaatctccccgccatgttacccaagtgtgtgacattattcagagtaaaagattttaaaggaaacccccacattccaatccaacttgagatcttatctaattttgcatctcgacactgtccagagagtggccatttttctaaaactagcattccagcattcaacaagcatacctatttgtccactatttttttagcatccaacctagtcacaaatattacatcaaataacttatgatcgtccccttcatccaccgctttcacattccaat

SEQ ID NO: 50815 - DNA, 1437 bp, Cannabis sativa
  modified_base (46)..(69): a, c, t, g, unknown or other
tgtaacatacatgtaaacatgcttcacttctaaattgataactaannnnnnnnnnnnnnnnnnnnnnnngggcataaaacccaacataaataacatgtcaaaaccctaatttgggaaaccctaactccaactaagggttctactattggtcactactatagcaataccccaaaaatcaaggaaataaccaaccatggcacttggaataacactaatttacaacacgaaaaattcaggaaaccggttaactagttttatagagcatgtaaaaccaattaaccaatttgcaccatgtaacccaaacaaatttgaaaccttgtccaattcgtatccaaaccttaacaaaccttcctgaacacctgtatcaaccccaaacaatatattccaagtagtaacagtaagtaaaacactcaaatactcaatatgccattattgagtcaagtttgagtttcttaaaactcaaacttgctcaacctcaaaaccagccaacaaaaacagtgcaataaagctaaaaacgtcaaacctaatctacaaaaaccaactctagctaaaaccctaacaaaacagtagctaacaaacaattatgcataattcaaaacttaagaaaaagttagctctagggctcaccttagctttcctcctccaaggcttctcctaaccattgaattttagctagaattaacaaggaaaaatctgaagaaccttggttctatggctgctacaaaaacgagagagaaagagagagagaggaagagaaatctcaaagaaatagggtttttcatatatttctaatattaccctttccttatgttatcccaatttttacactcagacgtggcttcacacaatggtgacacgtggaatcaactttatgaacctgctcgcaagagatatgccgaacagagcaccacatatattcgctcagacaacgccttcttaaccgagcagtgagcaatctgaacagcacgccaacacttagaaatttcatcttttgcattatcagtcaccgaagaaatccatacaattttgggatcttatcacaaagatatggcaagctgtccggatcccttgattagtgtattttgtatttaatatgcaatcttttcaattatatctattgtaatcagaagggaaattcttccctctcaagcttatagccctataaatagtgattcatactcactgggcaaagggtcgaaaaacttgtctaagaattcatattcagagatactattataagagctctaagaaaagggattatattccttgttcttgtgtcaatacaaaccaagaggattaggctattaccgaactgctcgaggctgaacctctataaaattcttaagtctttatttacttcggtatattacatacacattatactacttgtcgctcacaatttagactcactgtcgttggccaaaagcgaggtcaaca

SEQ ID NO: 50816 - DNA, 1094 bp, Cannabis sativa
atatatatatatataaaacataattacattttaataaacaatttatatataaatatttttagaaataatcaaattttgtttctttattagtattattcaattatatattattatttttttatctattttttttttttttgattaaaggcttcggaagagcaaacaaagaaacccagcagggcaaacaaactccacaccagggagaaaacaaagaccaaaccaaacaacagaacaaaaacgccaactaaagtaaacaaagcctaaaattagagacaaaaaaaaaataaagcacccggggaccactaactaagtgatgagaggttatggtcatctgcaatcagcgaatgcgaggaaccaaaagcagagggagaatcgaaatggccaaaagccttacagcagttccccccttgggccacagaatgggctacacgattgcaggatctaggaatccaacaagcttcccaaatgttaagagaagccatggagtgatggaacttgcaaacaagctcctgaatgttataatgttgcaacttgatatcttgtggtctcttgagcagaacttcaatagcgttagaggagtcactttggaatatgacatttttgtagccttgtctagcagcctcaattgccccctcacacagagccgcaacttcccctgccagtggatcacaatgtttgatcttgaaagtatagatacctttgcactgactattgtgatctctgaaaatagccgctcctgccgactggttatttccaattgcaatatcagtgttacaagtaatccacccagccggggggcgagggggtagccaatcactaatcgttccagtttttatggagtgaatctccaagagctccaacagtctagagttgatgttgatcacggtggctctaagaggagttgttttcttgtcatgaatgagtgcatttcgaactctccagatgttctgaaaaatgattgtcgcccctccaagaaagagatgataattgatatttggaggcctatctgacttagtagcaaaccaagtcatccaattttcccagtcgtgaatgttgagctcttcggttctaacatgccagttgaagccaaacca

SEQ ID NO: 50817 - DNA, 720 bp, Cannabis sativa
ccctctctcattgggagtctttagagtcgttttcttggttaatatcttcagaagactcataggacatcttcactaatgctcccctattcctagtctcgagttgtcttgggaagtaagtggagattcctcatcaatgctcttctactcgagatcatcctgggaaatataagaggagtcagtggaagcatttagtgctatatcttcttcactttcctggttaatgtctattggagactatggaaatagataataagtgtaatcgatagtttttggttgagcaactcctctgactttcttgacggctactttgagattgatgaaatcgtctgatctgtctagaaactcttgaatggtgtgtactgatttaagtttcaattcatttcacaattgactcataacggttagtcaagtagtcattgccatgatcttcgcatcttcactgagtatcttcatatgtgttgttgcctctaagaattgttgtaagtaatcatatagaggctcatcttcttgctgcttgatgtagaccaaataattaggctcaatcaatctatgtattttagggagataattgattatagaatgcttctttaagtgtttcctaaaaattgatagatctagaagaaagcttgagataccacttttgttctatttttgataccatggatggaaatatttgacaccaggattcatcttgaatgccttgcaggttagtttgtactt

SEQ ID NO: 50818 - DNA, 1164 bp, Cannabis sativa
ccttttggctctgataccatgtcataaggaatgaatgtgtattactaatcctcagggtcggccctgaaatttagtgggctaaaaaaatatttttggagcctcatttagaaaaaaaaatggagtatttttcaaaattaataaaaaaaaaatgtataatttaatttaaaaggggataaattttttttgggcccctaagctaagcggaccctagtcacaaacctagcctacctatactcagggccggccctgctaatcctcaaggaaaagagcacacactacaagaatatttatagcaaaataaagacacattgggagacacatgtcacaaataatacaaaaataatacaaggaaataacaaatgaattcttttatatggtttaacaatattcgaggattagaatcagctatgcatattaacaataattttcaacaatccgtattaaacaaatcttctctattcttcaaaataatgatatatgtccacacagtttttataagttaatattacacacttatatatctggttaagaaaatttaatcaatcgtgtctatatattttagataaatccacttaattagttaaaataatttgtgacgtgcgtaaaataccttaacttaggttacgtacgtactcagagctcatttttatcatttttcttttcttatacataaacatataattgatcacttatattgggagtgctctgggtggttatcgcattcttttttgtgacattaaattaatcgacaatactaatttgtgcattatatcatcgatacatataaatatactttattaagtaatcctaaaggcgtctctctctctctttgatttttaagggtataataataataatctctcatatattctctcgttgtttgaagtacttttacagcaaagattaaacaaataatatatatataatatacatctatatagtatgatttttatatatatccaaacaaacaatatatacctagttattccaaaattacaaacgcgttttcaacagtgtgagcatgcaaagtttgaatttcttgacacacttagttagctatcaacctctgtatattattataaatatgtcttcatgcggatatcacacataatagcctataaatactctcccttcacttcttgatttcataacactactactact

SEQ ID NO: 50819 - DNA, 1714 bp, Cannabis sativa
tgactcgttgtgttcgtattttataaattttttcgtatcacaagtcgtgtttgtatcaaacatctaaaataaattaagaaactacaacacaaacacaatgacactaaaaaataacaatttagcttacattccacccacacaatccaagattacacaacacaaaaatttattcaagtggtgctagtgtatgtattctataaatttctcgtatcagacttatgtttctcacccctaactattatgtcatgttatgttcttgattatcataattgaataattatcagcaaaaagatatttgcagaaagtaaataattagacttagagccaactttgaacatgaaattgaaagccactatattacaaactaagctcaacaacttttcttacaaaggattatttgttcaaaagaaaattaaaagttacagatctaattgagtttattgggatattagatctaacttggtgttagtgtagtcggttcctaacttaactcaatgaacaaaaaaatggcaacttgggaagttagctgacaaggggctgcaacttatatcccgcaatggactccaacagccatgtgtgagcgataacttgagctccagtttgagaagctacatcttcagcctcagttaacctttgccataggatcgaaacttcgtccccaagtttgcatccttctggaggatcaacattgtaagcgatcaatgccttgggagattgagcttcctgtcgatcataattttgtgctaccagttcttctcggctttccaacacagcaccaccacctgctatgactaaatcttgtagatcttccttgtaagaaggtagaaaatcacccacgaaatagaaatgcaagccggtaaagagattccgtgcctgcaaaggaaatgataaaccaaggcataaaatcacaatcaaagctcaatgagtgagaatcaaatatggtaattagggttcggaataagggacttacattactcaatgccctaagcctgccattcttcggaccgtcacaacacccatagttgtcgagattaacttcataaggttcttcatctacatggcaatttgattccatggaagctttaacccctacaaaaagaaagatgattttatggttgtgttatgatcatttaacattaaacaagttcaaataaagaactctacagttctacaataaaaccagtaagttattcagaaagtaaaagaaatttagagaaactaagattcatcaatataagaaacttagttaatagctaacaaaatacaagtgaaggtagcaacttacaatcaacattaacaatccaacttccattcaaaattgccataagaactttaagcgtccgagtgcaagcacccttctcatctgtggcagcaatcacatgtgacacagttggattccaaaacttggacacaggagcatctttcattttagcaaacttgaccatgagaatctgtatgaataagtacaaaaaaaaaataagtaatgagtcatttgtattacagaacagaatagccattcatagaggagcaaaagtactgatatgtcgaaaatagaaaaaataagaagtattttctattagagaggaaaataaccatacatagttgactaaggcaattagtcaacttaaagcattgcaattaagtttgttagttatgtaaataccatgaaataattttgtttctttatctagttgttctaactcttattcctatc

SEQ ID NO: 50820 - DNA, 985 bp, Cannabis sativa
aagaaagggttaagagagaagatgagaatcagagatgagggttttgggagccttttatatacactccataattcccaaattgcccttgcatttcaaaactaattccattttattaagagaggagtactaccgagtgattggcaaaacggatcagacacgataatatgatttgaaacttgcacgaaagttaatgagtttgtatttgtcttaaatgggtccaggtcatgtttgagttgactcgtctaacccgtttaataaacaggtcgtatttgggttgatacgaaactaacatgttaatgacatatttaaagttattttagtactataatatgttataattgggtcataaatgtgttattggttgatacgtttaaataaatatgcttataaacgggtcgtgtttggatttcattttttgacacgtttattaaacgagtcatgtttgggtcgagcatatacctattatcataggtctcaacaagacacgaatacgacctgcaaacacgaattattacccccaactattatcaacctcccattacatctcttagtcaacctctgtgcccaaaaacacataacgaaatatttttttttcacaatagtgttcgtgacactcttaacatcatccttgtattttttttttaaaaaaaaaatcgaatagtttacagtgctgaaaaataggtatgaaattttttgaacactcgtggtaaactgaaatattaggaactctgtttttgatgctgtaaactatttaaatttttttaaaattttactgggatgatattgtaactatataacgaataacgctatgaaaaaaaaaatatttcagcatgtaattttaaatgtaaaggttgactaagaagtcgtaataggaggttgtaattaataattatcactcctctttaaatagagtatttacaacgtaaatatttaagtttaactctcggttgaaagtaaatacataagtttaattttttatggtaat

SEQ ID NO: 50821 - DNA, 1565 bp, Cannabis sativa
gaagagaaggaagaatcagatgatgtaagttttgctgattaatctgtttgctttggtttttgattttttagtaatcctttgaattttctttctaatggtgtgttgtgatgttttcttttgtttcaggatatgggtttcagtcttttcgactaaaagctttgatatggagattttgaggtttttgctatttgaatgttgttttttatgttctatttttgtttagatatttagagaaggaagcaaaatttgagactgtattttatatttatttagatatttagagaaggaagaaaaatttgagacacttttactgtataagcttttatatgagtacattgcaattgtgccatttactctaccttgtttggttaaacttttgctttttgcttttagcttttagcttttcggctttctcttcttgaataagcttactaggccttggttggttgggcttttaaaagttacttttggacttctgaagctccaaaagtacttctggtggtgattgggtagctagtgagtttcaacttttagttttaaaaaactctaacagaagtcggttttagtagctttcttaggaagagcgctcttcatgagaagttaagaggtagaaagtaaaagtttagtcaaacaaagcctaaagtgacttcggttaaaaggactttttagagctaaaagttgaaattcattagttatccaactagcagcagaagtgtttttagagcttcagaagcctagaagcagtttttaaaagcccattcattcgaaagagtggtgatatctttgtttttctaaactcaaataattaggttggtgttgaatgacaaggtagttttagtaacttgaatggttatgtgtttggtgaggagctcaatttgttatggttagggttatggctttttggtgtatattctcatgttacctatattacacacgcccatttttaattttgctttgttttttattaagtaatttatggtaaaagtacttaagttgttctttgttacggttaaatttaagtataactgggaattaaatttaagtatttttgccttaaaaatgtgataaatttgatcggctttctaaacgtttcgaccacctcttggaaatggaattattgaaactagggcaaaataaggccatttgtctattttaggatgtgctattcttgaatcaaattgctaattttaattccattatcttccctttaagataatattatccttcacaaaatctactctagaaaataacaaaaggagaacccataatttattctagagaatctactaattgttcccgaacaacttcaaagagattctttaagaattttctttcattagcataaaatcttaggtgcaataatgggttcacaaacaaaatctatctttctcaaagataataattttattaataataattatacaaaaatgtaagtacccaaaatcaacttttacttcggatcatgtgaattataacacaaaagtataaaatatctaattaaaagcacatgttgtaatactttgggaaatttacatggtatattaatttttgttatttttttacaa

SEQ ID NO: 50822 - DNA, 1200 bp, Cannabis sativa
cgggtgttccttggcaagcaccggtaatcctagtcacaattcttgatatttcacatatatggttaatcccaaaattcaatttcacataatcacataattttcattccaattaccaattacagattacagataaagataagcactaagcacatagacatagagctcgaaacgagctttccaactatataaagaacgtcccaaagtcaaaaaattatggtgaaaaaaaaacccaaaaattccagggggaaaaatagggtctcgccgcggcgagcaaggccacggccgcgacaaggggccctgtaacccaaaaaaaagctaccattttcccaactttgaattcatacctaaaactcataccaaccacttccaatttatgcataatcacaaattttaaatcaacacaaccaaaactaactttgatatccaattagagcatcaaaccaagccctaaacaataccaaagatacacaaattcaacatactataaaacctcactataaccaacaagttgaacttcaatcatcaaaatattcacaccaaccatatttgcccagaaaaaaatagagtcaaaacccataatatcatactacattttcaaccctaaaaatcacacaaaacactcaaattgcaacccatatagtatcaatagctcaaacacataaaaaattattaatgtttcactcaaaaataagaacatgcatcatcatttcaagagcatcatgaacaacaaatagaaagctttaaaaatcagaatttaacttaaagtaaaagaaattaaagagcttaccaccaaatttacaagctccaaacacaaaaatcttccaaaaatacaccaatccaagccttaatttccaaaattaataaaaaattgaagaaggtaggaaattgagagagaggggttcggccaagagctagaaagaaccatgaattgatttttaattttctcaaattttgtttttgttgaataaagcttaagaggttaaaatgaccataatacccctatagtcattataagcatacttatctaacctagagtaaattagtcatttcatcacacacacaatacataaattttagattctcattaatcaccataaaacaatacttaaatctcgaaaaatgaattttgggccctaaatccagttcggtctaaaatacctagttgtgactataccattttgatttgtcaaaaaacaccta

SEQ ID NO: 50823 - DNA, 1072 bp, Cannabis sativa
attgctaaatgctaatagaatatgggttttggaggttttgccgctaaaatttgaatttttagagttaattactaatgaaatgaaagtattaggagtttagccgcaatttactcttataattcctttacatgtttaagtatatatgtacggacaacttttttcaaatactacaataactttagcctaacttttaggctctctttaaataaattctaattgactaaaaaatttaaagttaatgaagtggtccaattgagcaaaaaaaataaaaatataaacaccatcggagatgcctaacaagccacctcttatctcttttctcttctcttcactgaaactagaaactgagaaagccgacccgcctcgctccctccaacaatggctgccctcgttcaactcccttacgaagccacagtcaagcttgccctcgcctctctagagcgcaatcacttaccggacgtcgtcattcgaagactaacccgcctcctcttggccgctcgtcttcgctccggctacaaaccctccgtccatctccaactctccgaccttcttcgattcattaactgtaaaaaaccataatccaccgcctttgatgatgattgcccttctttcttcgatcatttcattttatatatttattgtgttgttttctcattgtgcttttatacataatatttatatataatttacagctctgaaggagatgccaatagcgatcaagactgatgagcctaaagcccagaattatgagttacccacttccttcttcaacctcgttctagggcaaaattttaagtacaggtacgtacactacagagagagtactctatttttctttttcttttttggaaaaaaattgaatgagtttgtttattaattattattactattgcttactatttggagaattatattatatttgaacttttgattattttttttttattcaattaaatatctgattctatataataatttttatagaatattaacaaataagaatgctctttggaattatcgtagtttttgttatttgagtaaaagtggagtattgaagaatgctggcaatgat

SEQ ID NO: 50824 - DNA, 916 bp, Cannabis sativa
atatatatatttatatatatataagtatacctatctatacatatatttatatttaatagctcatcacatctgtagctatatagagatctccaacgtcactacgtacaatcttaatttgaatatgtttattatatacatgtatattatatatttaattctttccattattggtaagtacaaaattaagactttaagagattcagaactagttgattaaaacttgatatatatatgtgtgttataggactagatatatacatgtttgtatttttttatctttttacatttttgacattaggtttctatatattttaattttggatagcattagctgaataagctacatacaattcaactaattaattggggatttattaaccagacactaacaagaaatactgacaattaatttcctaggtagtgaagaaaaatatcaattacaatttggttctaagaaaattaaccagtaaaggaagcaagaataagcatgttatgatgaaaataagacacaaaaatgaaaaaaactttaaacattgtcaatactttttatttatttatttatttattttggtaaatgagtaatttcattgatgaacaatacacccacaaagaactcagcccaaaactcaaacacaaatttctatatataccaactagaaaacggagccgcgcttcgcgcagcatgttaatgtattttataaattacaaaaaaaaaaattaaaatattgaaatgggagaaccataaattactccttcaaagtaccaacatatttaagtaatattattctattgacattacttttttttatacagtataatttttaattttagaaatctataaatagattaattagtatgcgtatgttataattgttttattgattgaattcacatcatataacatgttttttgtttt

SEQ ID NO: 50825 - DNA, 1354 bp, Cannabis sativa
  modified_base (1309)..(1312): a, c, t, g, unknown or other
ctttattatatatataattatcaaagtgaacaaaattttctgcctatgctgccatgcaatttcgcccgacctctaatgaaattcaaaggctttgcattttttttttcttgttcttgagtttatggtcagtggcggaacgagactccacttttaagagggccaagtataaagatttttggttttttacaatacaaatatatagaggaaatttttaatatataggtgtatcaaaagactctatgcataggagtgtcattcagtgaataaaagagcttcgtggcattgtttttttctaacaacaaatttgaatggtcacctacccattttttaaaaaagcaaacgaaactcagttaattgacattcatatatttaatttaattagagatttggaaattttatcccaatgtttattttggaattttcttctatctttattttaggtctgtaaatccatgtgttctttgtattcttaaacctcttaccacaatggacttttaagactagaatcacaaaaaatatccatttaatctgttttggatctctcaattacagtagaagaaaaagagagataaaaaaaaatgagaatttaattagaggatggattcattgaaagaggtggtggttgggttcatccttaaaggtagtggcgcataaaattttagagacagaatggaagaattgcaagagtgagaaactaacaaaataaaaaaaaaaatatatataaaaaaaatcagaaataatataaaaataaagatgcttaataatcggtatttctcgctcaaacaaacacaacttcattaattgacgttacgcgttctgattgcctctaagatactcccaccgatgaggtcattttcggagctcctatagaagaagctccctatatatatatacatatatataaaaggtaagtttatagtacacttatatttttgtaggtcatgattagacattcaagagaggtttttagtttatttttttatgattgtgtacgttgtagttatttaggtttactagtaaattttcagaatattttgaataatttacaatgcgaaaaataagatttaaatattttattgtaatcgtgacgattttttcttatatacatagtaaataaaaaaaacaaaaattaaaagctctaatgaatgcctaaacacataagaagcttagcaaaatgtatcattgagttttttcctaataaaagtcagtacttcttataattatgtagtagtaattttttgttttaatttcttttagggagactgttcaaaattttaaaaataaaacctttattcaaaaaaaaaaaaannnnaaaaaaaaaaaaaaaaataaactattttgagatgtaaaaaat

SEQ ID NO: 50826 - DNA, 773 bp, Cannabis sativa
ggcacaaaagcaatacaataccttcaaaagaaatttccaacaaaaatttgcaatctctatcaatgcattgattgacctgtacgtaatcactttcaagttcatttgatccagtagccaaagatgatggaccatatggaataattttctgtatcaatggtgccacaatggttgtccggaaaatttcttctgcatttttagtgttatcaatggaagcatatgctctcaagcaattgaaaattgcatttgcatctcggtgttccagtccatccacaaaacagtgtcccaaactagcatctaataataagctagcaccctgaatcctcttctccatgttttcaatgaaaggtaggttctgtactggcaaaacagagaaaaccaatgagcaaagatcgtgcaaatacctaagaagagaaaaaatgggtaggtcctatgaacaatcaaggatcgctatgttagggaaaaactaacaaaactggatatctttgtttgtactgatgatggtggaacaaggctctcatgataaagaaacacacccaataatacaatgcaaaaatacccacagcaatgaaagtaagttattgatattttttgacatatatacaaattagaaaactgatacaacataagctcaactactaagacagcattgtattgacgaatctattgaatttcttttactaagcctcattaacttcaaacagcatgaactttttctctcaaactcgaagaaagcaacctaattagtagtcttcaattaatttacataatgggga

SEQ ID NO: 50827 - DNA, 1127 bp, Cannabis sativa
tttttttttctttctttttcttataattaaagtataaagatatgcatttatttttgttatagtttactaaagtgtaccaaatataatatactaaactattttttttaaacggataaaaatatttgtctaattgattattattgttatttttaagaaatctgtattgattatttatgagaataaataggtgccattgtctttttttttttaacatctttttattttatttttcattgtttcatttcatactatatgaaaagagcctatataccccttttaattaaaaaattagtaaaattattttatttatttatacttggtatgattttttagaaataaaactatgttttacaataaaaaataattaattacaaatataacaatgaatgatttttaaaacatgtagaagttttttatcaacatttattttgtatttttgtaaataaaatttatatttttataatacaccatatttttatttttttagtaatttttaaaactttctaattaagtgcgaggtttaaaataacgaagtcaaatattgagagtgagtttgaaaataaataaatatatgttcatcattatactacaagtatttatacgtcagttgattgtgttgaaaaaatttaatttttaccaattcaatcataatatcgttttggcgaatacttaccttaaacttgtataattgaacaaaacttagtataaccaacctatttgatgtttgtgcagcctaactaaggttgcgtttagtaatacttttttaatcagtttttaaaattagaaaaagaaaagtattttccaaaatcatattctataaaactgtttttactttttaattttttaattaagaatctaaatttcaaaaaacaaaaaaaatcatttttaaatttttttaaacagtttttttaattgatattttgaactccgaacccaacttagaccttagaaattgaacccgacctcagacaaaatgttaccaaacgcacctaatttaataatctatttaacatccttaaaaacaaaaatcccacttaacatttttttcttcccttattatataattttaaataacagtatacatagtgtaaagttagtataaaattaaaactaactaattatacctt

SEQ ID NO: 50828 - DNA, 683 bp, Cannabis sativa
  modified_base (35)..(37): a, c, t, g, unknown or other
aacaaaaacccctagaacttaaaataaaactaatnnntacgtggctcgccacgtaactctcttctagtatatatatatatatatatatatgtattacattaattaagttacgatagaaaactaaatcagaaggaattcaagaatttttatatcgcatttacatataatgaacagtaaattacgaattatacactttttcatgtatacccaaaaaaagaaactaaaagtaattcaattgaaaatcatatataacagaatattacgataaattaaatcctcacaaattaatttagggatgattttgatacctgtaaatctaaattggctctaattaattcaagaaaatcaagtaataaaatataaattagcggaagcataccaaattccattgaattgtttgtaaaaagggtatgatcttacaatttacatcagaacatttgccttattttcctgatgatgaggattcaggattttgaagaaatacatggaaatggagaattaccaactgttttaacaattaataatatttattaactatttctaatttggtccctcatcaaattaaaaattgtccttatggtatccacatatttaaatcataacaatcatgtttttaagtcataaactttattctaaaatagaccacataaatttgacttatttatttgatgacccaacacaca

SEQ ID NO: 50829 - DNA, 822 bp, Cannabis sativa
gtccatgtcagcaaacatgtctcaccaccttttagaggtgcaaactctgattgcttagcgatatttttttaaatttattttttaaattacatgaactaagaaaggtgctatgttttaaatataaatagaagaatcctgaatgaacaaccatccacaaatatcgattcattcaaacaagagactggaaaatcattttctttgacactggtctcgtaaacgagtgaaaaatgccttgtttttcttttccttttctaccagtccaagagctcactcgaaagcggctaataaatatttgatttgaaccggttctaccccacccccttctagtaagtactggtgggaggaaaagaatagtgatgacttttagcaattctcttattgtattgctcattccttgcattcaatttgagctttcatggaccgatttcatactattaaatcgagaacacaatttattaattatcaagaaataattaagtaaactataataaaattttaacagttcacaacactttaagttttataataaatcaaatactctgctcagttgctcagtttttttcactattctgctgcaattcattactctcacagcacaattatatttactcttcctcaaagcacaatagtgccaaactggcattaaatgggtattgaactaaggattttttttttagtgttgataaaaatttaactttatttaagtataaatataattgaaatgctataatatattatgtatattagaccatctccaatagaagttgcatataatatattatatttgtcaaaaaagagtataatatatctgtataaattttt

SEQ ID NO: 50830 - DNA, 586 bp, Cannabis sativa
aatacgaaattgggtttcgaagctggccctatttcattcacattttgaaggatcactacttcagtttctgatttgctctaatggcggcatcttcttcatcctcatcttcctcgcactcttctaatttgtcgtctccctcttcctcccatcgccgatctcgtcggcaccaccgtagccgccgtgacaaagacaaagataaacacaaagatgctctcaaggttcggaagaagatctcgcgctcccacaccaaacgacgtcgtaaacaccaacgtcactcctctgattccgacgattcttcatcactatccgactattccaggtaccctttttttagcttgatattttagctggattttaaatttggcttttttttttttcctttttcattgggatgtttgttgatatgaagcaatacagttggattaaccatgattgttaatatgggatctagcgatctcttggagcaatttttgttttcttttatcaacatattgtttgtttccgagaatttttctggtcaacaattaagtattactttacatgttattaaaaaaaaaaagtattactttacatggttttttttttt

SEQ ID NO: 50831 - DNA, 872 bp, Cannabis sativa
ggggaaaatctcacttttacacaccgctatattgttaaaagtaattcaatatttttcttatatttttcaggttctactttgatttagactttattttttctagccacaaaagatcattaaaagtgagatatagccatggaaaatatatgaaatttaaaaaattaataccattatgctactcaaattaatttaaaattttatatattttttgcatgatccacttagatctaggtttttttaaaccacaaaaagtcttctaaagtcaaatatagctatagaaaatatattaaatcttaacaaaaattaaaattgtcaaatattatcatattttgactaaaacaaaaataatgatgtcaggataataaatttcggtaaaagatgaaataccttttaaaaaaagttgatcaattgatacagttgaattcactttttgaaaattaataatttgaagccttttttcaagttaaaattaaaagtgattaaatatatatatataatcataaataaaataagaaaaaatatatatatatatatacgaagcccactgtgtacgaattcaaaaaaaggactattgtgcatatacatgcatcatagcagcggctgctgcttacaaataaaaaaaaaagcaagaaagaaaaattatccatatatatatatatgagtcaaaagcaatttcagtcatatttctcaaaaaaatttactcatgttgatatcaaataacatattcaacggtcattattgtggctacgtgtatacatttaaaaagaaaaaattgtcaaagtagcgtccaaatcgtggcatgtatatatatatatattttttgagaaaaatcactattattataaattaaccagaatttacaatagtagtga

SEQ ID NO: 50832 - DNA, 1247 bp, Cannabis sativa
tgaaatcagcaaaagaaaatgtagcttgagatgaatctgattcaaattcggagtgagaataagagtgttgttcatgtttgtttgcatataaaagaatgagctttgaaggggatcaaatcagcattgggggatccgcccaaatccgagtagttgttttttttttttttgagggaaaaatccgagtagttgttgtacggacacttttgtactttcacactctttcttctcccaaaatatgggacacaatttcttctttttttatataaatttttatttatttctatttattgtcaattgggatgcacatttatgttattggaatttaaaaaataatattctatgttttattttataaaataaatttgtaaaatttcaaaattataaaagtataatattttctcataaaaaagtaaaaagatgaatcttaattacagttttttagtcaatttttacgtctaaaattacatgttagaatgctttttttttcaattttttatagcggtattcgttatagttataatattattcctgtaaatttttgaatagtttacaatactgaaaatagagttcttgatattccaatttactacgtgtattcaaaaagcttcaaacgtattttcgacattataaattattcaaatatgtgaatgcgataagtcaattcgcgaacaccatatgtttggtgttagggttaaaatttcttgaaataaaatatatacaggtcgggttaaaattgatcaattactgttgggatatcaactgaagtctcatatcgaaagaatatgcaagagttgccttaattataaggtgatatttggtttggtataatgtaatggtaatgataatagtaatgtaaaataataagaatagtaatgagaatcgattaagagatttggtttgttattaaattgataaaataatcctgtactttaatttttatatttatatataaaaagtattagagtccttttagtttagtttatttagtattttgtgatgtaatcctcattacatagtttttctaatgtaatagggatttcttgtataatgttattatgattacaatgtaatctcattacatcatttttaaaagcaaaacaaacattgtaatggacaatttgattctattatgacttccattacaacaaaccaaacatgtcgtatgtaggggtgagcaacggtcggtttggtcggttttttacacacaaaaaaatccaaaattcggtttttcggtttttatggttcta

SEQ ID NO: 50833 - DNA, 1409 bp, Cannabis sativa
aagaaacttccaaacccatctggctcaagactcttgattccaggtatgctgaatactgcttgcttgacttcatctctagaaaaatccgccatcaacatctcagcttgaacctttattaacacatgcccctcttctataaccatagcctttacatgttgcctaccctgcacatttgttcccagcaatgccttgtagtaatctaaaaaagcttatgttacctcttttggatcattgattctctcccccctagcatcaataatagagaaaattctattctaaattctcctttctctaatgcttgaatgaaataatattgtatttgagtcacaatctttgatccaattcaccttggatttctgttgcataaatgaaacataagctttgtgattccctgcataatttcccctgggttcaggttcactagtttatgagatgtcaaggtgcaactaccagattacaagttgatcctgaaatagagaagacttgcagacagaacagaagaaggaaaagattagaaaaggctgcatagagattgagcacagcgtagtaatggctaacaacgccaacaatggcaacgatggaggagctgtagaagaccaggctaatggtcgcaacaacaatgacagtagcttgagggactatttgctgccaaacttgacaggggccagatcctgtataaggccacctgccgttgatgccaataattttgagatcaagccggccatactgcagatggtctaatcttcggtctagtttggggggcttccattagaagacccaacagaacttccaaaaacagtttcctaatcggcaacaacaaggatttatccacagaaaaatcaatctcagtaaagctaacagtatcaacaacatcaagactttagtggagggtctaattctcaattagacacttattgtaatttatgacagagattaagtcttccattatggtcttagaaactcaggtgggggcagttggcttctcaaaacactaacaaggctcaaggtaacttgcctagcactactgaagtcaatccaaaagagaactgtaaggcaattaccttgagaagtggtaagaactatgctgggccaaaccaagacaagccaaaggatgaagaaccagtaccaacacaaaaggagaagaagattactgacggtctttaacaaaaagaaactccacctcctatcagcattgatcatcatatcaaaattccctatcctcaaagacttcacaagaataagctggataagcagttttcaaaattccttgaaatattcaagaaactgcacatcaacatttcattcatagacgttttggaacaaatgccaacttacctgaagttcatgaaagacattctatccaagaaaaggaagttggaagaatttgagatggtggcacttactgagga

SEQ ID NO: 50834 - DNA, 743 bp, Cannabis sativa
agccactatggtgctggagcctcacatgctccccgatcgagcttcatgagcatgccggcctgctccacgcgtcaacctccagaaggcccaaggtcccttgacctccaacaccaactgatctactcagctccatgcccacagccaagcgtcaagacctgatcgggttcacccaaaaaaaaaaaaaggaaaaaaaaggcatggtttgatttgaagattcagaaattgaagactaaagtgaggaatttcaataatttctcatcgtattttctccaaatttatgatgtcaaaattgaagaaactattctaagtctctaagtccattttgcaaatcccagaagaagattaaaagtaatacttgtttacttgcaagcatacttttgaggaacagatcgatgctatactttgatttcgcaaaaagaatattcaatcatatttttaaagaagaggatgtgaggcacacttccgacaagtagccatcgatacacggatagttatatatgcatgcagggctaaccctagctatgttaatttgggctcagtaaaaaagtggggttgttgggatttgaactttgaatctcttagttgttaagttaatcaaattaccactaggttgcaatacatatttagtattaagagtattgttatttattttattgcaaattatatatatatatatatatatttttttttcaaaatgagggctctgagcggtgagaggactaaggcgcctgcctccttcgtct

SEQ ID NO: 50835 - DNA, 1461 bp, Cannabis sativa
tatttattattatataataaagttatgttagctgaagggaagagtctctttggttctagttacatttttcatttacattaatacatccttttaataatgtatatataactattttaacaatggtgtttttatatttttttgagttatgaggattaaatttaagcattctgtcatgttatttattaagaccaggttttcttgtttattctttgcaggaaatttttcaatttcataagcatattatatgataattgtgatgattgtgaattggattgtctcgttagtatttgaaattaacgttgttaaatctgattgtttagcaattatatttgcttttaataatagtcatgtttacttaaatgatttgggttctttgttagagaatattacaagtttgttttctgaatttttaataatatcccaaattcatgtacgacgaatggtcaatacgactgcacatggattagcaatagcagtgcatgctcttcgaatgaatgaacaacttgtttggttagaggatttttctttttttgtgacgtttgtatagttttttagcatgtactgcattactttgatttttaatgacattgattattgtttgaaagaaaaaaagaagcaaaaatccaacaaatctaatttataatctaaattttaattcaaaaattatctataatctacatttttttttctagagtagcttgaatgttattagttttgagctagaggcaaattaataatttgaaggttgactatagagagaaaataaagagaagggcaaatgagtatttacaagaggcttgtatcatgttctatttatttatttattggaaaaaggcttgtatttggtagtataagaagcttgtatcatgttaattctcatatttttttttatctttaaaattactcaaattaaaattaaagtagtagagttgagtcaaagtccaaagaagattcatttcattcactaagaagagcaaaaatccaatgaatcaatttatatataatctaaattaatttcatagagtatcttaaatattagtctggaactagggataattaagtaatttgaaggttgttgactagctatagagactaaaataaaaaagaagggcaaaatggtaacttggtagtataagaggcttgtatcatgttaattctcatattttgtatattgttataaagaaaacataatacaagtctggctttttaataagacactagcatggtggaaaaaaaaaatatgagtttgggtacaataagattgataaattagataagtaagtataaatagactaacctgaaagtatgacatattaattttttttatataatttgataataataataataataataatatatttattaataaatatataaattgtaatcattttagttaattgtttatatgattattcgtaaaatattattaaaaaattatataaaaataattaaaattat

SEQ ID NO: 50836 - DNA, 1138 bp, Cannabis sativa
cgtccagtaaccgggccacatagatttaagttattagcaaaactgcaaaaaagaagaacaccacgttcagccgagctctaaacatcaagaatagtgtgaatgggagataaatcaaacacagatataaacctgatgggagtgaataaagaaaacgagccattgtctggaacctctccggttaatttgttatttgacagatccctacagtttacattgttacatcaaggtattaatgttgcagttacaaatatacaacggtacaaaatataagaagaaggcggggaaagaaagagtataagtttgtatcaagagaaactagtcacttacagcacttgcagtgaggtgatgttggtcaacgacataggaattggacccgtcagactattattgttaagccgactatccttacacaaatattacaaaagaaatcactttaaggcctaatatcaacaaagtagaaaattaacataaaactaataaagggattcaacttaattgatgatggaatatggtttccacaatataagattcttatgacatgaacttccaattataaactctgatcatatttaccattccttcttttctatctctctttaatgaaaagttttccctttcgcataaaaacgcacaacataaattaaaaacattcgttaaatcatcatatgttcaacccttgaaacccactttcatacattattcttcgaatttggtattgtagaaagttaatggttcaaaaaacctgcaaagtgaaaggtatatatacaaaattctcaaaagaaaaagcctacgatgacataatagaacacctcataaataaatattaaggtaaggaataagaagtactcacagaaatcttaattttgacaacttgcccaaggtgtccgggataggaccagtaaaactattcaaatacagatccaagctaaccaagctggtcaaattccccaaatcactaggaattgttccactaatgttattactgtaaagttccctgttacaaattaaaaaaacaaaaatgcaaaaatagcatgttatgtcaagacaataaagacgatattgcatcaagctaaataaaaactacaagattgcttgatggggcaggagggattctgaagaaaagcaggagagagagaga

SEQ ID NO: 50837 - DNA, 1001 bp, Cannabis sativa
aataaggataattttgtaatttaatgtaagaagcccaaaacaacattctctcttttatatagttatagattattttgtttttttaactgaggccttacaaactaccatttctttttggaaattttcctcttcaaagtgcaacacatttaaggatccttctttattagattgacttttctaaataagactcttatatataaaacaaacatatacaaaattatatgcaacaacgctagttagttctttatgtgtttacaggaaacataaaatattaacatataagactgacagtagaagcatgaaagttgttcaaagaaaaaacctttaactttgttttcaaggaaattaaatcattaatatccaaaataaacaagtcattcttatcctataaattattgttgtatgtacaattcaaaggagagtttctcatatgctcctaaaatttcactgcctgggatccgtacaattcttaatatgaaccaagaagagagagatcaagggtccttattcccacatcatctgattaaatgaataccctttggtgaccagtctccaaaactatgaagctcatttctcctatcgtaatgaaatttgtacaagggtgactctccatgagatgagttcacttatattgaaccaaaacattatcaaaatgatttgttgtccttaatgaatatgtgtgagagattttatttttaatatttttcctctccaatctatgtaacttttgacatataatatgaggttaaaagaaaatataaatgttaaaataagttacagaaaaatatatattatgttaaagcataacaaattttgttttataggcttttattataaggccaattatgtaaaatctctatattttagtttttttttttttttttttagttaatacaagggttgtcatgcaaaatggctctaaatttggtaactaagttagtaaatgtccactttttaaaaaaattaagaaaatggccaaatctaataaattagctaataaa

SEQ ID NO: 50838 - DNA, 2088 bp, Cannabis sativa
acctcactcctagtgagtctactacttgaaacgatacgtacacttgcgtgtgcaaaatatcgcaacaacaatctatatctgtatatattggtcactctctccctctatacatgtctatatatatatatgcatgtgcgtgtgtacaacggctgttattcatgtaaagagaatcgaaatatggtctcccatgcatgtaaacaacaattatattatatattttcaaatctgttcttcatattatttttaaattaacatatattcaacctcacctttgttaagagagtctcatattgataatgtgttaaaattaaataccatatgtaagatatataagctacttctcttattgtcaattgattttgagatgaaacctcatgcactttaccatacactacaagcaaaaagaaaataaccacttgaggaaaatattagagagtctcacattgataatttgttaaaactgtaagatatacatattgccaattaattttaagatataacccactacaaaaattttaacttttaattatgcaataacatttaaaaaaaaaaaaacatcacctactaatatttattttatccaaatatagttattgggtcttaattaattattgggcctcaaatagttattagatgcaaaaaaactctaaatttaaaaattaagttagtaaatgtcccttttaaaaaaaattaagaaaattgtcaaatacaataaactaggaaataagccgcgcttcgcgtgcggtggttaaataattatataaatattaattgaacaaaaaaattagtatcaaataattttaaatttatttttgtgtattttttaaaaaaatatatgcttattaaaaaataataaatctatatagaaaactctaaaaaataaaaaaaaataccatacaacttcttatataaataaaaaatcaaacaattttttttttaaaaaaaaaaatatacattatagtgaagaaaattagaaactaaatatttcttacacaaaatagagatctataacataatgaagataataaatctataaaaaattcatcatataattttaaaacaactatcatcaccgtatctcatttgtaggcaccattgtatttaaagttaatgttatcaccccatctcacatgtaatcatcattaatattttttctaataagtttgctttgtacataaaataaattaaacaataatgatcggtaagtatttatttttattatgtaagggaagagagggtgataaacataataagtttagaattttgatatttttggcatattagttaataatttcttttaacaaattatattagttaatattaactatatctctctctaaaaaaaaatatatgtagattaattcatttaatacacatatatttattagttattatatacaaatgtatagttgtttttttttttaatttttaattgattagtgatctctaattaaataaagcggaataaaaaaaattagaaaaatgagagaatttaaagtagcacaaaaaaattagaaaaatgaaaatagagcgatagaaatctaatgaagaatagacagtatcacatgagaatgaggaagaaaaagttacaatagccttttcatcacttttcatgaatttatcattaaaaaatcacttttttacatcaaataattcatactaatgagtaaatcatgaataatgtgaagacattgatgacagtgaagttgtcgatataaagaaaaaaggtctgtatgtctctaaattatggaacaatattaaaaattgaggtctttatgctatttattgatgttactgccgaggtgtcatgcatacataaaaaaattaataattacttaaacttaaagcaaataaaagaaaaaagagaaaaaaaaaataaataggattagagatagatgaagaatcttcatcaaaaaacaaaagaaaaaaataaaaaagaaaaaaaaaagaagaggctgtgagagagagatgtatataaaaataacttttattaaaaaacaaaaaaaaaaagtaaaaagaaaaaaaaaacgtgagatatatagaataatatataaatatatattatatatgtgttttaaaaattagaga

SEQ ID NO: 50839 - DNA, 2181 bp, Cannabis sativa
aatggagaatggcttgaagaaggctgatccgccactcggggcggtatcgccaccgaggcttaggcctactttgacattgggattggcttttttgatggctgagacttgagatggggagagattgtttgagtcccaaaagacgttgaatttgccattggttggggttgagcctgatgacgtgtcataatctatggcgaaggagagaaggaagtgaaattggagggttggattgattggtacgtctgagaatttaacgttgttgaattctgctcctatgtattctgtgaaaacgtttgtgtttggaattggaacagagttagtttgggataagatgataaggaaaatggtcatgaaaagtatgtttggattcatattgttctttttttggctttgctttgtttgggtataatatttatgtttttggctttcttttgttttgtgttttgatgagtaaaatagtggagggtggtggtgtttatatatggtttggctttctttggttagttgaattatatgttgttttttattgtccaaatcattattctttactaaagtaagtctttttttttttatttccgtttctaaattgtgaaaataaagagtaaagacaaatatttgtgcttccatcactagtaaagataatccaaaatttgcatccaataataaaaagagttatccattattcttgtattatttttcctccatgatgtattgttttaggggtcaacagtcaaatttggtgtattttgaacaataattttgataattgaaaaagttaaaattttcattccatgactgaaagggcacttcacaaatacacttttatcttcattattgaataaaaaaaaattatcaattttaatatattggcactcatgtcatgaatcatgatactattttgcattattgactgagatatattgggttcaaaaactcgtaaaccatcttcatactttagggtgtaccataatggtgaggtgaactataaatcttcctagttatatgattttggagcttcaaatctaatttcgactatgaatcatcattttctttctcgatttttcttttaatgtcatatcatacttagagttgggattaaattgaataataagaaagataaaaaagcaagaaagtttcaaagtgacatgtctaataagatgtatcataccataccaccacctaaaatgccaaaaatgcttaagagatgtatcataccattactatatcaccaacatgactagattgaggtgcatagcatgagcaatagagtcaagagattattatttggggtcaaaaatatgtgcacttttggcatggaaaggcctatattcttttgattggtttcttttttgtatggctttgattggtttccttaacttatttgaaagccaatttcattagtaattataacttttctaagctattccaatttcattagatttactatttgatttccgtttttgtttaaacccaatcataaccaaccttactcaaagaaataattagtaagtttgaattatacttaaaacaaaaaattgatctaagcttaatgtactcaaatagcctcaatttagcaccgggagaggatgggatcccaaccccgatctagcattcacccatattttttataagtaatttatacggtaaatattcatgtttaattctctataaatttttaaatttaatttttaacgataataataatatttaattatattttataatttcgttattaatacatacattgaattttaaattattattatgataatgtaaaattaaattattttgataatgaaaaagttgaaaaggtatttaaagctaaaatcttctgtttggtttctcgtccggcgattcagccggtgagctcatacagagatgggtctccgccgattcctcgtgaaagcttcagaaatccgaaacagaaagagattgtggcccatttccactcgttctttctctaacatctcctcccaaatccaatcaactccgttcgtatttcttccttccttacattctttccttttcattgtttttctttttcccttgaatctgaactgttgttagggtttgatttatttgatagagcttcgttcggtattgccttcgacatagacggtgtcattctacgcggtgaaactcctattggaggctctcctcaagctcttaaacgattataca

SEQ ID NO: 50840 - DNA, 1170 bp, Cannabis sativa
cgagaatgatctcttgtataatcgatcattgtacaaggtgaacctggaggctttggttctcaacttccttgattcatacttgtatgtaggtaaggtgccatggaggaggtattctttgattgttgtcatccaaggctgattttgaccacgttcattgattgttctggttgcttccatacgagtggccattgcatgtatactactaggattgttaccccattcttggtttgaattgttgagcccaagttcgcgagtgcatctgcatggttattttctaatctaggaacttatataattgaaaatttgatgaatcattttaccttttctttaactatctctaagtacgccgtcatcttggaatcttttgctttgtatgatccattgaactggttgactaccagttgggagtctgagttaacttcaatattttttacgttgaactccttggctaggtcaagtccagctatcaaagcctcgtactctgcttcgttatttgtagctttgaagtcgtatttgatggatcgttgaatcatgtctccagttggggttgagagtactattccgagtccacatcctttgctattactcaatccgtcgactgaaaaattccattttgaattcagttgttgttctagacaaagcaattccttcaatgcttgtaccagtatatcactagagaagtccgcaataaagtcagccaatacctgtgatttgattgcgctcctcggttggaatgtgatgtcgaattcattgagttctacagtccacttcgttaatcttccgaatagctccgacttatgtagtattgagcggagtggatactgggtgagtaccacaatggggtggcattggaagtatggtctgagctttcttcctattgtaacaagtgccaaggcaggcttctctagttggctgtacctggtttctacatccaaaagagttttaacacataatagactagtttttgcttacgattttcttctcttatgagaacggcgctaacagctacaactgatactgtaatgtagatgtaaagcgtctctcaatctttaggctttgccattagcagtggggatgaaagatacaccttgagctcatcgagtgcttttggacattcctcgctccataagaagtccttcgtcttcttgagttttgaaaagaagatactac

SEQ ID NO: 50841 - DNA, 1301 bp, Cannabis sativa
agcagccagctggtgcattttaagtgactgggatgaatttgctgatgtggataagtgaaagtcaatttttagacttttttcacgttccttcccaaactgcccagaatgttatagcattgcttcagcatttctgcccagttttcagcttttgttcaaacttttccattgcttcactctctttttcctatcaagttaattcttctttcccacaacaaacaagcaacatttaataaaaaaaaaaaaaaaagaacaattaacacaataatttttacaagactcaaaatttagcttactaattagaaattaagctaaaactacttaaaattaagcaaccaaacacattttcactactctcctcaaaatatttttagctttaaagcataaaaaataactatataccatagagttatcagatgacccactattggcgcctcccactgaaggaaggactcatgggtgatagcctcaaagaacaaaaattggatctcgtctcaagtactacaatggaaagataggtccaggagttggcgagcctgcaatcaacaagccccatgttgacttgggagaagatcttgagttagccagacttaaagaagtcgtaagctggcctaattgaagaaccacacgctattgattgcgatgtattcactcagtagagacgcgaattcttaagatggatggatgaccaagagtacatgcttcgatctcaccaagaggagttggatcgctgtaatagagaggtcaacaatctaataaggcactttaaccagagaactgatggaagaggccaagatctcatcagagatacacttcaaggaagactcgttgataaatcagggaggatctattgacaagctaaccaacctagttccttaaggactaggatagatcttcccttgccagagggaggatcgaccttgcctcaaaagtctaatggtgagaacagtcagatccaaacaaccagcaacatgggggctggctagggatctctagctcagcaacatcccccatcattcagcctttggctgcccagcaatctgcaggagttcccttggctgaccagaggagagcactccctccttgagtggagcgaggcacccagaggtcaatcttcaaccgacaaggactgagagtgggtggaaacacccaaaacaatgattgaagaagtgagattgatcacttcagacatatagatccaccaaactccaataacgggtttgatctacctactgttaacacacaggcaaaattagtcgaccaaagagtcgtgggtggccaaaccctgccctttgcaggtttgg

SEQ ID NO: 50842 - DNA, 1481 bp, Cannabis sativa
caaagacaatcagattcaagggaacacatttttccactgcgcttccttgatccaactaagggcctccttaatgcccaacacctccgctagaacaggttcaactaccccataattcaaagccgtgcgtccctctataagtaagacgttggagtctcgagccacaagaccaaaaccataagactgattcctttcgaacaaagccgcgtccacattaatcttaatgttatcattaggcggaggacaccaacactcattaccatctcctacttgaaaagcagaatgagatgtatcgaaatccgattgacgagcatttttccatttatcaagatacttttttgcaaactcaacaatgttgtcgggacaaacagtttttccattccaaacgaggtcgttacgggctccccaaacagcccaacaaacagtcgccattaagcacatttcatccgaggtagcttgctggaaaacaccccagcaccagtccaaaaagcttgatccaggaggcactattgtgccaataccaactcggttccaaacctgtttgacaacacggtaagtcaccaaacagtgcagaatactttcatcttcttccttgcaaacggggcagagtaaattaacatccactctcttggttttaagttgaaccaaagtgggcaagcattgtgaacaagcactccatagcagattactcacctttgaagggagttttagcttccatattttagaccagaaggcagtaattgcatcatcaaaccaattatttttctgtttttgaaggaagttataagcagattttactgaatactcacccgagttttcaagggaccaaaacagatggtcttgtgcatcagtatcaggcaagggaataccacagataagggactgatctctgggctcaaacaggtcagcaatgatctccaactcccatcttgacccatccaatgaaaacagatttgccacagtggcatcagcaagcccaggatgagttgaaatcacccacggattggtctcgtttggcagccacgggtccttcaaaactgaaattgaatggccattaccaacgcaccagcggactcccgcacgaacaaggtcttgggcttccactatactccgccaaatgaaacttggatttgagcccagttgtgcattgagaaaattaccacccgcaaaatatctcgctttaaagatccttgaaaccaaggaagacggtctagtaagcaaccgccagccctgctttccaagaagagcgagattaaaatcacgtagatctctaaatcccatgcctcctccccttttatgcttgcaaagtttgtcccaagacatccaatgaatgcctttaccatcgcttttcgaggaacgccaccagaatttagtcatagcacgctcaatatcattactaatatccaagggaaggagaaaaacactcatcgcgtagcttggcaaagcttggaccacagatttaattaggacttccttcccagctc

SEQ ID NO: 50843 - DNA, 750 bp, Cannabis sativa
tcatcccataaacagaaggggtccaaagggagctcgatcgatttctccaccattcattctaactttcaatagattgaccaatctcttttaggatagtctaggagggcaggtcgaatgcttccttccctctcctaggtagctggcaacggaccctggagagggttattgtgcttggtcgggtcctcatgccacccagggtgcaatgctgcctttgcatccgtatttcaaggagatagccaattaatacaatatcagtctgatctaactcacccctaaggacattaaatacttatttgccctgtttgtgttgtacgcctctcaaggatggggtcagccatccgcccatgatactaactagctatttgacctgaagtccagtcccaagcaaaataggtctaggtatttctacttttctcaaatcgaggagatgtggctgactgataccatagatactgaggtgaccataattagtggctatgtggaggactattacttcgtcaagggcatgaacaccaagcacaccagttttcaacacattcctccttattgtcgacctctgttcactctgggactcagagagatggctcaagagattctccaacctcccttagatgatcagaatatttctctcttggccactgaggccaattttatcacgtacaagatctacttatctgatcagggacaaggggtcgagcaggcagtaggagagcctatgccagcctaggaaggaggagttacatctgaaca

SEQ ID NO: 50844 - DNA, 686 bp, Cannabis sativa
aggcacaggcctagcctgcctatgcccagggccgggcctgctcatagtcacacctaaccaacaaagactaacaaaatataattttaataactttggccccaaaaaaactccttagattcttgctagttaggaatgtaagactttataaattatgctacaactattctatgttttctaaaaactcatttgtttttagaaaaccaaaactatatggtatagagacagaaatctagcttggttgagcagatggttgtttcaccaaaaatctttcttaatcaatagtcaagtgcccatagacaaatcaacgttgatgcatcaattttaaagattgattatgtaacaactttttttgcgttgctcatatggatggtactttgctattggaagcaactttgacttgtcaagaaggtttggtgtaacctaaggtgactgaagtattgggaattaaagaagcgcttagttgaatcaaggcaagagtttagcttaagtggttattgaaagagattgtgttgttcttgtgcaaacaataagtagcaagatgcctttggagtcttatttccatgaaattggggtatgttttgttaatcctaattaaatgtgttgctaatatagcaactcactttctaacttgatcattttattttgctgcaatttgtattttaattgagcttaatatttattctaat

SEQ ID NO: 50845 - DNA, 1307 bp, Cannabis sativa
tcactgactatcgacccatcagcctttgctctaccttctataaaatcatctcaagggtcttagtcaaccgtcttaagcccattctcaatcgcatcatttctcctgcacaaagtgcttttcttccttcacgtttaatctcggataacattatcatcggtcaggaagtcatgcattctctctctcatcgtaaatccggccgtctgggatggatggcattaaaactagatatggccaaagcttttgaccgggtcgaatgggtcttccttcgtaaggttatggaaaagttcttatttcccaagcgattcattgagcttattatggcctgtgtctccacagctaccttctccatctcccttaaccaacaagttcttggatcagtcaaacctactcgtggcattcgccagggagaccctctctctccatatttatttcttctctgctctgagggtctttcttcgctcatcaactctaaatcccaacaacgccaacctcggagtcatgcccttggcattaaaattgctcgacgtgccccaaccatctcccatctctttttcgctgatgatagtctcctttttagctctgcttctgttaaagctgcgaccaccatccaaggtattctttgtgactacagccgtgcctctggacaactggtcaattacactaagtcagccttgtatttttctccaaacacgactcctgaacttcagcatgaaatcgcaacgcttcttggcatccctgttcgggaaacgatggagaagtacctgggtcttcctcaagcttttgggagatctaagaaggatgctttcaactacataaacgatcgtgtttggtctcacttaaataaatggaattctaaagtcttttccaaaggtggtaaagaagtacttttgaaatctgttgttcaggccatcccttcttatgccatggcgtgttttaagcttcccgcatccttccactctaagattgaatccctcatggctcggttctggtggggcggcactgagaccaccaggaaaatccattggaaatcttggtcttttctttgcttttcaaaattccatggtggtcttgggttccgttctatgaaagctttcaatcaggcgatgttggccaagcaagcttggcggctactccatcatcctcattcgctagtggccacactacttaaagcccgatacttcccacacactagcttcctgcattctggcaaaggccatagaccttctcttgtttggtcgagtattacttggggtaaagaacttcttcagtcaggccttaggaaatcaattggtgatggcactaccatc

SEQ ID NO: 50846 - DNA, 1646 bp, Cannabis sativa
  modified_base (34)..(47): a, c, t, g, unknown or other
atctatattaataaacaaatctgattatattgannnnnnnnnnnnnnagggcataaaacccaacagggaaaacacattatttaaaaaattttagatttggactaattgcccacggttataaatcgtggcctataacactatagacgacggttttaaactgttcggaattctccttaaaaaaaaatttaatttttaaggcacgcttaaaaaccgtcgaggataatactataagagatagttttaaactgtggtctatactataggggacggtttaaaaccgtggcctatataggccacaatttttaaccgtcggtaattttccttttaaaaaagaattcacaatttttaaggcacacataaaatcgttgggaatacatcacgcgtgtttaattaaaaccgtcgagaatacctaatttttttccgacagttttaaatactaacttaatttttttaaccgtcgggaatagtggtttttgtagtagttatagatagaaaccttcaggctatgtggcgctgttggtttgtatataacaagttgtgaaatgaatacatactcatctgattcaccaaaagaaaatatatgttgtgtttttttttacaagtcttacgtgtttaattattaatggtttttttagaatgtgaagatatattgttaagtatttctttgaagcaatactagacgatatatatatatatatatatatatatttgaagttgagatcttagaattcaaaaagtgtatttcatttctaagttagacaaacttagcctcttactgagcttggatttgtccagcccaagatgcatgactacttataaatagagcaatttcaacaccaaaaaagaaattcaattttttaaagagttaaatatcactgcaaaaattgtaacaaaaactccattaattgttgagttgctaaaagcttaatagtactgactcgtgaaccaaaattcattaacgctccaatcacttatttgtctcaatatatatatatatatatatatatatattttgctctaaatccttgtaacttacttatttttaaaaaactcagtaaagacaagtatttagaatggagaaattatatttgcaccccaataagttataaatacatcccaatttacataaaattttcaattacatttttgtacaaattactaaaatatacaactttaaatgatgagtttattttaacttttattttattaattacacctcatttgcttttaaaagtaaaattatccccttcaagtcttaaaaaagaatcattaatggaggataataattgaggttttatcaataaataaaatttaatataagcataaaaaaattatatgtttaactattttattaaatttatataatctctaatttttttgtatttattttcgtataaatctaacttatattatatatataaactaatataaaagatttcattcatttacttcattttttcgaccatagaatctttatttattgttatacatatgaaaaaattgattgatatttttaattataattataaaaagagagatgtatatgtaagtgcatatattgatatctaaaatgcaatgattatttaaaagaataaaaatcacaaagaaaagataaaaaagattagaactgaacaaaaaaagatata

SEQ ID NO: 50847 - DNA, 1473 bp, Cannabis sativa
ttgctagcgccatcacatgttagaccattattcaatgtgccttttatgtatctcattacccatttcagtgttgtccagtgtacattccctggattagcaacaaatttgattgtgatgctcatggcatgtgctaaatctagtctagtgcagaccatagagtacatcaagcttcctacacacaacttgcatataggatcttactcaatttctctttctcagcatctgttgttggtgcttgtaaacttgtcagcttgaaatgctgacttagaggtgttgagacaatcttagaacagtccattccaaacttgtctaacactttctgtaaataacccttttgagatagaataatgacatttggtttggtctttggatatcaaccctaagaatcttcttagcagcaccaagatctttcattttaaactcttggttgagtttactttcaacctgttaatatctgatttctccttaccaaatatcaggatatcatcaacataaagttacatgtatatctaattattatggtagatacatggattatatttactttaagcatatccaattttattcatatatttatcaaatcttaaattccactacattgggacctattttaaaccatagagaaatttatttagtagacaaacttgttatggatctttgcttttaaatccttctggtagttgcatgtagatttattcatctagatttacatgtaggaaagcagtccttacatctatttgttctatatgaagctcttcatttgttgccttagccatcataactctgatagatatttgtttaaaaactggtgagaagatctcattgaaatccactccttcctgctgagtgaaccctttagcaactagccttgctttgaacttgattgactcaacaccaggtatgagatgtcatttcctcatgtattgcccttaaccattttaatctgtttttgccagcttcataataactggtcggttcagaggattccaactcttctgcagcaatcaatggatatacaataaaatttatatagccaaatttttttggaggtctgatttcccttctcaccctgtctcttgcaagctggtatgtactcaggtcagtttgatcttcatgactttcagtttttaatctagtttcatgatgttgttctacaatttgaggatttgtttattgatctacctcaatttgcatatcctgaacatgaattgttggttgaatctcattgtgaaccttaggtttcattgctatctcatcctccttgaagacaaaatctttacttatgatacatttcttgtatccaggttctagataccatagtttataacctttgacaccatttggatagcctaaaatcatgcattttaatgatctaggctgcaacttgcccttttttatgtgttcataggcaatacaaccaaagacccttagtgatctatcttagggacctgccctatccacatttcttgtaat

SEQ ID NO: 50848 - DNA, 1030 bp, Cannabis sativa
atttaataaataattaaattaaataatttaattattatctaattatatttataaatttttaaaatatatatttatttatttattttattaaaaaaatattaattaattttatttaaagaattactttatatactatttttaatttttttttttctatttttatagtgtgaattgggttgttatgtaaatttgagttgccatttaatttacttaattaatttataatgtgtaaataaaaaaaaagctcattttatttttaatatgcacctacactgctacacatgtgataaaaaaataataaataaaccatcaatataaaatatcacatattacatatttattaattttatgtatttgtatcttattattataataatgagaattatgttttaaattatatttatatacattttttctttttagtgaaattcatccaaaatgatagaccaaaaagattgagtgtattaaatctagttcaatagaaaaactagttaatgcatttaatagtcgaaaaccgatacaatctaatgtattcatcgaatcagttgacaaaatttaatatccaataaatacttgtgctaaataattaaattggatcgattaaattggatccaaatctattagatgtgatctaatgaatacattatttttattttttaattgaaataaataattataaaagaattattttgttttttaatcaatacttttattatttgttttgaaaatttatgtaatagaccccctaaatggtagttcgagtagaccatttatctgtttcggcatttataagagctttttagtctaattttcttttcataatcatatatgttatagctatttaagactacttgtaaatttttagaaaattttaaatagtttacagtgttgaaaataaggtttaaataattatttactacgtgtatagaaaaaataatcgcttgtgcaacaaaatatgtaaatcttattttcgtcattgtaaactatttgaaattttctaaaaatttacaggtagtcttaaataaataca

SEQ ID NO: 50849 - DNA, 1496 bp, Cannabis sativa
tttaaaggccaagaataactatacatgtatcaggtgtcaatattgtcaatattgttcttatttacaatcatctacaacttgtaaaaccaggctttgtcttcttcctttacccattttggctaataaaaagtaatgcgctgcttgactgactacttaaactgctggatcaaaagatctgattgcacctgagtttgacaccagattttggcattccgggcactccatatcatgtacaccagatcagaaatgcatgctgcataggtaagctttcgaaacttactcatttttgctctcccgatccacctgagtaatcgggtaagataagtagcagaggcatgccaattcagccatgttttaactgctgataagcaccctgctgcaactgcacaatcaaaaaatagatggggacctgtttctacatcctgacaacacagaacacacattgtatcttggctgattcccatccgagctaacctttcctttgttttcaatctctcctagattgcaacccatggtatgaagctgtgtttgggaatattcaatcttccccaaacctgttggctccaactcactttctcttgatttggcctcaacaaaagataacctatagcaacactataaggtgtatgaatagatacctgaccagcacaagcttccttgaatgtatctttcagcaaaacaagccttctttaataccagctcccttggataggaggattgtattaccaccgattctcatctcggatatacacgcaatggatccatttcatccaaagactatcttcttttatttgatatggcccaaatgtactttcccattgctgcaagattccattcatgaactcttttgaacccaagtcctccacaggttttagaatagcatagtttctcccacgctattaaaccaggacccgtggctttatcctgacctgtccatagaaaatttttacatagagcttcaatatcatggacaattttctgaggcaaaatcattacctaagaccagtatgcattgatggataagagaatagagtttatcaaaacaattcgggctgcaaacgacaggtttctcgatctccatgttcggattcttgctgtcattttctccacaagtgcagagcaatcattctttgatatctttttggcacaaataggtactcccaagtaatggaaaggcatctgtttttgactgaaactgatgcatcaagaatcctagttacttctgaactagccatgttgctgcaatatatagctgatttttgggggttaggttgaagtcccgatgtttggctaaatagctttaagccttgcaaaagataatacacactcttgaaatccccattactgaagaggaggacatcatctgcaaatgcaagatgatttattttaagctccgagcatctctcatggaaatgaaaatcctctttcttgcccataacattcaggattctagaaaggtactccattccaattacaaaaaggagaggagacattgg

SEQ ID NO: 50850 - DNA, 881 bp, Cannabis sativa
atggctctaggcggggacgctaagcgtcacccgcctcttcaactgaatcttccttaagggatttcgctaaattgcgcgtgcgtttaagaattttctgaaattcagcagcattaaggcagtcagggctctttggtttacccctgcggttggtagatggagcaggagttgaggtgcttgcagcgccaatagtaaaacgaaggggttgagtggagttaaggttcgccagaatagtagaaaaagcttgggaaacagggacaacatgttgaggggcagcagttgtagccaggatggtagcaaatgtggtcgatataatttttgagagtggcatggttagttgctcaaccgtggtcactgagtgagaaggtaaagggatggtggacatggaatggctcagattggcaagtgtgggtgtcccataggaaggtgcagccatcgtggtagtaggagcagcttgaggataaggccatggggaagtaggaagaggaggttggttaagatcatgagagtggggaatgggaacattgtgagaggaactagccatatagaatccaacagaagtagtgtgcggctggcctaaatgttgtatcccataagttgaggtaggctcattgaaaaggccttcagaaaggactaaaggctgttgtagtcgatagtgaggggctggggccaatgagattggattggcaatatgcggcctcagccaagtccttgtgttcgcaatgtagaaggggtttgaggtgatgcggatctttgcgcctaaagactgatcgtaacaaagcaaaggaggggccgaagaagagtcacatttttcaaggaattcaggacaatggttcacaatatgactcaaacgaccacagtaatggcaaaaatctggaagattt

SEQ ID NO: 50851 - DNA, 2221 bp, Cannabis sativa
tcatttaatttgtggctgtaatgagtttgttatattgtttttagcattgtaattttttgttagtgttggtatgctctttaccaacattagggccaattggcacttttctattagagcttgtattccatttttagaatataaatagaatatgttgtacttagtctgcttgagttgagaaaatcattttaccaaaattgtgtaaagttttactgactcctcctttgatcaaatgaatatagttacaatgttttctttctgggttcttcctttcattgttcttaatgaatgttccctctttggtaaaagaactttatcccctacatgaattgtagttctttccttatagtatgatttccttttgcatgtatgactgtgctataagctattcaatgctctgtttgacatgtatcgttttgtgttgtttattgttattcattggttttaggttttacttgttattaatgttattatactcaaaacatttgttctttcgacatagcttgatcaaaaatctatcttgcttttggattactcaacttatccccgacttatattgtactgattttacttagactacgataacatctatctttgttttggaaaggataaaacatatctcagatcggcatgaggctggtcctggacttaacagggatagatgctttttggtccaaggttgtatctttcttagaacgatctaagatgggaattatctcgaatcgatccgaattagatatttctttgactggtccattgggttaccctctttgttatgttcacgtatctcacctccaaatctggatatatcctcaaactctcttattatatattcttaatctttcgtagatgtttcttgtgttcgtttaatgggcctttcctatttttccaataccatggccctcttgttgaccaattgaaatttcccctaaataatgtttataaatcttaaaattttaaaatttgtaggtattttgtttttggaaattgtgtagaatcttggtgggttttttgttgtctagtttatattgttcaaatttttcgggcaacttatttggctaagcatgtcttttgactagacaaatggttatcattttgacgttcattgatgtctacatcatgaattcttaaagtgatttataacacttcttaagaaaaatttattggacaagttgaccttaattaattgacggttaaatactaaattattaataaagcatgagatagctcttttaattatgattggtttaatttctataagttattttttagcttaaagaattaaagaaaaataaatagaaggtatatttggataaaaaagaaaataaagttatttttatgtatgattttgaatcataattgtactactactattacaagttttgataattggataaatactatattttgtgtgattaaatatattaaaacaaagaaatttgtgtgttttgttggtttaatctatattaatcgtgtgtaagtaatttgtttggttttatttttcttgggaagaagtggagcctctagtatccaccatgaacattgtcttttgagcttttatagtaatttttttcttttcctgcaaagagctagagaaaattttcaaatacaattatgcaacttattttaatatattaaatttcttgcaaagtggaagagttctatctatctctctatatggtcaatgtttgaatctttgacactttaaaatcaaccaaaaaaaataaaaaaaaaaattaaataaatatgtgaaagataatattcgaactttcacatctttaagaaaaaaaataattaagtttaccattgcaccgaattttcatttatgtgatagggggtctctaccatatagtgtattcgatgtgttgtactagtacaacatgctccaaattagtacaatttaagcattttaatagttatttttttattatggtatttgttgtagttatagaaaaaaaactctggtacatttttaatttaagcataaagaggcaaaagagaatatgtctaagctaatacaaacagcctcgcggttaaggcattttttaagttgtctccactaatattaaaaggggacaaaaagcccccccataacaagaaaagaagaagaaaagaagaaattagatataagatatcaagatttagttggatcttgggactaacttggaggttgatcatgataagtgtgagcctccttctcagaagaaaattctataactttagc

SEQ ID NO: 50852 - DNA, 1176 bp, Cannabis sativa
ttgttaggcaagtatccattcctgcaatgttgttaaagagattcttcatccctatgaacaggccataggagaatgtgttaatcaagataaatcttctctttattctctcctaacactgctttgagggatcgaactcttatctcgaattacatgggtaagcttgttagaaatgattttgaaaaatatctgggcctcccacaatgctttgaaagaactaagaaacaaaccttcaattatatcagagagagagtttgacaccacatcttcaattggactcacaagtttttcttaaaagggggaaaagaaatccttatcaaagcaatcttgcagtccatctcctactacgctatgtcctacttttggcttcctgtcattatttgcaagcctctcaaatctatgagtgtcaattttaggtgggtcactaatgctaacaagagacctaggactcattgtcatagatggacaacactttacaaatctaagaattaagggggcatgggctttagatctctagttcatttcaactaggcatgcttgccaagcaagcatggcgtctctttagccagcctaattctttggttgctcaaatctcaaggcaagatatcatcctcattttttcttcctcgacaaaattacaagtcgtaccccttcttttgtttggagaagcattagctgggggaaatccttgttgaaaacaagactcattacaatggtaatggacagaatacacaccctctgtatggttattggatccccaatgttagatttatgcctacaatccaaactcctccgacccctgtggcttatttataaatagaaacatgacctggaacatcccttgcctcaaccaaatgttccctattgatatagttaataaaattctagatatactctccccatagaccaatcctagggttctctcatcttgcaacacaccacttctggtagctacactgtcaaatttggatatcatgtaagcttcacccttgataatgaccaataaactcccacatcttcccaaccctcggattggcggtccactttgtggtccttttccttaccctccaaactaaaacacttttcctatagggccaccaaaaatacactccctaccctctcaaatatctataaaaggaaagtagtggattccccgatttgttccaaatgcaacaatgg

SEQ ID NO: 50853 - DNA, 1077 bp, Cannabis sativa
gtaaaataatttccaacactattcgtcttcacttcagttcagtggactagaactggactcgtcgtcaccgactcgccctcacccacaccagtcgactcgagtcgtcgtcacccacacccagtcacggagtcacccaccctacccttaaaccattaccacgcacggtaggcacgcacgcttcttcttcttcaagagtggcgacggcgactggttctcttctccggctgagtcgcatcctagagtagtcgactcagttcggcgtcccgatccacccaccaatcggcgacgtactggtcatgcaagatgttacatcttaatggtaacattcgggctcagcccaataggacccgaacccgaccacacccaacccaaaaaagcccgacccaatacccaacgcacccaaacacccaaaaactgggttcggttgtgcatttccaagacccgaagcccaaaaacccaaacccgaaaaccccaaaaactcgacccgtgtgcacccctagcgcctaaatctttttatgtttcagtttgtatatacataactcccttatcatttttttttttattttaattctgtttgcaaatctcatgtaacagttaatttttaaagttaagtgtcaactaggatgccaactaagactgccacagtatacatctatatacacgtggaatacttttattgatatcaaaaatttagttatttccctcttctttgcaggtgactggcagccggtggcggaggatggcagattaaggggaggagatgggattgagatttttgggccttggggaagtcgatggtgctttgttcatttcttgacggagaaacacgaagaggagaacgagaagagacgagggagagtgagagagaactctgagaggatcagggatggggttttgagggggctgagaagctattcgtgcctatgtttgctcaccgacgtcgagaaacatccaagcttgtttgggcagagagattcaacatgaaattttcttaatttttttttttatttctttcttcatttatggtaggagttttgagatttttttgttgtcttgctttgaatttgagatttgaga

SEQ ID NO: 50854 - DNA, 1359 bp, Cannabis sativa
tttcaaaaaacgccttcaccaaatgtcctgagcgttactatcaatgttctgatgaaagaaccaaacttattcattgtggaatttggatgttttggtgatcgacagcgtgttcttattggccaaccatggcatttcgattataagctcattgttatgacccctctcgaaactagttccacagtcactaccgagatgctaacttccacccctttttggatttaagtttttggaatccctttccttcatcattcccaggctttagcaagaaaactcggtgagattctcggccgcttcattgaagtggatactgcctctctcaaagaaacatgggggccttatcttagggtccgaatagaaatggacgctactcagccccttcctcgtggaattggtttccatttcaccaacatggctgcccttgtttggcttgaatttcggtatgaaaacctgcctgatttttgccattactgtggtcacctaagtcacattgtgaaccactgggccgagtttttggccaaatgtgattcgtcttctgtgcccccctcgctcagctatgaccacacccttagagctaaggtctgcatcacctccaatcctttttacatggccaatacccgcgccacgcttcgcccacacatacaccatcctcaccttatggctacccaccaatttatgtttgttcctcagggacagaacacaccaactcatgcctataatgcccccactttggattatggcattcaacactttagtcaagcccgtacggtttcagcaggcctttttatggtgggatcttccaacacacacgaaacgctgcccttacactcagtttcgcatgctccctcctttgcgataggatggaatccccatctaaccgcacccatacgcaacatcatgctccctaacacctcccaccacccctgtccacccaatgagccctacaccgacacccatcaactcccctagatttaacgctgatgtcccattagaaaccaatactcacccaccactttatcctgctgtcacaactgtggagcaactccataacccgatgccaccactatccacacctccttctataccgatcccctgtcacggaaggcacaacttggcacaccgttccctcaaaggcattctccactatacttgctgacctaacgacctcttagccactgcaattctctcccagagcctcctctacaccatctacaagtgctccacctggtcgtaaaatcaagcctaagcgaccctctggaatcaatgaagctgagtttagaaagctcctcaagcataatcatagtcaagccaagtccttagatgaaagctacctcgatgaggcgggtgaagctcagtgcaccc

SEQ ID NO: 50855 - DNA, 665 bp, Cannabis sativa
  modified_base (380)..(383): a, c, t, g, unknown or other
cctttgtggtctaagcttcggatttggaataggctaactcgtggtagcactgggtctttagcggaattgttggtgtttctatttgaggtacttgattcgaatacttttactttgttgtctatggtttggtggtggttattgtttgacaggaactcggtgttgtttggaaaaaagcaatctagattggatgtgcttgatgaattagctcaggaagctttggaggaatttcagggggtgggtgtgggggctggaggccagttgttgggagcttctatggcgtgtggggtcttgatgggggtcgggtgtggtgaggagaggcggctccattggtgtccgcccgggagaggggagtttgtgttgtctgtggatgcggcggtcannnnggggagggggtttgtggggtttgggggagttgttcgaggtggtgagggggtggtgtgggcggtttgggctatgggtgtcgtgggggatttccaaatggcggtggcctagcttctggctctccgagcgggtcttgtgtgggctaacaggttggggttcaatttggtgcgtgtggagacggattcttcagttgttagttcttggattaattgtccggataatattcttatgtttaagccaattgagcaggagattatttctcttttagcggctggtggtggggg

SEQ ID NO: 50856 - DNA, 1357 bp, Cannabis sativa
tctctaatatatattggattatacgttattattatatataaatcatcaacataaatttatatatatatatatatatgtttacataatttaattatgtcactcataatatatcacatatcttaattgctttataaggtagtacattatgatcagtcatatatatatatttactgatctttttatcaggatttctggttcaagtttcttaatttatcggactccatacattttatttatattatataaattatcttttgtagagtcgagatcattataatatcgatctctatgaattaatgagtcattttaattagcttagatggaagaaattccacttatatataaaaatcaagatatatacttattttatatatttatagagttttttttttcaatgtaataattatgtttgaaagttgaattttgatggaaataaataaataatatgcttcagcttatgagatgggcgactcagtgtaagttgtgtcggttcaaaaaacaagtagtcttctctgctagctgtgattttggcagctttgtatatgatttgcaagacggtatatatatatatataacatgttttttgggagcaaaaagcccctaagaagagatacatcattgttaaaactgttaaatattaatacgtacgtagaattataataagtaaatacattcctttgaaaactatatataaagctgtagatatatatatttgttgattggttttgtggtcttcaaatcatgtattgatgctggtttttggctttgccatgtacattttttttgttgtgctttgtaggggtgctttccctaagttttgtattgtttgttcttaatttggtattaatgagattacttacttacttaattacttactaataataataatatatgttttttaccatataccgatcaacatgagattttttttttatttcttatattttattttctcgccagaatcaaacttctgtcaatagaaatgaattgttgttaatcgaacaaaacataagattaaaataacattatgaaatccctccacttatatatttgtaaatatagggattattttagaaactaataaagttattgagttaattgggatgtcaagcgttaattaatctagctatattatatacattttctcatacgaaagtgtaattataatattgatctttgatcgatttcttgattttgtaattagttttattgtcattcttgatactaatgatttgtgatctatacttctatatatagtggttcaaaaaagttcaaagtttaatcttcataataaaaattagtattatatatatatatatatatagatttcgatctattcggtaatatataattcaaa

SEQ ID NO: 50857 - DNA, 1233 bp, Cannabis sativa
aatgtggttttattgtttttagttaattttcatttttttttactgaaatatattaatttagaaactttacaacagtatttttgaaaatttaattttataaaaatgtaaaaataaataaataagaacactaaaaatgtaaaataacataaaaataagtatttaagtggaaatctcttaatattaggaggaggaaattatattcattataagattttaaaagtagtttatttaattataacatttttaagtttgactaatttatatgttatttttttgtttttatgtatttttataatatttgatatactatatatatgtaaattaagttttcaaagctcacaattaatgtttttatttgtttatgcagttttatttgttactggtgctgggaaaaagtcgctggagtttgttgttagcaccggaaaagtcactaaagtagctgccggcatcgaaaaaatttatggagttgctgctggcaccagaaaatttgtcagaattgacattgacgctggaaaaattaccgaaaaatcaaaaaccgatttcttggtgatttttccagtgatttttctgacacctgcaactactccagtgacttttctgacaccgacagcaaacttcaaaaaattcatcagaattggcattgtcatcgaaattcatcgaaaaagtctatgaagttactgctgacaccagaaaattcgttgaaattaaaattgacgctggaaaaatcagaaaccagtttcttggtgattttttcggtgatttttctggcgataatgtcaattctgatgaattttccgaagtttgttgttggtgctgaatcggagtagctgccggtatcgaaaaaaatcacaaagaaaccagattcttagtatttttgggtgatttttccggtgacaatgccaattctgatgactttttcggcaacgtcaacaactctggcgacttttctggctccaacaactactccgacgacttttcggtcgtccgtagcaaactgtggcgagttttccggcaccagtgataactccgacgattactgtggtttcatttgtttttttaaaaaaaaaaaataggaaaatttacaaaaatactagaatttgggttaacttttataaaaatactgtcacacaaaatttttttaaaaaacacaaagcagaacaactcaaaataacagtagaacactagtaaaacaccagtgaaaacttaacacagtatactgtattatgaaactta

SEQ ID NO: 50858 - DNA, 2102 bp, Cannabis sativa
atagttctttgatagcatctcaacatacaaatttaatttaacctttgatattgatcttttaaatcaacaaaagacattcataataaaaaacaccaaagtattaaatcaacatggtcaataagtctagtagtgtggtaagaaattgtgttcaacatgtgatctataaaataacataatttctttatcagtcctcaattttacttgataccgtgatgcttaataaatatgtcagtgaaattagtcatacactacttaataaataagtcaatgtcactaaacatgcttaaaaaattaagctagcaaaatatcattggcattaaacaattaaactgaaagacaataatcacaacaagatatgaactacatgttttcaattcaatcattcttgagaatataacaaaacataattgaaatcataaatatcctataataaggaattattggcccttcataatattaataagaaaattacatctaaatgtaatctcaaataatagaacaataaactcctactaactcaatggaacaaaagattataaaatatccatatcgacaacatattattaaacaacgcgacacttaatcatttagttagaggatctgctaatattgacttgatcttgtaatattatatcacaatatctcatttctcggccaagtctctagcagtgagatactttatttctatatagtttgaagcactactaatcttgttattctttgaaaagaaaataatagtattattctcataatagattagtattagagaggaaatagaatcaaccactcgtatctttgaaatcaaattctttaactacaaagcttgcaaagatgccccataacatgctacaaactcaacatacatagtagatgatgtgatcaaagtcagtttaacacttttccaagaaatagttgcaccagccaaagtaaaaatatagctaaaaattgacttttaatcatctacacaacctccaaaatttgaatcttgataatcaacaactcagatattgtcgacatgctaataaacaagcattaaattctttgttatttacaaatatctcatgaccttcttggctgcaacccaatgatcatggccaggataagataaatatctcccaagaacattgaataagaaagcaatgtcaggtcgagtgcaaaacatgagcatacatcaaactccctactacgcttgcatatgagatgttcttctttgcttctctttccaagttgttcttacgatattatttcttagtaaacttgtcttattttgaaataggaacatatcagcctaacataaattgatgttgaaccttttgagcacacaattaatgtaagcttattaagataagccaagaattttttgattcatgtcatgatgaatctcaatcccaaaacaactgatgcttctccaagatccttcgtatcaaagttgttagataatttaattttggtctcatttagtaatgacaaatcactgctgacacgtaaaatgtcatccacataaagaacaagaaaaatgcaacaactcccactgattttaatataaatacactagtcaaacttgttctctatgaaaccaaacgatgtcacaaccttatcaaactttaagtattactggtgagatgcctgtttgagaccataaacataaatggattgtttgaatttgcaaaccaaattttcatttctatattccttgaagcctttaggttgagatatatagacttgctcactcaattttccattcaaaaaagtagttttaacatccattttatgcaactctaaataaacatgcacaactaaaatcataataattatgaatgaatttttagttaaaacaggcaagaaagtgtcaatgtaatcagtaccttccctctgagtaaagcccttttccacttaaagtgttttctacctttcaatttgtccatgattatcctttttagttttgaaaattcacttacaacctattggtttaaaactatcaagttatagaactaactcctatacatcatttttttccatggactcattatcatcatccatagctttcatctattttgaagattgtcgactattaattacttcactataagtgacatgatcca

SEQ ID NO: 50859 - DNA, 1922 bp, Cannabis sativa
aagatgtacaacttggtaacttgaatcaataaaatctactagtagcactttcagagtccaacatattcaatcaggtgtcaatcttgcggacttattcacaaagttaatatcagcatcaatatttgaaaatacaacatacaagattagaattcatcgattaaaagatctccataaatacctaaatgaggggagttaatttatactaccttcttttcctttgaccaagtttcttcagcaaggtttttatgaggcagttattatagacatctaggcagtgttatgaaatattatatagatgtccaaatcaccaaatcaattattatcattaatgcttgattgtattttcctttattacattgattagtttctcactcttttagtcatacttttgtataaataggggttcaccttaatagaataaacaattgataaattctcattcagttcctctttctctcttcatcttcttcttcttttcttcttatatattttatattatcctatatattttataacattaatcatatttatttttatttaatttcttaaccaaaaaaccgtaaacagttgtttgtgtaaaggttgtcaaagttgccttatttttttatggaaactttgttgaatacaactatcttggttcaatgtacctgtttgaacggactagttgtttgtttaaataaattttgactttcctgtttggaaatatttttcatttgttgacttgattatttcttggttgtttaaccacgacctagaggtattctaaagtgtataaatacacacttaggttgttggtattgttatctttcttggtgtatcatttctaagatcacttttaaatttagagagagtttcattgttatttgaagaacttgagtccaacgagttcttattattttattattgtgttattctgtattgttttttgttataattgtgcaggttgaacaccttgatatcatttatcaagcttcggagaagtcttgttcgagagtcactttttgggaggaaaaatgcaagttagtcacttttcgagaggaagattgcgagttagacacctctttgggtggaagattacaagtgagtcactctccggaagaaagtgtgcaaatgctacgatttgaagggagtttaaggtctcggtatttcagaaatttgattaaaagaatagattacaatagttgtggcagattcaaaaggagagtctttatttgtataagtcaatttggttttgtaatcacttgagacttataaatatcattcattgggcgtggtcctgtggactaggagcaattcgaaggagttgttaataccacgtataaaattttgtgtatcattttattttctgcaattttacttttgccagtatatttttgttctatcagattttgtgtctgatagaacagagttaaattctgttcaaacaattttactataattccgcattatttaaattatttgataatttcacttaacaattataaaaaatagaatttcaattttaaatattattaaaacataaatttatttcaaatatttctttgataatgataataattattatattaaatattatacaatattaatttattgtgtaattactaattgtctccaaatataataataaaaagttacatgtaattatcatttgatgtccaaacacattttgtaatttaaaatatacgaagtaattatttgtaacgcccgtatttgaaatttactaaacttgaaaattaattttaatatattataattacttaactataaagaccgggatcccgagttataaaacacattaaaaaaaactatatttgttattacaaaaccctttgtaaatttttcttttaaacaaatgacaggcaacacaaaatacaactcaaaatattgaaagaccgaaaccctccaggttgcactgtcgcgat

SEQ ID NO: 50860 - DNA, 3387 bp, Cannabis sativa
gcttccactcattttggtaaatagtccacagccaataagatatacatattgttgaaagaagatggaaaaggatccatgaaatctatcccccagacattaaacaactccacctccaagatacatgtcaaaggcatttcgtttcttctagaaagattccccgttttctaattacgatcacatgccttcacaagaccattagcatctttaaaaagagtaggccaatagaacccgctttgaagaaccttagcagcagttcttgtgccactgaaatgccccccacattgtaaggcatggtagtggttcaaaactgaatacatctcttcttcaggcacacatcttcttattatctgatcagcacagtgtttgtaaagaatcggctcttcccaatagtagtgcttcacctctgaaaagaactttttcagctgttgatgaggtatctcagggggtgtaacatttgtaggcaagaagctgacatagtctgtgaaccaaggcaccatcaagctttccctcaaactaaagagttgctcatcgggaaactattcatttatgtgcacctcttttgcgttttggctctcttctaattcaagtcttgacaaatgatcagcaactaggttttcagtcccatttttgtcttttatctcaatgtcgaattcttgaagcaaaagcacccaccgaatcaaccttggctttgcatccttcttggtcataaggtactttattacaaagtggtctgtataaacaatcaccttattcccaatcaggtatggccgacacttgtcacacgcgaacacaattgctagcatttctttttctgtggtggcataattcagctgaacatcattcagggttctattagcatagtagatggtatgaaacacactatcaactctttgccctaagacagttccgatggcatagtcacttgcatcacacatcagtttaaaaggcaactcccaatttggtgaagcgactataggtgccgatatcaatttctttaagagcttggaagactttcaagcattcctctccaaactcaaaaggtaccccgttaataagcagattggacagtggttttgagatctttgagaagtccttgataaatcttcggtaaaatcctgcatggcctagaaaactccttactccttttacaggaaccggagggggtagattctcaattgtagacactttggctctatccacctcgatgtctgccttcgaaatcttgtgccccagaacaattcccactgctaccatgaaagggcacttttcccaattaagtaccaagtttgactcctcacatctgattagaactttctccaagttcttcaaacaattttcaaatgaagaaccgaaaactaagaaatcatccataaagatctctatacaagtctcaattaagtctgaaaagatcgccatcatacacctctgaaattttactggagcattacatagttcaaatggcattctcctaaaagtgaaagtaccatatggacaagtaaaagttgtattctcttgatcttctggtgctatggctatttgatggtaatcagagtagccatctaagaaacagtagtactcttgtccaaccaaccggtctggtcaatgaatggcaaaggaaaatggtcttttctggttgccttattaagcttcctgtagtcaatgcagattcgccaaccagtaaccgttcttgtagggatcaattcatttttttcatttttatcactgtcatccctcttttctttggtactacttgcactgggttaacccacttactatctaaaattgggtaagccaccccagcatctacccactagaccacttcctttcttacaacctctttcattagtggattacgtcttcgttgtgcatcaatagtcagtttagcgccctcctccattagaactcgatgcataactattgagggactgattcccttaatatcagccaatgcccacccaatggctttattgtgtgcgcagaatactcttagcagcttgtcagtctccacatcagaaagtgaagctgacactatgactggcagcttcttgtcttctcccaaaaactcataccgtagatgatcaggaagcaccttcagttctagttcttgtggtttttctgtagatggcacatgcttctttggaacaacccccaactcttcatagtacttcctattcaacggcccgtaggagtcaagccatttggcatatcccattgcctccattccatcttgctcattcaactcgtcttcggttaaactcatttctaatggatcttccatcaactttttcttctccactatagtgtctacaagatttacaaagaaacagttatcacttgcctttggaaaattcattgcctttggaacattgaagaccacttcttccccttgcactctcagcttcaattcacccttctgaacatcaatcaatgcttggcctgttgccaagaatggtcttctaagaataatcagaacattgttgtcttcttccatgtccagaacaataaaatcagttaggaagatgaatttatctgctttgactagaacatcttcgatgaccccccttggatgagccaacgaccgatcagccaattgcaaggttaatgtagtaggctttgcctcccccaactgcaatcttctaaaaattgacagaggcatcaaattgatgctcgctcccaaatcacacaacacatttatcccttccattctcccgatggtacaaggaatggtgaaactcccaggatcaatgagtttgggagggagtttcttctgcagtatcgcactacaaccctcagtcaaggccactattttatagtcttccatttttctctttttggacaggatttctttcatgaatttaacatagctaagcatttgttgcaaggcttctgtaaagggaatgttgatgtgcagatttttaaatacctccagaaatttcaaaaactacttgtctaggttggtctttcaaagtctctgtggataaggaatcttcacatggtgatttatgctgaccggtggagaagcttcttttggtgcgagactctcagtaatcttcttttctattgatgttggtgccggttgatcctgaacctcttcttccactagctgtctcccattaggcccttcatacttcttcctgcttcttagggtaatttccttacagttttcttttgggttcacctctgttatgctaggcaagttccccagaggatgggtagctatctgagttgccaattgccccatctgattctctaaggctttaatggacgatcttgtctctgtcataaactgtagcaacaaatctgtttgaagactagaccctccactagaaccttgttgctgtggttgttgttgattctgttggcactgatttctctgctgatagaacc

SEQ ID NO: 50861 - DNA, 924 bp, Cannabis sativa
ttaagcatgatctccaatcaagagaccattctctttctctcttccaaaaggacctctagcttagaattggctttgtcttttgcggcaagggaagcctccaagaccttcacatgctcctgggaagtgtctgaagacccctttgagccatcacgagctgagctcagcttcatcagggcctaaaaacaaagaaaaaaaaacatcaatgttaaacattacagctttagccgaccagtcccctcactggactgctatgaccggccaaacccctatataattgtccaaggctggccagccatatgcaagcagcttaatggtcgaccatcttatacagtgccaacaagatgaacaaagctgaaagcattaccccagcagagaaagatcctaaagtccagcagagtatagcctgtgaggcacactatcacccaactccttcaaagcctcatccaagaaaggaacaaccctatctatacaccgagtggctaactcagtagctctctggccggtaggccaaatcataggctgtctgactagtgcaggtcctagtggaggaggaggcagtgatggtccactagcatttgcaccatgagaggtcctggccaccttggccctcacctgtccagtaggctcatctgaaggcccacctgggagacctctcaacttggaagacatgtctgcaaaaaaaaagtagcaaagtcagaatgcattcataaatattcaatacaagaacaaaagcatgttgttacaaactatccatcatcatcagaagaggagctatcagaactcacaactacagccttgcccttgcctctatctgtaggcacagggcgtgtatgtctatcagaaactaggcctctaggctcgatatgaagggaggcgtcacctactggacccccacgggccaggcgcctacggagagctctctct

SEQ ID NO: 50862 - DNA, 1211 bp, Cannabis sativa
aaatcccaaaacgtaggacttgtgatgctcaaaagcaaatcattaaattattgggaaagtctagcataccccctaaaggattaacctggtacacctcgtatcttaagtattcaagaaactttttagtataattttttttattgtgaaggttgtaattatttaggagtagctattgaatttcagaaaatttcgaatagtttatatcaaaaataaattttaaatattttcagtaattgttttaacttaatttttgacactgtaaattgtttagaattttttaaaaatttatgtataattctaaataactaggaagtatacgataataaaaggaaaaaaaatgactaaaactagatatgaatctaccgaaacatacaaacttttcctaaattattttgctgagaatattgtagatatcatggcttgacaggcgagcaatataggtacactacaacactttcagttacacatacatacacattaagaatatttcgatgttctgaactattgtagatgcttgtgctttttactttctgtaaaaagaagtaagttgacttcaaattgaaaaagtgagttgatgtaactacaggactggagtagtttataggggtatacataaatcgatccaatctaatgacaattgactgatttaattacaactgactgttaaacatcaaaaattcaattataatcggattagattggatattttttttaatatctaattagatcggatgggatattgaatgggatgtccgaaaatctaatacatctaacatttaattaaactaattaatattttaattcaatttgaatgaataattaaattttatattgttatacgtaaaaaaaaaatatttatatataaaaattaacattaatttttgtttagattgaatgaatccaattaaatccaataaatattgaatttaaaatgttagatgaatctaaaccaatctaatgtctaacatattattctagataaccttaaatgaaagcaatagatatgcataaaatacatccaataaatagaatcgttccaatccaatatttattggatgttcgatcgattggatgattaaaactaattgaattaaatcggataataaaatttaacatctaatacataattgatagacctaaacacattgcatgtggtccaataaacactctaatttatagtgaaataccaaaataataataagaataataat

SEQ ID NO: 50863 - DNA, 618 bp, Cannabis sativa
acactaaggacgtcaccaagaataatgttgcggtggcaaacaagctagaaaagaacattcaacatcaccttaccagaacacttaaaattctcaaccattacacaaacaaatatattgcaggatttgcaccaacaaagaatggtaatgtactacggcaatatcagtcaataaatactagaaatcatcctctgcatagttcattacatgatctgttttgattgtaatttcacaatttatcggttgcagggactaggaggtctagatgggaaggacttagcagcacctagtggcacccaaaaggagaaacattagtttgttcaactgatgaattgcgtttatagtatttcaattctcacttttgaaccaagtgtactaggtttaccaactatgtaatgtaatttctgatattagtttcattgatagtaaggtcatgcaggaatattacacaattcagatgagattatgtaccgtgttcaaacttttcagtgtcattaccaacttcattcagtagtgtctgtttatattcattgaaaatcatctttaaaaatgcaattaccttcttttaccacttcacagaaaacaattttcaaaattaaactttaactcaaagttttggta

SEQ ID NO: 50864 - DNA, 818 bp, Cannabis sativa
ggtctttgtatttgtctctgagttacctctccgtcttggtagctctcttctatcgagacaaggacttttccatatactcaaacaccctctgcgttgtggtagtctccatgttggcattggcatcagctaaggccttctctgcctcctccctcctttgtttagcattgtcatgtacagctctcaccatctccatgtcgtaagccaactgggtgatcagggagtagctcttctctgccatcaaaccaatctacaaaggaaggaacataagtaggtttaaataatatggaaacccgaaaaccttattggagttagaagagtatcgaacttacatcattggcctgagtcctcacggagttagtcacgtacctcaagtccctactagccatcatggcgaatctatcagcgttaagcctatagcttgtggtagcgttctgctccaatagatctgccaaaaatggtgacaaataagtcccaatgcatggacaaagtttcgttatcagttcaaccctgtttatgcatggaggagcagtctcattccatttgtcataatcagcaaattcagcattgcgcttggaagagatgacagtagacaatttcctcatctcctcaaccttagagctgcacctttattgataaaatttatccactacttccaatctcgcttcctccccttccgtcaactgtacgagtttgataggaagtgtgaacgctgccggtggcaacagaggcagtttagtccttaaccttcataattgggtcgaaatggccggaatcactgtaggcgctggggctgtgggaggaaggtccagcttgtccct

SEQ ID NO: 50865 - DNA, 1009 bp, Cannabis sativa
aaaaataattaaaaataaaaaagcagtaaatttacacaaaaatctgtttatttgaaaaatcactttaatacaataaaacttgaaaaatatatatcagttatcttttctaaattttatttttacggatttcaaacatcatgaaaacccaccaccaaagacgaagttagtacaactcttctctaaggttacgaaaatattttggttagctttattataataaaagactggcccaaaaatttagtgggtcatagaaaaaaatattttgggcccttacatagaaaaaatgttgtatttttccaaatatataaaaaatatttgattttaaaataatttttttggagcatctgagctaggtgggtacaaggtaaaggcctagcccgcctatgcctaagactgaacgtgctatataacagagtccaatatataatctaattctttaatacattgggctcaaccaaaacttttattgaaagtttcatatatagtttcttgtcatggtctatgaatctttctttctctgtgatttaattgttggttatggttataagttttgtcttatgaaaagctagttattaatctagaaatgagctacaagaagcttggtgaccctccgaatagcttgttcagaaagttgtggccaatctggatggtttttctagcaagctagtcatccgtaaggatcttctttccagatagcttgtcatcaacctggaacattcttcgagatagcttgtagttagtccataacgttcatctagaaagcttgaaccaatctagattgactcatccagatagttcgaatagaaagcgcagggttgacgtggaatatattgtttaagcttacttggagactttaaagaagcattagttagcaacgatacaagcagagttaattttagtaataatacaaacctatacatagttatcacctttataatccatagtgtatcagatcatcaacaacttgagaggaatcttgttgtgtaatgttagagagagagagagagag

SEQ ID NO: 50866 - DNA, 769 bp, Cannabis sativa
atgtaatgtatggaaaaaaccatagaatttgattattttttctttagaaaaaaaaagttgaccaggtcaacccatgaacccgatcaacccaactattttacaggccgagtccggatacaattttttgaacccgaaatccaaaaaactcgctcagtgtttggtcctaattggagatctttgggtgtagtatgatgataattgcaatcaaatttttccgttacttaatttagcctagtactacaaaccaactaatggtacctgaattaattcaattatgtatatatattaaatacttcaatactcaaagttgtcacactctatgatctaatagattatttcatttaattataacaatattattaaactaaatttttaaaatttatatattaatatgaaaggtaaaatttataggggagtgttaattacaatctcttaattaacctctacatttgaaattatatgttgaaatattttttatagcggtattcattatagttactatatcatccctgtaaatttttgaaaaattctgaatggtttacagtactgaaaacagagttactaatattccaatttaccacgggtgttcaaaaaatttcaaacgtatttttgatactataaactattcaaaaaattttaaaaatttacagagatgatgttgtaagcataacgaacactcgtgaattttttttaaaaaaaatacttcgacatgtgtttttgggtgtggaggttgactaagaagttgtaataggatgttgacggtatcact

SEQ ID NO: 50867 - DNA, 1044 bp, Cannabis sativa
aatccttgtctcttttatacatactaagctaataaccattttctgatcccatgatatggttttgagatgatgattagtctgcaaaatctagaatccttgtccttaatattcctgttctgaaaaattgtctgaccaaacagatcaaaggtttctcatttaccaaatttggtgtgaatcattttcttggagaatgaaactgtacaaattcattactgtgaactaaacttattgtaacattaacttatataatataaatttcttgcaagctcatttccaaaccatgtctcattagtctattagataagagtttagcttaaagtgtcaatccatgatcaactaccattttcttagtccaaattttctatggaaaggtaacaagtatttgatccgagcaaggttcttgtatggaaacagatgacaaaagccaaatcccaaaatttgatttggacattaaatttggaaatcatacatgttcctctttcagatcacatatcagcattagaactaattaaaggcctacaaatcatgatcatcctactccatgctcgctatgtgtcgatccctatatcaactactgattagtacacgtccaaagaaaaagtagaggcatctatcaaaatcagtttcttgattttggcagcagttactgatctcagttataaatttatattcacaagaaatgctaaaagtgatgtttgttttagttaattcttcttgaatataggctagtgagctttgaagttggcaaagagtgacactgattagaaaatgatatagcagccaaaaaaaatggaattcaactgaaaagtgaacaagttttaatcaatgagtcatttctattaactagttttgaagaaaaagagtaagagtatgtgatctacaaaattgttttctgtgaatctagctatgtcagtactaaaaattacatcatcggttcaactgagatgtgatatcattaaagatgtcttcactgcaaggaattgtgagtccgcccatgggatgctcatatccgaattcttcttcagccatacttagcaagtcttg

SEQ ID NO: 50868 - DNA, 1307 bp, Cannabis sativa
gaacatagcgggtattttcacaccctttagcttccctttttataaatagggttgaaaaaactgcctctaaaagctaatattgtagcagtgataacaattttttatggtgtgattccaaatttagttagctggtttgatgggtcaccaaacatttaatttgtgcaccactaaaatatcaaaatagtacatttatcgttgacatccaaaaatatggaaacattcaagaaaatcaaacacaacataaataaataacacatgtgcgatattactcttctagtaattaaataatactagctaggttgtaatatataaataatgttcatattaaatacttacttggtcgttgtacgtccgtaggtactaataattattacacacttcactcttaatcagccttgttattattataccaccaataatgcacctaaacacttattattatttatcatcaattcaaaggtgaccgttgaggaacaccctttcggcggcgattaccaccgacgtccacatccaccggccggcggaacatcataacatgatgatgaggtggctcattatagtcactaatgctacacttcttaaccgttggggttctacaaactactagatcagttagtaatattcgtagttgagtcgggagtagttaatattcgatccagtagaactaccttcttaggttcttctggtgttattccatcatcatgataatggacctgttattgtaataattggcttatcagttgtggtcaattgaaatacaatataattaataaaaactctaataaacaacaaagtaaacaaatcatatataatatatatattatattacttggaaccttgcaagagagagagcagaagagataagggtggtggagaattcggccacatttgatgcaaaaattcttagatgaagaaacccttaatggtggaggacttaatgctgatgatgatattgccctttgcttcaaaaacactacattcgccttgtttcttctgtatgactacatataatttagattattataattagttcttctccttcattaaataataagtatatatataattatacttacttgaatagatgaacaatcaatatttaacttgtttgcatcatttatgcgtatcacatcatgatacacataccttctgatctgtggataaatgtttttatatatatataattaaattaagctgaataaaacatggggaaagattggccaaatcttctcctaaagtgaaaagcctaaatcctagaatcaaaaacgtcgtcatcagtcaaagagactacagagctaaagatcaca

SEQ ID NO: 50869 - DNA, 984 bp, Cannabis sativa
  modified_base (53)..(61): a, c, t, g, unknown or other
aaaatttattttttaaaaacaaaaatttcactttcattttgtgattaaaaaannnnnnnnnaaaagtgttaccaaacgacacctacataagttatgtgaatactttcgtttcatatcaaaatctatgttcattcatttaaagaattccaaacatgcataaagtgggtaatcaaaaacatgtaataaacacaaatattataaataaatcacaatcaaggaagaaagaacaattgactaatattaactcatgaaataatctcaaacaatatcgatccatcaaatcgttaaattaggagtacttagctcataattaaatccataatcaaactaaacattaacataaacataaaaaaatagaagatgaatgagatgaaactagtttgggattgtcacggatcgccaacttctagctccaatcttcttcttcttttctagggttttatttctctcatttggctccccttattttgaagccctctctcgcttttaaaacataagtttcagccaaaaacacgtgaaaagacaaaaaaagtcccacttcgcacgatggcaacaccgtggtgacacaatgccatgccgcggtgactgcagtttctcaaatatataattttggttctttaaaattttgcttcggcaaccacaaacctctccgagacaagaacacatgacaaaatctcgtcacaatgacaataagccttactgcggcgactgacacatttttatagcttcaatttctctcaataaaatatgcataactttcacatacaaactccaaactaatttaggatgtaaaaaactggagaagagatctaaacttttatatttttgacatttactaaaatttgatcagaatatatttgaattcaagcttaaagtttcagttttagtttcttatgaaaaaatttctatgttatagatcagcgtatttatgatatttaaccaatttatatattttaagtgtcaaaacttaaaaaaaaaaaaaaa

SEQ ID NO: 50870 - DNA, 671 bp, Cannabis sativa
acatagaccaacacatatgaacagccagtagaatcatgtttgacaaacaatgagtgatttgtttttacttagataaagccaagtgagagtaaaattgatgagagcttttcaaaccatgtccgtaggtcttgcttgagaccataaatggcattttgaagcttgcaaactttgtgaacagtagatggatcaacaaagccaggtgattgaaccatgtagatttcttcttgaagatccccatctcagaaggctttattgacttctagctatctcactgtccagccttttgtgatagcaattgtcaaaacaattctcattgtgacaaatttaatgacaaagctcccctccaagatgtggtcgggtacatccggaaccgagatgccaacacttcccattgtacccaatattccttcattgtggttgtttgggtcaacgacaatagctcattcgataatgaacccacaggcacagcacaaaatcaaagaagaatgaaatgtttgagcattgcccaggaggtgattgggcggtgttgattctcccacttgaactataacagtgcatctctatcaagtctgacaatggccgtatacaacattagagactcagacatttttgtgatcaagaaatatcattaactaatgataaggctgcttaactattatataaaactaaag

SEQ ID NO: 50871 - DNA, 925 bp, Cannabis sativa
tcatcaaaacaaggagacctaaaagtttgagttaacatttttagctttggaaatgaaaattcaaggtgattacaaggaaattttagttcaagaatagtgttttggagttgtgaatatcttaaatatggaatttatggatttctggagagttctagaatcctggaagcaagcttagcatggaagaagaaggaagtttttattaaaaaaaactattgtaattgggagtcttttaaatttaaatcttaaaggaaaagataaatgataagcaaaagatcaaatatcttttttcttcttctattttctctaatttttgaatggcgcatccaaataggagtaggatttaaatccaattaattaatcttaatgccatgagagatacgtgaaaattttaagttttcaaagaaaaagataaaagaaaagtgaaaaatgataagtttttttcctctttatctttgcttaacaatttttgaaaattgcgaagtgttagtgcaagggaatccaaagtcttaattatattgggaattattgaagaacaaaaacaattttccaagattgtcagaagtgatgcccatccggtagtttcgagagaaacaagctcggttcacgtcatcaagtcaaccccacgtatgtataaagtggaattggggccaaattttaacccaaaaacttttcctagtgaagaaaaaatcaatattcgacatatggcaagaaagacaacatctcggagttaagtagccgagtcctaacggtcgacctaggaggggtctctggccctacgaccaagttaactctgggaattccaaaattggtgttcaaatttaaataagtcatttccaactcattatcttttagtattatgtaccatgaagacataaagcaaccaagtccaggccacaagagctgaaaatacacgaatcagcacttg

SEQ ID NO: 50872 - DNA, 966 bp, Cannabis sativa
ttttatatggattaaggtagaatttgtggaacataatctatttaaaactaaacctggttttttgtctccaaacagtttttttcccaactgctttttctgttacaaacttttccacatttggaaattcagttatgttagttaaattgaattcatgagttgttaagtgctgatcatgtcagctactaacaatatataaagctcctcactttgattgattgaggtaagaaaaggagagactaagacataaagaaaatatggtgagagtgaaagaagatcaagatcagaaatagattataatcatgttgtcatgatagttgagcagctctaggtttgagtgttggagagcaatttctatcattgattgttcttggtggttctacactgtaattggagtttgtaacttgttgaatcttagtggagaaactccttgggggagagctagagtaggactctaattgagatccgaactaggataatttcttgtgttttctctcttacttttctggtttatttatcattttcaatttctagtttgctagctaacatatttgttgattgtttgatctctgatattgtctgagtttgtgttatttaatcacaataataaacataaccatttactatatttatatatagggtaaatagcggcataagtacccaatgttttagatttgtaattggcataaacccaatgtttatttttagcgggtaaagtacccaaagtttctaaaagtgttattccgtccacctccgtttgaatttcctctgttagtctattatgcttaacacgtgtaaggccagattaataggccttctttttaaataaaaataaataaataggaattaaaataaaatataaaatatattaaactgaataaataaaacataaattctaaaaataaaataataaattgttcaatcctgtaagaaacgaaaggtctccccctatatttcccccattttttt

SEQ ID NO: 50873 - DNA, 2065 bp, Cannabis sativa
gcttttacttggggactccaatgtagtttttaatcttaacgatagaacaggggggaacctgattaccctaaatgacatagctgattcttcacaatggcttgcacaatctcatgttaaggctcttaagtacactagtttgaaattcacttggtctaataatcaagatgatttgagcaaaatctactctaaaatagattatgctttggttattgaagattggaatgacatttttcccaacataattgctcactttggttaggaaattatctctgatcactattcttgtatcatttttctaaagctgctgtgaagattggaatcaagccattttggttctttaatttttgggttgaccacccagattttaaggaactggttttaattagctggaggaaaccagttatagctgagggattgaaaagtgtttacctcaagctcatgagagtgaaacacagcctcaagaaatttaactatgagatagtatgagatgtgagaaagtctttttaaaaggccaaggacaattttttggcacctaagcaattggcttaagcttacccgagggacatgtttattaagaacaagaaaaagctgcagcaacaaactttagtagccttgagaaaatgtataacaagttcttaagacaacgtagtaaaattaagtggcttcaaaatggggatgataacacagctttttttcgtgcttttcttaagtagaaaaggatggataacatgattacttcttttgtcatagatcaaggggttgttaatgataacttctcaaatgttgttgatcattttttaagtcacttcagaggtagtatgggcactaagaacacaggctctaacaacttatgctttgattattttgactagggttccagtcttaacttagaccaacaattgttgcttttgaaaccattcgctcataaagaaataaggaaagcaatgttcagcatcccagacactaaatatgcaaggcagtcactgactttttcagttcaggtaaaatgcctctcaaattgcactctactgtgatctctcttattcctctgattgataatcttgccagggcagttgacttcaggcctattgcttgttgttctactatctacaagtgcattttgaaactcttatgttctaggcttgccaaggtgcttccttacttgatcaaccaaaactggagagcctttatacaaggtagattcatagctcacaatgtaatgattcttcaagatctcttgaagaattataacaggaaaattgtgcccctcgttgtgcaatataagtaaggcatgtgacacgatcaactgggaatttctcgaagctttgttgaatgcttttaatcaaccccaaatatttatcaacctggtgatgatttgtatccgctttacctcctacgcgattattttgaatggtagaatccaaggtagtttcaagggcgaaaaggggcttcatcaaggagatcctttatcgccttaactttttgttctaataatggaatatttgacaaggagacttcagattgcagctaatggctctttatttagatttcatcctctgtgtaagggtttaaggatcattaatctctgttttgctgatgacttgatgttatttagtaaagggacaaggcaattggttttggttctcaaaaacattcttgatgaatttagtttctctttaggtttacacataaatttgggaagtctcagatattttttggtggtgtagactctaaagagaagcataatattcttaatatcctcaacttgtgaaggttcttttcctctcaaatacttggaattcccctcaagaccaaccaaaagaaaggcagatgactgtgttgtgatccttaaaaaaataagccagaggttgcattcttggtctagtgaacatctcttgtttgcgggcagagtgcaacttattcattcagttcttttagggcttcacaattactggatgagcattttcatgcttcctcaaagtgttatgaaggaggtagagaaactttgtagaggctttctttggggtttgaatggcagcaggagtaaaattcatgtagcttcatg

SEQ ID NO: 50874 - DNA, 1122 bp, Cannabis sativa
tttttactattttggaaaatacaatgttcattttgtcatttaacaaaatagagagtccaattaataacttttacaaaatataaggtctaaaatagtattaaccctaaaaaaaatatatcaaaaaattattttttaaaaaaactaaatattaagagaacaagtttgaaagagtgatgatgaaattattgattgatttttatgtttcttttatttcatttatgagaagtttaaatgtcttttcatcacttatatatatatatatatatatatgatagttttaaatttatataaatatataaataaaaattttaagtaatttttaatgataaaatcttctaaattattaaactggtaataaatttaaattgtcatccagttaattatcaacatatgttgcttatgtgtacgctcttatacacgcggtatgtttatatcagtataactaatattattaattaaaaattatttcaaaattaaataaaaataataaaataaaatattttaaaaaaaatatcataaattttaaaataattttgaaataataatattaggtgtaccaatataaacgtattacatgtacgagagtgtacacataagtagttcctgttggcaattaattgaaaaaaatggatagcactctaaatttgctgacacatgagtagtttagagagttttaccaccaaaatttaaacttaaaaagttaagtgcaattaaaattatagttaagagagtttaaccgcaaattactctaaagtaaatttgttcttatatttgcacacaattttaaattatttaattgtaaaacaccaattatttgttaaataaaaataataaatgagtgtattagagttactcccacgtgtgactgatgcgtagaaaaaaaaatatatattatatataagataaatagactacaacttttattttcaattagttatgagatgtaaaactattcacaaagaaaagataatatatttttctttttttgtttgagagtgattatatatggaaaaacaaataaaaaaaagttttcttaaatgtttttcaataaaattaaaatagaaatgaaatatatatgtatggaacacttcttaatgggtaatacccattgatgggaactaa

SEQ ID NO: 50875 - DNA, 1640 bp, Cannabis sativa
tatattgaaatgagttttattaataagtgtctcttaatgctctatatataatgcctcaatgcattctcttgtccattcaaacattttattgtcttaaaacacgttaaaaaatggtaaggacttatctattgatttcgagatgaacctatttaatgaaaccatttttttggttaatgattggacttctttcagtttctttaggaaaggcattttgagtagagcttttatcttcttaagttttgcttcaatttctctcacattcactatgaaacctaagaattttccagaagacacctcgaatgaacatttttttagattcaacttcattttatattttctcagaactgagaaacactttgcaagatcaactacacgatcttttctctcatgtattttaccaacatattgtccacataaacttctatattttggccaatctgatgttcgaacattccatttacgagacattggtaagttgctcccgtgtttttaatccaaatggcatgattttatatcaataaagccccatgttagttataaagcttatatgttcttaatcatcgatgtgcattcttatctggttatacctagaatatgcgtccatgaataatatgagtttgtgccagcctgtgacgttgacaagctgatcaatctcgtgcaaagggaaacaatattttaggcacgctttatttaggtcagagaagactatacaagttctccatgggccgtttgtttttgagaccaagactaggtttgaaacccaagctcaatgaagttattagtcaacaacttgctaacctcttcttttaaaggatttggtctttctgtttctgagtctagaagacgtctcttttgttgccttggtggataatgagaatccatgttaagatgatgaaaaatgacacttaggttaatcccaatcatatttgaatggctctaggaaaattgatcttagtctgcctttaaaaagcaaattaattgctacttcaattcttcccccaaccctttaccaattttcactatcttgatagatcgttgggatctagtatcaccttttccaactcttccacgggcccaagttgtgattgttcatcaataatccttgggtccaaatcttcaatttctctttcattgacttccttagttattataccattatctgacgagtcgttgctctttcttttagctttacactacaacattgtctcatcgttaattgatctcctttaacagtgcctattccagaataagttggtaacgagtcaggacatctttgattcaattactctcgaaggccaagtctatgcacatcctggcgtcgctcttgcctttcatcgtaattgctcaccgatagacttggtgaaacactttctgattgataaatttgcaagttgctaacgctttctcattctttgcgatattcatgacgatgagttctctctcctcgcggtggattttcccatgtgcatgatctacatgattaactttgcccttagctccctctcgacccacttttggccgtgtttgattgagaccctcgaggttcatcacaagttggtcttcgtctttcacatacatttataactccgtccctgcttagataggtatacataccatccctttcattccttctgggtcca

SEQ ID NO: 50876 - DNA, 1359 bp, Cannabis sativa
ataaatatggctatgctgaattcactacctatgctcttagtgttgctgaagacatagatagtgccgagccatctagccacacagatgcaattactgggaacaatagtgcagcttggctgcaagctattaaggaagagaaactatcacttaaaaagaacaagacctggacagtggttaacaaaccagaaaaccagaaagtaatcaagttcaaatggctattcaaacaaaaagaaggattaccagggagtgagggtccaatgtacaaagcaagacttgttgccaagggatttactaaacatgaaggcattgattacaatgatatattctctccagtagtcaaataaacaaccatcagagttatcatatccatggctgggaaatttgatcttgaggtggatcaaatggatgtcagaactgcattccttcatggcaatttggaggagaaaatctacatggagatgcatgaaggctatgaagatgaaaaaccgggttaggtatgccttctaaacaaatcactttatggattaaaataggttcctagacaatggaaccttaaatttgacgattttatgatgaaaattggtttcaccaagaacaattatagtacatgtgtctacattcaaaatggtatctatcgactattgtatattgatgacatcctaatagttgggaaagaaaggaaccaaattgacaatctcaagtctcaactgagtgttgaatttaaaatgaaagacttggggccagccaataaaatcttaggcataaagagaaacatacctcacactatcaacctatcataagaaaattacctcaagaaggtacttgacaaacttggcatgaaagatgccaaaccttttaccactccccttgcttagcatttcaaactgtcttagaatcagtcaccaaagacagatgctgagaggaagctcatggaaagtataccctatgcaaatagagttggcaccctcatgtatgtatgtcatggtgtgtatcagacctgatcaggcacacatcatgagtgttgtcagcagattcatcagtgatccttgtgaagaacactgaaagggattgaaatggatccttagatacatcaaaggttcactcatgactggcctagtatttgaaaaaaatagcaattatgatgataatgttattggtttcgttgatttagactatgttgggaatttggacaccagaagatctctatctggttttgtgtttattgtatttggaggctgtgttagttggaaagccagtttacaaaaaatttgtagccgtcctccacagaagcagagtacatggttgcaacagaagctgttaaagaagccatctggctaaaaggcttgacatcagaaatag

SEQ ID NO: 50877 - DNA, 751 bp, Cannabis sativa
aacagctaatttccaaattaactaagcgggctttacattgaccctaaattaccttttttaaaaactttaaacttcgctcattttttttttcttaccatgcaattaattattttaaactttcttttcatcactgtaatttatttggagttttgaaaattgtataatttatgtcttataattataaacactatcatatagagaattatattataatttctttaaataatactaccatggaagcccaacctgcaatatggtgagcccttttattcatattacaatgaatccacaagaatatttaaactaatagctattctaacaacattagtaaaccttacaaaacttctgtaaccaggagagatatcggtctccaaagtattacaaaactgaagacaaccagagaagataacaacatcccctatccatacctctctagcaaagagtattagagttaatcttacattgctaatgtgtagaaataaaataccatatataagatatataggctactcctcccattaccatttagttttgagatgaaatctcaagcatcttatctcaaattctaacatggtatctgagccaaactaaactctaatgagtatctaatttccaaaagagcctcttgtgttttgttgtgagccaaaagtgttgtcgatccaaaaagacgagccttaacctccatttgggacctttcggtctatgtgtgcctgttttcaatgttaggatctttgacttatttcaaaatcta

SEQ ID NO: 50878 - DNA, 1500 bp, Cannabis sativa
gtacttatttaaggagcaagtaaaatatattgtagattatgctatcagttaaatcctgtgtactgataaatcataggaatacaattaatcacataatcttgattatttttcattatgttgacatcacaataaacaagaatatcaatgtgataagaaattagatgaacttataaatcaaacaagtggtcacatgaataaaataacacattaaacaagtaatgaaataaatctgtttctttattgataaatgaatattcaaaattacattgaaatagggttttttttagtatacaaaactgaacaattttttcatacttacagaacctttgtcaaaattcctataaactttttttttctccaagagaaactaaaggaatacagagcagtattcatacagtaaacacttgtaatatttaaacacttgcctgcaaggctaatacaatggactcgtggactagggattattaattcccgaaccacgtataaattacttgtcgattatttatcgttttgcatttcccttaagctctaattaattagtttttgaaaatttcggtaaatagttgggtttggcgaatccacctgcctgaaattattgttcaatggcagaacaaagttatttcagttcttgcaccacgagttgacgttgtcttgggtgtttttgcttattctaagacctagcctgtcaaaaataggccttagaacgacgtgttcttgaatgttttgggcttgagaatcactatgctggctggccgattggtgaatctcatgttctcgaaatgtttggtcgtcccccaacacctccttgtgccagggactggctactcctgctgtacgatctgtttaacaagatttgactgtcttctagcaggggaaggcctgtcctcgtgctcgagggacctggttgatgagccttccttgcaaaggatctctaattagatcttgatctcttatggcagttctctcattgaatcgccttatcaggttacgggcctccctgttacggcggtccagctctgcctgatgggtccagagatggcctcttggtcgtccatccatctcaggaattcgcgtctctgttgggtgaaagcatcacaaccaacaacgtgtggttcttctgtttgggtgacctggcccacgacttttctgagcctggccagctcgatgtcctctcttaggtccacatgaggctcaataatagctagtttgtcaattcctggccttgtttctccggcataatattggggaccagtccagtttcgctccgtagaggttgttttatgttggcaagaccttttctttgaggtgttgttggcggatctgttctgggcagcaaaggtgggtcactaggattcaccgtgtcggtaggaccaacaagattagtggtattggttggatttgcaggattcgtcggatcggcagtatgagttggattagtgatgccttccgtggtgggaggaactcgaacattgggatcagttgccataggatcttgaggaa

SEQ ID NO: 50879 - DNA, 2005 bp, Cannabis sativa
cccaacattaggtgccagatggttgagccctctgtcaaaaataagtgaggcacgcatgagggccttggataaggttgggtacctgggcagactttagtgttatgtcccctcttcgaaacatcgggcaagtaactcgccaaaagggttttgtgcttggtcgggtgctaacaccaagcaaggggtgatggtgcctttgcactcgtacttcaagagggtgccagattattttggcctttgtgtgacccaggtcgctcccaaggccattaagtatttttctgccatgttcgtcctctacgccattcaaggatggggtgtgtcgcccccaaacgaggtcaactggttttttgacttgaagtctacccctaagcaaagtaggtcggggtacttctacttctctcagccagacttcaagtggctgacgggcaccgtggacaaggatgttagcaggatcaggggttttgtgacgagtattacttcgtggaaggcatggataccacctatacttggtttcaatagatcccaatatacaaccgtccacccctaacattggcacttagggacagggctcaagagatctagttgccagatgctgctcgtaatatcactttgttcacctcggaggacaactttgtgaagtacaagctttatccaacagactttatacctcagcctgtgaagggaaggaagaagaagtccagggctggccaagctgagggagctgagcaagagaaggagctcattcagctcaagcgtgaggctaagttgaagggtgatgcaggagccaagcagtatgctcaggaatattctgagcaggataggccgctcaagaagaagaaaaccctcctgatcgggcagaggcccatcgaacatactattcggatcagagagcctaatctacctgctcggtcgtccacccctgtagaaggaaaggggaagccgtcatggaggagcaggaagactcttcggatgatgacgccccgtctgtgcttgttcgggcaaatgctcctgccagcgtgcagaatacttcatcttgcatttttttttcttatttttcatgccttcatatattttatactttcttctgactgtattgtttttattccatccagaaatgtctcagaagatgattgaggccttgaagaagagagtggggggaagctcgggcttattccctccggccaagaagtcttagggcggtgagattccatgaaaagagaaagcaccagtaggagaggtcattaagctttcaagggaacaacctgccgtggaccctcctaccccggaagtcactaagtccaaaggttcttgaggagggagttcaaaggaacctaagcaagcgaagggaggatccgagctgatcagaagcgggtctaaacaagttaaggctctcaccccacctttggtattccacacagagaccaaaagaggcagagacatgctcaacccctatgtgagccggtcggtttcagaggtgaacaaacagttggatggggcggataatgacttgtctctcaagctggtcatgggaggagtcttgaaagagctttcgcaggtaagtcttttctgacaattttcttttattcttccttgactagttcggatttttaatgacttttttctgcacagattggtttgaagatggcatacgcctattctcgagcaaagtcggatgctgctaaaaaccttgccatttccaacacaatgcgaacggaagtggacaaggccaaaaaggatgtcgaggatgcgcgggttcaacttggggttgtgtggatagagctgggagaggttaacaagaaactcctagcagctgagaccaaagttgccgagctgactaaggaactacaggagacgtcctcaaccgagcactcgaggctgatattgcttctttgtcctgggacgttaccagtcttcaggacaaaaaagagggtctcaaactcttcttcgcatgttggaggatgagaagaaggccatggaggaggaactcaaggctgaggttaagaaccag

SEQ ID NO: 50880 - DNA, 761 bp, Cannabis sativa
cacaacaccttaacatctttaataccccccttaaggtggaatgtatatgttacaaagccccattttttatttcaaaacattaaactgagcaggaagtaaggccttagtacacatgtttgcaatttgatctttgttgatgtgtgagctatttttatgacaccctcttgaaccttttgtctaataaggtggcagtctatctcaatatgctttgttttcttgtaaaacacaggattagctgcaatttgttaagttgccttgttgtcacagtgtagtatagctggtccatggtgctcaatattcaattctttcagcagaaaaattagccaaataacttcacatgttgtatttgacatggctctgtactatgcttcaacagaggatctagacaccgtgtgttgtttcttgctcttccaggatacaagagacttgccaagaaatgcacaaaagccagttgtcgacctcctagtggctacacatgctgcccagtcagcatcaatgtaggcctcgaacctgatttctaattttgtaggatagagcaatccttgtcctaggctgcttttcacatactgcagacttctttatgcagcatgaaggtagttgactcttggagaggacaaaaactgactaagtttattcacagaataggctaagtcaggccttcttattgtcaaatattggagtttcccaatcattctcctatacaacttagggtctgtcagtttttcttcaccttcttgacttagttttagattggtttcctt

SEQ ID NO: 50881 - DNA, 747 bp, Cannabis sativa
tgtgttttcgagcacaaagattaattaagaagttgtaataggaagttgatgatagtactctattattaatgtactactctgtccatatataatgatacaactgattttgactttcgagcatcattaaaaaaaagagttaataccattttagattttatattttgtaaaaattattaattagactttctgttttattaaataacaaaataaattctgtattttccaaaatagtacaaataagaccctaaatttaattcgacaatttttttcatatatataactaatttgaaggtaattcttaaacgaatagaagcaaaaaaaaaaaaaaatatgtagccaatttttttatactacctccagattaacttattattaagttttattttgccaaaaaatcaattcaatatactatttagtactatattaaaaaaatataaaatctaatttatcatttaacaaaacagaagatttaatcaataggttatacaaaaacacatagttaaaaatcatatttaccctataaagaaatctattataaagctacaaagtatgtgtagatgttaatgaagcttggaatcactttatttttatttgctataaacatttgtcccaacttgtaaagaacattttttttttctttttggaatatttgacttgagtaaaatataatataagtgatatttacagagtagaaatatactaagaatcagtgagaaatataataagacaaccttcttgttcttcaat

SEQ ID NO: 50882 - DNA, 1052 bp, Cannabis sativa
atcttctcccttagtttatttatttatttattttaacaattctctcttagacattttgattgtagataacaacataaactctacaatctcacatatttcaaaattttgacattgtcttattatatgccaacattattatggagtgtgtgcaggttccctaaagtgacactactcaatattgtatggtggcactactcaattttaattatttatgaatctcactactcatatttcaaaagtttgaaaatgtctactcacaatttcattttgagtattactactaatagtactaacgttaaggtcatgtcttacaaatagttttagatttattataattattattaaaataacatatgtatgacatgatatttaattataccaacaaaaatataatatcttaggtaggagtgtgtataaactgattcaatctaatgacaagtgatcaatccaattacaatcaaccaccaaacattaaatatccaattgtaatcggattagattggatgttatcttttaatatctaattagatcggattaaatgttgggtggggtgtccaaaatccaatcaaactaaataatattttcatttagtttgaatgagtaattaacttttatattattaaacgtaaataaaatgtatgtatgtataaaagttaacattaaaattttactttttttattggataactccaattcaatcaaatttaatagatattagatctaaaatattaaaaagattcgatccgattcaataaatattaagtctaaaatattggataaactcaaattaaattaaaccaataaatatacataaaatacatctagtggatagaaccggtccaattcaacgtccattggatgactaaaattaattgaatcgaatagaataataaatctaacatctaatatataactggatcgaatttaaataagcctaaaatcattagatgtggtccaataaatatccttaaattctcaggatagtaatgccctttggctttttttttctttttatgtgaaattctgtcaaaatcttctctatttctctccca

SEQ ID NO: 50883 - DNA, 1390 bp, Cannabis sativa
cccaagaaatgacagttaatactcattaaaaaagtgtagacatcacgcacacccaaggtggcattacatgccctaaacatcaaagagacaatcgattagtcacatcagatcaaaagtggtctgaagaacgaatacgtgtcacccattcgaccggtttggtgactaattaagtccatgtgcaggcaggaagttcccgcatggacttgggggccaaattttatcctaatttttgcacgaaggtgatgtgacatccatctaggtgacacgtggagaagatttcatgacctggacaaataggtcatcctgtgatatatcatctaggttaactcatcccttgaaagtaatcaatctatagaaagagctaaaaaaatgtccagatagagtatgctacaccatctgactagtatctattgtccagttagcttgcagacattggccagagaatgacagttaattatcttcagagatatgtctcatgaatcctcaagcgcaagttactatcttatcctaatttcatgggatagatttgcgttggtaagaaataagaggaagcccatctagtttccttttttttttttatttgattagggaaagtaaacaagttttctatttaaattcttattagttttggaaaaccaatttgatgtaattttttcctataaatagtggagtcatttcattattcaggatggagaaaaatcagagagaaatactcgaaaatcattgtaaaagcttttaagagagatcaagaacttcttgcttcgcttctcacaagttaatacaagtaaaaggggagtagactattgccaccatcatggggcctaacctctataacaaccttaatgttctctttgctttatatttatcattattgttattaattatttataatttctttaatttgactcaatatcattggctaaaagcaaggtcaatattatccattaaaaaccggaggctctccccctcctttcttcatctcattaatttcatcctatagtgagtattagacatatatcttccaacactatcgtttgtagtcataattgacatagccacttttttccttggaaaatcccttcttcttggtctgttgcaagccttcatcatcaactactttccctttcttatttcatacatccctttcctctttgttcttctccacccacacttgcttaggcttaacaaattttttctcttctttcttcctagaaactttaattttgtgtccaaaggctttgcacttgtgacataccacgagtttttattcatacttaaccataacttcaagatcctgcttaatttcatcgcaaaagaaaatggtgtcaggaaagtcttgatacatctttacctccaccaagacacgtaggaaattgagtctctatttatt

SEQ ID NO: 50884 - DNA, 834 bp, Cannabis sativa
tctagaaatttatcatttgctggtatagttgtcctcattaatttggttttgatggccatacacttttattggtgtcaaatgatggttttgccaaaaagcattgtaagagatataaaggccatttgtagaggattcctatggaatagcagccactgcttgactggggctgctgctgtagcttggaataatgtcttccaatctaaatcagcaggtggcttggggttaagaaatgtcacaaattggaacattgctgcaatgttcaaatatgtgtgggctgtggccaagaaagaagacaatttgtggtaaaatgggtacattatgtgtatgtaaaaggagagaactggtagaattatagtgctaaggccaatggcaattgatattggaggaaattggttgctataaaagagaaaattaaaaatctggttgatagggaagttataaacaacagatatcagattgctcaagggtacaaatttcttgatcctactgtcctaaagtacattggacttccattatgtggagtcgattcaactctcctaagcatagtttcattttttggctaactatgcttaagaggatcaaaactaaagataggctcataaagttcaatactgccatggacccctgctgtttttatgcaacaatggagaggtgtcagttgaacacatctattttgattgttcttttccacaaggttgtctaaaccagatcaagatttggctgtaatggaatatgaactttaattctttgttttaaattgtcaagtggttaggcaaatcaaggattagagacttcagaaggatgactttggctgctgcaattgcagcgctggtg

SEQ ID NO: 50885 - DNA, 899 bp, Cannabis sativa
ggagtccttaacctgggttccctttgagataacgcaacaggtgatgtattgcttggagatgaggggtgcgtggagtggccatgaattggctgaggtagttgactgcgaatgtgatgtcaggccgagacaaggtgagatagaagggttttccaatgagttgacgaaatgttaagggattgtctggtgtctctccatgctcattgtcgagtttaagctttggatccattggagttttgctgggtttactgccaacaaaccctgtatcttcaaggagttgaagcgtatacttcctttgagagatgaaaagtccttcttgtgcacgggaaatttcgaaacttagaaagtatttcaggtttccaagagttttgagttgaaatttctggtgcaaggaggcttgaagtttgtgaagaaggaggagattaggtctagtgattatgatgtcgtcgacatagacaaggagggcgatgaaagtatcattggatcctcttatgaacaaagtgtaatttgcttgtgactgcttgaatccttcttcgagtaaggcatcagagagcttcttgtactattggcgagatgattgtttgagcccgtatatggatttatgtaacttacagacaagattattttctgcaataagagaagaaggaagagttaagccttttggtagagtcatgtagacctcttcattgacgtcaccatttaaaaaagcgttgtcaacatcaagttgcaatatatgccattgtttgacaaccgagatggcaagtacaagtttaaggttaaccattttggccacaggagaaaaagtgtcaaaaaaattgagcccttcttgttgcgtgtaaccttgggcaacaagtctggctttaagccgttcgacactgccatcgctattgaatttgatttta

SEQ ID NO: 50886 - DNA, 504 bp, Cannabis sativa
aatctcttaagctaaagatactggacgcgagaccacaaggagttagttgggtcttgcctgctttcactctttctgatgaggcatttagcaaggttcttgctagtggcttagtaggggatgtccagtgcaagattcgccatagaaattgtcgtgcgcaccagccctctctaggttggttagcgtggtttgaacgtcatattgaacatgggtcagtgctaccacttcattagtattttcttaacatcactgcttactttgggatgtgcccaacacagctcacgccaaagagcatcaagtatcttttggcgatgttcgtgttgtatagggagctaggctaacctctacataccccctacgagattgggtactactttgatctgaggttttagccgaagtagaacaggataggatattttaatttcagttagattggtctccaatggttgggtgacactaattgcacagccatgtcgaaggtcggtgggtgttggaaatattttacca

SEQ ID NO: 50887 - DNA, 671 bp, Cannabis sativa
ttttactgttatggactttgtttagagactaattagcacttttgcccccaaactttgacgtgtaccaaatcatgcccctgaacttttgggactattaaaaattgttcctgtattattgagattattggattcaaggatttttgtttaatttcgtttaatttaacaaatgtggcatttgtcatctactaattcgtacctccgaactttgatatgtattacattgtgtctctcaaactttgacatgtactaaattttgtctctcaaactttgacatgtaccaaattttgtccctcgaactttgacatgtaccaaatcgtaccccctgaattttttagactgtgaaaatctttttccgaactattgaaattaatagattcaaggatttcttttcaattttactaacggacccttgtcgagttgtcgtagatgatttggttcatgtcagtcaaagttcggggagaactttgaaattcatgatttctctgttaattaacgtgccgctgtgcttattgtaactgacgatttctgagagatattagctggtagaggcagtgattattaatcctgtggttccctactagtctactacaaatgagtgggtttgtgcattaatttgttgacgttggatgcatgctatggtccagacgttttgattgatttttttttttttt

SEQ ID NO: 50888 - DNA, 838 bp, Cannabis sativa
ctctctccttcgcttctagccgcggtaactccgtcagagtccaaaggcctccaatcgtaatattacagtggggtttcgtcctttgcttcatcccagccgcctagacgatttgacgatgacggtgcctctccattcgcagacaacggtggtgtaagctcttccgcatttgcagacgccggcggtgcacgatctcccaatcgcagacgacagtggtgagtttcttccctcttacaaacgtcaacgacggcggtgtgaaggttcctgcgatttgagccattgttctgtgtcattgattaaagagagtaaaagattggttcaagctatttccatgagttagagtgaacgattggttggttttagtttctgttttcgtgtgttattggttggatttagttcttttgttattttgttgaacaattcgatttagtttattgttttcttgagttacagtcaacaatttgttgctttacagtgaacgattggttgaatgattggttgatcttttattttttactgtcattaggttaattcctattagtgtttttatggggttagaatttttagtttcatttgttgaaagtaattaggttttcccattagtcttatcttttgacatggttttataatttctctcattggtattggtttattggtttctggcgttagttactagttcttggttctgggttcgttcaggtgaccatggcgtcgagtagttatctgagaatggaggcagcggagaacatggtagggatttttatgccgaaatggaaggtgcagcctgaaatagatgaatttgttggcataaaagaagctttaagctggattgaccgtcatt

SEQ ID NO: 50889 - DNA, 1226 bp, Cannabis sativa
agctgtgcacatactctctaagcccactctaacatcacaattcagttttatccaatcctgaggatgaggagtccaagtctccttcaagatcggtgtaggactaagcaagagagaaacatgtaactctacaaaagaagtacaaatatgatcaatacatttcagcacatccggaggagaattattgtgtaccatgccattgtgcatcctccagatggtgtcaacaacaattgatgcataaagaaatacatcctcaactcggatcacaatttatattatcatgtagaaaatgtatttgtgagagaaataattacgaaaattttgttcatcaatgtatttgtgacacatcattctaaaaatattctaaatacatttatgaatgctctccttaataattttttattctccaattttctattttttaatctatttttctaaatatatataaatttaaaactaataaatacatccgtacttaatatgttttatattaatttttaaaaactaaaatatctaaccctatcatttaaacaaaacaaagatattcatctaaaactaataaattataccataaactagtaaagcctatttatctaaattttataaatataccattcaaataataaaatcctaaaatcatattgtctctatcattctctctcaattctctcatcatttaatttctttgtcctcttcgattatcattcaatagagttttcattttgcatgagaattaagaaattctttgttggtaggttccctctatattgttgaaataggattctgagttaggtaacactaattaaaattctttgtttgtaggtcacacaaagagtttttaatttaatttgtaacatttgttgaagatgacatgtagcagaaactaaagtttttaaatatataaaagaaatgtgtgaggcggtgacatgttactctaaaaatacttaaaatacatttaccactctctttaattctctcattttaataatccattttttttttttttaaaaaaaagtcattctaaaatcatcaaatttctctatccataatctatttctttacttatttttttaaactgataaaaataatgtggtagttattttcataaaaataagtacttaattcttgatttgttttatgtacggagtagatctactgagtgacaaaaatcacaattataagtgagatacggtgatgacaactgatgtgatataattaaataatataac

SEQ ID NO: 50890 - DNA, 1512 bp, Cannabis sativa
ctttgtctcttcctcttcatcttcttcgcaccatcgaggccacctaagcattgagaacaccgaccgctaccactgaacctccacatctacccaaaactcaacccaacaatcctcaaatctcacctactcaaatctttctctcttctttctccttggcttctctcaaccaccgtcgctacttaacccttgcctaaccagaaattcattgaattgtgccaccaaaccacgaaccgagagcaagatagaccaccatgaacttgttgatttttcatggtactaaattaggtacacatcagaagaattttgtattgctgattatcattgtaccatatagcccaatatatcttttttctcgttcaattcttttgaagtcattggatattttttctcgtttgagagccttttccttcttccacttcgttccgaaaagtaactaggaccaatcctatcgactcaaaacttgaaaaaaaaatgtaaaacttaagtaaaattatcgataaatcattgataaaatatcgataccctatcgacaaactcaagacattcaaaaaattaattaagagccactaaaccattgacaaaccataaataaatgttgatttcctatcaataaacattaaaaaaaaatttgaaaaaaacacttcagctaaaaatatcaactacccatttaattttaaatcgatattataccgataaatatatcgacaattcatcgataatagtgaaaaagctaacataacacataaacagctccacgaactcaatttatctccaaaaaaatcacaaaaaatcaactaatttcaagaacatacataaattcgcacattaatctataaaaaaaatgtacaatttcttaaagaaaaacttaactgggaggagcaatgagtatggtggaggcagttcgtagtggtctgttttggtctcggttcgtggtgtggtggtgtcgtttaatgagcttctggttgggcgaggattaggtggcgacggaccgacggtgacgatggtggttaagagaagtcgaggatgaggaagagagaaagatttgggtaggtgaaaattaggggttgttgggttgagttttaagtagatgaagagattcggtggtggaggagagcatgttcggtggtggtggttggtgatctcgttgcttggatctaggtggtctcagtggtgcgaggaagaggaagagacagagagagggaaaatgaaaaggaagttattttaagtagaaattaaattatataaattaattagggatttaagttttattatgatgtatttttttaagtacgtaaaataaaatttctcttgtaaaaattttcaaaaaaaataaaataaaataaataagactatttattagtgtggaaaaggaacatgaagtttccaacattttcttaaagggatttttactcaaatatacaaaaaagacctcatatttacatttatacggacacatgcatatttaaacttttatacaaaagaagattctttttttttcaaatatacgaacat

SEQ ID NO: 50891 - DNA, 1063 bp, Cannabis sativa
ttgaagatgtttctagacttttttttaatagatgttttagaacttgtttgtgtgtattactttgattttccgcttcccacttctttatgaatttttttgtattgttttgttctttttttttttaaagaaaaatcaaatctctcctttcacaaacaaggctatcacatttttttgaaagaaaaagtggtaatattaaaccaaatcaactgttaactgttatagaaacacttaaaaatttaggacaagcatcagtccaaacatgaatttttgacgaactagtaatagatttagctagtgtgtggatcacatcatttgcaacatgcgaaatggcacaacatgaaccaccaccaaccgcagctaaaagacagataatctcctcaataacatgtttgaattcaaaattagaatcaagattattaacccaattacaaacgatagtcgcatccgtctccactctccctacattgatacccaaatttgaagcccaaaggagaccaatacgaagagccaacaactctgccatgaccacacgaaattcactaacaacaccaatcaaccatgccgcccacacaacgccctctacatcacgaaccacccccaaaaacatgtaaagcctctcccaggcatgactgtcgcatcaattgacaacaccaacaccccgagttcaaaaggaacccacctgcgaccaacaccagcggccaccctcgacctcgactcccaacaactaggctccatcagctcaccccgaaccatcctccctctttcccccattcgctgctgcacaccaaaaaaaaccagcaacgcaaaactcatctaaagccacatccgccaagtcaacaatgacattcaaccttgattgtttttcctgaacaacatcgagttctgatcatcccaaatccaccaccacaccatagctaccatggcaaagttatcacgatctaggacgttaaaaagccacatttggagctctgaaaatgggccatttctacaccgccagttgcccccacacccccaatcgatgccaaaccagaatcaaaggagaacaatacattaattcgtgttt

SEQ ID NO: 50892 - DNA, 1022 bp, Cannabis sativa
  modified_base (42)..(45): a, c, t, g, unknown or other
tatattaataagtaaatctcattatattgaaatgagttttannnngggcataaaacccaacacaaggatgttctgggaagaacattgaagtgtatgtggatgacatgctgttcaagtccaaaacctcaggagagcatagcaatgatttggaggaagccttcaccattatttgaaacgggataaagattaatccaaagaagtgcaccttcggagtttcttcaggaaaattcttgggcttcattgtttgcttctgagaaaaagaagccaatttggaaaatttcaaggcattcctggacatgccttcccttaagaaacataaggacgtccaaagtttgactagaagtatcgctactctcagtagatttgtttccaattctgctgataaatgtattctgttcttcaatgtcttgcgcagaagcaaaaagttcaagtggacaaaagaatgtgaaaaggcttttaagaagatgaaagaacatttaaccaaggccctaattctatcaaatctagttgaggagaaccatcatacctgtacttggccatgtcagataacgctataagtgtcgcattcgtgcgagaagaagggaaggtcctacttccagtgtatttcataagaaaaagattgttgggctcaaagtccagatatctaattatagaaaaattgtcctattacttgttaattgcctcacagaagtcgcgaccctactttcgggcccatgccattaaggtttaacaaactaccctctctgctaggtattgttaaaattggattcatctgaaagattaataaaattggctatgaagctcagtcaattcgatattcatatcaaccccaaatttccatcaaaggataggctacaacagatttcgtggtggaatgtaccacattgaatgatgatccagatgagtcaatccccaaactggagctctagaaagtcttcatttactgagcattgaatgagaagtgtgctagaaaaggagtaattttgatctctccacaaagacagcagctctagagggccctt

SEQ ID NO: 50893 - DNA, 1618 bp, Cannabis sativa
gttggtagccataaacgacaaaacttggacatgtccttcttactaatgtcctttttcatgggagcaggtttcttctacggaactactgactgagtggccatgtagatggtctctaaattgtcagtcaggacagagaaagcagtgaatttggaaggattttctctaggggtctgttcaactttgccagcaaactttcccctttttctattgccttgtctgttgttgttgctagatctcttactacctgagcttgaactgcttgggtactgggggttttgaacggacgttccaactaagggagcttatgattggcccagtttagggtcaacgtctgctcgctgaatggcttcttcaagcttgatgaaaccatctgcgcagtcgagaaaatcactcatagaatctactggaccacttttcttgatgtccttctacagctctcggagaatctcgatgccccccgtatggcggctaatttcccttcttcagttaatcgtgccacttttatcacctccgtcatcaatttgcttatataatcttggagaggttctcctggtctttgcttcacttcgaccaggtcttctaaatataacgggagttggcgtgaagaagagaattgtgcatgaaattttgaggagaaagccttccaagagttgaaccttcctggtgtcaacttgaagtaccattattgagcggcttctgagagtgtagcaggaaaaactttgcaatgcacatctcctcttaccccttgcaagtccatttgcatttcaaaatacttgagatgtgataagggatcttctttccatgtatacatcttgctggttggcatcttgaacttgttgggtagctctagaacattgatctctggagtaaatggggatccgcgtgctcggtccaactcgagatcattgagcttttgaccgaccaagcaatggaacatgtttttcagttcatccaactgtgcttccatggatggatgaacttgttcagcctcttggtcgaccaacgtcacgttaggatctctttgagctagatcttgaacacgggccccgggctaagtggctagttgaacgtattattcgtctaaccctctatttatatttaaatcatctctgagatcaagagctattcccaatctattgaatactgaagcaccaggttacctcaatgactggttggtttcgcgaagcacctggccagaacttctggtctaggtggtgttattgggtaaaaccccacctaaagaattaccagataaggtctgtttgcctaccacttagcccacgggtggaacctgtgaccggggattggacggctgaccgttcagagtttgggcagtatttccaactagatttttgtctaagccgctcagcgggatggtggacgcaggttgttgattagcaacttggtaggctcttcgaattagtatggtagcctgtcttgttcggtcgtcgatggctgcttgctgacccttcaacatttccatctctctatccctccattcgacaaactaacgcctttgctcttcgaacgcaaggttcactgtagcgtggagctcttcctgatcatgatgcaaaatattagtattaccttccatgagcccaagagcattacagaggtt

SEQ ID NO: 50894 - DNA, 855 bp, Cannabis sativa
tttctcataaaccaagaattcaggtacactttatatagaatagatatgccacatcatcataaaaaataaattagaaatcgtgggtttattttaataattaataataataatttttaagggaaaatcgtattttctaatgtgtgtgtttttcttaactgaatatatataattatactaaattaatattaggttgcacatataattaatttttatttaattaggtgatattaaatgcaatataagtatgtttaattttttaaattaagtaatacatatttttaaaaaaaatttaaaataaagtttaaaattttgatatttgaagattttttttagctattgcgactatattggtatattatttgaatgtgattatttatagatattttatatgtacaataaaactcaagtaagatatcgtagtgagtaaataatttagaaggccaaaaataaaattgtttggtataaagatgtacaaattattaatgatttattcaattttgtaaaatttattgtaaagagagtttatagtctacatatacttaaaataggagataaagatagcatatgatttaatagattgttgagtgaagtttaataggaagtatgagttttaaaagggtatggtttgtacaaattattaaactataaggtggatgcacataattgatttaaagtaatataactttatttttgttaggggtgaatatgcaaatctacaaatattttcaaaaaataattcaaaaattattattggattatgttaatgtagaaaacaaccctaaaattcaacgaattaattaaaatgacatttttcgaatatattatatattcataattattttagaatttataaaa

SEQ ID NO: 50895 - DNA, 1381 bp, Cannabis sativa
ctctctctctctctcgattttttgaacaggtcttttcaacatcccaacccacaacaaaccaccccgtagacccccattgacccacgatgcaccccaccgacccacggcgcacctccaaccaaatcggacacaatgtcaaaggtaagtttgtgttctgttttttagtttttagaatctcaaatctgtgatttgggcaagatctgacggggtctgatagggtcgaatgaaactgtgagtttgcgaggtaggagacgtaggtccgatgggttgatctgattgtgtaaatgagggtgacgtaaatgagaggtgttttagggatatcataaaaattgtcatatcttacaaatattaattattatgagtttatgggagattttttaaccaaatgtaagcataaaaaatcaattttccattgctaaaccccttcatagattgaaaaaaattcaattcaaattataattggaaatcattgtttacatttttctcactaaacaaaattaggtggtatacattcttgggttcttcatttacaattttgagattattttataagtattcaaaaataataaaaaatttatattttttctgatctacaatatttttaataactttttcatgaatttattttttaacagaatatagaccttcgtttttggttgtaaaaaaaactttgttttaactgcaacatttacattatgtttttacaatgtgaaattgaaatttaaaagaaaaatcgtaagaaaaaaaaatgaattaaagcgcttcatgtaaatttcctatttcaaatagcaacgtgttattatatcgtgttcgtagtatattttatttgacttgcttttatatttagtgtcaggtgtgtgtgtctacccatttttaactcgtgtctaactttttcaactctaacccgatttgtaaaaaatcgtgttcgtattgagccactttaacccattttactttactgaagattgagttgtagagaaaataatagatttaagttttattaaaaaacttatatagattgttgtatgtatagtttttcttatatataataataattagaaattttataatttttttaaagaaaattaaattaatttttttttaactcaacattaaatcactaaatataaatttttatattattattaataataataattttttttattttattttaaaaaacttgtgtcaaacgtatcaaaatcgtattaagtgagtcgtaccatgtttgactcgcttttatttagtatcaagtcgtgttaactctaacttataaaattcatgtcatattcatattcgtgtgccatatcaaaactcgttttgccatctctaatagaaacactacaatatcataacaatcccaatctctctctctctctct

SEQ ID NO: 50896 - DNA, 2160 bp, Cannabis sativa
tacacagaaagacaagtgattcagctctagggatcccctcagaaaaacactgtaaataccccccaaacacactgagaagggggtcgagaattctgggtacataagaattaaagagagaaaataggagtgatacccaccaagaacattttctgtaataaatacgctcataaataaaaaagactcgtggactaaggctccttaatgccccaaccacataaaaatctcatgcattaaacttcctacagctttcttacatatattattaaattggttgccaaaaacctctgtaaacaataataagtgtgcatttgttttgttatttatgtattttttgtgcagttattgtttagtttatgtgtatttttatcgtgtatatgttcagtatattccaaaaaatatttttgttagatatatgtgcatttattttgttatttttcagtttatagttattttttaactatcacaaactcaaaaaggtaaagagaaaagataaagttgtaacaacaaatttcataaaaaaaaaaaaaaaacaatgtaacagtacaaaaagataaatcaagttgtcaaaactaagtaaaaaaatcgtaatatgacgagttgagattattttgtttataacaattaagtcaatgttttgttatttttctattactttaagtcaattaagtcaaggagaacaatctacactaagccatttcgcctagcccactaattttattggtgacaattttgtagcaccaccccttttcagtgacttttcggtgatatcgtgcaccgttttaacgaatggtcagcatgggtgtgatctactcgtcgaggtgttctggtgactttctagcaatatcgtgcactgcttcgaaaaatagttggtatgggtgtgatctacttgttgaggtgatcgttttgatatagactacctttattttcgccgacgtttctggtacactaatttctaccaccaccaatagttaatgtgcaccgcttaagtgaggtttcaaaactccaaaatttaaatatagtcgtatatgtcgttggactcggtttcagatgtagaatgcaatgttgataattatttagctatttgatgggagtgatcatatctattattagactaaacaattggagttcgggacttgagagcttaggatcatctttttggaaaaagtttaacgactcgagagaggtagggactcaagttgattttagaatttttatatgtgttgaatattattagacatattccaatttttatgatttttaatttgtttaaaaaactgaaaacttaatccccatatttttctagatttttctggggcagtgagtaccaaatatatttttgtacaactatttatgcaagttatgattttttaagtttattcaaaagagaatatgttcctttgttattcttattattttcctactttggtcatactgacgagagtcatgttgatatgattgttgtttttcacgacctagtctttgtgtcatcatagatagttcaagtttgcactcacttgtaggtgaaagacctagaattgtacaggaagtaaattaaatctgagcccctggtattatggtggttatcaggtgcgactactcagtttttggatgtcgtttcctactagactttataagctcatcttctattttcttccattccagaaactcaatttgatgcgaatggatgatgatggtattgttgaggaagaaagtcgttattaatttagtcttattttctttataaaacttctattgaaaacaggttttgtatttaaacttgaatggatagtttgaatgacttaaattagctatgtatagtaagaaatgaagaatgatggatgctagatattagtttggtatattttattgacttattaagtctatctatttggtgactatataattgtgtagatattattattcttttatattgttgagtggtcctaatttagttattagtatttttctataaatataggagttattttactatttttgaataaatattttgtaaaataaattaaatgattatctataagtacgtattatcttcttacaaggataaaaatgtgacttttgatcaccctaattatgaatattacatatctgtcacagtttaggattcacaatgaaagtattgcttgtcttttttttttttta

SEQ ID NO: 50897 - DNA, 550 bp, Cannabis sativa
actttggtggagtggaggcttatctcgtgcatattaacctatctgccttatagcctaatctaaacatgtttatcttatgaaactttaaatttagtaagtacaccttattagtaaaattcaaattcaaatcctaattttctattaatttcttatagtttcattattacaaattggattccaatttaaaattaattaatgctttccataatgaaaatttattatgtttcttaaagttatttttattaaattatatttgtattttatgtaaagaacatactccatattgaaactacaagagtataacatagacaatctatcaaaactacgagccacaacaccttttcttaaattatatctcagtttttattgattattgtttattattatcttttattatttttgttgtaaaattgaagaattaacatataatatgatctatcccaaaaaaaaaacatatataaatacgatttacattcaccttagtcaattagccatattttacatatttagaaaatcactttatatattatttattttaactttttttttt

SEQ ID NO: 50898 - DNA, 1175 bp, Cannabis sativa
attacataattttaacttttttatgttgaaacaaaattttaaaactttgttcgataaatatagtatttttaagttgttttttttttttatcatatttatgtaaatagcctttatatctctgatggaataaaattatcaaggaaaattttatttatcgcacttaaaactttatgcaataactaataaatccctctcaaataattttttgccaaactatactttttttatgttaacatactcatcattttaccactctcataaaaatgctatctctctcctcaaccaaactaaaagaataccatccccttagccaaccgctctattgcatgttcgagattgcgaggtagccagcgttccatctccatccgactgtataagttgtgacttgacttccattcacaaacttaattttgtttcgagcaacaaatgcgatcatcattaatctcctccaggtattgtaattctcacttcttgtgagaatctttggaaccaaaacagctcctagattatcacctttagaaatgaagtaaggattggagagatcattagcattcgttgatctcgagttctcatcgagaaaagggaactaattagaatgaccatcattacgagagcttcgagtttgtactcttcctcctcgcgccatgaaagaacaaacaagtagaaagaaaggaaaacaacaaagaaggagcacactttaatggtggctctgataccatgtcagtttggaatctattagagaaaatagagagaaagatgagagaaatgaattaaaggcaaattcttattaatcttaatgaaacagtacatgagtataactacttatagtagctgaagttagttacaatattaactaactcaaactaacactaatgatagctcactcttacaactaactaattcttaactctaacttttctaaccaattataaatttgatattctcacagttctttaagaaagatctcaaaaaaataataaagttatagcaccacgtgactaaaaactaatatatatatatatatagatatatatactagattattattatgcaacgttatattattagttttatttttgttatgtgtatttttaaaattttataaattaaaagaattattaattttttaaaaaacagtatttaaagttttcaaaatttgaagaaaataaatacaa

SEQ ID NO: 50899 - DNA, 1790 bp, Cannabis sativa
aattaaacttcatgcagcacatttgtaagtactaagtatggaaaaaatattaaactattaaattttcatctactgacatttaaaattttaagcttaatttaactatttaaaaaaaaatgctaaaagtacagtggtgcttagtatctttttgtgtgttgatattgttattggtttaattaagtattgagtctcatataagatactcaataataatgctctaaaaaaatctctttttacaccatattaaaaatatgtttatatataaaatactttaagtcaaatttaactttttatctttcttttacccaaattttttttcctgggttttcttttcaacaatcctatgccatatttaattaattaaaaaaataagtgaaaatttaaatttttaaatactactcattcatgagtaatatcttatactagaagtatatgttggtcggttttgtcagattataacatatttttatgaactaatataaatatcgagttgcaaatatttaatcgtaatccgcccaattaaaaattaaaaaaagttcaactcgcccaataatttcgtcaatttggtcgagttaacctgtctaaaccgtttttcattttttttataattagtattgttagtttctagtattcaaataattagatttaaaaaaataaaaatatattatttatatttcaagctaaaaaatactacagtttaaattaattttaggaactttaatataataatataattgagtaaacataaaataattgaataaaataacaaaaaaataagtaataatatagtatagattttgaacttcaactttaatattcaaatacaataaaaattattaactataaagtttaagttttaagctaaacattaaaatgttcaaattttaaatacaaattagtttacacaaataaatataatttgtgcaatataatatatacaattcaattaaaaaatattttaatcggtttaattcggtttattcgagttaagcaatttataaattttgttgaagacctctatcatacacccatataagtctattcgtataaaagaatgttggatcattttaaactcatttcgaaaaaagcttacatttacttctctcttttatacattattttattagagattcccttagtttattaatttaattaaaatttaaataaattgtagtgatttaaatagatattaaatttaagttatttaataaaatgttttttttttgactcatacctaataagaacgggcacgcttgtttataaaatacctaatacaatttaataagtacgatctaattcaatccaatccacaaaatgcaactatttgtgcttgtgcgaattggattgaattaaaaaatttaaaattcacacttatgcagattgaatgttaattaatatgtaaaattaaccgatccaatcaaatttacacttatttatatatgttttttcaaaattatatatgcaattaatattttaagcaaaaaaaaaatagtaatttaagaatctaatacatatgatatatattttaaaacttaatagattaaatttatattctattattatatataagaaaaatataatttaaagcaaaattaattatttttttttacgtacaatttttttttttcatttgaatttgttattttatttatttcaatttattttgggaaacataaaaaagtaggaataattacataagacactattttttataaaatatttacatttttacgttcaaagaatattttttttgtttacatttttacggtttttcaaaaaataacacgaaa

SEQ ID NO: 50900 - DNA, 927 bp, Cannabis sativa
cccaacccctgtggcaataagttttgccaactcatacgacttgcacctaaagggaataccatatatttgaacccaaaaaggcacataatgcaattggtccggggtaataggaaaagaggaagcaggagcagcaaaaattgtcagactttgggcaaaatgccatggctggccatcgaggatcctacgcttatcaccttcacagccaaaggtgacaagaaaaagaacctcagagtgatcagacaccacagcagggaaacgacactgggaagtccatatctgggataaagtttttatcaaagataaatggctaaagtgcttgactgtacagagcttaaggagaagagtgatttcattaggggtttcagaggggagatcatcaagagtatagactaagttttcatcagaggtcaaggtcagaggttgaagagggttgaaattaagttcatccattatcacacacacactaaaaaccagattactaagacaggaaagcaagcagaaagtagatagacaaaaatcgatcctaattcttactttatatagaaaaaataccagctttcgaaaaacaattctcgggaagtttctgataataacctctattggggatatgctagccatcataacgattccaatctcccaagctccatcatcacaaatccacctcctggccgccatgcttagagagagcaaaggatttgcaaactgaccttggatttgatagccagatttactagagagaaaaaataaattagagggcaaataaaacgactttggagggttttgaaagggtaaaaagcatttaattgggttgaaaaatgcatctgaactgagatttggagcctaatcaccgtcagagcaataaatgctccaattaatgcaagaaaagaaaggttgacaaacagggaagagggatcgatgcccagcgcc

SEQ ID NO: 50901 - DNA, 3421 bp, Cannabis sativa
ggcaaaggagaggttatacgccttagtatttgtagtacacgaagctcgtggatactcaggaacgagtatacttcgcgacccgacgaaacactcattatcgaaaacttcctcctttgtaccgagatagtttctggagagatccagtaaaaggtgtgactaccaaaatgatatcagtcacaccactaatgagtgaaaaaaattgaaggatgaaattgaaaatttaattcgattaggtcatttatagaatggatcaaaaacaggctcccacacctgaacccaggacaaaccgaagcccaagtaccactggggggaccaacaatggtaccagaaggacagatacctcccgggggtataccccatcagtaggtgcccgaaaaacctccctgaacgaatggaagggttgccatgatctctggaggtcctcacatatgagggaccacgagaaatgagctaaagtgttgtgacatgtttggagcatgatggtgagatatgtgaagttactcagcttctagctcaacggccgagacttattgatcaatccatcaccttcacagaggaagatcctaagttggtacgcttcccgtatcatgaccccttagtcattaaaaccccaattgcaaacaagattgtggcaagaatattggtagacaacgaaagttcggtgaacttgttatttaaagaggctttcacgaccatcgggctcactgatcgagacctctcccctagtagttcacaactcacaagatttaacgggactacactcattcctatgggaaaggttagactcaatatcactctatgcctagacactccgcagagtacattcaagtattgtaccttggtggtagtagactgtcccaccgcttacaatgccattctaagtcgaccagctctggtcggctttagagcagtcacgtctatcaggcacttgtgctgtgcctcaagttttccacttagacagctgggacagaaacggtgcaaggtaatcaaggggaggcaagatagtgttataatgctacagtgcacctgtccatttttgcaatccaagggattgaggcagcatcctcgtcgggacaagccaagttggatcctctcattggctctgaatctgtactagaaccaatggaggatattgaagaggtaggaatatgtgatcaggacccaactaaggtcatccgcttaggaaagggtctcgacccggaggagtgaagcaagatcatcgataccatcaaggtatcgatagacgtgtttgcatggtgtcatggagacatgaccgacataagtcctcacatgattactcatgttctgattgtcaacctagacatgcctccagttcaataaaaacggcgtctgttagatccagtgaagtcggacgccctggagaaagaggtggacaaaatgttgtctaacatttttatccgtgatgtgtattacccggagtggttagcaaaccttgttctagtgcccaagccaaatgggacatggtggatatgtataaacttcaccaaccttaacaaaacttgtccaaaagattgctttctgctaccaagattgacctgatggtggatgccacctcaggtttcaaattattatcctttatggactcgtattcaggatacaaccagatcaagatgcatgttgcagaccaagagtgtaccagcttcagaaccgacaacgggtacactgttacctagtcatgccctttggattaaaaaatgttggagccatatatcaatgcatggtcaaccgaatgttcaaaggccttctggagcgaaacatggaggtgtatgtggatgacatgctgatcaaatctaaaacaagtatgggccatgcagaagatctcatgaaatgctttaaagtagtcaggaagtacgggatgaagcttaatcccaagaagtgtacttttggtgtcaaattagggaaatttctagggtttattgtgagccagcgcggaatataggcaaacccagaaaagatacaggccttgttaagtatgacctacctgagaagacacaaagatgtacaaagcttgagcgggaaggtagccaccctaagtcgcttcatttcctgctcaactgacagatgcatcccattcttcaacatctttaaaaaattccaaaagtttgagtggactgaagattgtgaggaggcatttaggaagttaaaagaacacatggcccaaccacttgtgttgtccaagctcgttcacggagaagacttgtatctatatcttgttgtctctgagaatgcgattagcgcagcattagtccgggaagaaggaaagacacaacactcggtgtattatgtcagtaaatgcatgataggagcagaagttcggtaccccgtgatcgaaaagttagccttctgtctctttattatttcaagaaagctgaggccatattttcaggcacaccccatcaaagtattcacaaactacccacttcggcaggtcttacagaaacgagaggcctcatgaagactcctcaagtgggcaatggagctaagccaattcgacatacgatacatacctcgtgtctcgatcaaaggttaggcgctcgcagatttcattattgagtgcaatgaaactaaagttaacgccaatgagccggatctagacatgcctacattaaaagtgtatgtcgatggtgcatcaaacgagaattgatcaagagcgggagtagcaatgatatcacctgacgggctaaggctccaggccactttaaggttcacatttttggcttccaacaatgaagctgagtatgaggccctgatagcgggattaaaattggctaaggtagtaggagccaatagagtggaggtatacagcgactcacaactagttgtcaatcaagtgttgggagaataccaaacgcgtggagaaaaaatgatcgcttacgtctcaactgtcagggaattgttacaagaattcaggaattacaagattgaacggatgctcgggaaagaaatgcccatgtaaattgtctagctaagctagcatcagacagtgaggtagaaaagctggggctggtgccagttgagtatctcacggagcctagaattaggccaaaagcggaagtagcaacaaatgagcaaatgccatgttggatggaccctatcatcaagtacataacaacgggagaattgccccaagagagagctatgtccagaaaggtatagtactaggctcaccgatacttgatgatcgatggtatcctttatcggagggggatcaacatgccatatttaaggtgtgtgtcggatcctgaagctagacggattgtacaagaagtccatgaaggattttgcagagatcacaccgggggcctgagtctctccaagaaaatattaagacaaggttatttttggcctaccatgaagaaagactgtatagactatgtcaagtgcgatccatgccaaaaat

SEQ ID NO: 50902 - DNA, 2291 bp, Cannabis sativa
aaataattaaaaacttactaaattaattaaaaacttaagaactaaaccaatttttagttaaaaaaatgtgaaaaataactctaatttctagagttatcacctttctgctattattatcaatcataaaaccctccacaaccaattcaagggtatctccgtctgtcattttgctccctgtattacacatatgctttttgcagatgacaacttgtttttttgcttaggttaaagctcacaattgttatgctattaaagacatccttctcctctacaacaaggccactggccaaacggttaacttaactaaatcctccatcctcttctcccctaacactagcccttctgatagatcttttttcctcaattctctgattatggaggataaaccgtttattgataaatatatgagtgttcgccaatgcctttcccgttttaaaaaattatctttccttttccttttccttcttcaaaaagctagcaataaattgtctgtctggaaccaaaactttttctaaggctggcaaagagatatttcttaaatcagtgatccaagctatcccctcttatactatgtcttgttacaggctccctatctcaatctgcaagcatttcagcagcctcatgactaacttctggtggggttccttgggtaataggcataaggtacactggaaaaattgagatctgctctgcaaatctaaattctacgagggtcttggatttcgtcatattgttcaccataatcaagccatgttggccaagcaagcttggcgtatcttaactaaccctgattcccttgttgcttctttttcaaagccaaatatttcaagcacaacgattttctctgagcttctattggtcataatccttctttttgttggagaagtctcctttggggtagaaatcttctttctaaagggcttgtttggaaaattagagatggtaagtcggttgaaattgctagtttgaattggatgcctgattcgaggaatatctcttttcacagtgattcatatccacgagaaaataccgtttcttattttgtaagggaggatagacaatgggacattaataaactaacctatttctttgatgataatactgttagttccattctcaaagtccccataaatcatttcaataaaggattgtctcatttggaggcatgacccttcaggcagtctcaccgtcaactccgcctaccaccttgcaatctctaataatcccaacctttgtacttctaatgccgatgctcttaaaccttggtggaagtcagtttggtcttctaatattctctcaaaaattaaacacttcatttggaaagcctttcatcatatacttccctcgaagcttaacattttccctaggaaaattctagataacccatattgtaccatatgtttaaaccagattgaatctaacgctcactcctttttgcattgttctaaggcaagtaagttgtggaaacagtctagattctcttcttttttctacaataataaatattgtgatattaaagaatttctgttaagaggttttgatgaattcagcaaagatgacttagttgtattttttggtatcttatgggctatttagaacaagcgcaataattatctttttgcagataacaagttcattggtttatatgtgaaaccttctatcattaattacctgctggaatacaagaatccacaaacaaagatcactaccccttctaccaacaatcagcacgattggtcacctttgctgtcttctccaagaatgtttaaacttagcattgatgcaacagacatggctatggtaccatatccaagactttcaaagcagaattatcgcatgcttctcttccccagcctattcaggtttccctcccatttttgctgaagtagaggcccttcatcgtgctttaagttggtgttaagcagtttgttttcccattcaactcattatttcaaattgccataatttgatctcaagaattcaaaggaagcttaccgaccgctcaaccctttctcgctacatcatgaatattatctcctctttgtcctatttttcaggcgcttcattcagatttgcccccaaatcggaaaacacccaggcccataacctcgctcaggcgaccttaggaactggcgaagaatttgtttggaataattgccattccaatctttctagatatgtgtaacctagtttctctagtctctttctttggttataggtcttgtttatttttttttttaaaaaaagccacataaaatatgactttccgctaaaataaataaataaataaa

SEQ ID NO: 50903 - DNA, 1134 bp, Cannabis sativa
aataaagcttgattaaagacttccaaattctgaaagcccatccctcctctgttttaaggtcgacataatttttcctaagaaccccaatgaattttctttgtagaatcagaagctccccacttgaaagacgttttcaaggcatgaatctcctttatggttcctttgggaaggcgaaagtagctcataatctcataatgtaacaatgaagagcttgaaccactgatttaattagatcatcctgacccgcttaagagaatagactggctttccaagattggagtttattcgacacctttctacgaatagtattgaacacttctttcttatgttgaaccacaaaagtcggcatgccgagatacttggggtgacatggaaccagtttaactctaagggtagcaagagtagtgcccatctcctcagtgattcgtttccccatacatatttctaacttgtcaaggttaataagttgccttaaaacattcttatactcggccagaatctgaagaagagtgccccttcttccaaagtcgcattcaggaaaacaaggttgtcatcagcgaagaagagatgagaaagcttaagaccatttctcccaaactaaatgtcgtgtatagaattggatctctcaccttcatgaatcaagcaagagaaagcctcaaaacaattaagaaaaagatagggcgacaaaggatcaccttggcaaagaccccaatgaggaataaacagccgacatacctacccgttgagaagaattgagaaagaaacagattgaatgcagtttaggatcttctctatccatctaaaatcataacccaaacactccatcatagcaataaggaagccccatttgacccggttaaataccttagaaatatctaatttgagagccattttcttcccattacagaattactctttttttagacagtggagactttcaaaactcgaaatggcattttcttggatgagacgacctttgataaaagcactttggttatcagaaataactttagacatactctgcttcattcgattagccagacacttcgaaataactttataacttacattgcagaggctgatagggtgaaactcagtgaccgtagttggtcgtgttggaatttattttaccag

SEQ ID NO: 50904 - DNA, 554 bp, Cannabis sativa
gccaaatgttaaacgagtttattttgattatttctaaagtttttaaaattttagattacacatgtacattattctttttattagttcttgtatggtgttcttgaattggtctctaaccaaaatctttgtattattttattgaaagtgagggtgcattaaacgagtttaattagttcatcaattagagtatttaagctatattttacatttatattatatagaaacaaatgtttcaacttttgccatatgaaagaatgtagagtgataccttattgttgatattgaaaattccaacgacaatgtttgtaggaagatgatgatggtgttctcaccaataaaaaaaaatgcaataaagctcttaattctatatggttcaaaagtagagatgaaaatttaacccgctaaaagttgtttgacatttgaaaaagaaaaagtgaaaaaaaggagaaagaatagaacagagaataacgaagaagaaagattcatcttatattgattgagctatacacaagaggcaagagaactatttgatgcttttagtaacaaaatcacag

SEQ ID NO: 50905 - DNA, 836 bp, Cannabis sativa
gttaagtgaatttacttccacatgtcatgagattccggttccaatggcttagatcttagagtttcgagttgtttattaaattgcttacttctagattccctcaagtcttggttccaatggcctaagccttggggttttggtgaatttaatctcaacctgctcattttttaaaaaaaaaacagaatgtgtaaaagtaacttactcctagattcctaaggtcccagttctaaaagcttaagacctatcagactctcgttagcattttctacaattagtaaattaccacttttttattatttttgaaaccagagtttcttttgccttgttgaactgagctaactgatggatcattaatctaagtgtagtaagaagtaacttactcccggatctctgaagttccagtttcaaaggcctgaattttatgggcttcagttagtacttctattcccaaatcgaataacggataaccatacaatagaatttttttttgtaaaatcaatctactttcgatttcctaaaatttccgttccaaaggcccgaaccaattgaatttcaattgtctgtttttcttaaaaagatttcatttctcgaattctaagaagccagatccctgtggtgcaagttctgtggtgcagtctgctttagcttattttgatcaatggaaaagtgcgaaatctcaatcttttgagagtgacatgcctgctggtgtggtcagttatcagcgctgggttcctcctcctttaaatacgatctaagtcaatgtagatgcttcagtttttgcttctgaaaaccggtttgggtttgggtggctcgccagagatcacgagggccgagtc

SEQ ID NO: 50906 - DNA, 1051 bp, Cannabis sativa
gtgatttatggaaattaggagatcgagttgagaatgaagttttcgttccattcttattgagttattacgatttgccttctcttgaaaaacgttgcttattatattgttcaatttttccgaaagattataacatcgatagagatgagttgatacagttatggatgtcacaaggttacttaactagttcagaagaagacgagagaaaaggcataaattgtttcgagaatttagttgcacactctttttttcaagatttcgaaagagacgaacacgaaaatgtcataaaatgtaagatgcatgatatagtgcatgattttgtgttgtttctaaccaagaatgattgttttaactcacacataagttcaaaaaatgatgaattgaagctactaagctcaaaagcttttcactatacattgttacttgagtgtaatgtgcctagatcggaatactacaaattaaacataaatctatgtccaattctacatttagagtatttgtcatgtacattctcaccttggtctatagtaccaccctcaatttacaacaaaagaaaattacttacattgtcaataattggtaatcctggttcaataaaatgggatttattgtttaaattaacatgtcttaggactttgaacttgagtggttgcttacctcctaactcaaaaataccaaaaggtattgataagttaatccttttgaggtatcttaatttatcaaataatggatggcttgttcttccaaaaacattgggaaatttgttcaatttgcaaactctaaatttggagaagagtagaggttggcttccaaaagaaattggaaaacttgtcaatctaagacatttgtatttgggtgatttttgttgtaaattttcaaaagaattaggaaaattaactggtctaaagactctagaatcatacaattttttatatgtagttgttgaaaaaagggggaaaatgttatttcaaaattggatgatgtcattaaataatttgaaaagtcttgtacttgtaaggtgcaactattgtgtttccttaggaccttttggaaa

SEQ ID NO: 50907 - DNA, 938 bp, Cannabis sativa
taagtctcgaacgttcatacaaaaagtacgattgatcataacatcaatatatgctcagtactctagtcgtactgatgtgatagtactgttaatcctacttgtatattattgataggcaaccgtaaacatgtatacatgtatattattatactaattttatcttgatttcgaatttaaatgtgttggtcaacctgagtggaaactgctaatcgatgatttaaaggccctaagtcacaatttatgtaaaactggtaagtaacttgctagctcacttttggggacttaaaattaaaaataaaaatttccctgtcgataaatagtgtggcaatactctaaatatcgataaaatataaaaacaagggctcccaaaactgctcaaaccggtgaaccgaattcccaaaatagcgaaccgttttctgggattctgcttggagaaataattcaccatttttgaaaaatatatagaaccgttttttctacaggaaatacaaagctactcccaagctcaattctaccccaaatcgaaccaaaacctccaaaaacacttataaacatcataaataatatattccaatcagaaataatattagaatcgagtttttccattgatggactaaaatttgaactcataataaactcaaacttagctaaccaacacgaaagtccttaagtacactaactaaaccaacttcaaacaactcaaaattaactttaaaaaaacaatccctaaacaccctaagctcatacaaaacacaattcataaaattacaagcttaaccaaacttttaaaatgaaatgtcaaagagaaaatagtctagggtttaccttaggggtaaaactctactagctacaatgaattcttgctgaaaaaaaaaacttgattttggtctgaaaaggatgagaaattcgctagtttagcctttggtttctttggctga

SEQ ID NO: 50908 - DNA, 1377 bp, Cannabis sativa
gctcacttgggttggcatactttctcccaagcaatagcacctgctcctgtcatattgctactgcctctccatagaaaacttctgcaaattctttctatttcagtcactactttctttggtagtaccaaaatctgactccaatatgtaagaatggttagcagtacaaagttgatgagaattgatctgcctaaaaaagaaatatgtctagtgctctaggtcttaattcgagctgtcattttgtcaactaaaatcttacattatgcttgtgagattctttttgcacaaattggtatgcctagatactgcaaagctctcctttttttgaaggaagcaagaattaatctatacataaagtatttacaattgttcaaaccaagttctatcttcttgttcaactttccttggcattatacaggtagtcctagtcttaatatgccacttaagctcctgtatagaaagtttcaacgaatcaaagcttgttttccaaatcttgatgttcctttgttgccaaatatgatacaccagaccagctatggcagcagcgtataccattttcctgaatttacttcttttcgatctatcaatccacctattgaggatatgcaaatatgttgcttgcacattccaattcaggcaatctttaacctgttgtaaccaacttctagataccatacaatcaaaaaaaaaatataagaaacagtttcatcttaattactgcagaaaaagcaagtggcaacctcaataatcttgaatttgtgcagcctagctcttgtttttaatctgtcatgtactgccatccatagtatgaagctgtgtttagggctattaagtctagaccatacctgcttgctccattgaactctatcctgagttttatggatcaatttatatcatgctgctatctggtatagccctacagtaaattggctatgatccataattttcatcacttcatcttttatttccacaagcttcctccaataccagctgctatggatggaggccttgtggttccagcagtctcccttttttaagtagacattatgaatccacttaacccacgggttatcattctttgtggctaatgtccatatgtttttaatcaatgctgctctgttccaggtaccaatgttcaaaaatccaatacctcctgctcacttgggttggcatactttcccccaagcaatagcacctgctcctatcatattgctactgcatctccacagaaaacttttgcaaattctttctatttcagtcactactttctttggtagtaccaaaatctgattccaatatgtaagaatggttagcagtacagagttgatgagaattgatctgcctgcaaaagaaatgtgtctagtgctctaggtcttaatt

SEQ ID NO: 50909 - DNA, 2877 bp, Cannabis sativa
aaattataaaaatacactttgctcaacaaaaaataaaaaagaaaaaacaactaaaaaataacaaaaaatcaacctcacgatactataaaatcaactataaatgtaatataaaacaacaaaaaataaccagaaaaacaacctcatgactactataatataactataaaataaccaaaaaagcaattcattatgtttactcaagaggaatttatgtacataaaaaagttctaagagtcaaaataaaattttttcaatattgttgtatttttataaattttttcaaatttttagtttactatataaatttttctttaaataataaacaaataactaaaacatattcaatctattttaataaggctaattatgatttttagttcctgatctttgatatgtactaaatcatgtccttgaacttttcggtcgttaaaaaattttcttgaactattgacattgttggatttaaagacttttgtctaatttcattcaattttgctaatatggcgattgtccatatactaaatcgtgcccccgaactttaatatttataaaatcacgccccttaaactttaatatgtaccgaattatgcccctaaattttcatccacatcagattttctttaataaaattaaacaaaaaaagttcaagaaacataatttagtacatataaaagttcagagacaaaaattcaaattaaaaaaaacctaaatcttctataataaaattagacaaaagtccttcaagtaaaaaagtacgtacacctaaaaagtttacgtcaaattttctttagtaaaattagacaaaaaaaaaaatttaactaaaaaaattgaaaagatttaatttggtacacatcaaaaaagtttttagataaaaattcaaacaagcctaaaaataatattgggtgattctataatgcacctcttaaaagggatgtattgatgcacccttagcttgttttggcatccagaaaaaatttttagtctaattttttttcggaataatttacaatatagaaaacaatgttcaaacagtctatattacacgcgtataaaataaaatagtcacgcgtgcaacacggcgtgttaaacttttttaaatttcttaaaattttgcaggatgtcttaacaatgagaaaaaatttggctaaaaaattatttcggatgctaaaacagataaaggtgcatcaatatatccattttaaaggggtgtattgtagaattttccaataatattaaataaacaaaaaaaaacctaaatcttcatcttcttctctcccgagtctcctccactctctcccactctttctaatcgctacttttctctgcaaaacccggtgccatctccggccaaccggttcgtcttccaacgatccgaacccagccccaactgcccaacgatcccagccccatttccgacgacaacaaccccgacccttccttggggatcagccccaagatcctcaacctcgagaccctcaattctcatttccctctctctctctctctgtcagtcactcccagccgcggcaactccggagttccaagggtcttcaatcgcgatttaagactatttcgaactcatacgtatgtagaacaaaatccgtgagttctattttttctaaccattacttgttttactaatatttatatgctattattagggtttgaattaatttttcagttgcattagtttaatagacttgagagaaatagttcgtatgaagaaagaagttgatttaagctcagaatttatcgaacaatagttttactttttccatttctcagattatatatcaaaatattgtgtttacaattttgaatgtattttagggttatatggtaatgcttttcttgaaatgaagtaactattcgtgtgtttttaatggggctgatacaaattactgagtatcaattgatagaaattaacttgggttttcttgtttgtttctgaagatatccattactatcattactacttagttcatttcaggtaatttttgtatgcttaagtatcctattatattaggacattatgaggtatcaaaacttgatttatagtgttgtatgcttgtatagtgctgtatattttgttctaaaatatagctgttgtttttgttcatagtagtgaaaatggttgctgttgactagaataagtattatattaggcttttccattagttgtttttttttaaactaattattagtttgaacaagttttgatatcttttgggttttatgttttgcagatttttctttctattgtactttgctagggttgtggctctcaatgcttgtaggggtgtagtttgttgtcttgtcaaagttttcaatgaaaccaaagtgtgctttaaagttcttaagagatgcttctatttttatttctgtttgattataattttaatataactggtcctttctaagcttatgaagtaatgtttctccaatttaaaatatttgtgtttttctttttaatttttatattaaaaaaaacattattattggcaatcctaaaaaagtagggagaaaatctattatattcattttttctttaatttattcattctcaatgctcaatctcagaaaccctagcaatggagaaagagaagacaacgaacaagcgcacccgggaggagcgtgaccatcggaagcatcgcacccgtgatgctgatgaaaaaaggtcttctagagaccttgatcatgaccatcaccaccgccaccaccgctcggaccgcgaccacaaatcccgtcgagagtcgagacacgaagaccgcgagggttcgcgagaaagagaagggagtcgagataggccctacgatcgcgaatcgaagcgtgagaggtcgtatgagccgaggagtgatgaaaaggctaatcatcatc

SEQ ID NO: 50910 - DNA, 1609 bp, Cannabis sativa
cccccatttgttgccttgattgtcagggagtgacgcatctggtttgtgccactcggttttgaatcttcacctttcgagtcaaaaatggctccactctgcttccataacagttttttcaaaccatctatttgttcttttaatatcttggtatcactgttcagaagctcacacccacaaattctatcgttaatgtgattttagatatcattccctcgatgtctcaccttttttcctttagctttttctcttttggcaccgaggcacctctagaggtcaataatagaccaaatgtcttctagagaaatctcttatatcctatcatcttggttaatggaatcactaggcagtttttccttcccttagcactaagcctttgcacccaagtgtcaagcctatcattatgcaacactttgccttgtagagcataagggcgtccaagatcagaggcaccggtggcctccttttttctgcaagggttggttggttgtgtttacgttgtttttaggaggtaatgggacaattgtatattggggctcgcctacttttgccttccccttgtcctttacaggagttgaggttccattgttagtagggcttgtccttttctccctgttaacaggctcttctagagcattttcctcagagtcttcctctatatcgccaagtttggcctgcatccatgccatcattttctctattcgacaagaaaattcttcttgctgtgccaactttctttgggcctaagctagctcactggatactcaggccacctccaggtcttgcttataataatatccatatttgtaatatccatctctgatttcaccatcgtctttctccacctctcctcatttgggttttcctccacagactgttcctgatgttgggttgtttcaattgttttatcgccagcttcggacgcttctccgtcctttatagtactcaactaggcatgcactggagggagcggatcagtgccatccatgacgatgtcctgacctagactagacttctcgatgatggttattctggtagccaccatttttgcagatgcaaggtagcttcaaatctttcttcaactctcaatgatagcatcaaaatatttatcgagttaaaatcgattaaataagagcttaagaaattaaataagtaaatatagtatgaatggagatttttacgtaattcaagtgttaattaatcctagtccacgagtcaatgtatttggccgaaaggctttgatgtattacaatgaggtcttacaaattgaagaaccatagcttcttactatagtctcctccctcttaggtttttctaatctagctagaaaaaaaattctagagataagatgaatcgtttgtctcccatgcatgaaggtataaagaggtatttataggttaggatccatatttgagaatacccgtgactagttagtgtttggttcaaactgggccactattagagtaaatacataacttttagacccactgacagtattctagctcatggggcaaaagtaattttttacatttgatctcatttttaaattaaaagaaaaaaaacaccaagtgtacttggtcatgaatgctcatttttattatcttaagaatca

SEQ ID NO: 50911 - DNA, 1280 bp, Cannabis sativa
aattatcgaaatcaagcaacagcttcttttcaacccaacacgtggacattagtagatactgggcccattaacattgatgacgtggcttgaatcggtgacttttgggagcatattattaatatctacgaacgttatagcaaataattcttggaagaatcttaagcaaaggaatatgttaaaagataaagctcacgtttggtcaattgataacaaattataattgtaatgagtgacttcaactcagatgactaataaacgggtgaaaagaaagagagagtaatttcagaacacactcaaacatattttaattaattattacaatttacaagtaaagaaagaagatgcattttggctgacaaggattcgatatttatataaacataaattatttgatgaaacaatataaattataatattggatccaatatgataccaccaattattgaggtgcatattcctacattatattgttgaaaagtaaactccgtgcatatgaatagttgtatttttgtttttaatattgacttatatggtatatatggggtagtagttttgtttgtcatcacaactatatacgtactacgtacttggtctattgcgtgtggatttttaaattgggggtaaaaaaaaattaattagtaaacattataaacaaataatggggggagtcataaccaagctatttaattaatataatattaatattacacataataagaaaaaatagcttggttaagaaattattgccaaataagattagctagacggatcagcttatgtataggattaattagctgagctgcttactaatagaaatggagaatctattattattaatattaatattgttattattattattattattatgttaaaataattaaataaactcaagatataagtttgtatataatgtagaacatacaaataataataattaaatatgcgtactaaattaatatctagtaattatttgaatttaatagtgtaatactattaattaaatctttctctttagatctctaaattaaaaacaatttaatttatctgattatcaaaagtgtacagttgtgatgaaatgataatatgtatttataaagttaaattggaatgctcatcactagaaactctcgtacttttgttttaattagactttatatatatagatactaagctaattaactatgactaacacaacaaaaaattatatatccaattaactcatattttattaaaatcaataaaaattagtgtataatcacaaataaaaatctaacatt

SEQ ID NO: 50912 - DNA, 1004 bp, Cannabis sativa
tttgaataataaattaataatagtcaacatgagtttgacctatatttactgttgtactgaagtaaatggtaatattgaaataaaaaaaataataaatttattatggtaaacaacatgcatcaaattttttagcatcgttatgggggactattttattcattttttttttcctttttactaattttttcttctagttattgtttcaaatttaaggtcttgtgctaaaaacatggcaatgtaatatcaacaatatattgatccatattataagtgtatcaatatgatctcttctatgatagttacacttcacgatggggggatcattctaatacattatatggtgaaaataatcaatatattgagccaaattactacgatcctctttcacaaccacataatcaaggttcatctattgaatatttgatagaggctatggctagtaacaccattcagttttagaagaaaggtcacaaatatactcaaaattatgtgcctcattatctacaacctagtcatgttgcactatatagtgaaaaaccaactactggtgagctgattcaaattataccagccaataactttgcatattcaacaaaatatcttacagtttcagtaaagcttccatgaaacaatacagagcacccaaaaatttctacaaaagatggagaatcttcctgagcatataaaaacatctatgagtggattcatcactatcgaaactagcacacaacttgaatcacccccacacaaagaagtttatgatttaattccaagtcatggtgtcaacgatttatatctcttgaaggatcatctccacaagaggttcaatctactttagttggtctaccatcactcaaaaagatatagaaaccaattgtataaacttaattcactctaacgattttttcaagtagattgaaaagtattcatgaaagaggagcctatcaagtagatccctaaaactctttctaaaattgaaataaaaattgcatgtctcaatgtta

SEQ ID NO: 50913 - DNA, 1090 bp, Cannabis sativa
  modified_base (30)..(31): a, c, t, g, unknown or other
tttacaacttaattatttaatctaaatatnntattatataaaataatataacatcgacacgacacacaaacacgaacatgatacgaattttatgggttagagtcgagaaaattagatgcgagtcgaaaacgggtcgacacgacttgacacgaaataaaaacggatcaaatacgatacgactcccttaacatgaattttttaaataaaataaaataaaatattattaataataatataattatgtaaaaatatatatttagtgattcaatgtttagttataaaatttaaaatttaattttctttaaaacaaattgaaactattttaaaaaatttaatttttattattgttgactcagaaattcggactagacttctaagttacacctgctcgctagattggatagaatgaaacagttgttaagtaattataagagagacataataaatttaaagtacttcactccttatatcgtgacagtaatgaaactacatctactttgagttttatttctcacaagatggtattacaaaaataggctaagtgtcagaagctccaatttctaaagagaaaaactaaagaaagaaactctgaccttgtggatagttttttgaatgtaaaaaatgagctaagggagctctcatttcataggtaaaggagacccacaaaagtaggagaaaaatataaattatatatattttttactgtatatgatgaaccaacagtaaaaattagcttctaatggtgatagtcatttttcgaaacccagaacttatttttgaactcccttgagggtaaaatttgagtttgataactttagaattacaattgatatgtgagacataacttgatagagcattgaaatagcttcaaaatgctagttgaatcgcatcaataggtttaatattgagtgagttatgactgttttactaaagacatttcatgacccagtgcccaggttgacatccaacgcccaggttgacattctagcgcgtaggttgacatatgacatatgctgggtaagtgtaaaaccatccaaggggtgtgcttttaaaatgcttaagtgctattttgatatcacttagtctattt

SEQ ID NO: 50914 - DNA, 615 bp, Cannabis sativa
aaaaaaaaaaacaaaaaagaattattaaagggagtagtgtgagttgcattagagatgattgtccagttcgtattggttgatagagtaagctgtaaagtagatttgaaaaacgagtttgctattggttgtgacttctgatcatagataaggtacggacacgactaggatagacttatctctctaattgtggtgacgtggcaaatactccctccaataatataaaaaatagttaccctcaatcttttcttaaattagtatttattatagtcgcaacattatcaagtataaatttaaaaaaaaattaaataatttataatgtcgaaaatatacttaaaggtttttaattatatattagaatatcaagtattctatttttgatattataaactatttaaattttttaaaaatttacaaaaataatattgtaactatataatgtatgatgctataaaaagttaaaaaaaaaaaaaattttgacatataattttagatgtaaaaattaattaaaatattataataaaaagttataattaacatttctccttaatataaagccaagaagagtaagtaagctagagcactccaattctattttcctttagttatatatatata

SEQ ID NO: 50915 - DNA, 1266 bp, Cannabis sativa
tatattaataagtaaatctaattatattaaaatgaattttatttagggcataaaacccaacatattcacctctctttaatttcaaggtttatttgaggtttttatggtgttttcttgttttaggttctgttgagttttgttgttgttttaaatgagttttggggtttaatttaggtttgtttgaactggtgttgagcagattgtttgtagttggcaagatttgagctaggtttgagttttgagctcaaacttagctcaacaattgtagtttttgattcaaggctttatagttggtattttttgatgaaataggtttattttagcattaattgaagttatagacagtttgtgatagattggttgtggtttactgaagtttggaaatttgggtaggttttgctgtgaaaacagcctaccatttttctaggcaaaaaaaaaaaaaaaaaaaaaatagactgccattttcacagaaatggcctaccaattttttgggtacttttctcaaaatcccttttttcagccattttctcgatatgtaggatttagtcatgttatttatagatagagaaacttttagtttcaagtttaagtccccaaaagtgatttagtggatcacttacaagttttacgtaaattgtgacttagggccataaattgtcgagtagcagttttcactcagagttaccagcacacttgcattcagaattaaggtaagattagtagaatgatttgcatatatgtatacatgtttagtgtgcatgttagttgctattagaataacatattagggtattagagaggtgtacatagagttgcactgaggtaccaataaatatatgttaggcaaatcagtggccatcagattagcatatcagggtattggtgaagtgtacatagagttacacggagatgcaaaaatatatatgctaggcctccagatagtatgaattaattgctaccacatcagtatgactaaagtactgagtataggctagattcgcggttagttatactttatcgagaacgttcctgacccagttatcagatcgtaagtaggtgtatggacacctaattacgatatggatatatgtttatttttatgattatacttttcttactgagtctgttgactcacagttattacgtgtatgtgtaggtaagagttagaatcgaatcgggatgagtcaaaagctaagggtgaagattgaacatatcaagacagttagtgttggaatttattttgccaggatcttagatctactcaca

SEQ ID NO: 50916 - DNA, 1391 bp, Cannabis sativa
  modified_base (98)..(104): a, c, t, g, unknown or other
agacaactttcctttcaagtttaaatacacaaaataggaaaccatttaaacacataccagccaaaattaataggaaataataaaatatttttgtcaannnnnnntgccaaaaatggaattaacagacaactttaaggatgaggagaaatagaaaaagggggctagtttgaggggaatgtcgatgatgatgaagatgaagattaaaaattggtttttttttaaaaaaaataaaattaattttgattggttgttaactttttttaattgggtgtcagattttatttttcaagaaggaaattttatgaacttacaaacaaatatattttacacaatcttgatttttaaaagtcatatagattaatggtttaaaaagtgtatgtatagtataggaacaaaaacataatcagtaccatagaattattcaatatatttattgtaggtgaatgatatatattttttaaaaagtagtatatatatatatttcaattaaataacattaatatttataaaattttaataaataaaaaaaattataaacgtggtgaattttttttgtataagaatgtgtgtaatatttttttttatatatatatatatatataaattgatggttgtagcatattttttttaattaatcaactaatatttataaatctaataaaaattaaaaaaaaaaaataagagaattaagaagagaacaaataatattaatcaaaaaaaaaaaaaattaaagtgtcatgtcaccgccttatatctctcctttatatttacgtagatagatactaacaatttgtacacttgtgtacacgtgataaattttgattggtccacataatttaattattttaaatattataaaattaattaaattttaaaactaatttatttttttaaaaaataatttaaaaaaaaaatcttttttttctttcctttttcttttttctatcaaagataaaaaacaatgatcttggaaaaaaaggaagaagaaagaaaatgatgactgaaaaatactgctcagctaaaatgcatgagcgagctaaacttatatttataacagagtttttacaactgaataagaaactctttgtgagttgtcaaagtctagtttgtcacaatcattacaagtagtttgttcaatgcctaactgattttctaacaaacttcctaattgtcttgaatcactttgctcggtatttctaatagccaccctcaagtgacacgagtgaacaccaagtgtcaacttgtccctcaaaaaagtgaaggaggatataagtaaaggtttagtaaagatgtctacaacttggtattctatctcgaaatagcgcacctcaagttgattagctaacactcgatctcgaacaaaatgaagatcgattttgatatgttttgtg

SEQ ID NO: 50917 - DNA, 1586 bp, Cannabis sativa
caaaatcagatctaaaaaatgctcaaacccaaaatcgattagcaaacgaaaatacaattttttaaaaaaaaaataaacatcgttggggctccccactatcaataatgaaccaacaaaagaaatagaaaaattcaaaatttaaaaaggagagatccctagagagtgatagagagagatagaactatacctttggtacagcgtgagttcgacaatggcaaagcgaggcaagagagagattccaagagagctcatggtcgaggctcacggggcttaggaggctaacggtcatagcacacaagggcgggtcatcgaggctaggcatccatcgcagttgggtggttgttaggggctacggtggaaaagagatttgagaaagagaaggaaaaagagaaagattttttctttaaaaaaaatgaagaagatgcggctgtaataaaagaaggagaaatataataagatatatttaagtgtagggttttgttttagggtttgtaaaatgggctttgacccatttacatttctgactagtaaatgggtttgcgaggctttaaaaccgacgcaaaaggtcacaaaataggtttgcgaggctttaaaactgacacaaattctatataatttttttttaaatttctgtcttttctcgtcgattttgtaattagcgagggaaagagaaccgatgcaaatcattacttatttgtgtcgtttttaaaacgtcaaattatttaatctggcactattcacgttggtcaacgcaataaacagtcatgttgaccgacgtgaatagtgaattttgtagtagtgcaatagcatttctctccccctcaacgagagaatttttaaaaattataaaatctaataatattaatacacttgtaaggatatatcacaattaattaatatttattttaaactcatatatactatatgacattcaactttacgttcaataaataacttatttcatttctaagaatgagtcatatgtgtataattagaaatccataaatttataaaaattatgttcatctatgatcatatgatcttatcacatcgataagaagttatgcaataaaaatctaacaatggccaagattgctaaagaaatataattcaaatatttttatcaaaataatttaatatatattctagaaatataaataagtttgattttttctttaaaaaaattttagtctgttaaaattatttattgattttcaataattttggtttgattttttaagaaatgtatttatatataaaataaagtttgaaaatatttttttaagaaataatttagagtttctaataatttttataatttttgtcagaattaattgaactttgtaatttttaaaattattttcttaataaaagaaacagaatctaataaaagtgacataattatataactgttatattttaaaaaaaaaaattaagaagtcgtatattttagaaggcaggatccaacagcacatgtggaaaattcatggccaaaaataatcccttgaatagggaacataaatatatatttaaaatatattaccattataaaaagagaacttgatataaagcatcatgatgatgtt

SEQ ID NO: 50918 - DNA, 955 bp, Cannabis sativa
ttaaatttgttgttgatttatgaaccaggtggccgagttgttggggcaaaccagaaagagagtttgggaagtggagatctcagggctgcaactttgtcattgagtatgaagatagtgatggtggtggatctttttgtgggtttgttcataacttccatttaagtggatgaagagaaaggtttttggttggtgttgctttacaagaggactttgtgaagcgatctcagtaagagaacatccacattttattctttaaagtcttgaattgcagcatttctataggttcaagaaaagagagtttactagttattgggaactgggtgtttgataaaactagaggagaatagagtgttgtgggcaatcccgttgggatttcctatgaagggacagagagtcagaaagagttgtggaacaaatcgattgtttattaaggaatgagaattagaacaaacaatcgtttggggagaggagaattcggattggtacttatacaatcagagttttaatgaaaagactatagtaccccttaagcaatttttttcacttttttaaatagaaacggggaggaagggtacgtctgttcagtggttgccctctagctttgtcaagagagctccaacctaataaaaaaaaaaagggaaaatgatagtaaatgaccttaaattataaaattatgttaattttaaaatttgtaggagaatatttattttttttagattatttattatttatattgtcttttgtttgtcacataaaaaaattaataatttttttttatatatattttttttttttagaattagaagcaaattacttaaagattatgatatatgtatattttttttttacaatgatgatatatgtatattagttttgttaaaatcttttttatttgaaagttatgttgattttttttttttaatttttatgaattattattggttgttggtatata

SEQ ID NO: 50919 - DNA, 1296 bp, Cannabis sativa
aatagtaaaacatcatctattattaaaagtgttacacattactaatggtcaatattaatgttgtaggcaacactacatattaatggtgccgccaaaatccaaatgtcctcaaatgatttatgaatagtaaagcttaaacacattggaaactatgcatattaaaaaggctgtccaactcgatctctcttccttttgtctcttcggatattgtgtcaagtttcggccttggatcttctgtatatttttacctctctatacatacatatatgcattatatatatacactgtacacacacacacgatatacaacaattgagtatagaaagcttgaagaaagagagacatgggggtgcctgcgtttaatcgttggttagtgagcaagtatccaaaagtggtggcaaatgccgtagaagcaaaatgggagaacaactacttagatacaagctcaacaaacccaaatgggattgagttcgataacctttatcttgacttgaacaacattattcacccctgttttcatcctgaagatgatgatgatgatgaacaagtatatatattatatattacgtacccacattttattgtcctgaaatttacatagacataaccctgtaatatttactttttttcttatttaatgttactgtagtttccacctccaaaaacgtttgaagaagtgttcgagaacatgttcaagtacattgatcgcatcttcaacatcattagacctcggaagcttttatacatggccataggttagtgaaatatacatttacgtatttttgaagtacaaatttatacttttatatatatatatatttatgtttttgttgtgtagatggagtggctccaagagctaagatgaatcagcaacgaactaggcgttttcgtaatgccaatgacataaaaattgctgtgagtttttcactcgattgttttttatatgaattattcttgcttcatttttcacttttttttttaaataaacattgtaggaagaagaagaacttagagtcaagagacaatttgaaatggatggaaaagaagtacttccaaaacaggaaactgaattatctgatcccaacataatcacacctggaacaaagttcatgcaagacatgtcaaatgcacttaaaaactatatcaagttacgtttaagtaatgatttggggtggagggacattaaggtatatatatatgactatgatcccatgttaatatttaatatagtcctaagttgaaaaagaacagtaatgataaacttgaactgttatttttcattaggtgattctttct

SEQ ID NO: 50920 - DNA, 1334 bp, Cannabis sativa
taattaattacaatttttgtgactatatactacttttcatttgatggattatatatatttttctaattttaattaaacacaaaatttgcactaaaatatgacattattttgttttgtaaaacaaaaaagtaatattttttgtacttttaattttcattattatttgatttgaattaactattttgttttttcacattattaacctgtctaaatacattagttacttctcttatcgtgaattaatttgagataaaacctcatacattttactgtacacttctaaattctaacaactcataacaacgaaaccctaattgctcactagctagctatatatagacataacaatataagatttgaagtaaaaggttataggtattataatatggagagggcaaagggtaatgaggatgctgagaagaaaccaaatgatgatcaattggcaacaaaaccgatcgacgaaactgtaacaaacgatggcggcggtgcagccaaatcatcagttgaatccgcctaaaaaaccacaccaacaaaaacttctgaagaaataccaacggcgataaacgcagccaaatcatctgttgaatccaagggaaaaaccacaccaccaacaacaaaaacactcgaaaaaatatcattggagagaaacaaaggcaaatcatcaattcaatccccaaaaaccacaacttcaaccgacactactactgcttctgaagttgttaattcggggagaaatggggctagttcattacaaataaccacaccaaaagtgtcatcaacaaatgttaatgatcctcaagtagtgaagaatattagtaatggagtgaattcattatcaacttatagttataaaaagtctaaaaaaactgctactgctgataaagtgaccatgccagaaggaaaatactcattaactgtccagggaactaaatctgctgatgatcgtaataataactctggtaatttgattataccctatataatcatatatatatataatttctttgcatttatatatataatatataactgtatgatggttattttttttttataatcaaggttgctaataattaacagattattattaaaaagaaaaaattgtgtttttggaattggattaattaattataatcaatcatataaaattataatcttgtttagtaactaattacgaaaactatatagcatttggttatgataattaaattgaatttttgagataaaattaatcttgattataatgttttataaaaaaaaaatatattaaaaagggatcaaataagatcaaattagtttgatatatatgcaatttattaattatttttaattag

SEQ ID NO: 50921 - DNA, 919 bp, Cannabis sativa
catggttgattttaagtatgagaggctagctgagttttgtacctattgcggacgccttgatcacgtgttcaatgaatgtggtgctgttttgactcttcaagaacaagggattgcaccaattccaacctatgatgaacgtattagaatcccaggcttaccaacatatgtgcgtccaaggcctcaagtcattcgtcattttccaagggctttgttcccaagccctccacttcccacggtgcctcgggttattcctgtcttcaatgatcaaaatacagctggtggtcgtcttctcctgtctgaagctcctaaagggaaggagaaagctcatgacaatggtgatttggttgaatcaggatatgctacctctctagcactgttagtagctaatggctcctccactctatcccctcatgtgatagaaaattcaccgagtagttctcatgctatgagtttctcctctaatgtgatgagccttcccactaaatctgataaaggaaaggcgattcagctggaggatactaagatcacaactgctatggcttcccttcaaggtggagggagcaaaagggctaaggctgcgactgaagatatttctctcgttaagaaatctaagaagtagttcgatgttgttctgttgccattttgtgtctagaatatagggatttgtttttcttatgaatctagcttcctattatgtttcattgggttgtttaggagttaggtgtgtttcactattattgtgtctttaacttattccccattatgtgtcatgttatgttctgtcctattcttttgattgaatgaagatctttctctattattaaatgtggagttatgttttattaatgtttcctttattttcttccagcataaaatttgagttgctagcttaattcgaatgaacttaatgataattaga

SEQ ID NO: 50922 - DNA, 1649 bp, Cannabis sativa
aataatgcttaatatgttgcaatagcttccgagtttgctatgtcactagccattttttctcctttcatctagtactccacatacacttggttgactacaagctgtgaatcactatagagttcgatgtttttagcgccaacgtcttttgccagctgtaaaccaacgatcatagcctcatgcttagctttattgttaaaagctccaaactcgaattgaagtgcactttgaagctaaagattctgtggagatattaaaatcattccgaatctaagacctttttcatttgatgattccaaacttctctctctgggaccgacattttaggatcgtcatttaaccctgtgcactccacaatgaaggcttgacctttaatcgaaactttaggttgatattgtaattcgaattgactcaattctatttcccacttcaggagtcttcctgatgactctagcttttataacacttgacggagagggtggttggttagtacccttatggcatgagcctaaaagtatggtcttaactttcttgaagaaatcagcaagcaaaaggaaagattctcgatcataggatatctggacttcgcgcccaacaatctcttgcttacataatatactagaagttgtacctttcctttttctcgcactagagcagcgcttatggcatgatctaacactgctaagtacagaaacaacaactctccctcaactcatttggatagtattggagccttcattagatgttcttttagttgctagaaggctgtttcacattctactgtccattcaaatttatgatttcctcgaagtacattgaagaatggtatgcacttatttgtggatttagatatgaatctgctaagtgttgttattcgccctgtcaacttctggacatctttgtgcttcctgggtgaaggcaagtctataaaagctttaattttctttggggtcgcctcgatccctcgtgaacttactataaaacccaagacttccctaaggaaactccaaaagtgcatttctctgggtttagcttcattccgtactcgcggattatggcaaaggcctcttctagatctttatagtggttcccagaggttttcgactttaccagcatgtcatcgacgtaaatcttcatattcttccccaaaacattcttgaacattttgttcaccattcgttggtaagtggccctggcattcttcaatctaaatggcatgaccttttagaagtagattcctttctcagtttagaaactagtgtgctcctgatcaaccacgttaatttttatttggttatagctggagtatgcatccatgaaggttaagagttgaaatcttgaggtagcagcaaccatctgatcaatgtgcgtaagtggaaaacagtctttaggacaagttttgtttagatctgtaaagtctatacacattctccatgtcctattaggctttgagaccagaaccggattagcaagccatatggaatatagagcttccctacggaagtcaatgttcgtcaacttgtctacgtctatttttactgcttccgacctcactggatctaaaggtcttcacttttgccaaattggttcagcattggaatctatatttaatgtatggaaaatggcatggactaatgccagtcatatcagaa

SEQ ID NO: 50923 - DNA, 931 bp, Cannabis sativa
tgaaagaagaaattgagttcctaataagaaggaacaagccccacttacatcgctatatccaagccgaccaaaaccaggcccaggtccaaaaaaataatgatatgttgcccccaccaactgctggccatttataggttgtcatcgatggaccccacattgatgggtacacaaacaaagcattggaccgctacgcttggactctccatcacaggcaaagaaatgaagtcctggctgtagaggaaagagatccaaagcaaccaaaggtagaagagtctaccatcatcttcactaaagaagatgctacccatgtcagattctctcataacgatcctttggtcataaccaatcaactaaggaacatgacggtagctcgttgtatggtggatgatggagcctcttccaacatcatcttcgaaactgtatatgtgaagatggggttccatttgaaggatttaacaccctgtacgcaactcatgcacaggttctcgagccaaggactgactcctttagggtacatctggagttgatattattttacttattgcaattagatcaatatttttttttatttttatgttgctttgtaattatatttttgttgttttatagtttgtttgttaaattattttaaggtttttttttagttattttaatttttatttttttagaacacaatatttttgtaattttgaaactttaaatatattatttttgtaaaattagtacaataatagtgtaaaaatttcttatcacaatatttttgtaaattatttcttattttacagtatttttgtaaatatttttgtttttattggattttatttgttttttttttaatgagattgtaatattattaattttaaaatcacagggaagccagaaatttgttttacgagagtcaaataaagaaaatattaagaaaacgtttgaa

SEQ ID NO: 50924 - DNA, 1792 bp, Cannabis sativa
  modified_base (339)..(342): a, c, t, g, unknown or other
  modified_base (1116)..(1116): a, c, t, g, unknown or other
ctttcaaatgcgactctacctgtaatttttacttagatttaaatataagaataaaatatacatttgatttattaagttttgaaatataattgtattatatgcattagactgaattgggttgtgatttaggttattttgttaatttctccgtgagtgcgcactgtatattctgtaaaaatgtataaaaaaaaatactttgaaatgtatgaatgaaaaaccccttattattattatatggaaattttacaaaaatacttttttggggttatttttactgtcacatttttttctttaatatttttatggaataattacataagacaccattttttgtaaaannnntatatttttacgttcaaagaattttttttttttacatttttacgatttttcaaaaaataacacgaaaacaacataaaatcaacaaaaaaatacataaaagtatcatcaaaataataacaaaaaatcatcaacaaatcaacaagattacaacataaaaaagatcgtattttatgtaaataaaataaaaaaatcgtaaaaatgtttaaaattctgtgaaactgtatttttgtaatttttttgttgtttttatgtatttctgaaataatccctatttttattgtaccaagttttcaaaaatactgtgtgaaagttttaaaattacaaaactatcgtatttctgtaaaataaaaaataaaactccagagcaacttaataaacaacatgaaaacaactataaaacaacaaaaagataactacaaagcaacaaaaaaataacaaaacaaacctaattgcaatatacaaaacaatatcaactcctcaatataattttgtattaatttttttacttagttttgacaacttgatttatcttttatactattacattattttttttatggaatttgttgttataatttcataatttgatcagtttttttttttttgagtcagtaacagttaaaatgataatttatttttaaaaagttaaataaataattaaaaaataaaatccaataattttaaaataaggtatataatataatgagtaataataacttagcttttttgtataattggcaaagacattagacacactacaagaaatgtcacttntaccagcacagttcgctactgcgtcgataaaacttttaccaatgtattttgcaaactgcattagcaaaaatgtcaaagttttatcagcgaacatttgcagtgtctaaaatcaaacttttaccatcgcatttacgcgctaggaaaagtcatttttgccgctggggaaagtcatttttgccagtgctttttattttgtgctagcaaaagttctaataccaacgttgatttgccaaccccttttgccaacacatcagaaataaattctattttaccagcacaataccaaacttttgccagcacattttttacattttttgtagtagcatatgcgtgtctataaatttgataggtttccaaactatataatttttttagaaataaaataaacaacaaaataagttaattaatacagcctaattaataatttttttaaaaaaataaaattatagtatttaaagtttaactaatcaaaataagtaactaaaatgtgtatttgaaaaaattatcttaaaataatgttttaagtttgaatttagttttttagtggcaaaattagttaataaattaactaaggaaaatttgattttctatacttaaaaaattttaaaatttttcttttaaaccaatacattttacactacaaaaaatatgacacttttttcaaaactccaaaaat

SEQ ID NO: 50925 - DNA, 992 bp, Cannabis sativa
tgatgttgttcttcgcaattcattaattcctcaaagatcaaagtattttgaagtctcaagttttaatgtgtccaaaatcgtctctaaggttgattagtctttaaataaggtgttgcaccagagtgaaaagaagaaacaaagcaaccgaaaggaaactacaccagttaatgcagaggttgtttcttaataacaatggcttgagaacaagtcagtagaaactccaattatcgatttataggaaaactaaacgttgaatgtttggaagatcttttcaagttgccaaatcttaattggaatgtgttgtatattatagggttaatactattttagactctgtattttgcaaaaattatcgatcgaattctttgttttgttaaatgataaaatagactctgtatttttcaaaatggtacaaaatagtacccttggcttaatttttaacatttcttttttaatataaccaacttgaaaataatttttagtatgaatagattcaggaaatgtcttaacaaaaatagaaagagttatgtgagttaagtaaaattgtttttctttcaaaaaaaaaaaaaagtaaaattgttttggcataagccgttgtaaaattcaaaattttgagctatatttttatcatgtgattagtgttaaagcatattggtccaaagttgtagttattgattttatattatacattatagtagtgtgcatattttcaaagttgtttagatgtagcaaattgagctcattcccctctagataactattttgttaaagaataaaaataataaaaaatagtaaatatgcagaatatactatgacaagatgattttagtatttagtttaagttggatagtatattattacactcaacttacaatttgaaattaaaaagcaacaaaatcttcaaaaagaagaaaatcaaataataaatgagaagtaaataaaacaatcattgaaacacaatcatcattatcatcatcaattattgaaattaa

SEQ ID NO: 50926 - DNA, 689 bp, Cannabis sativa
atattaagaaatgaaggaaaagagaattttcattaaacaacaagagcaggtgaggcaagcttttatagagagcttggacctctgaacaaacaaacggtattaacggataaaccgttacaccagaaatacccaactgttagaacagaaaaaccaaaataacaatacaactgtaccaaataacagaacaaaactacctaagctaactgaccaaaaagactaactaaaccagtaaataatcagtaactaaaccagtaaataatcagtaagtttaataagttatgatgccaaacatgcactatattttcaacacttcattctctccaatagtttaaataagaaaactgtagttgaaaacaattaaatgctaattttacctctcaatcttgctttctttaacatgaggattcgatatatgttaatatttcgttccttaccttttcattgttggctatgcgcatttcacaaagtgtttcatgaaaaatgcatgagctgatacgaattgggtacgtgtccagcctctcgggctatacattaacataaaaattgtttttatcctgtctaactaatcatctacaattttcaattaaggtaataaaaaggaataaattaagaaatttgaccaaaaaaaaaccatcaattgcgcgtttcctttaaaaatatagttgatacatcattcaatacttgtgaga

SEQ ID NO: 50927 - DNA, 1118 bp, Cannabis sativa
catcaaatgttacacattgttatatcaattctttaatctatgcatgtacaaaagaatgctatatttatttatttattgctatggttaaggaaatttataagagaaaattgagagtttgtagattggtgatcacatagggactcacctcccagatatcaaacctagcccacttaaccaactcattagcaccctcatttcttgctctacaaatccaacatatatcatacttcaattcattatttaacggagcaagagctagatacaacaaactccaatgtggaatttctctcttcttcatagcatgcatgactatttgacaatgcgagtagataaagaatgccgtgttattatatcaaatctttgtgaacagatagcgagtttcttaaaagaaaatctaatatgatatgataaagaaaaattagttctctaagaaaattttataggataattattctaagctcttgctgattatttttaatattttaatattaattgttttagttaatgtacatagaaattggttgattttgggaaaggctagagacttgatatgtggagtttgtagataaagttaaacattgggtgcctatattgatcttcaaatagaaggaaatcatagtatttctcttttctgtgcgcctcctttcattgtcagtgatggaaattttttctaccagctttgtgattgttttgtatttttgtgtttgctttttgtataatttttatctgtatttatgttggttattgttttcctctgccacaagtgaggaaataaacttggaagaaagtcactgtttatctggtgacctttgtctctttttcataaaaaatgaaaaagaaaagaaaaaagtgtgattgctagccttctctccatatgttttgtatgttggtttggcatgtagttcctcgtttttgttctataatgtaggctttagatgctactgacaaaaaaattgttgatttcggaaaaggacaaaaagaactgtagttgcttattcttttagttttagcttgttacatcctaagtgtaggtcttgaggatttgcaaagattttagttgcccttttggctagtagctttataagattttgatggtattgtgttttccactcttgaaa

SEQ ID NO: 50928 - DNA, 737 bp, Cannabis sativa
tttcacaattttcgtaacaataaacccttggaaattttgagtttcctagtcacgacataccaggatcaatctcaacttcttttaatgctttgactgactcaaaattttcacttagttccccacggcggggatccatatcttcatctccaccgtgggcagacccctatttcgcaatgcatttacccttctctgaactctagctggatgtttcatccttttcggtcttggttagagcatggttttagaatttcctgtagtcctttaattccctctcaaacaatccaccccattcctcgttggaaattttatgtacaagtgatatatagaaataacgactttcaaatcatatagagttggacgacccaacatgacattaaaagcataaagaacatcaatcacccaaaattgggtcattatagttatggttatcagagcttttcctactgtgagtagtaggcgggtatgtccaagtggagcaatgctctagccaaagaaaccgtacaccaattgcatgcaaggaaataagtctttgagttgaagccccatcttctcatatgttttctttaaaagaatatttgaagaggctccatcgtcaatcatagtccaaaccattttatttgcaatttttacatcaaccaccagaggatcattgtgtgggtaaataacatggtcagaatcttcttcactaaaggatatggctggttcttccttggacgtttgtttaggctttctttctt

SEQ ID NO: 50929 - DNA, 1435 bp, Cannabis sativa
  modified_base (55)..(55): a, c, t, g, unknown or other
tttctttattgatatttaaaagataaatattacattaaaattgagttttatttanggcataaaacccaacaattgggacattttttttataaaagagaaatcccaattcttggaagaaatttattaaaaccataaacttataaatacaataaacctaaagttttaactatgtctaaaccctaaaaattacccagaaaattaaataaaaactaccaaaaccaaacaaagaagaacgatgatgcaattagttataaatatatatatatatatatatatatatataccaagaaggaataggatgaacaacttacgagtcaaagatggatgtttgcgtagggaagaatcctgtaactgagttttaaatgaatgactaaatgaactctgtgaacttttgagattgaagattaaatctaaagaaattcgcaggaaataagtcaaggacaaagagggcatgaaaagttctgagaaattggaaaaagggttttttgtagaaaagctcgaagtttgtcgaatgcaaaaaatggtggaatgatggtttcatttcaatttttataccttgagattggtcaccgttagattaaaaaaatagagatctaacggacaagaacaaaggagaattgaaaaagatgggtcattaaatgctaatgatgtgccttgaaactatgaacctccaaatttaaaagcatgcaattttttaaatttggttaagacaaatataccctttgtaatcatttaaaaagatctttttattaaaaaagaactttttaaggggcaattattatacccgaaattcgactatacttcagagagttacacgtgccgatcaagtagaatatgaaccaccagatataataacgattatatcatttaatgcaaaatggaataattcataaaaatataaaattaatagagtatatttataactctctgactgtatagtctaaggcgagacaaggatacacaaactactaattcttgtattgatgagagaccatattatctcgaaagacacagtcccgagaataagatttgtttcttaagtaaaattattcaaattgactacaagcaatatatagcgagacatccgcctcgctacacataagaaaatattgacgagacgaatcagctattgaaacacttagtgtatattccacattataataactaagtgtaacaacttggaaacatgtaggacatgattgtccagtctgcgaggccttatggtcatagagcagttcttaagtttgctcagtatattgtggctcatgccattattggaaggcatatgattaaactgagttattattggtcatctatatacaaagcgagataccacagtcgcacgtcaacatcaaccaccttgaagataagaatgataagctgttatgcggttatctactgttatccacatgtgttttaatgaaacgtgatcaaa

SEQ ID NO: 50930 - DNA, 3065 bp, Cannabis sativa
  modified_base (3019)..(3023): a, c, t, g, unknown or other
tgaaaatcaggaacaaagaggacattgtgtgaaaataatgtgtttaaaaactttatgctacctgatttatgaatcttaatgctcatgcatctgaattcaaaggtgttcgctgaagtttttgacttaacagggaaataagagtatgaatatcttcctatttgttcaggttagccaagactgaaagtggatcagtggaggctgagacttgattggcagatggttaatttttaagtttcttcttatcaccataacctggtggaaatctaatcaagaaaaaacatttttctttaaggtggccatgtttatggtagttggtacaataaagcctcatgcgtttattgtgcccttggtttgcagcagcagttgatgccagtatgccagcttaggatgtacctacgtggaaagtgtatgttgacagagcgtcgaatgaaaacggattaggagccagaatagcaatgatctcacctgacgggttaagactccaggctaccctacggatcatgttttcagcttccaataacgaggccaagtacgaagctctaatagaaggattaaaaatttccaaggccgtaggggccagcaaggtacagtgattcgcaactggtggtcaactaggtgtcaggagaatatcaaacccggggagaaaagatggtcgcttacgtatcggttgtcagggaattgctgtaagagtttaagtaatacaaagtggaatgaattcaacaagagaaaaatacccatgcagagtgtctggcaagataactttagatagtaagatagagatgctgggaatggcacttgttgaacaccttgcagaacctagcattaggaccaaagaaacagtggctactaatatacaagggtcgagttggatggaccatatcattaagtacataacaacaggagaagtgcctcaagaaaggaccttgtctagaaagttacagtaccaaacttatcaatgattgacggtattctctattgaagggggctcagcatgccatatttaaggtgtgtgtcggatcctgaagctagacagatcatgcaagaggtccatgagggattcggtggagaccacaccggaggcccaagcctcttaaagaaaatattaaaataagggtatttttgggcccacaatgaagaaatattgtatagactatgtccttaagtgtgatccatgccagaggtttgcaaatatcctaagggccccacctaatgaaattactttgatgactagcccatgaccctttgtggtatggggaatagatctcatcgggtccctacccacgggaaaaggaggggtaaaatatgtcatagtggcagtggattattacacggagtggagggaggacgaatccatgaagaccataactaccaagaaagccttggactttgtcataaagaacatcatatgtcgatgtgaattgcctcacaaaatagtctcagacaatggaaagcaatttgattgtgacaaattcacgagcttctgtgactaacacggagttatcaaaagtttctctgtggtcgcgaggccacaaaaaaatggacaggcagaagttgtcaataaaatactaaaggtcaccctaaagaaaaaactcttggcctgaagaactaccacgcgtgttatggggctaccggactactacaagaaccacaaccggacactccccattctcaatggtgtacggatgcgaagccatggttctggtagaggctaatcctatcccacagaagagccacttacgatccagcaaagaaccacgccttactgtaggaaacggtggatttggtagatgagctccgggaggaatctcaaatacgcatgcaagtttaccaaaagaaagtgccaaaatactttaattccaaagtcaaagacaaaaagttttccactggtgatctggtccaaagaagggtctttccggcctcccaagagccaagagtgggggtactcgggctaaattgggaaggcgcgtaaaaaattgaagatgaaataggctccgaggcctataagctaaagagaacggatggatctatagtacctagagcctggaatgctgaccatctccgcaaatactatcaatagctaagagtccattatttaaattcatctttactctgtaagttaacatgtggcggacaaaatatatgcattatcccacataaatttaagttgagtgaggcataaaatacgtgcatagacagactagacataagaaaaacaaaatagatataaacttatataagttgtctaaaatgtaaacaacaaaacgcctgaagtcgggccataatagtcccccctaatagaaaatatagataataaatacaaaaaataaaattgtcttaaagggggaaataagcaaaatatatatatatataaaaaataaaagaaaaaaagagagaagggtttaattaatcaactcgtggaggtagacgaggacccctgcactaggccaagacagcttccagtttcttgttattttcccaaaactgacataaaacagccatgggatcgggaaagaaagggagacgaggcttgaacttgttggatttccagcacatgaacaccccatcttcgaagcacttctcacattacttgcaattaactggagccagtaaagcctccctcgcagccttagcagcctcctttcgagtttggtcctggaattcacgaagctctgagctcaacagtcagattggctattgtctctaagtcagttcagtgtatctcttttagatacctgagcttcacagtgaattcctagttatcctctttggagtcttgaagatccttcctgactgaggtgatgaatcttctttggccttcagcgccgcttgatgatatcgctccatgagagacttctcctctcgagctttgttatgaagagcttccattcggtccttcgactccctgagcctcctcattactctgtccatgccaccaaactctgacacagtgaatgtaaagaccgcttagtttaatttagaaattagcggttaattaagatttaattatgaaaattatttnnnnntatttaaataattatttacgttgttatattggaattcagaat

SEQ ID NO: 50931 - DNA, 879 bp, Cannabis sativa
  modified_base (49)..(63): a, c, t, g, unknown or other
tcaatgaggaagagagagagtgggttcgggcaaagatagggagagagannnnnnnnnnnnnnnttttttttttttttaatgaaaaaagtatatataaataattagatggaggtatcatcaatccttacgtaaagtttctaaaatactattgttacatgaaagattagtaaattgtcgtaactattataaatatgtaattcattttacaaatagataattaatcaatgaaataagtaatttgatttagttggaagattgatattgtctcaaaagtacattttaaagatttgttttgtttcgaagaggattattactctatcattagtgcattttactcgagtttatgagttgttacttttctttgtggaatgtctctcattttactaatagtaataagcacaagaatattaattacattataattagtcttaaaaatatcgatcattaagttttcatactttgagatagagctagtcttgtgatgggaactttataatactagttattcatattagttatattatcctacttaattaaatcacaaattaatgaattttaaaatataatcctatatatggtatatttaaagggacataatctaattgaaccgaactgattcaacccaattaaatttaactaaattaattcaatctaattaaaaaaattagatatccaatacaatctaatccaaactcttattatctacctctaaaaataattactccaataaataggcccatattttttttgaaaaatttgcgccagtgaacgttgttttcattttaattatgaatttagccttagtttaattaatacggttttataccgtttatattttaaaatttggagtgacacgtataccgttccaaatgcttttca

SEQ ID NO: 50932 - DNA, 1496 bp, Cannabis sativa
  modified_base (976)..(977): a, c, t, g, unknown or other
ggtaatcctggaacatctgattcaaataatccatatcaaatataatacgcagccttagcccgtcattcatgctgatggtgttcttacattttggacattctagatatgatctgaaagaggatccgtgaccttgatggccacctccgtttccccaaaacttcctaatactccctgatgttctagaagattttgccttctgtttgtgattagggttaccagcgtcggtccccttaccgatattaccactaacaggaggattcgatgccatggcgtcatcctttacaatctgctcctttaacatgttgctcaacctcctcaacaattaaggctagctctactactttcttgtacaaagtgtcatgagtagttgtaatcatcaagtcccgactgtttgtggcattcaatcctcgcagcaatgttataaatttttcctcaaacagactcttgaactctttccaagtcattacgctaacatcacgagtctgtcccacaatatcccaccagacgcgagcatgatttcgcaacatgaaagcagcacagtttacttcctctgctcccgtcaccgccatgttcacaaggatacgggtgattgtactcatccaccgctcaacttaaactatctgcatacatcccagaaagttggaggttgcagcttcacaaactactcaaacgctgagtctatatgcggcaacataaacccctggttaccgaccaccagcacagttgctggtggtaacaatttgttgaacaggggtaggccggtgccggttgccttaaccgacgcaattcctcctcttgatgaagtatgatactttgcatatcttaaaatatccgctgccatttagcaggtggattagcattgccaaccccagcattattcctcggattcagcggaagcggaggcggtgtcggtcgattggtttggtctacaccaggctctactagctcgccctgtggtctagatgattatggaggnnccattttacaaacagcccagtaatcaacaacccccagcgagtcaggcaccaatacacacttacgcacttattgccttagtagggtttatctttgttatagttaccgagtctaacctgattatgccatgctcgcataacctattcatatatattattatatatatacgtaatccatacattacgttcttttagtggtttatcctagtaatatgctaggtctaacccagttaagtcttatgcgcataactcttgacatacattcgtccattcaataaataccaaagcatatagaatcttaggataataaccctaacttgcatactaaataatcattcctacaacatattacggcatgctcgaaataacacttattgaggatattaaccctaacttatgccttcacttaattagcaatataaccatacatcattgctttcttacctttataatattctttggtaataaccctagaccgcttcaaaaattaaactcaaggtactagtttaccgagtctagctt

SEQ ID NO: 50933 - DNA, 964 bp, Cannabis sativa
ttcaataaaaacaaaagcaagcatatgaaaacaatgtcattgtttcaaaacaaaaaccaaaatgtatttataactaaatgaggctagagcagatattggaggaaacactatagaaatttcaaagtattaagtggtgcaaaaacattgaaggatttttgttaaataataaaggtttaaagacttttaattccttaaagagccaaaaggactctgctaaaattgaaaccacaacaaggacaaagatgataacaataaagtttaagcttattagtaagcaaaagaaatttaccctttcgattcggaagcaatccagcagactcagctgaaacaggcaaaattgcaaaaagaccaacctcataatcaaacttcactttctctaaattcccttttagagaaatgttctgaacagcttcagattcggccaatttcgcaaaggaagttgcttgagaatgcaaatcgactgaagatgaggttttgaaactattatcctgataaaatgaaatatgagaatctgattactctctatgcagtattaagaatccacaaaaccaaaaagggacaaaattttcaacaccttcactattggcttctgctcttccacactcttctcaaccaaagtctcacctataaatatgaagtagataaacattgcttattcataagagtatagtgagaaacaaacaatgattcatatttttctttggagacttgaaaatttaccagcattaacatgattattgggatcaagtgcagtgtccatcaaattcctagtcaaaggactaggattcatgaaagatatgcttcggatttcatggcgaatcgcctcaagttgagacattgtttcttgaagttctttgtgaacctaaacaaaatcaaaatataagaaaaattcaaactttttctagtccaaacaatcaaatcctacaacacaagtgaagacaaactcaaactcatctctaatttc

SEQ ID NO: 50934 - DNA, 793 bp, Cannabis sativa
gtagggctctaggaaaaccatctccagataagaaccagaggactcaacctggtgtgctgactcgatggaatgcacctcgataaccctcggagcagagacctcattccctcgcagcagggacctccttccctacagctaagacctcattcccctcgcgaaatttatcaatatcaatgacaggctggcttgaagatctcttcgtgtaagctttggtctttggccgtttgggttctttagtggaattcgcgacttcatcagcttggactatcttcttcctagatttcttgtcggctttgggaggacatttgaacatactctcaaaatctacgtccattcctgtgaagacaaaggtaaaagatcaatgaagcaacagtgatgttgaataaaacattgggtttgcagataaaaaaaataagttcaaatcaggccagcatttacaaagaacgatgcttaccttcagaaatctcttataagaatcgtctataacgatcgacagtgttttcttggtttggattaatcgaacaatcttcagtcctagaatcattcatgtccaatttgaactgaggtttgaagcttttgtgtatacatggggaggataggcgtttggcatattctggtgctacaaattttggaggataaatttcttaaccaggatgggacatctctgctggagaaggacaatccaatttctggacaaaattctccaaaccaggagtttatagaatatggctaacataaactgtcattttatactttgagcctagtaacagtaaggccaaaagatgggagatct

SEQ ID NO: 50935 - DNA, 1775 bp, Cannabis sativa
taaaaagtaacagaatcatgtacaacatcggacatcccatctaaaagtttctaagtttgtaatcaaagtgaaccatagaaacatataaaatatcatataatattattatcagaagactacataacactcaatatgattacaataaaaacttaaaatgctaatattaacatcacttacaagaatttagattttttgtatcattattattgcattctcttcttaattttggcaagtaaaattggtcacatcatgatgagaaaatgcatatctaattcaaagcctcatatggtttgtattttgttggtctggataacaatctccatttctacttggttaattgttctgtctcggcaacattttattaactaattcaccttttctttctttcttagtctttaatataaatgtgtttttatattttaatatagccgaccccatatagccgatagcaattaaatatataaaaatattataataccaaacaatgttttgataatgtggaacattgttccctataaataaaatattggtgaatcatggaagcttaattgcactgtgttttacttaattgggtcattaaaaccaaatccacatgccatctacatgggtcatgggtcccaaccattgtctgattatgctattatatacatataatataatttatattatgcaaataattagtaatcaatcaaataaggtttccggttaaggtaattagctagtatttatttattaataatagttgatacttctgtgaaaagtttacatccgtacattttatatgatctgataacaaaatgatcactctttttgtaatttcaaccttttgttttttcgttacaaaataaaagagttatataggtcgaattttttattttaattgctaaaaacaagactcaataatatataattttggaaaataagatcagaataatgttgttaattcttaactaataagaaaatgatgaatatattctgactctccttatcttaaggatttggaataatgagaaaggacccaaagagatatttttgaatgtaatgatataatatgtgtaaaaggaagaaaagaatagagaaataggggaggtgataataattggtttggttttgattaggtgtgtgatttggcgtatatgcatgcaatgcaggtttagatagattattagaatttagatctgtatgttatgtttgtttgggggttgggataacataattttatttgacagttgtgttgtgttatgttgtgtcctacccacgtgcggccctacgtaccactttattcaattcatcgccaatctctacgccaatgcaattcactgcactaaccacccacgtgaaacctttttcccaactaaacactccattacttactactactactacactgtacacacatgtatattacgttatatatggatgaattattgtaaaaaggaaaattgatttattatgtatttattgaacaaattgatacactaaattttagtatattaaaattatttgtagaataggtcaatttttcattaaagtcaaaactattcctcccatttgtcaacacacctacctctctcttacactcttctaaacaaacccaatttttcaccatcattgtaacagcttctcgaaccaacgacaacccaccaccacggccataaccaccggatttgtctctccaacccacgaccactgcccatcacgaactatcacgacatctcgcacctgaggccacgatcgagttcgcaatgtcaaaggtaagagattttgttccctcc

SEQ ID NO: 50936 - DNA, 1820 bp, Cannabis sativa
gaagcttgaacgttaattctgaggtttacaagactttaataatattgcccatacctctggtttagatgaggaatttaataatattgcccatacctttgaatttgaacctgtttctagtcgaccttcagagtcaaaaatcaaagacattactactactactaataacagtactaataataaagttttcaatttgaatgttttgtccttagaataaaaaaaaagctggaagttctgttttgctggacattttgggttgtttatgatttattttattttacttatctcactatattgtcgacagaaagcttattaattcattgtgcgacttattttgtcatacataaaagattgctatatgtgtaagtctactgatatagatgttctaattaaattatttgtgatattgcatttaatggtgatttagatattcaagcatcgtttctaatttctgtttctgaaagtagtataaggtgaatcaaatctgttggtttccattcattgctattgtattgttgaactactggcaatgggtggtaataccatgaacaatgatttattcctttatctctgtcaatcccactggttctctccttagaatagcaaggtgtagatgtagacaatatatgaaacttgtgtattattgttgctatagcagctagagaattacatacataatttcccactcccactcaaaactattgctgctattgtattattgcctaaggctctccatgatgcagagaaataacctcttaatcccactcccactcaaaactatcaatcatcacaatcacaatgtctcatctacccctttatttactctcttctacgtaccatactccactactcttggggtctaacatgttcaccatgtaattaagaatctgctcctattaaacagccagagtcagaatgattgtcaaagctctatcattctactgtttttgtaaattaacagtagaatgaatgtcaaagctctatatatatcacaatcacaatgtctcatctacctctttatttactctctgtgaaatttaattttatggaatttcttcccaccgtttatgcacctttgtctcattccaaaattaaaattaaaatttagataaattgaaaagacaacttgaacagctagctgtgtagtgtgtgaagacaactttcttaatatactctctttctaaagtaattaacattttgagtcaaaagaatagtgaaatacttttggaagaacaaacaaaattaaataaatagagggactatagcctataatggtgtgtgtttaattattctctaaaccaaataaggaatattaagaaaaaattcaacccatttaattggcttaccattatgattgtcttaattgtctcatagaaaaatagttactcatagaaaaaaaggaaatatatatatatatatatatatctgtgtgtttatatatatatttttttgcatgaaaaaaaacaattcttatcaactttatgaggttaaacagtaagcaataattgtttctatattgtcattttctatttgagtaacattcttgtctagtacaatgtggttattatgtgatgaagattatccagagtttaatgacggttgttaatcctgcaagttttttaaaaaatcaagtaaacatgaatagctacttttctttatttagtttgtgttttaattatatatacttttaatataatgattaatattttttttatcttttgttttacagtactcaagttaaacgctccctatagtaacgaggagatcaatgtcgtacgggatgagtgggccgaatttgcgaagcctttgattatagattaagt

SEQ ID NO: 50937 - DNA, 1341 bp, Cannabis sativa
tgaccaagtaaaccagattcaaagcaaaattctggaagatgctcacaacagaagtctatccaaaattcatctcttatctttgggagacttatccaaaattcatctcttatcaatcgacatcgaggaagtggcttaataacaaaaagtttaactctaacacgaaggaaaggataatatcattcatcaagtgaatcttcatgtactcctatgaattcaccaataagatcacccaatgcttttgctagagttttggatttacatagaaaaagaaagcgataaatctgaacccaaaaaagagtagagattaaattgttaattaagacattctgcaaaacatctggggcgtgcattacaatatggtaattttgaaagtgtcaaggttccttattcatcactctgagtttgtcccctgcacaactgaaagagactttgaacaaatcatcaccatagtcagagattacaacagggtaacgacctctttaatatctactcatctgatcaataaatgtcagcttgtggacatagttgtccgtaagtactctggccaaaaaaacatgattgaaatgtggtgcctgagtgggggcgacatcatttggaagaccaaaaaccgtgttctctttctcagttagagatagtgttgtattcaaagagttcatgagagagtttatcaacaaagacaacagtaagggagtggtgcaaaagcagcaaaaacaaaaaaaaaaaaccaaaaatatggacatgaatcgtacaatcagggaggtcaaagggaacaaaaccgtaagaggaaaaggagggagatgatgaattttgaaaatagttagttaccaggagaaaagtttgttaaaaaatcataactgcaacagactcatcagggcactacgtagaattttttttttaaaaaaaatatttattttgttgtgattaagtataaggatttacataaaatttaataattattgaataataaaatgggcacacacaaatttaactcctttttaataagcatggcttattttaattaaaattgattggttgaaattacttacatgccacataaatatgtgttatttttatttataatttatttgtaaaattatcaatatttttttttttgaaaagtaaaattatcaatattcgtagttaccataaaatattagctttttttttattattatactataaaatgtacaataatattacaaatttatatttcaaaattttatacataaatatacctcattttaaaaataatagttatgtaataaaaaattatccatttaattcattttcttatttgactttcttttttctgtatacaaattctaaaatctatatgtatta

SEQ ID NO: 50938 - DNA, 2059 bp, Cannabis sativa
  modified_base (36)..(42): a, c, t, g, unknown or other
gcccccgaaaagtgtgggccctaggcacgggcctannnnnnntatgcctagggccggccctgcttgggtgaataccaggcaaaggggttaagaatggttagatatttagagaaagttcgtaagaacttgaaaaagtttgattattttaaaatagaacaaatttcaagagaacaaaattctaatgtagattccttggcaaaactggcgtctcaatttgacctcaacaaattaaaccttgtcttggtggaggtactggacgagtcgagtatatgtgaaaaggaaaatgtggacatagtagcaaaaaagaatttcatgtgactattattttggattaatcgacaaagtaaatttaatttgaagtaaaaacaaaaaaaaaaatatgcaagacatagaagcaatacattttgataaaaatagaataaaattggtgttttcaattactaaaaaaaaataggatgagaaatattccttaattattttataaaagtagatatattttaaaagatgacatgtgtcattagaataaatgaggaagtgagagtgcaaaagacacctatttaacactcctctatatttttactgtgataatttaaagtttgatataaccattattaatcatccactccaaactccaatgattgttgatatttttaagtgtccaataagcccaaccaaatgttgcttcattataaacctccaactgagcctttccaaatttttggtactcttctttggttgctcccttcacttgccactcggccacccattcccctgtttgtcaaataaattaatgtatataaatattatctatatatatatttttgttaaaagatgtagtagtttgggttgttaacgtaccaacgaaggtgagaggtccatttgaagtggtaacataactcaaatcgcttgttcgattagtatagatgtaatctatgttttgttggggtgtcatgttgtcgaatgtagaggagaaaaggttgtagtaatgaacgtcgattacaattccatttaagccatttgctagagggaatagctcccttgcgtcaatgtttcctagtcgatttgagaatataacataaacagttgaggagtgcctgcgaatggctttgtatgcttcctcgtaatacttggtcagtgtctctagtttcactgatggggatagaggctcgtttaagagttcaactgcgtgtagacttggactctttgcatacctatatatattgttattagttaattaaatatttgataacacataaaataaattgtgaagatgaaaacaactgattgacctggctgttagaaagtctataacatcaacagtttggtgaatattagcatcagtttttccccattcaattgaaccgtctcgagaagagctatgctcgaaaccattttgagaaccaggcccagcgtgtagatctattatcactttcaatccatatttcctaccaaaattaattttaaaaaggaacaattttaattggttgaaatgttttatcatatctaattaaactgtaattatacaatgttacgtactgtgcccaagagaaagccttgtctaacattgttaaggagcccccaacataaggccgtgggggtcttggatcattcgctatccaccaaccaactggtattctaactgcatttaatcccttttctgatatgaactcgaagtctttttcaactatgaatgttttccagtgatcctgatccattcaaactctttctttatattcattttatttgcaattttatatatgcttaattaactgttatgttagttataacagtagaatatatatatcataccctcataacttgtggagctcttattgggccataaccatttgtgacttgaaactctccttccaattttccagaaattctaatcaagaaaacggatggatcatcatctccccatgtagtattctcctctgcatagtcagctgtcaccagctcctctgtttttgcctgcagttttttttaaagcacataatagggctgccactatgtattttgttaagataaattattaatattattcataaaaaaaaaaaaa

SEQ ID NO: 50939 - DNA, 1837 bp, Cannabis sativa
gaggatcatcagagaattggaatcacttggtagccacccatgaaattaagcgctcccaaatggttcctagccaaaactgttaaatccatccaaactttcgcattacaattaatctttatccagatcgtaaaagaatgtactactacaaaagtcactattggtgttggttctagtatcagttaattataaaacttgatactaaaaattaacctaattattaagtatcggtttataacaaacaccaaagagtactcagtggtgtcggtcagtacaactattatataagagcaaaacatttcatcattgttatttaggttaacgatgaagaagtggtattatcgtgtactttgtatataagcaaatttttcgtttcgacctgtaataatcaagtaaaccactaataagtttacagcaaatatagtattttgtaagcaatttatacaaaatatgtctaattaccttacaagcatcattataaaatcattggtatctcactatatgatttttattacccttaataatatttttagggaaaaattataagggacaatttgtccctaaaagttattagggtcgatttttagtattattagaggcgacatttgtcacccctaaagcttgaaaatattgtagtactgcatctgcttcgcttctaagagatcatcaaaaaacttaaactgcttggtagccacccaggaaaactaagcgctcccaattgttacctagccacaactctgcacataaattcattccaacattcacatcacaattaatcttgatttagatagtagtacactacaaaaaatcttacttttagacttttagtcacaacaaaatttttgattaaaaaaaaaaattgtagttaattataaaccatcatttttttgttatgactaaaaagtccgtaactaaatgtattagtcacaaaaattacaacttatgactaaaactaaattagtaacaactttgtatctaaaatactaaattttagttacaagtgactttattttgttgtggctacagtcatatttaatcacaaaaaatttatgttttgattaaaaagttattactaaaatgattttttttttatagtgggaggaggagactacgagatcagctgaaggatgaagtatttaattaagttttatctctggtatggttacacacacgctatgagtccatctttgaagaatgctatatattaaattcataatgttatataaataaaagaattaaataattttttaaaaagtagatgtatattcttttaaaatatgtttagcaatgttttcccagttagagtaattaattaaaactatgtcgtaaattatttgaagaactaatatttatttctgcagcaatttgatccaagaacatatataataaaaaaaaatgcaacaaatatatattgatatattttttaaaaataataaatgatcgatcttcccatgttgaaggatcctggccgtcttccatctttttaatatttataattaagcttttgtcttgaccaaatattcgttccatcgatataaacatatatattaatatttataatataatggacccgtaacccgttatatatcatcatatttatcaatttcaattacttcagtaaattaaaagacgtgcaattattttcgaagaatatctatgatcaaaatcatgaaaagatcgttatcacatgaaatatatatattttaatttttctaatggactaatttgaactaattattaatttatctacaaattatacttaattacaaagacaaattacagataagaggtatgtccacacaaatcatagctagctagcggccagcagacgaccatatat

SEQ ID NO: 50940 - DNA, 1845 bp, Cannabis sativa
  modified_base (1587)..(1590): a, c, t, g, unknown or other
tagaattggaatcatgggttgtgctcaaattggatcgttcaagcctcagttcaagcaaccccactattgaagttcttatactaataaaagagtgggaataaaaaaaaagggaggggagataactggccaaattgatgaggaagtaaaagagtggggtaaaatgttctcaaataaaatcctattaacttgttaatattcttatttttaaattatgaaaatgaaggtaaaaaaatttatttttgaaaaaaaaacatgtttcctaacttttttgtttttgtttttaaaaacaagaaacgaaaaatatatttagtattctttttatttaagtgtggaaagaagaattgagattcgagaaagtgagccggagtcagaattgcggtcggggtcctaatttggggtcgggttcgaaggcgaaggacggggtccgaatttgggtcaaggtttaggtttaggtttagattttgggtttggttccaagtgcataccaggagccgagattcgatatccaatgtccgaggttgagatttaggtctcgctccagaaattgggatcagattcaaaatattagtgaaagaaaataaaaataaattataattgagaaaaaaaaaaattatttggtgattttacaatgcacccccttataagagatgtacttattttggcatctaaaaaaaatttttagtctaatttttttttcatattcatgtatgttatatctatttaagatagcttaaaaattgagaaatttagaataatttacaatgtagaaaataatgtttaaacaatctattttacacgcgtataaaataaaatagttatgcgtgcaacacattgtctgaacgcagtttttagtatattaaactttttcgaattttttaaaattttacaggatgttttaaataattataatttaaaaaatttaatttgaatttgactaaaaataaaaaattattcggatactaaaacaaatagagatgtatcagtgtatcccttataaagggtgtattatagaattttccaaaactattcaacaaattttgaaaatatttttttattttattattattattgtatttaaatcttttaaattttgattatgattttaaaaattaaaaaaagttaaaaatagttttattttatggaggagcaaactttgtttatatatatttttacttttctaattaacattaaaagcacattagaaaattgtacacttagcattgaagaatttttttaatcaatatatcaatataaaggagaggaatgaagcggtgacatctcaccctaaaatctttctaaagctattttctttttctccttaattctcttatttttaatattttattagaacataaatttacaaattaatattttactattattttaataattttttcataaaaataaaataattttaaaaaacaaaaattaattaattaaaacaaattcatatcattctaaaaataaaaaaaatattatatacatattaaatgaaataaaaatcaattatttattatttttcatcttcttccagccatgttatcttcacagattaacaatagattttttttttttttgtaaggagannnncaataaattttgattctcgattcaaatgctatctttcaattctattttcatatattcaaaattctcattctataaattttctattaatattttccaatcaatgaaacgaaaaagataaattttaattcccgtatgaaaaatcaaactattaatctcaataaccaatagaaacaacatcaaatttcaagttataaaaatctatgaaaaaaaaaaacaacagttctcataaacacaaactcaaatagtagaatccca

SEQ ID NO: 50941 - DNA, 1266 bp, Cannabis sativa
caaagtgtttgcacactcagattgaatgtgcccaaagccttcacatttttctgcactgaaattcctttttattagtcacacaaggtttaaaaggtgtatttatttttgaaaattttggagtattctttttattacccatctttttcatatatttctgaaagttcttggttaataaagcaatttcatcatcgcattcgttatcagaattttcttcttcagtaactcttaaagtgatacttttaccttttgtcatcaattgacttgggtttttccttttctttgatttgttgattcaattcaaaagtacgcaaagaacccattagctcttcaaccttcattgtgctaaaatctttagcttcctccatagccaaaaatttactgtcaaacctgtctggaagaactctaataatttttctgacaagaatagattcatcaagctattcaccaagagcaaaatattcattagctatatcagacagtctttcataaaactcagtcaaagtttcagatttagacattctaagatcgtcaaatttgttctgaagcataataaatctagagcgcttaacatcaaatgttccttcaaactgagtttgaaggatctgccaagcatcctcaggagattcacaagaagatataaggttagtataaccttcacctactccattaaatatagcatgtaaagcttttctattgtaagaagacaatttatgttcagattttaattttgaattacctttggaatctaccacaacaggaggagaccatcctaaaacaatcattctcagtgctttctcatcttgagacttgataaaatcctcattctaactttctaataaggataattagaatcattgagcagcggtggacgagtaatggaactttcttctacaaaaaaaagacataatgcacaaaaacacagaaaaatattgaaggaccacactaagagtttactgtcccactctaatactaagtgaaaaattatttttttgaaaacaccaataaatttttacaaaaaaaattgtaaaaatacaattgtaacagtctgtagcagcagaacgtaattctatcactatagaacacgattttgtagaaacaaaccagaattagaaataaaataacagtagaaaataaaatcacttgacacaagagaatgatacatggtatcagtgttctttcgaacactcctagtctaggggaccacgctcaaagaaaaaaatcaattagtaaagtctcaaataattacaaagacaattgacttaaaca

SEQ ID NO: 50942 - DNA, 2500 bp, Cannabis sativa
  modified_base (2284)..(2285): a, c, t, g, unknown or other
agtgtgtaagtgtggatttggtgcgtgactcgctgggattgatgattttagggttgtttgaaagaatggaccctactaaatcaactagaacactgagcgagtctgtagagtaggttgatattcaaccaatataccggtaccgccaacaccttcacaaaattcttggaatactgcgaccggggatgaacaatgataatcctcttgccgactgtcagtaaatatttattgaaatgcacactatcatactctattaagaggaagagtcgcgccggattaggcaactgactcaagcagccccggtagctaatcctggattggacctgcaaccacacagtgattcaatctttgaaaggtttgtcaagctgcaacctccgactttcctgggtgtggtactgatattataaaggcagagcaatggacgagtactattacggtgtagttggaattgagtaggttaattgtgccactttcatgcttcaagagcatgtccacacctggtgggatctagttaggggtatttatcaaaccacattcaatatttttaggcatcactacaaaaaattttatttttagtcacaacaaaacttgtgactacaattaaaaatgttgtgactaattataaatcatcatattcctatgttgtaactaaaagttccgtgactaaagatagtcacaaaaattagaatttattatgactaaatgttttttagtcacaatacttcttgtgacaaactaaattagtgacaacttatatctaaatgctatgttttattcacaaataactttttatttttgttgtgactaaaagtcacatttagtcactaaaaatttatgttaacactaaaaagttatcactaaaggaagcatttttttatagtgcctatcaagatttgatccagttatatattggatgctagattttactatccgatccgattcaattaattttagtcatccaatttgaattgaatcggttttattcattggatgtatttcatgtactaattcaaatttatccaatattttagacttatagttttttttttttttttaattgaattggatatccatctaacatttaaatttactatttaaaacacaaggaatatattaattaactcattattattaattagtatagtaatattctctgccaattattgttttcaccaatataattaatatatatactcagaataatgtagaattaacaacaacactgtaatatttgtctttttttgtaaggaatattacgtacacctgtcttttgaacacgtacctctaaattgcatgcatgcatgcagagaattaaagccacaaagtcatatacgtggaattaaatttttcctagggttaacacgtatagattaaatgtgtcaaatccatgcagaaaaaaacactttacatgcaaaccctataaataccaatcctttacttcacaaaaacacatccaccacacaaccaaaccctaaaacattttcaacaatggcaaaaatctcatcatccactctagctctgttcgcagctttaatgttggtggctcatgcagttgctttccgaaccacgatcaccactgtagaaactgacgatgttgaaaactacagtcgatcaggttcggaacaggaatgcaggcgacagagacaggacctgaaccactgcagaatgtacatgagggagaagatgcacggacggtttgaggaagaagatgagatcgagaactacagccagcatctggatcagtgctgtagccagttgaggaatgtcaacgagaggtgtcgttgccccgcgttggagatggagattcagaaggagcagggtcaggataagcagaggatgatggagagtgctaggaatattccatctatgtgtggtatgcagcctagaacttgccaattccattctcgttactattgaagatcataaagttataataagttataactatgttcagagaatattaagagagagaggataaaattatgcacattatcgtgtgcttaatttgtagtgtactttttgtttttatgtttgtaaattaaggagtttttttttaataaggctcttttcttgaataataaaatcggcacttaattaatgttggaatgtttagtagaacaataaaatttagcgataatactacctaaactcactataattttttttttccttttagtcataataaaacttataatttgtgactaaaagtgaagtgaagaaattatgactaattataaatcatgaatcctatgttgtgactaaaaggtctgtggctaaaagtattagnnacaaaaattacaatttattatgactaaatgtattttaatcacaatattgtgattaaaactaaattagtgaaaatttgtaattaaatactatgttttagtcacaagtaacatttttttgtgactaaaagttacatttagtcaaataaaattatgttgtgattaaaaagttaaaaataccaattttttgtagttacgatttatgacaattaactttt

SEQ ID NO: 50943 - DNA, 1232 bp, Cannabis sativa
atttatataattatatgaattaattaatagatttttttcaattattataaagtaaacttactttttaggagaattaagtcaattattttgttttcccttctagtgttgaaataatggcattgggcatctccttcccttgactgggaaattttttcattttacatattttaccaacatataaattaaatattcatttatcttcatcaaattacattttatataattaatgcatgtatatagttatagtaaatattagaggaagattgatgttgaaaatacttcaagaacacatttcattaaaaatgagctaggaaaactcaactcaaaaaaagaaaaatatgtcaattttcattgaataagaaataaaaatgataagaatgacatatggacaaatgagagtaagctcttctaaccccttctttcacttatttttctactagtattactattagattttagtggtgctcaacattactgcgatttgatgcctaaagaataattagtaatatttcataaaaaatattacattaaattatgtaggaaccaaatatttaattatactaatagcaatataataccttaaataatgttagacattactgatacttttgagtatatactcttaagcatatttctcttattctataaatacatacaacatctctcatttggaaatgaaatcaatctccatcattgttagcattcaacttagacatcaacatgaaaaaaaaaactcaatcttcaaccggattctaaattaagatgagttaagtcagtgtttatgacccactcaaattccgggtcaaaaatcttatgtaatttgtagagagaaaaaaggggaaattaaactgtatacccattttatattactaactctcatttttaccctattttttaaaatcttttatttctaccttttttttcaaacactataccaatcttatccttgtcattacacgatactctatccccctctaataaacaggctgttggattttttggtgtgattaaatgtttttgagagaaaaagaaagataaactattttagaaaaaataatttaaagatgaatggaaccattttcactaaacaagagtaactacaatgatcacaagtgtatgtatgaccaccaaaattggtggatatatatagaagagtacttaattaaaacttttatgaatgcaatgataaataaaagaagtcatctcataatgatgaacgagcccagatttct

SEQ ID NO: 50944 - DNA, 846 bp, Cannabis sativa
ttatgcccggggtttctttatcctaattctggcgatcgtatatggctaccattccgttacgaaaggttgccctttatgattacaggtcttgtgcaaaacatcctgtgactgtagcggatggtgagggtcgttcttcagcagctttcggtgcttggttgaaaatcgatgataaatccatgaggcaagatggaagaacgacgaacacagaagatggggagaagggtactaatttcattcaacctgctgcaagtttgaaagggattagcgaagtggaaaagtctcaatcgatggcaagaaagacttggaactctggcaaaaaatctgggggaagtcaagaacctgactctactccaagaattaccaaccagaattctctgcgtggggaggtacaaatatctaaaactacttttcctttcaaatttgttaatttaatggattgctttgatgccaatcgggttggaaaggagttagaaaaagaaggaggatcaggggtgaaaagtagagcggacagttgtgagattttgaacaggggatccgggttagacaatgaaacagggaaaaggttgcatagagatgacagtagaggtaatgtgagatcggaagtgattgtttccaacaaagagggggagtggatagacatccctataaccttggacaggagcttcgggagtgagaaaaccggtcaaaagggagggaggaaaaagagagtagtgaatagaaaggataagaagatagatactaagctgaaatccccagcggtgacccaaggagacgaatggacaagaagctcgggaaacatggtgaaggataaagcatcagggaacatttctaagtctttggatttgt

SEQ ID NO: 50945 - DNA, 2101 bp, Cannabis sativa
  modified_base (2039)..(2067): a, c, t, g, unknown or other
ccatccttaccaaggctcttattaggatgcatttccaaacatctgatcctgtgaacagtctcatcaacacatcattatgctcattagtaacccgttgttggacttattctagcaccacattcaaaaccttgtcaaaaggctcatgtgaagtaaacaaggattgaaaatgatcctaaaaaatcgatgcaatacaaagaggtgacccaacccaaaccttatttttgtcaaagataccaccaataacattttctttttacgatgagaaacactttgatgaaaataggctaaatttttttcacccaactccaatcatgaattatttgcacgtgaagaccaatacttttcatctttatatagcaagacatcaagctctttctccactttaagatatgaagacaatgtgctagcatcgagattagagtcaagcacatcaagctcacgagtatataaacacctttccattccaataatttagtgcactcaacacaccccagatattttgtttaacacccacaatatcaactaaagtaaaagccttcccacggtttgcagtaatttcacggtaaccaaggtaatctgcccaagccatttcaagtggaaccaacctttctgctttggacgtttcctagtatcacagacacaaagaatgcaagctaagagagttctatgattggaaccccaaagtttcaaatgcacgacataggaatttgaaaacatagaatgccagctattggtacaaaccattcgatctagttgttcttacaaaaacgatccatccttatgtttgttatcccacgtaaaacgggcacattcaaatcccatatcgacaagaccacatttcactataacatattacgaaacacatccataaggctttgagcacgcagaaaaccaccacttttctcatgggagaaaagaatctcattaaaaaatcataaggttttgagcacccatccttgtttggcggtcttgagtcagggactctcgacttatagcccaaatctcggtctattgaagcatcacaaccggcactagtggccctagttgcttgttcttataaactcctttatgaatgaagtatctattcgaacactaaaagctaaaacacaaccaaggattaaaactggtcctctcaatgaagaaccaaaatgttgatgccaaaaagcaatcaactctgtaccgtttgatcagcgatagcggccaacgaatgtatgaactgaaagtaaaaaagagaacaccacaattatagtagttcactcgttttattacgatgataatggagttatgtctacttagagcttttattaccacaaaaagctaattgacttttaagagaactcaagaaaaatgactaaatatagctttccttcacaatttctagagagagaaagtgtgaagagacaaaagctctaacattgtggacaggaattatattgtgaaaaatgagctaggagaactcttcttttatatagaaggaggtccaattaaatatcaataaaataataggcaacttcgcacaaaatttgttgggaaattctacagtagctcgctagtccattttaaggctcaaatctttagaattgcggcggggtgtgtgacacacttagatgcgccttgaaaatatctttaatttgtcactagaatttacgtcatttggataaaaattgagagtgaaggccattttactgatcggtgtgcactgtagaaaagtgactgtgataacaacctgacttttgggcacccaaggtgacatataaatgtcaacctaggcgcccaaaacttgatttcttaggatttaggcctattttgagattcttgaatgatgtgatagatatccttagtgtattaatctttgaccttcggaagtgctctttgaaattttacctgatatgcacaggtgattctcgatgtttcactaaagatgactaggtgacacccgggtgattagtagtggacataggtgtcggaggacactacaaaaaatcttacttttagtcacaaaagaacttgtgactaaaagtaaaaaaattatgactaannnnnnnnnnnnnnnnnnnnnnnnnnnnnaaaaggtccgtggctaaaggtattggtcacaaaa

SEQ ID NO: 50946 - DNA, 705 bp, Cannabis sativa
ttacacgcgccgaacacgaagtatatacgccaaatttaaggttgaccgaaagtttatagctttagcacatagacaggtctgaaatagagaaagatagacggagcggatgcttactgctattaccaatagttataaattaatttcagcaaaaataattgtattaaataaattttatatgggggaactcatacttaattagagatatttctaaatagtgctacagtttcttgtgttttttttttcagaatagtcaaaaagttgatgtttagtatcttatataattaaaaaaataatttttaagaaatattattaactaatattaaaatatcacctatagaaagtattagctaccattagtaccactatccaataataatatttttattatgtacatataaaatgtataaataataaattttgaatcaaaaaatatagaaataatttatatatttatatatctattttataacagaattcttagtttatgaaaaatgattggatgacttttttttaaataaaaagaaataacaaattattagatgttgctatcaaacctaaatataattaatctactaaaatattacaattaataacatattgtttattttttattaaaagttattttcaaattttgatatttaaaattagttaaattttaaatattattttaaaataaatttagatgtggaaagctacaaattaaat

SEQ ID NO: 50947 - DNA, 2928 bp, Cannabis sativa
tagaataacattatgtctctaaccggtattttaattcggtttaacagatacaatagattattaatagatgtagtcaatgggttggcaattaatattttatgattatattcttcaaaaaaggaaaacaaaaaataaaatctcattatatgttaattcccctttcacatggctaattaatgcgaatatctagcactctagttcattggatttttttttccttcttacaaataagaatattagttaattaattaattatttaaattaaaatatataccttgatgagataggggattctcaaaagctctgggatttaattttctgctgatcaattgttatatatttttagtaaaattaagagaaattgttaagggcaccggccactatatatctaatactattaagatattgttattattataattaattaaatctgtgattttatatctttcaaatttaataattattataagaaataattaaacagacactattgtgtggttatattataggcacaccactctctgaaattaaccaaaaagtgtaatcaatgatgatgacacttaaattatttaattgaattaaattatgaaaaaaaaatatcgaatagaattaagggaagattatggtagtgcaccaaggataaataaaacaatatgtattatagtactgcacaataatcctagctaagtattatactgattaatggttagaattgactggacaataatattaatataagtaaaaatctaatatatgaagttatgaacggagattgtgagaccaaataacgaaggaaaaaaaattctctgttatacagtcacatgtaactacttaattagtcaagagaaactggtgcacgcaagcttagtggaaagaatatatactactttcatggtttgaccaaactaataaaatatatatttataaatatgtagaaaataaaacaaagatatataaacaataaattagattcacattaccaattaacatatattattaccattaattttaaattaaatatcggactttcgaatctataagacattaagatgtgaccatctacaatatcataaaatttatataatggtagctaggagtgagatgcggttcagaattaagactacatgatttttcattcgcaattaatagataaacaagtttataaatggtattatcttgtcccaaaaagcgaaacttaattacattatttcattatacattcatagtaattaattaatatagtatctctttcctcactaactcagattatgccacgtttcctgcaatctttggccacatggtcatatatatgtacaaaacaattagagatgataattctaggagaccttgatttttttagtttatcattaaagagagactatatatattaaatcgtctatcatgtatatattattttctgatcatatatagatatggtgaaaattattgggagaagtctttgtgttttattgtttttaattaatttgctatggaaggtatcttttgaaagccatatgttaggagattaattatatttagtagacaataatttattttcctactcttaatgattcccctgaggttgttataaatcataataatatttggttacattataaattagttagtatgaaagcgtgagtgaccatataattaattaaattttactaataattaatatatcttaattatacataatttaatttgtgttttaattcgaatcacccctggccggtccatgccttgtaataaattgctaacacattaaaataattgaactgaattaattaattgtgaaatttatatattttccctacctatatattttaataatgaactacatatatgtgaacgtaaaattataatatacatatatataattattatgtgtgtaatgttggtagccatgcaaaatataaatacgaaattaaattctttccactatttagttaaaaagtgtaaagtgtaggtaatttccacagtcgtatatcttaaaaagtagttctaagtagtgttttcctattggcaaacatgcttttggtttcctcaaaagttaagttacaaaatttcaagggactcttttaattggacaattcacctcaaaaacgcgtgtgaccagatcatctattatagaatacaaaataaactttttcaataatgcactaaaaataaccccagaaagttcataatcaattctcttttagacttttttttttctttcttctttaatgtcttgcaagaaactcttcctcaaaatcagattgcgtagttggtgacacccaagctagagccactttttcctctagacaagttcaatttttctttacataacataatagcatgacaaagaaaaagatatatgcatgtgtggctagaagtgtagactcgtctcctaaattctaattagttttttgtctcagccgaaaacagaatgtaggagttaattaatacttaacaatattaacgaatttttgaactcttaattaccctaataatatatataattcaaataataataataataataatctttttgactcttggtttctgacccacgttataacgcagcaaaagtactagtactgactacacccacccattattacaatctaatatcttccttaatatccgtctctcctgatatagtcatatggtttttttcttaattaatgtgatgaagtgaaaagacacaaatacccccatacatatatataggttaatatataaaatggtcggttgtgcttgcgagtcacaagtggatattatggaacagccggccgacgtcggtagcagcatgagccgttaatttcgccggcgtgttatatattacgtatgcaagaaaattaatatgcatacttaatttttagatttatatatgttcgtttcacacgtacacacatgtcaatttattacgatgttatactcgta

SEQ ID NO: 50948 - DNA, 1690 bp, Cannabis sativa
  modified_base (1646)..(1664): a, c, t, g, unknown or other
tttatctgtgtgatatcgttttgttttgttttatttcgttgttgattcttttttgtttttcgatgattcgtcatcaaatcgttgttaatggttgagaataacaagctctctgcaactaaataggttattagtagtgcagtaccttacacaataattgagcacttaagctacgaggttgaatggacatgcttgttgtgtcgtctgattgatgaatgaaacagaatataagtattttttttaaagttaattgtgatataatctatttcacatgattttattttgatgtttttgtgatgacgatctgggaattagacaattgattatttagtttatttttctaattctaaatctaatcctaatcgtatctttaatgggaagatgtaccattgtattgcatgctattattttagttgattgccattaataaaattttattatttattcaaaaaaattattttttataagaaattatatctgtaatttatatcaattttttaaagttttttcttctctcttatattcttacaaaatttatatataaaataaaaataaaatatattttaaatattaagtgaaaataattaaaataaaaaatatatatgaatttttattgaaaataaataaaaataattataaataattttttttaagaaattcatcttctttaactcatctcacccacaataatgattgaataaaaaaagtaggtaaatagtccccactaagaacacgattagtccccacccgccgctattaccctttaccagcggattaatggattattaccagcggactcctccgcctctaataacgataaatgttgtagtgtatgtgcgagattattaacagatcgttttacaaaacaaacaaaaatagaacttaagacatcaagcaaaaccttacaatcatttaagacatagccataaagagaagctaatttcctattcttacttagatcattcacaagagtaaggcaatctatagctctaccaccactagtgaccattcttttttttttttttgatccaatttaaagcttctttgagtcccatagctttaattatcaaaggaggccaaatcccaccgtttagcttcaatcactatctcaaaacagtttttagccaccataccaaagccaaaggaactttcattgacaaaaagagcaccattaacattaactttgattgtgaggaaagccagtttagtcgaatactcatctactctctcacgttggttcaggacctgtggagaattcagggactttgtttagcattattccaatcttcaaaactaagagaagccaatgacactacaccatcaatggatggattccaaaccaaattatttttgtatttctaaagagaccaacataacatggcagcaactaattggtcttccttcttccacacacacagaacatttttaaactagggactaaattcagttgcaacaaagataacattcagaataggaggaatttgccaacaattccgagagaaagggcaaccaacaaggatatggaagaataatgtgaaaaaaattaaaaatattaagacaaatttttgaaagtttatttaagttaattttttaaaatattagagtgtacttataactttatgggatcactacaattttttttacttttnnnnnnnnnnnnnnnnnnnactaaaagtaaaaaaattgtaactaa

SEQ ID NO: 50949 - DNA, 732 bp, Cannabis sativa
  modified_base (27)..(28): a, c, t, g, unknown or other
tttgtaaaaaaatggcaaaagttagtnnaccatgtaaatttccctttaattatcagaaatcaaaaatcagtgacaaatatgtaaataaaaaaagttggtatttattgttgtgcaaatttgacttgtgctatattttgtttaaattttagcaaaatgtttaaggcgtgctaaatttagtatattttttacactattagagttactttttttttttttaagaaaaaaccttgtaaaatatagtaataggcaacttttatagctctccgtagtattatgctagaatgcaagttttgtttttcattaatatattcaatattcatcaaaaaaaaatctttaccaaaaaaatatatttattaaaaatatacaaaaattagtaaactacttatgtggtagctaatgaatataataaaacaataaaagatgtataaaagtacagtaaaaagagtagtacttacgaaccatgcaaaatatgtatactgctatattgtgtattaaatttgacacaaattttaatgtgtaaaaattggcacaacttttgtgtaatagaacacaaaaaagagagaggaaagaagaaaaccaaaattagagaaaaaaaattatgaacagctcaattttattaattgccaaaagagatgtttatatacataagaccaaagcaaaaataacaagcaaaacaagaaaattaagtaacaaactgtcagttaactgttacaatattaactaactaacatc

SEQ ID NO: 50950 - DNA, 776 bp, Cannabis sativa
tttcttttctcctaaatcttgagatatttcaagagatgggtttgtgcactcagacataaagtctgcaagggcttgacccttttatggttgttcttggttcatatgtgatcttgaactagccaagttcaatggcccacttgagtagttggcctgacgcttgaggtttctataacacctactgcaatggttgatcgatgtacacctttatggggtatcactactacaaaaggaagaatttgcgacgttccaaaaaatgattttttttggggattgtcactaaaataattaagcaattttttaaaatttttgggaaaaattggtattcccgacggtttataacactgcctaagagattcgatgacatttttcattaaaaacgcttatacttgacagtttaaaaccgtcataaaccgtaaggtatagtatagccgacggtttagatacgtcgtctatactatacccaacggttttaaaccattgggtataagcatcctaaaaaaattccctaatatactccattttccccccacctaacctaattagtatttacctttttgaaatattaacccacgcacgaacctacagaaaaccccttacccacagacgcgccccccacaaatcgaaaacccaaacccaccaccagcgccaccgacccagtgttgccagtccacgaaccttctctctctttctcaagctcacaccaccggcgccacccacactctcgtctctctcttaatcggcacccatattcgtcctccatctctctctctctctct

SEQ ID NO: 50951 - DNA, 942 bp, Cannabis sativa
aaaccctcctcgtcacgaagaaatcatcgtcaccatcaacgtccagacaatgtctatccattcctaaatcaatatctatccctaaccctaaatccaagtctaaaccatccatacccacgtcgcaatttccctcaatcaccccaaaattcgaatcgtcaagtgcctcagttaccaaatcgcttagacccattacctgagactgctcgacacgttggtggaagagatcgatgacgaaattgacctggttctcgcggtccaatatatcggcgttggcaatcgaaccaagctccgaaacgttttcgtcgtcgtctaagcaccgtacgttgatgttggattcgtgctggaatagaagctcgtcttcgtggacagtgatatgtgtatggatagagttatcggacggtgggaattcgggatcggaagcatagaggtcgaagtcgtatggggtccagtaggggaaggagtcaaggactaggctttggtcagggtggctaggatcgtcttctagttcgtgaagacgaaggtaggtgacctccgccattgatggaatctgttgagctttacgtggtttcaggttgtaagaaacttttggtttaggtttataagaagattagattgtgaatttacaaaattgtcctttcttttctatttgtagatgggagcttagactagacatctttgtagtggtttttgttttgggaaattatactaatgccctaaattatagtagtatgttagtatatgtacttattttaaaaaattataacaaataaccttaaattatatgattatgttagtaaatgtcctcatttcaaaattggtagagaaataattcttttaagctatttattatttatattgccttttcacataaaaaaattaatgattttttttattatttttttagaattagaagcaaattatttaaagattatggtatatcta

SEQ ID NO: 50952 - DNA, 1456 bp, Cannabis sativa
ataattgcaacttatcctcccaatacttacctccatgatcatcataaacaccaaagaagcaagtggatgaatccatatcagaataagtggcatgctaaataaaagaaataaaatcacaataacttaagaataattttttacaagataaaaagacacaaaatgagacttgctaatacacaaaatgaaagcaggcttgttaatagaagtaaagattatttgaaactttaaataatagaaaaatagatcaatttcagttcagttttaattttaaaaaacaaaagattttattaattactcacaatatcttctatggatgcgcaccacccttgcattgatgataacccgtatcttagtcgatcattcccactattttcagagagcttatcagttttgggagtactgagttaagtacccattttctattcaaaataaacaaggtataaactaaaagaaagaaagaaaaattaaaatatgtatgtacgtatatatcaaggtttttcaataatcatatctcaaacttcaaattaaagaaaaatattgaatacatcataatcggttagtatgaaaaattattaaacaaaataagtagaacagaaccttgaccaacaaagagaaaacccataaaatatcaaacgggatcacctaaatcaaaggtcacaaaagttcacaagatttaagtgaaaaccttagtcagattaaaaaaatttaattcatacatatccattagtcaatattaagttaaacacgtactttgtaaagaaattgagctactattttcacaaaccccaaaagcgtaaattaaaaaaaatgtcttcaaaaaagggaaaaaaattataaaactccacaaagcaaaacaattcaaaaatcaatattgtgagcaaaaaattgaagaacaaccaaaacaaaccaaacattcattgagtttgatgacaagcttcatagcgactgtggtggcgtagccttctttcttgacaaattggcagctagaactcaactagaggagtcttcgggcttgagatccttgtcgagggacaaatgtaaagagatctactttaggtgagaggcacacagagagagggaatcgtgagtgagaaaggaatgatgggggtcaaaaatcgcgagagctataccctatattctgatctggaaaagagaatgaatagtctttgctgattttgcaatttggctttagaatgaatagggcttcagcttcatcagtttataaaagtcgaaaccacttttgtgagtgcttagaactgattatatagtcatatttgacttttttaaattgacgtaatttttttttaaaattttactttctcccgttacttttgttattagcgtctaattagcaacaaacataaataatatttttaagtgacagtttgaaacacttgcacaaatacatgacttactattcatgtcggtcaataaaattaaaagtagcattgactga

SEQ ID NO: 50953 - DNA, 680 bp, Cannabis sativa
tataacaaatgaaattctttcaaacagattttaagattaaaactgataaacttattgtaccactgattgggttaacctcgaatcttggttatgcatctgcttatggcattgaacctaatgcaaatgcagattttggagctttgattttagcttctattaaaattgatttttgttaagagagttttttagagataaaagttaaaatttactagttaccaacctttaagtccaaaagaactttcagctctctttcatcctaaagctagataaacaattgatgcaacttcattttcagatagatgaaaataaatattgaatattaagactcttattaagaaaataatgtagactattattttttttcattttagataaaaaaatagagaaagaaatgaaaaaattgatgtatggtataatgtaaaagtgtaaggtaaaatagagaaaattgagttttagtgagatattttgaagaatatagtagaaaagatgatgagagtgtttaggtattttccaaaaaagaaaaattgagtgaatagtaatattttgaaaaaaaaaaagcgtgattcattaatactgcgtttggaaagtcacaatgtaattggatttgtgtataattggaggtaattacacaatttagcatgtttgtttgaccatgcaattaactgtgtaattggaagtaa

SEQ ID NO: 50954 - DNA, 1630 bp, Cannabis sativa
gcgtccttaggagctggtgatcaaaatcacaacttcggtgttcccacgacaatgtttctccctcccttgcgcttggatcgcaacaattatttcttttggcgttctcaagtccttccaccaattcgtgcacatgatcttgaatcaattctactcaatcgcaatcctccacggccttagcttttagtaagttgtggttaaaagtgaaaaatgtcatgaccaaacgttttagtcacaatttttttttgtgacggcgttgtggctaaaaagtccgtggctaagagttttagtcacaataaaaataatattgttactaaaagtcacttttgtgacttttaccctttactcacaaattatttatttttgataaaaacatttattgtcattaatatttacttagtcacaaaaatattgtaactaatatttctttagtcacaataaaaaattgtgactaatatttctttagccacaacaaaagattgtagctaatatttttttagtcacaacaaaaattattgaaattcaatttaaaaacaaagtaatatcaaatcaaattaaacaaccaaatcatcaaaacataattttttcactgagctccatccttcaatgcttgttgttccaattccactgcactttatgtaacatcaccattgtttgtccctacacaactcacactaaattcatccaatttcaaatttacaaacaacttatgatagcatagataataaaatgagcagaaatttaagtaataatagatataagtcacattcaagatatataagagaagcaaaacactaattaaattaatatttgtaaaggaaaataagataagaaaagttatagaaaaatataaacaaaaaaatcatcaagtatggagactaacccatcaagtataggccaagtctgcaaaatcatcctcctcaaataaagaatttggtgagtcattgtgcgattgcgatcgagaactattcatttctctcataaatttttcaaacattagttgcattgcctcacatttcgcttgcaaagcatcacatttggctttataatgtgatgttattttacttaatttttcatccattttagacttcatttcttttttcattttttgcatctcttgtttcttggctgcctttcgagttgagccaaatcgttgtaaatgagaaagcttttctgaacctaaaacagatgagaaaatctcatcttcactcgttgaagtagtgccattctttgagagtttactagtaacctcatcattatatttttcctaaaaaaattaaataacacatgactttatcaatattatcagaaagttacttgctcaattaaggtgagttccaatcattcttaaagaataccaacttaaataaaaagagcaaccaaacttgtcatgccaccagaagtaatatgaaaatcgtacttattcaatcaataagaataccatttatacctgtaaaaacagtctaaaatatacacttaacaactcccacaaagctacaacaaaatttttttacaacatcaaggaaaagttcttatttttcaatgtactcttgagaaaagaaaattataaagtaaaaacaaattcaaaaagattacttcattaaaatttaaaagaaaaaagaagaagataatt

SEQ ID NO: 50955 - DNA, 1669 bp, Cannabis sativa
actcttgagcaacagttataaaacacacaaaacctagaattcatgaaatacaacctaaaatcccctttaagttcatcaaactaaaaaatatgatgttttaaaaaaaattatatatatatggtcgggcattttaggtgggtcttggtttgattcgggtatttgggggtgtcacaatttagaattcaaacttggcccgttgaacttgaactcgtcaagtatttttcagatgctaatttttcgggattttgcgagttcgggttgaccaggtttgccaaatggatgagtttcttgggtataaatgttctgccctactctaatttgtttcagcaatgcggtagaaatttcttaattatatgataaattcaattaaaataaaatagaataaaaaatgaataataaaaaaaaaagtaacaaacatttgagatttcttaagccccacaaaccacaatcaagtggaaaaaggaaattaaaaaaaaaaaaaagtagtagaagaataaagtatcgaaaaagaataaaaaaaaaaaaaaactatctactttagtgattgttaatactacaagacattaggctcacttatcacttgcgataattttttttcaaaaggaagtaaataattttatttaattcacctaacagtcttaaaatgacaaaacggtgcacccaaattttattttatttatcaaattagtgtgcaacagtcaaaatgaaaataataaatttaatatttttcattcatgtaaattttagataaattttgtttttcgtttgctttcttgattatgaattgattagtttataactaaaaattgaagagataaagctactaagactagcttaatggtgaggaagggaatgagaaaagagaaaagtcctggttcgaacttaagatctttaaactattaagctaatgtataattgtaaaatactattacgatacacttaaaaaaaaaaaaaaaattgacgagttatttataaggcttgtttatattatatgtctttaaattatttaagttttggttagttggtttttatattttactttttgataaattaattcttaaattatataagttttgatacattggttctcaaattttatttttttggtaaaagagtctctaaattcttattttttttttttggcaacattaagtctccacccttagatattgacacttttattgatttttatttattttacaaactttaatttatttttttgtgttaaattcaaataatttcattttttttttaaattttaatacattcataaagataatcatattaatatttttatattttaagtattcatataatatattattataatattaacttttttaaaaaaaatatttgaaatatactttattcatttgtattatttaataagaaaaaagagtataaatactagtaaattcatataatagttagagaaaattttagcccctcacatttttatattttagtatttatagtatattttattattaatttataaatatataatattataattttaataattttttattatatatatatttattatttaaattttgcatcaactttggtaaaattttatgggttcactaaggagcataagtttaaaaaaattttaaaatacataatttactttggtactttataaaaaaataatattattatttaa

SEQ ID NO: 50956 - DNA, 969 bp, Cannabis sativa
  modified_base (942)..(943): a, c, t, g, unknown or other
ctaaggggcatggaactgcatgaacattaagttagtgggaaacatctaccaaaatatagaagatatttctagtgtggtgcgagtgcaatttgaaaaaaaaaagtgttctcacctgaataataagatttcaaataaaaaaaaaactaaccgcatgtctcaagaaatggttggggtttccctttatcctaaggggcatggaactgcatgaagattaagttagtgggaaacatccaccattttgagaactcaaatagttttcatatcaaccaaagctcatatggactaagaccccaaagttaagtaaaattggctacgtgcgacctaagagttaaaactctgagacaaggtctaacaactatcgattttcaaactttgggttaaacgggtttaaaaatgtgagtatgcaataaggaattatcatacagatgcgggtattcaagagttcatcatgaaaacccatgagtattcaagtttcaggcaagtcttttctagagaacatatcatattctgcctaaatttttgattctctctataaaccctattcgtttcatacattttctatccctaaagcctagaatgcatgtgaatatttaaggaaaagataattattacaggaaatgaaaacactaagcttcaatgtaattcttttttagatactcttgtagatgatcaagccttcaaaactgtcttcaatcagcaggaatttgaaactttagaaaattctaaaagtttgaaatttttggtaaaggtgagaaagtaagaaatgagagggcaaaatgagtaaggatcaatttatatccgcggggattaaatactaatactcctcattcattgggataaaaacacgtggccagagaatgcctaaagtctcccaatccaacggtctctagagaacctgcctgcacatacctcgaggtcttgattgttgggttttatgccctnnataaaactctttacaatctgattagt

SEQ ID NO: 50957 - DNA, 931 bp, Cannabis sativa
ctacttattattgcaaaaactcttttttcatgtccactaaaataggtcatgactcatgaacatccattttgtattggatataatattcaaaataagtatttttcaggtcataaaaaaaagtttatgtccaacattactcggcgtgcgacacataatagagtggtttttttagattgaattagcacacatttttatttttttaaaaaaaaaattaatatgaaatataaatgttttaaaattttaaaatttatatatattaatattaattacattaataaaaataatataattttaaatttaaatataatatttaattgtaattatacaaaatcagacattataacaagttaacaacaaaaaaatacacatttcttattttcacaaacttgttaatgctgagttttatgacctaaaagaaacctaaagtaattcaatttaatgttaactcaataaagatcaaaaatcacactttgacttaatcaaatgcttggttcatgtatttatttacatgattatatgtttaataaatagattctattaaatttagagtatatagttattcacagttattgtgatgtcatcacattgaaaaataattataagtatatgtttcaaatatttaaaagtcctgagatttatcagtgcattaatggacttataatgacgtgataatcagcgatgtgatttacttactctatgacaagtggtatgtctttttcaagatattggtaaagtagaattgtatcgaatgtattagtttgcattggacttgaccgatattaaaaagataagagatattataatattactgttatatctattctcagtcaatatcactaattagttgatcatagatcaatttaagctgaaacctgacatgattaagctttaagctaattattttatttgagttttttgactaatgttatat

SEQ ID NO: 50958 - DNA, 4718 bp, Cannabis sativa
gggtctaatggagacatcatccataaaaagtgggtatatcttaaaggatataaagatggaggtaaaaattaaaacaagtaaagtaaagtgggtatacatgtaatttcctattaaaaaaaagtctaacaaaatgaaagttaagggatatgatttggtatgtctcaaagttcgagtggtatgatttggtagatatcaaagtttagggagcatggtttagtacataaactgaaatagtaaaattgaatgaaattatacaaaattcttaaatttaatcatctcaataatttatgggaaattttaacatgatttgatacgtattaaaatttaggggacaaaaatagatttaccgggaaaaggggcaataccgtcatttgaaagaacattcctctctcccccaaatcaacgaacacaaactaatcaaatctttcccgccaaataagaaacttctctcttctacaaataaattcttcttcctagctctgtcactatcaatggcggcttcacttctcatctctctaactcttctctcatttctttctctctcctcctcactcccctcaaacaccattatcgatgcctccgagattctctccgactctggcttcgcttccatggctcttactctggatctcgtctcccaaaccctaacccaaaggactccttctctcacgatatttgctccggccgatgacgcctttaagagatcagggcaacccgctctatctctcctccgttaccacttctgccccctcactttgccgctggagaccctcaaatcgctcccctctgggaccaagatcccgactctgttaccgggccgtaccttgaccgtcactcattcctcctctacctctgaaatttcactgaacaatgtcaaaatcagtagaagatttccgatcttcgatgatggttctctgattgtcttcggagttccagagttcttcgatcccaattttcaagctcccggacccggtaatagcccgaggtttggtccaagatgcaaatcgttgccatcgaaggctgccgccatggggtttccgggagcttcttggtttaaagaagccagtagagatttgaggtccaatgggtactcatccatggcttcgtttctggatttgcagttgttggggttcaacaaggacccgactacaatgactgtgtttgctcctaatgacatggccatggcgaatcgtccaaccgatcaggctcaagacccatcaatctttctacgacatgtcgttccttgcaagcttctgtggagtgatttgatcaatttcactgatggaacggtgttgcctacatactcggatgggttcaccatcaccattaccagatcgggtagtacattgatgattaatggaattcctgtaaccgtttccaacctccattatagtgattctgtcgttgttcatggcctaaatgagcttcttactggacaagcaactacatctgggtcaggttaaagcaagactgaaaatgatgccatgttaaacacttcaaatcatgtcttagcttttagaaagaaattacacacttttcatttgcaatattatacatagttgaattgctataaagtacagaatataaagataattgttttttggcactgcttttattcattgagaaagtaaagtaacttacacaagacttatggaaaaatcgaacttccttttttctttactatacattacaataatttatactatatataatggagcaaatactctaaactcaaaatggaactttgctccacttcggtttcttctttctttctttatacataactcttccaaaaaaattggatatttctaatctttcaggtaattttttactcatacttcaattgatgtaattgatgatggcacattattgctgctacttctgtaacccttgccttgtattagtgaggatagtttcacaaacacttcctccctttgggggcggtttgcatagagaatccagagaacaaggcaaagcaagacaccaacagaaatcagggccaagccagcattcaccgtcttgagatgacggtctaatggagggcagtagctggaagtgatatttcggaatgtatcacggacaaaattgcagtcttggaggctcagcaatggtggggtgtagtgctcaagtgcgtagctctcattaactgcggctaccagctgtgagtatatgttgggagtcactcttccagcagttatacatatttcagctgttgatacttcacatgtatatttctgccatacctgaagtaattgtaaatcatacaaacaaacatttaaaacaagtccccttgccggattttaagagacaccaaaaactatccaacaatgtttttctttttcaaaaattactttgtttcaacttggtaactcttggtatgaacgaggatttaagtcaagctacatactatttatgtaaatcttaaagaagatccctaactaagaccaagcttatcaattaatctacgtgaggcaaaccagaagagtaggcgaggggggttctccatccagaccccagtgataaagattgtctatgttacatcatatgattcacttttatatcactacttaccataaaccagtctcaatcaactgaaaatgttatgttttttttagaaataattaaaatcctaagaagcatatccctgcaattgagaaaactacttaccattgaagcatttgcaatagacacctcttgatccccacattggctttgtttcagattagagtcaaacggataacatagaggaggcataggaggtccagactgattgtagtaataaggagcaccttctgagggatttgcatttgcataggtatagacaaatcgattgacaacatttacaataccattgatagtttgtttactctggatgagagtctgattagttgttctttgatcaacgcatggaagaatgttggtaagagctgtttctgcatggggattttcaacccattcttccatggccatacaagtgtcggaaattgcactaaaagatgttaagagcacatatgctgcgttagataattcatgatgaagatatgaaaaacaaaaatacattaatcatcaagttgagaaacatgagcagaaggaaaaattagaatacaagggaagcctcaaatttctaacagagagaatggcagattactggaactttcaacagtttaaggtatgcattatgaatttttctgaacatcgcatgcgaagggaagttaaaaatttaaggatggtcatgtgtatcaattaacatgcatgtaatcaagtctccagtacacaataacgattgtatgatgtccaataactaacaaaactcttacttgttgagtattacaaaaactccacaaagaatgaaagtaactgccacaagtagccatccactgattataaatctgaaacaataaaatgaaattgttagaacaagatatcaatctccccagaatatatagtaatacaaccacgaagagaatttcagttaaatttgcaaagaaacttacatgtggattgcatgttggtgtccaaggacagagaggactgcacaaaagaaacatcaatgagttggcatgaacagaaaatggtaaaaatcagtcaattagaaataaggtgattatcatttgttttaatacgtaccaagaccaatcaaggctaggacaagcattactgcagcaacagtaatcaaagctgaacgcctgagaaagaaaagaaaaagtcaaggttagcccattaaataagttagaaaagtgtttcaccagacagaacaccacaaagtcaagaacacctacacaagattgaagacttttttaattttcacagaattttcactcgtcttttcagtcagagtatctgctgcagtattcaattcaacattcaacttgtcaatatcttccataatatcagaaggaaggaaaacctgggccacgttgatatcctttgcaagggacaggtattgcgtgacatttctcaagatttgcactgtgtaatctgactgatttacaacatatttgagtgtatgcagaacttcaccatgaaattcatcctgcccaacagatagaaggatacatccaatcctgtgtggttaaaagtaaaatcgcagtcaattttcaagtcatttgtgattgaagcgtatggaaagaaagacccaatgaaacttcaaggaaagccagtgttttcaaagagttgtgataaaagttttcaaaataaaactttaatatttaagagaaagaaaattacgctgcaacacaggtgaagactagaagcaagataagagtgatcttttgtgaaagatgtgatccttcattcttgatgtttatcctccatccacagcaatgatgaataacaagaactaacccaaaggaaataaaccataggacagcaagaatgaaagcagctgagccagtaaatccaacagactgcgtagataaataatgttcaaggaatgatgagtgaaaaaaagaaagagatagtaattgtagatataatcctaaaattaagaaatgcttccgtaaatcttgagttaaactctagtcacataaaaagagaaagataaaatagagtgacaaataaaagcaattatcactttgaaattagctcatagattgtttaaactagcttgttacttctattcataatgtagcctgcatgtggttgttttcatacaaattttcctaaaatagatttagaggtatgaaatgttttgagaacaaattttgtggcacttgaca

SEQ ID NO: 50959 - DNA, 711 bp, Cannabis sativa
tatcacccatgataaaataatgatcaactggttttctatattttttttatgtaaaaaaaaatatgaaagccgtagtccatcgtgaccagcttcttctatgtggagttatcccctccataatatttcatatttggactaacaaaatatatatatctatatataatgcacaataacatctactctactcttatcaattcaatcacacctccatttttctttatatttctttgcagattcataggaatcaaggtcgatctccccctcctcttttggcattctgcaatccaataagaccaagcctcctgttgtccgtagataatcaccccattcagtccatcattgttgaacattgttacacaagagagctagctctttctccttcccactaaccttacaatgtcttctttctttctgttatgatgttccaatcgaccaactcgaccagattcatgcctgatctggttggcatccagaatggtgatgtaacgtcctaacaataaggcacgctaagacaacagattatgaaaccctaatcccctaaactgagattactagaaaggtaagtgcgggaaaatttaaactttattcgaaactaaataaaaattaaacctgttacaactttaaactttacaaccataaaacacatgttttgggatcccgtaaatattttcacaaaatattacaagttcattttacgagccgacctaagcg

SEQ ID NO: 50960 - DNA, 1146 bp, Cannabis sativa
  modified_base (1082)..(1090): a, c, t, g, unknown or other
atgtccactattgtacactataagagaaatatagataggaattatttttagaaaaatatatattaaatgaattatctctttataaaacattattcaaaaaaaaaaatctctttataaaacattaaaattaaactggagactcttaataataaaacacgtgtaaaaaaagataaagatgtatatatagtaaaattattttgtaaacctccagtaaaaaagtgaaacgtgtaaaaaaaattgtagaccataaatagagtctatcttagagaccctatgggctacggcaacattttcctatttataaagagatataattattagcggcggtatagcgaactttagcaattaataatatatattttagccgctaaaagttaaaactcatttttgttgcagttagagcatcttaaatggtgtattttttaaagatactctatatttctacatcatccaaaatataatattttattttattttttttccatattatttttgacacctttacttttaaaaactctccaataatataatacattttaaaaatactataattatgatatcacatattattatatatatatatgtttttttctttattaaactactatatatattgcacttttaatattttattgtataaaaaagacatagcatcaatgtcattgtgtggcatcaatgcaaatttgaagaataacattttttatctttaatagtatacataacatctctatattttatcacataagctttccacttcatcaagcattctccaaaatattaggaatcttagtggcatttactatagtctctacaattgacagcttatctattcatattttctttattggcttggctttactaaataaatgcatactctgattttgttttctaaaattgggagagaaagtatatataagtacaataatattgagaaatgttaaggtcacaccttaactaagtgccaataggtcctccacatatttaaatgagaaatactaaagggtaccagtggtgtctagcatccttctatgtgtgaatatcgctcttggtctaattaagtatcggatctcatataatttaannnnnnnnnttttaaggagtatcactaaccaattacaacgtgacatgttaaaaaagtgctagcca

SEQ ID NO: 50961 - DNA, 1131 bp, Cannabis sativa
  modified_base (458)..(461): a, c, t, g, unknown or other
atatatatatatattattattatgagtgttcatccaattcaatctacactattttgctcatagtacatccaattcgtgcgaattttatattttgtatccaatctaatcagcacaatagcttaaatttagtccaattcaatcggcaaaagtatagattgaattgattattttgaattatttacttttcaatattaaattatttattatttattaaaagataattttatttaacataactaacaacaaaataaacaaactattgttattttatatgtctctaataataaattaaaataattaaaataaaaaaaataacaaattcaaatgaaaaaaaatttaattttgtttaaattgtatgtagacaagaaaaaattatatatatattttgatctattgaattttgaaatatatttttattatatgtattagatttttaaattactaatttttttacattnnnntagtaattgtatatataattttttaaaattttagtataaataggtgtggattggaaaacttttaaacaatcaacatccaattcgcataagtgtgaattttggattttctaatctgtacaagtgctgatatccgtactttgcggattggatcgtgcggattaaattagattgactattttatgaatatcctatatgttgttattaggtgtatctggcttgggaattactaattgcgaatgtttttggttgggtcgcccttccactattatatccgaggcttattttggaacaggtcaggttgagtctcattatgttattatgcgatccaaatatgatcagaccaccaaaaaaaaaaaaaaaactcttcatagagcaggcaaaatcttagcaggttgggatcgaatcgatttacatccatgtgaatataagtaaagttaaagcgatttaactttttcttgataaacctaaacggatcaagttaacatttttaagactaataaaactagaagagtattgttattagacactaacactattaaaaattaacttaccaataattaataaatttactgatattataaaattaaaatatataaaatctaatacttagttatataataagatatatgaaacccatataataccccagggccggccctgagggtaggta

SEQ ID NO: 50962 - DNA, 1780 bp, Cannabis sativa
  modified_base (86)..(93): a, c, t, g, unknown or other
agaccgtattttctgtaaataatattaaaaaaatcgtaaaaatatttaaaattccgtgaaactgtatttttataattttttttgtnnnnnnnntgtatttgtgaaataatctctaaattatattggtccaatattttgtatattcagtatattgatgaaagtttcacagaccaaaaatttggaaaataaaataaaaaaaatattttaacacgattttttttcatttttaccctttgaattttttatttacacaaatacctctttagtaaaaacagaacttttttttttagttattttatagtttatttataattgtattatagttttcattaggttcttttatagtttatttactgttgatttatagttgtcttgtcgtgaggttaattttttgttattttttagttatttttcactttttgttaagagatgtatttttgtacttttaaaactttaaaagagtatttttataaataaaaactttaagttgaagaattataaataaaaaatatatataaaaagatattttttaaaatttcctagattttactttttatttcattaaataactattttgtttaattatgataaaagtaaaataacaaagccaattagacttttatttaagggtaaatattattttagactctctattttgttaaatgacaaagtgaaccctgtattttctaaaatagtacaaatgggaccttgaactgattttttgtcaaaataaaactaaataatctgacctagaagtgttatgacaaaactggttaaattttttacatttgtttatgttaataattgtctttaagttggttatattaaaaaaaattgtcgaaaattgcgctcagtgtcctatttgtactattttaaaaaatacaagattgattttctcatttaacaaaacagatggtaaaatctgtaacttttacaaaacacaaaatccaaaatagtatttactctttatttaaaattagaaaatgttcaaatccatcaaaagaaattcagccgcgaaaaatagaaacgaatagcttaaaagcctatatataaagagatgtaagttgactcactcctgtactcaagaaaattacattgtatacctattttagtttatctgttttaatttttatttttattttcatattttttaagatatacttacttttattgatgatattcctattataggtaaatatatataaattatgtgctagatttaagtagaaagtgaatgtatattggacaaccaactcccagaaatgggtatattttaataaaatataatatcaaaatatttttaattaatggataccaaaaaaaataaaatattactcaacttatcccctatgctttcttataattatatatgaaatttcatattttaagataccaacttttgttttcaaaaaaaaaaaaaaaaacagaaaaccaattttttttttttgaatgagattaccaacttttatttaattaaattcaaaattaaaaagttggtactgtaattttgtaggtacaaaaagaaattctatacctacagaaatacacatagtggtttatcaaataataactcttgttatttatcataaaaacaataaccttgtttgataaatctcagtacttgaagaaaaaaaaatattcatataattagtaattgaaaccgaaataataaatcaaaacttttacttatattatttagctatatatatataatctaacccaaattgccatttccgaaacaaaataaatctctagcaaaaatttctgaaacaaccttgtt

SEQ ID NO: 50963 - DNA, 744 bp, Cannabis sativa
acacctagtcctccaagaagctggctcaccttctttagcctccaagcaggtggtttgcctacctcggaccttgtaggtggctcgctcacctagccctccaaggaggtggcttgcattccttagcctcaaagaaggtggtttgcccaccttggactccttgaaggtggctcacccacctagccctccaaggaggtgtctcctgttggtctgaacactgtaaatatttcaaacacaaggggaaaatggtgaggaagtatgcgtatttaagaacgagccagaagatacaaccatacttcctacaaaacttgaggaagtgtagtaaacatacatgaggcacatacgagacaagtagtggaggcgtgctctccgcatgttaatatgacctgacactcgaccaccactacctccactccactaccaactgaatctgccacttgacaccatcagagtagtagatggtcctcataagtaccgcataaatatcaacttgtaaatttctaccaatagagctccccctctataaatacccttctcttccattggtcatcattatgatataaatcaaatctttatagtcaacgacatgtttgataaaaatagcttaattacatatcagtccttgtcatatataatctctactatatacaacacattcacttagatgtcatgctacatcagtaatccgaatcaagattacttctaccgaataacaagcatcaacaaatcgcactatcaaccattaat

SEQ ID NO: 50964 - DNA, 751 bp, Cannabis sativa
gtaaaatacaatttattttttgtcttcacctaaatttactcatcagggggaggatgatgatttgttggtatattctatcacatgttctacgcctgacatatgttttgacgagtttcttattcctccatctgtcttggtcacagctcctaacatgtctacacctcctccaccttttccgcctcctattaaagtgtacttcaggtgtccgccccctctgtctcctctacaacttgttcatgtcttgcacctgcttcttcatcatcagatccggatcccagggatgatctttccattgcattacataaaggcaaacgcaaatgtacctatcctatttcttcttttgtttctataatcatttgtcctcatcttcttgctccttcattaattctcttgattctatttcgatacgtaaacctattcgtgaagctctatctcatcttggttggcttgctgccatgatagaagagatgaatgttttagatgcgaatggcacttgagacttggttgttttaccttcaagaaaacgggtcatagggtgcaaatgggtattaatctagatggaacagttgctcgattaaaggtttgtcttgttgccaagggttatgttcaaacctatggagtcgactattgtgatactttttctcctgctaaattgacaatatgttcgactttttatttccatttgcagctactcatcattgacctttatataaacttgatattaaaaatgttttcttcatggagatcttca

SEQ ID NO: 50965 - DNA, 2303 bp, Cannabis sativa
ctctttctctcttcatcttcttcttctttattctcatctactttatataattttatattattttataacagtattagcaaaaatgactctatataaactcgtttttaatacctctactgaagcattgtcctatagcttaaaatggcatttcaaactttaatatttttgatactcaacatatctgatcttatcatttataataaaagataaaaatcaaatttaaccaaatttaaaatatagtacattaattttcaagttcaaaaaaatataaatatttaaatttaacttttattaattaaaaataaaaaaaataactaaattcattctatttttactattttaaacttaatatatggaaactgcacaaaaaattaataaagtgtgacttttgaatcaataaaaaaggatagaattcaagatatgaaaaaaaaaaacgagaaactatacaagaaacgcatgcatgccacgcgcggcacacatggaccatgtgcccattcccgcgcacatcaccctacaacaatcgagttttctcggcatcctttgcacccgagtgacgatggcaaccatgccatcaaaacttcaaacttccataatttttttcattttttattgaaatcaagttttctaaaaaacaaacttgcataatttttcaccaattttcattctaaagtaattttagaaccaaatacaaattatttttaatagaaaaacttgtaattatcacaatcattcatcaagacatataatacaaacatgaattatctaaatctcacataaaacacacaaaattgttttaaattcatattttataaataataaatattaccatggctctaataccaattgttagaaacttgttttatcaggatcttatttactattcatgtatgttaaattaaggctaatcaaacatcctaacatggataccctaaaacaataaaataaacacataagaaatttaagaaaacattacattgattgtaacgaaataaattgtctccttccgttcaactctctaactcttgtttctttctgtcacagagtattaccaagaattaaacctggatcttttttcttcaattgtgttcatcacagtctttcacaaaggcctgagtatcaacttgaataatgtgggttgattctcaaaaccccttagaaaaatattgagaaagaatttagcatagtaaattttgaattagaagaaagaagagaagagaatcgtctcacattgaattttgtgagactagagttatgaaacttaggttaattctctcttctcatcactttctttgtataggcttcacttagggttagatttagataagatgagcttaaaataaagacttgggctgaatctaatcctctaggccgaaatacatatgattttagagttaaatttctaccactttatttcaactaataaaactaaagtgtcttttctaattttagcacttatctcatctaattatttaaataccaattttattttaataattataaattattatcaaataaaatacaattttattatttttattaattagacctgcaaagagtactaattaacaaataaacttttatttctcttttcttctcaaaattgtccaaatttggtcaaaattatcaaataagacatagtctattttaaaattctaattgacttgttaaactaattaattgagtctacaagatgatgttatcctagacaatgtggggaccatgggcctatgtaaccaagctcctaataagcagatcttaaaatttatcaagtaaattttttagcttattaattcctcctgactccactatagattcaaaattgcacttttgattacataaaacactctatacaccaagtatggataccctatgaatctatcgattgtttcaatcataacgatcattgatcatctatagacggtctatattgagtagggaaaaaattaccattttacccttcaatagattttatgcttaaaatacatagctacttgtaagtgatattttagaaaactaatataattattgaaatgagctctctatcatttatcgcgttaagccaagctcttagaaaactattgtctcacttctaataaatatagaagctataaatgttcatatctatgattaacactctcactcaattgcactaccgagttcttaagatgtaagtatgggctattcccgcaggtaagcaagtaacgaacaagtcaaagaaccgtgcaatatacatttaagctagagcttaaccatctcaggattgagattaaataatctatgattaactaagtaatattgactta

SEQ ID NO: 50966 - DNA, 551 bp, Cannabis sativa
tggcaaaagccttttgttcaggttgaaatcttggatgaaagtgatcagcttattcagtgtaagattagagtggtgggactgaattcagattttattcttactgcgatttatggtaagaacacaattacaaaaagaaaagatttatggggcaaacttggtggctttaagcatattcagctttcgtggctggttttacgggactttaatgccatgttcaacataaaagatagaactgggggtagagaggtgacccttgctagaatctttgatgcccgaaattggctctcgttgggtcaggtggatgctttaaaatgtacgggaaccaattacacttggtcaaataagcatgaacaaggagttagagtttattctaaacttgacagggttttaaaaatgagagctggttggacctcttccctgccactgagagtgtgtttaactgggaaacttactaagaccatagctattatgttatcaaaaagttggagataggaaaattcggcaccaaacctttcaaattctttaatttttggatggaccattccaaatat

SEQ ID NO: 50967 - DNA, 1115 bp, Cannabis sativa
agttggctgggctgctctgaaactagatatggaaaaagcttttgacaaagttgaatgggcttacattgagcacatcctccatcattttggcttcccctaccctttcatttctctaattctaaattgtctctccactgtttcttttcgacttcgcattaataatactctttctcatcagtttttccttctcgcggtatccgtcaaggtgaccccctctcaccttatctttttctccttcttgctgaaggcctttctgggattattaatgccaaggaaaattctcactctttccacggaatatccatatcccgctctgctccgtctatttctcatctcctcttcgcagatgacagtctgctcttcacccgggtttctccctcttcctctactgaaatcaaggatattctttccatttatcgccacgccactggacaatcagttaatttcaataaatcctccatccttttctcccctaataccacttcctctggcctctgattgccacatattcagaaacactctcaacttggacaacaagcctttcattgacaaatacctgagcgtccctcagtgtttttctagaccaaaaacctcctctttccagtgtctgctttaaaaagctagctccaaactatctgtctggaaccaaaatcttttctctaaagctggcaaagagattctcttaaagtcggttattcaagctatcccctcttacgctatgtcctgcttccgtctccctgtttccctttgcaagcacttcagcagactaatgtctaaattctggtggggctccctcggccacagtaacaagattcactggaaaaaatgggacaacctctgcacttccaagttttttgggggtttgggctttcgtaatattatccattttaaccaagccatgcttgccaaacaagcatggcgtattttcacctctcctgattccttagtcgctcaactcctcaaagccaagtatttcaagcgaaacgatttcttgcacgccgctattggtcactccccatctttctgttggcgtagtattctttggggtcgggaacttctgataaaaggcctcatttggaaaattggagacggtacctcggtaaatattactgaat

SEQ ID NO: 50968 - DNA, 1341 bp, Cannabis sativa
  modified_base (735)..(735): a, c, t, g, unknown or other
  modified_base (810)..(818): a, c, t, g, unknown or other
ttattttgtccaaaaagatattatacttaagaaatcttataagtgataatattgactgtttgtgactattaaagttatttggtaattgtagatatattgtttactaacattttgtcataaaatatacctggcaaaagtgtagtattatggtcaaatattaccatacttgttttaattgaattctatttattatttctgcacattttagttaaataaataatataaaaaatcgctaattatattggggtcataaggtacttcatagcaatacttttttaagtaaaaactcttgcattattgataggattaagataagctccacatgttggactcctagccaatgcatttttctctaattctttgtctttggttcacgctctaaatactaattttgtgtatcttaatgagctaggtattttgtttaatttacaacattaaagctcttctaataattgtacatttaatattaatattgctcattaattgattaagcatgtttttagaataaataataatttttttagatgaaagtactctctaatcaaataacagtgatcatgacaacaataaaagatatgtaatataaggatatttccggccatactacactattgcaagtctatgcaaatataattggcactaattccatatatgtatgtcttaaattaacactacaaaagactgttacttttagtgataactttttagttataacataaattttttgtgattaantgtgacttttagtcacaacaaaacatagcatttagacataagttgccactaaatttagttttagtcacaacaaannnnnnnnntaaaaatacatttagtcactacaaattgtaacttttgtgacaatatctttagccacggaccttttagttacgacatacgaataatattttataattaattataatttttttttacttttagtcataaattttgttatgactaaaaataagattttttgtagtgtaacatatagttgaattttgcctatatggatcggattgggattgtaagattatatatcaaccactaccatatttttatcaaaagttaaaataatatataataataaaaaggggcaaagccttttctttccttataaaaaaaaaaaagaaatatttatacaataaaacttagtgattggtgtaatttaatattagattttgtcgttatattttaattaagtattattgtttttgaaaacgaatctaatcagtactcattaaagaaaactctatcaagtttagagtagattctatccccaacttcatgtttatttgtttaagtatagaagggccctgagcatttgaattcttccaattggcc

SEQ ID NO: 50969 - DNA, 843 bp, Cannabis sativa
aacgcatttttgtttttcaaaagcaaaatttttaaaaacaattttatttttattttgtaattaaaaaattaattaagacttttttttttttcctgttaaaatgaattttattaattgggtggtagtggtactggattatgttgacatgaaaagcgataaaaaagaaattaagactctaattaattatttaatgaatttgacatgggagaaaagagtttataaaaacaatctttatttaggtgtcaaaaaacttccccataaataaagtctccaatagccaaataaaataagaaaaaattaaattgatgattacatattaaagaaaagaaaagaaaagaggtattgtcaatcagtgattgcactatataaatatatatcataatcagaacatattccctcttcactgtcgccggccgccataccaaaacccaaaccccctaacaaataaaagtctatctatgtatctatctatatatgtctttttttcaatttattacaagaaatgatatacttaagacgatttaatatggtacattttaatttaataaataacataaaaaaaattaataatcaatcataacacaccaatataataagtatcttaaagtgtttaaatatacacattctaaaatattttttatttttatttttctctctcatttatacaagatttatcactacattcttaaaaaaaaaaaaaaactccgacaactctaaaaattatccactataattttccatcacattaaattaatgatttttttaagtaaaaataacttttttataaaaaaattacaaaaaaaaaatatgtaaccattatctattgaacaacactacataaaa

SEQ ID NO: 50970 - DNA, 1615 bp, Cannabis sativa
agaaataaaataaaagaatcaacattaaaataatgagaaaaatatattttttaagataataattaattaattgaaattaatattaattatatagaagatatattgtgaaatttcgcctattaaaattataattagtattttttattataagaaaatagttaagggagtcaataatatattttaaacaataaaaaaaaaattcttaattatatcaacctccctaataataagtatttgaaaatttatgagtatgctaagagcaacctcatcagatgagtataatagctcatttttaaaaaaaattaaaaaatataagaaataaaaactatatctgatagatgatatatttttatatattaaaaatgactattaatgataatttttggcttatcgattgttgtttatttttttaacattttaaattataaacgtcgttaattattatctttttaaaaaaataaaaaagttcaaaacaaccccaaatcaaatcaaaataataatgtcaaattgattttttgagcaaattgctttttagaaaaaggaaaagaaatttgaagatgttgaaatgagatttgagttccaatattataactgatttatgttgaaatcgattctcatgatagaaaaagcagagagaacaaagtatccatttaaaacccaccatagtcccctattccaaagctattaaaatcgattctgaaatgggtaaaaattttgggaacgacgtatatgagtacgaggagagagagcatgaggaagaatccaagaagaatcgctagttcgaacaggtggaaaactttgattattaactaacacatgactttgaagtttgctctttactgtttatgtttcaaattcgaataaaagtggacttgattagatgcactaagcatatattcttatggtaaatgtcgttgttgtttgatttagtatgaaccctatacacctgagcctccttgtcatacccgaaattgtttatgtgccagaagctaacacgtgtcctacagaaagaatatgaatcaactcaaggaatataataatgacattatatcattaaatgcaattcaaataacctgttccaattaaatacaagtttgatagaaatattcaaactcactgactacttagtcttatgggagacaagaataataactattgaactagaattgacgagacatatgtctacctcgggataataagagaaaatatacgagacgaagatatccaaatattttgtgaatcattgactctcccacacgagcagggtgaagataacaacactcaaccgcctcaccttttacacaacaaagtagtcatctcgcaatatcaatactgtaacgccctaatgttaaggcatgctacaataatttttcaattacagtgctatctttgctaatcaaagaacttactcaaaaatcgtgtcaaactaaaacttttatattaaatattaaattttataactttacaaaactatttacaagtttcgggatctcgtttttaaacttttatacaaaatacacaaaatagtagggttgtacaaaaacaattgtaaaccgcccaaaccgaaccgaaaaaaccgataaaaattacacactgagataactacaaaaaatta

SEQ ID NO: 50971 - DNA, 1054 bp, Cannabis sativa
tcattctcatttttaatgctaattcataaatttatttgtcaaactattttttcaattccaatcaaacatttaattttataatcttatataattctatgcaattaattttttaggtttccattaaaatattattaatttttaattatacttttttttagacccaaattttaatattcgaacaagacctttaaaatatttaagacggtcctgataacaatatgctttttatatatatatatatatatatttatacagtagcggatccacaatttaaattgaaaggagcgacacttttttttgtaagtgagggggcacgcaaatttatattttagtattaaaagttgtataaagtaaaaaattgtaacaataaaaatattgggtttgataattaacaaactaaatataaatcttaagttcaaaatgtaaaatacaaatactataataaatatacttctattggaattagaactcatgacctttactatatgcatgaaatagctttaccatcatgtcaaacttgcattatgttcataaatataactttcatttataaatatatgttgtaactagctaaaatgcatatacatatatttccttatttaatttttttaaggggggcgactgccccacctcgcctctacgtgatatttaacaattgaactcattagaaaagaaatctgatttataataggatatagttataatattgaaaaaatataaaaaaaaaaattacaaaaatataattgtacagcataattttacgatttaaaagtttttttttttgccaaaaatacagactattaatattttcatgtaattttttgttgtaatttttttttttattttcttattatttgtatgttattttttagttattttcatattatcaaacaaacttatgaaaaaaattataactttgaaaaaaaaaatttatttgacggtagaaatattaaaaaaaattcaaaataatatatttttatatatatatttccctcgagaagctactaaaactatctccaatttatgggctaaaaaatatgttaaatttggcata

SEQ ID NO: 50972 - DNA, 1660 bp, Cannabis sativa
  modified_base (1378)..(1378): a, c, t, g, unknown or other
cggatccgagctggtcaggagcggagctgaacagatcagggcccctgccccacctctagtgctgcatctggagactaagagtggcaaagacatgcttgcccactacgtgactcggttagtacatgaggtgaatgagtagctagccggagctgataatgagctttccctggagctggtgatgggaggagtcctaaaggagttcacaagggtaggtcttcattgatagttttcttttatccttctttactcaactcagattctattgttttttctctgtgaagacgggtctgaagatggcttatgcttattcccgggctaagtcggctgcttctaagaatgctgtcgtgtccaacaccatgagggcagaagtggacttggctgggaaagatggtgatgaagccagggttcaacttggagccatccgcctcgagatgggtgaagtcaacaaaaaacttcttgctgtcgagaacaaagtagccgagctgacttaggacctcgaggcttctgaccaacttgaagctaccatcgcctccttgtcaatagaagtgaacaatctccaagaagaaagggaggttctttgggctgtcttctgtaggttggaagcagagaagaagtctaaggaggaggagcttaaagctgaggtcgagaagtacaagtcagaggctgaacagcagagagcagaggctgagcagcagagagcgaaggtgatgaggattggagagaaggtaaatgccttagagacagcgggtctcgagattttttatgacttctggaaagctaatgccaagaaaaattttgattacttaggcgattccaaagacatgtttctcgagtattgtgcttctcaggtggcctatggagaattcgaggcgaccagttctgcctctggccaggacgttggcgtgccccccacccagaaaacaaatcctcctgctcctaccgacctagaagacccgtacaaagagcctggcactccagctgtctaaatacttctccttttatctttttcttttttttttaatatctgtccggccagaaggccttttttaagacaaagtgacttgccaagcgttctttaaacttggaattatttttcatttttcagataacaggctgaccgggcatcctttaatcccggttttacgtgcttttgttatctttaatgaatttcattctctatttgctttgtacaggtataggtgccccgcaagtgaccgagcagacttatgactcttggtgacttatagttttttgcaagtatgctcttttgtctgttcggggttcggggtttgaccaaaccttttgtacgcactagatggtaaagtaagaacatgctagagaattcgacttaacttgaattttgaaataaacatctttnttcatttattgatcgaaaatgtgtttgttaccgtagtagcttacatcaaccctatttgatctaatctgatcttttagtttaacatgaaataaaacaaattgtagaaattagaaattgtactttatatggtggtcacccgacctgagtactattcaattttcttcgaaccttttggtgtggtctgcccagaaggccattcacttaaaagtaaatgttctttttgtttagtacttgatatggtcatccaacctggtacttatatttgtagtattttcttaaatg

SEQ ID NO: 50973 - DNA, 897 bp, Cannabis sativa
  modified_base (688)..(691): a, c, t, g, unknown or other
tactcttcaaatcttggtgtgtattcatcataataccatcttgcttctcttaaataagatttgcaaagatctgcccactaaaacataaccaaaacaaaaaatcatcgtaagactatgtacagaataaaatagaaataccatcataaacatataaaataacatttttttttacatttttacgaatttattgttattttttttttatatatttttatggattttgtattttttagcaaaaatacaagtgttgattttttgttgttttttttaaaaaatattgtttgatattgctgttatgaaaaaaataacatgatttgtttttacaactatgttgtttttccgttgttttagaacagtgttattttgacattcttgctacaggaaagtaacgttaaaaaataatattatttttgggaaaaagaactgtaaaatattcataaaaatataaaaaaaaattgtaaaaatgtaaaaaagtattgtttttaaatatattgtgtaaatttttcaataaaataactatgttaatataaagtgaaaattacaacttatatggatttttacacaatttgtaaaaataaatatgacatttttttcaaagaaaaagttattgggagttttccactatatatactgaaatttctagcttttttactatttttattttatggtagaatttttttcaaaaatnnnntgtactgtgttaagtttttattgttgttccacggatattttttagttattctactgttgttttaattgttatattttgttattttacggttgttttataaaaagacagtatgtttgtaaaaaaaatatttgatagtaaaagtgtaaacttttgcctaaaattcagtatttttgtaaaaacttcattaaaatattaacatttagagt

SEQ ID NO: 50974 - DNA, 1272 bp, Cannabis sativa
  modified_base (364)..(370): a, c, t, g, unknown or other
aaatgcttttacatggtgcaatgggaggacatccaatttgatttatgagaagcttgaccgtgtgctttgtaactcagcttggctggataattttaaatctaacaagaccactctcctcaaatggtggaactcggatcatagaccgattttattggaagctcatcaaggtgttaaagggagttcgtttggaagaaaatgggggtcttgattccattatgagcatgcttgggcggataatgaagattgcctcaaaattattaatgaagtttggggggttaaagagaatgggaggcctcttgatactcttactcatttaatttccaattgtggaaggagataacatgagtggaatatcactcaaaannnnnnnatctttgctagatccaaggagttaaaaggaaaaattgattggctttccaaatcgtcaaatatgacggattggttagtccgtcaaaagttggaaaaggatcttaatggtgtggaaaaaaaaaagggagatgtattggagacaaaggagtcgggcgctttggttaaaacatggtgatcgaaatactaaatttttccatttcaaagcttctgctagacggaaaaaaaatacaattttggggctgttcaatgatagtgggaagtggtgcactgctgatgatgatatagccgatgtggctattaattacttccagaaatttattctcgtcttcaaatggtgaagttgatgtcaaagctggccttcgtggaagaatcccttgccgaattagtgatgctgaaaacagtgcactcctggagccgttcactagtgaagaaattcagtccacattattccaagttcaccctttaaaggccccggggaaggatggtctgtcgggtctgtttttccacaaaaattgggacttaattaagtctgaactcactgctgcctgcctagatatcttgaaccataactcggattgcagaaaaataaatgagactcttatttgcctcattccaaaggtgaaacaaccgactaagatgtcggaattccgccctattagcctttgtaatgtggtttataaggtggtttctaaatgccttgccaatcgtatgaaactaagtatgaattcagcaatctcagaaaaccaaagtgccttcattggtggaagaatcattcaagataatgccatccttggatttgaaagtcttcattgcatgaggaaatgtcggtttgggaatgggagaaagatggctttcaaacttgatatgtctaaggcgtacgatagagtagaatgggatttcttg

SEQ ID NO: 50975 - DNA, 1677 bp, Cannabis sativa
ctattttaattagatatatatcacatatatttataataaaaactaatatttataaatataatattaactttaatacaacattgaagttggattgtagatataatatagattaatctcatgagagattttttttttcaactttactctttttttctgcctacaaaaaaaaaaaattatcctcatagctcttgtatctctatgctttaagggataattcaagttttatttagaggagtatatttattatctaatgaaagtagaagctcgacgctttgttgggtatatggggttactattaatattttatttcttcgtgatccttagctaccggacatgcatggagaatccatatgtggcttcttattcgttttgtttagatatttttaccgacgtctctaatcttatggttgttgatagtagggaatgggttgtggatctaaattaatgatatttttgagcctatatatagctagggaacatgagttgatcttgactcttgagtattcatttgcattattattctgctcaagatgatgattggttttggaatcatgatgcatgttacttgcttacaatacaatatttggtattgacttgtattaattgattgtgtaaagttataatatatttttaatacactcgctcctaacactaactacgggtcccgggtccgaggtctgggatctgggttcggggtccaggtctaagttccgggtgcgggttggagattggtgctgactctaaattctttgtaaatattataatacaagctaatacggaccatttattattatgtattaaataatataacatatattgtattaaaaaatttggtcgtaataattgaatgatcttatcaatacaagcaaagaagaaaacagagaaatgaaaaggttgagcttgcaaaagatacaagactcaaagaaggaacttgtatttatagaagaagtgatacaggggtacaaaaggaaaaaatcagagttaactactctgtaacagaattaggaaaatacaagaacctaactaattgtttgttgaagacttgctttatcatcccccctcaaacgaaaaggtgtaatagacacattgagtttggttttgaggtaagaaaatctgtctttgctgagagatttggtgagaatgtccgcagcttggtcaagagatggaacgtatctcacttcaagttccttggcaataagttgatccctaacaaagtgtagatcaatttctatgtgcttcgacctcgcatgaaacacggggttggcggcaagagaggcagccccttgattgtcaacccatatgataggaggtgcgggtaacaatacatgaatttcagatagaacagagcgcagccaccggatctcagctgctgtgttggctaaggatcgaaattcactctcggtactgctccgagcaacaacattttgtttctttgcagaccaggagataagatttccgccaaagaaaacagcatagccacctgtggacttcctatcatcgggacagctagcccaatcagcatccgagtatgcgtgaagagacatatgcaagcttggtcgaatatgcaaaccctcatacatagtacctttcaagtatctgagtaacctcttgcaagcttcccaatgaatatttgtaggggcatgaatgaattggctgagtttattgacgatgaaagca

SEQ ID NO: 50976 - DNA, 1093 bp, Cannabis sativa
gcaatacaaaattttgtagtttatatgaattatataatgatagaaaataaaatttaaagtttaaaattttaatttttttggctgaagtatgagacctgtggacacactttttttttacattatttttgacactatttattaacggttagatcaaataaaatccctaaaattaatggatcacaaataaacttaattaaaaagatataaaatcttaaaaggaaaaatacacactcctctcaaggaacacctcatttgcatctgcatttaattcgaacaaacaatttacataattttagttcttcgtaaaagctaatttgtattggttttcctaattgttttcagtcttagattttggccagttttacaatgaatttttacaattttcttatcattttgtagtcatgttttctccttcaaatcaaactacatttatcctaattttgtacctcaaaaactaatcaattacacttaatatataattgggcattatcttattattgcaattttaatgttcattaagaattgggattatattcattttgagacaaattcaatatatcatggaaacggtggtggtggtggaattggaatctcaaaatcgtgtcaaacacaaatcaagatcaaatctcctgtttgatttcacgaccatatttgaattgggaccaattttattcccaaaatgcttgaagttgagaatcggatatacttatatttctcgtcctcaatttgaacagaaaaattaatcgaattcaactctcttgttatctctctcggcaaatccattcgattgctactcatatcttcctcgcttaatttttccaagcactaaaacggctaatttccatgattttgatgattttgttcaggttctttgaggtaggggatcaggattgatgagaaatctgttattgatgttattttattggattttcagaggagtgtgcgttaagagggagaaataatgttttccttttctaggttttatttatctttttaattaagtttaggaaaattctacaatacacccccttacaatggatatattgatgtacccctatctgtcttagcatccgaaataattttttagtcaatt

SEQ ID NO: 50977 - DNA, 3143 bp, Cannabis sativa
tgcgcttgtaaacctgttgaccataataattttcagtgttgattaataatgccacaataggaaattatgtacagcttaacagcttgtattaaacaaataagaggggagattttaaattgcacaaatagcaagaagggcacaccaaatacataaatcatacctcttgtaaagaaatttcagagctttcagattcctttgacaatgagagcaatttcattctcattaagtcatatatatgcaatagatagtgcgtatcttctctagcatatctgtcattccataaaagcatattagacaaccatggaggttgaaaaacttgtacacagttttctataacaggaaacatgtttgatgcttatgtaaaataaacattaataataactacttaaagcatataaagaatttgcagttctacctaagcatctccttaggaagtggccgcaatctccaatctgcattttgatatctgcaaagagttgagagatcaaccttacagattttgaggacaagaaataacacaagaaaggatgatgcagcaaaagtggcaatataaatatatattaaacgaaaattgtaaagacattaatatcagtaaggcaaaaaaaactgactctttattagcagttactccacaaaagtggtgtagaagatattccagactatttctctccaatttcagtatcctcgaggcctgaggcaaaggaaaagagaaaaacaatttcagtaacagcaaagctcagaactgctaattaaaaggaaaatcgttataaccttgttctataattactgcttacgtatggtaataagctatcatcagaatattaactgaccaaatttgaggcattataagaataccaaaatgttaggctaagataccagtgacaataggaaactacttctccatgtatagaaaaattatacagattaatcaattgaaaaaacaactgaaattaactcaaaaccagtaaattttatggtataatacctggccagtgtcaaacatattgcagatgtaaatgccgaaatctctttgaagccaaaaaatatcacgatctgctccatgcatcacctaattcagcatacatataatcataaattctggtgttctttaatgagtagagaaaagtaggtgtcaggaaatcaacctttctttttgttgggtccttgaaagcttctctaagatatgggccaatacgcgttcggagcttcagagcatctattacaaaatcttcggttctcgttgatatttgtatcaaacaggtcaatccttggaatgaacgatattgattatgttccaaatcaacctagataggaaaaatcaaagttaaaaagtgccacatgagcataattctttttttcttttcatttgatgatggagagaggctttggtttgtcaaaagtagaaaattgatggtaaacatctaagatcacaacaagaaagctaatgcccacttcagcaaaatcattgttgttgtgatcaaagaaaatgtaagaaacaatatcgagtttcgtgatacaccatgtgcagaaatgcttacacattggcagaggtttctcaataaaaaatttaagtatgagtttcataatatacatttcaaatccatttctttcaaagaatccaattcaagaaactaatcatccacaaagtaaaagcaaaaacaaacaacaactttagaaatagcttaccgcaaattcatttacaccactcagcttaatagctaggttcttcaaatctattacttcatctacaaacgtgaatggtgtagtctcaactggacttggctttaccggctcaatatgcagaacatcactatctttatcaacaaaatccataaaagaaaacttcttctgcaataacccattaaagaaaaaaaaaaaaaaaaaaacactaccaatcataaacaaaaacaaagaatcaagcttaaatgaacttaaagaaaaccaaagattactcaccagaggatgaacatactttccatcctcactcttgtccaaccaaacatgctcaaacgcttggttattattattaacaaagatattaaactcctgttgaggtctcgtaatcgaaggtatatgaaacggaatcttcggcttcgaaccaacagtggttttcttatccttagtcgcaaccgtaatcgaagaattagaatcttgaaacccactcggcaactgatttgcccccttctttttcttcccacataccaactgaaacccatcattatcatcaacaaccgaagaactcgcattcataaccttcccagcagcctcctcactattcctattcctctgaaattcatcaatcgacatatcaaccctctcgaaaatctcgtcgttagcattatttaaccaatccatagcctcatccatatctacaggaaaaggcatatgtttgttccacatacgcgacgaagaagaaccaactgattcgagcaaagactgtgatttattatcgatttcttgaattggagctcggaaatcatcgaagttgttgtaaaaatagaagtctttgttcgacggaattcctcgcgatgagcctgaaagtttggatagagacgatgctaatggacctttggttagagtatatagggattgagccttgttgggtgagtattgatcgacgttcatggcgtcttcggccatggtgatcgaaaaagttttgatttttttttttctgttaatttcagtaagggttttagggttagggtttaagagtgatcaatttgggattggcttttttcacacacttgacacgtgtgaacatttctttcgaaactgaaaacggtaaaagctgttaccacttaccacttttgtttcatgacttttattatttttgctaagtgggacacttacaatcttttattttgccataatagccctgtattttacaagaatttataagaatcacgtccattttatacgtaaaatgaaaattaatttcaaaattacttttataaatattaacattataataatatcttgtcacgcacgatgtaaaaaaataaataaattctaaattaacatattacgcacatagtattctaacgagcacgtttaactttagaattctcaaataataaaataaaatacacattgttaatataacttattagaaaataaaggggcgtgtaaaatgatcgcgaata

SEQ ID NO: 50978 - DNA, 898 bp, Cannabis sativa
cctggtttggcgtgcgggtagggaatgtttgccgactttaaaacagttgaggaagagaagagttgatgtgcaaaccctttgtcccatatgccaggatgcagaagaatcaattgaacatgctcttattctgtgtgcaagagcgaaacaagcctgggatcgggttggtattgggactggaaacgttgaaactggtgggtgcaatttcctggactggtgcattcagtcgttcgcgtttgctgatgcagaaaagaggaagctgctgccggttctctgctgggcgatttggagtgcaagaaacgagtttgtatggcaacaaaaaactgctactgctgctgctattttgtacacaacaacgggattccttgatcaatggagtaaagctcaaaattctcttatcgaaacgtcttggtcgggttattcgactagtgacggggctgagcaatgggttgttccgagtgaaaataaaatcaaggtaaacgttgatgctgcgttatttaatagtagtaacaagtttggttgtggatttgttgctagagatcaccacggcatgctagtccaagggaaaacactcttattcacaggttcggcttccccggagcttgccgaatcaattgggatacgggaagcgctgagttggataaagagtcatgggtggcaagatgctacgttggaaaccgattgtcttaccgtagttcaagcacttagaagctcaacagacatgatttccccatttggtcaagttattttggagagtaaaaagttgttatctgaattgaaaactgtttctgttttattcattaagcgatcagctaatatggtagctcataactgtgcaagagcttctatattatatcctggttgtactttcgatatggagtctgttccattcgacttgcta

SEQ ID NO: 50979 - DNA, 1723 bp, Cannabis sativa
gagacattatattttgttgccaccaatgtaaagttttctataactttatatgtgtttatttcattgttttagagaatttatatttagaatattagattatagttatataattaacatacatgttagttaatctagatattggtaaaataaatttcaacagtaacaaccctaaatatcttcttagaaaaaatcaacatactattcaaaatttatgttatttaaaaaaaaaatatatatttaataaaataaatatctaacaagataaaatggtaaataactgttatttttctaatctcataatttaatttaataaaatatattaaaataactaaattttgaaaaattgataaatatatggttagatttcaaaaatatctagattattttttaaattatattcatattttaatgtcaaataagtccattccatataattaattaaataaataaataaaataaaatatctaatcttataatttaatagaataataaataatcaaatttaaaaaataaccataacaacaaatttgtagaaaatatcaattttcaaattcaaagtcttctaatatttaaaattaattaaattataaacaattaatttaaatatgataattagttttcaaatttaaaaataaaattctacacaaaaatctaccaaaattcgaaattgtaattccatgaaaaatgacaaaatttgaaaaattaaaaaaaaaatggtgaaaatcaaacaatatgcattgcataatgtccatgcgcgtttaaaggggggttgccaaggaaataggctacttgcagcatcatttggagcgcaggggctcgttcatgttgtccaagaaaactcgaatatgtgtgtctaaaatggggattttgtctgagctggatgcgtaagcatctcattccgcgcatgcgtgaagggtggaccctagtcaaaattttcaaatcttcaaaatatcataactttttcaaatttaatcaaaatttagttatgtaaaaggttaatttacttaatttttaaccaattattcaaataaaataatatcaaatcaaaaattagattatttttatagaaaatttcgtaataacacaatcaatcatcaaaatcacataaaccaacacgaacacatccaaatcaaccaaatatcgttttaaattcatatttcatgaaaataaatcattaccatggctctaaggccagttgttggaaatattttaccagtatttagatttactaacatgtatgttcgattataattctataatctaacatcttagatatgaatgtcctaaaaataatgaattaaacacataaagttatagaaaatattagattaatggtagcagaataatatgactcattcctttcagatctctaacccttgatccattctattgcagagtatgatcaaaatttgaacctaatttctctttgcttagtgaagctcataaataagacataatcttattcagaattctaattgattaataaaatcaatcaattgagtctacaagataatattatctcaactagtgtggtgaccatgagcttatataatcaagctctcaataagtagttctagaatttactgaataaattctctatcttattaattcctcctcactccactatagattcggaattacactcttgataatatagaacactatataccaagtacatatacgatataaattatccattgtttcaattcaaataatcaatgat

SEQ ID NO: 50980 - DNA, 1480 bp, Cannabis sativa
tcccttttccatgtccagcaaaatgattgttggacatgaaaaggttttagggagttttctagtctaacattgttggactagaaatttttttttatcatgtccaacaatgttggactagaaaactagtagtggacatgatatatattttttgtattttttaaaattgggtttattctcacgtccaattgtattggactagaaaatattcttgggagttttctagtctagcataaatggacttgagtttaacttaaaaaaaaaaagaacaaaaaaaaaataaaaagattagaattgccaaaattaaaggtctttttttaaccaaaaaaaattaaaatccaattgatggtacataaattacagtattccattagaaaaataaagttattaaaagttattattattattattattattgataaattttctttctctcacaattgaaaacctacacaaaacctagcgaacatattatctttagtctcaaaataacatagtcgcaccaaaaacaaaaacaacacagccacaactcttcttagacccgatctccttccctcgttcgctccatcccaatcactctccatctctctttctctctcggcgtctcaagcatcggagtctctctcgggatgggtctcgaccgatggtagacctctttctcttatctctctctatttctgcagtgtgggagatgaaagctcattgttcttattttttttctctctcaataatgttcaggttgtcggcgtgcaggttctcagcaacctttgttggcgtttgtggcaagttctcggcaactacatcgatgaagctttaatctgggatctatgtaattttgatgcttagatctgagatattttctgttatgatttcttatcatatttgttataagattttgtagttttggtttttagatgtcctttgtttgaatctaaagcttgtatttttctttcttttcctttttgaatatgggattatattatggattactttgacattgttgttataatgttggattttgttatattaatttagtaattaaattattaccaaatttaattaagattatatatataaattttaaatttttagaaatttatatttattgattatttaaaatttaaaataatatatactttgtctattaatgttggactagaaatatttttagttcccgggctattatgtccaacaaaaaatagactcaaaagttttatctagtcaaactttgatggacttaaaatgaggtttttgtagtagtggcaaggccatgtcaaaagtaggcaagtacgccaaaaagtactttgtggaacaagacctttgcgaaattgtgtaccgcgagtttcagttgttaccgctctcttcaaacacacattccatccctactttggagatatgggatagaacgaatcacatcctttctttgtcgactgaacagagaaatattattcggttgaccaatgtacttcgagaggcatggctt

SEQ ID NO: 50981 - DNA, 1186 bp, Cannabis sativa
aagggagcccgctagaaagaaagaaactcaataaggtcacaagggtcatcgcctatccagattgccacttcatctaaccccaaagcccggtgcgccaacttgtcagcaagggagttggcaccacgattgacatgagagagccaagcagcaaggacgtgagacaaagtatccttgatttgacgtataagatctccaaaaatcgagatgtcttctttatgatgaaacaatgcgtcagtaatagctttgcagtctgtttctacctcatggaccagaaaatgttcatcgatgcaccagcgcaacgtagtgaggagagattttgcttcaagagtggggacagttcctcctccaatgtagggttgtgccagggctgcaactaccaaaccttcactatttctgataacaccaccaaaacttgcttttccattgaccttggagattgttgcgtccacattgagcttgagaagtcccgaagccggaggagaccaagttgtggtgaccaaagtatgactgggtcgggcagtaggtgctgaagccgtcagggaagaatgataatcagccagaaaacattgaggcaagttgaaaattgcatgagcttgatcataagcttaacttttcagagctttgttcctgttaaaccagataagccaagcagtgcaaagaaaaagctctacttctttgacattttaataaaatcttaataaatttagtataaaatcttaataaatttgacattttaatattccattagagttggacgtaaatttaaaaacaacttctattaaagttgccctaacttcttttttatatataaaaaaaaatccttactaactaattaataagtatattattataattattacagaaaaagtaaagggaaatttttaataatatacctatattataataaatttatggatattatgtgcatcatttaattgtgcggtataccgtttctggccataccaaaaattgaaagtaatacacgtgggacttgttgttgaactatattagaaaaccaccatcttctccggttcatgaaccattgccttcgacaactgactcattcttaaaaaaaatgaacaactattatgtgtattacacacccttagtaactcatatatatacctctaacacaatagaaaaaaaaaagacccaatattcccacaactgcaacacacaaaaaaca

SEQ ID NO: 50982 - DNA, 927 bp, Cannabis sativa
aaaataaaaaaaaaaatacttaaatatttaataaaccataaattaaaaagaaataacaaacaatatataaaatcataaaaatatcttcaaatcattccgaacttcaacctccatgtcttcactatcataatccttaggcaaatcttatacaacttcatctttttcaaattttgaacatcttccttcttaactttctcagctacttttttccttttagtttgcaaagcagatccacgactaccattagaggatccaccaactccagcagaacgactagaatcactaccttcttcatcctcatgtacatttttcatttttttcttattagtagctaattttatagaataggaagcagaaattgaagaacgaattttaactatttctttaggtatacagggataagaagactcaaaaatcaaacaataccaaaccaccaaaagaaccagaaactaaaatgatacactaaaaatacttttactcggtagcacacactaaaacttaaaataagttctagaatatctactaaagaagatgaaaccctaacccatacccataaactctgacaaagaaaacagagaaaatacaattaaaaatgattatttataacgaaaatttccctatttatgaccaaacctaaaaaccaactaatataacataattgaaatttttttatataacaaaaaggaaaatatgaaatgtaaccatttgtaatactgaataatcgattcatatttaaaaaaaaacctgcaaaaaaaatgggctcatgaacagttacacactctacatgcagtgagagatgtgatgcgtgacatcaacaaaagcaacacacgtctcagtcccatttttcaatatttttttgaaagaaaatgaattaaattaaaaataatatataaaacggtacaggttttaaacaaaaaaaaaaaaaaa

SEQ ID NO: 50983 - DNA, 800 bp, Cannabis sativa
aactcggacatttactgaactagaagacacatacatctatattctgtagtatgtaatcattcacagtgaaaaacctcaccagagatcataaagaaaagatggcatttaataaagctgttcttaaaacaatatctattactggggcagtatatagcatgtcagtaacaaaacattgcaactctctttaactaatctcagataccaaaaaaaggcatttttgttttttttgtcactttcccaaaagacctcattccaataaagatagtattcatccttatatatctaagattagttccattcctaaccaatgtgggagtttgtttgtacatccaacaatcctccccttaaaaaaaaaccatctaaacctgaatctctcgatttcaacactcaagatcccttgagtaagcggctctaacagcaagctttacctcctttgtttgtcaaatccgaggatacattcatggctaatttttagaatttggctctaatagcacttgtaagcaccatcaaacaccatctattattccatattgttcgcacatatactttaaaattatattccataaattccgtgacatgaattatttactctaaatatcaattcaaaaatcttcaccaaagtccctttcaatttgctatataaaaatgatttttattttcttttctaaattaagaaatgagaacctagattccaatttcaatcaatatatatatataaatatacattaacaaggcttagaaaaaaaaaaataagagagggaacagagcaatttgagtgagataagagatgaaaccttgaa

SEQ ID NO: 50984 - DNA, 1292 bp, Cannabis sativa
attttaataatttttattttaaataaaatttacatgtgtaataatatatttttttttaatcaaaattccctccaattcatattcttaaaaaaataaatcgatcaaaaaaaaaatttaaatattataacaaaataacattatataaaattctattaaaaaaagaaaaaaaaatgtataaaaatttgaaaaaaaaaattatgaaactaaaattaatacagaataagaaaagtaattcaaaaaaaaatattgagaatactttttaaaaattattttaaatttatattttaaaaatattgaaatgtaaatctacttacgactttgtaatatttttctagtcacttctctctttttgttctcttttttcttaaaagttcttaaaaattgctcctcaaatgatctaaaattgtaaccaaaatggaagattttaaaaaaaaaattagagattgagactcagaagttctctaatagcaaaatcaaagaacaatatgtaatttttttttttcttttgagaaagagatgtacaaaagctttttgtgtgctgttttttgactctgaagctcaacttttatttttcttttaagagaaaatataaatcaaaacccttacttttggatacaattgggtccttcgaggagcaagtttaagaaattttaaagagggaaggagaagaaaaagagaaaagtagccaaaagaataatagtatttttgacaaataattattaaaaaaataaaaaataatattaactatgaatatataaagaaacaataacatatattaaaaaaataattcaacctaaaaagattcatatcatatttgataataattatagcatgcaaatgcaattagtcaacaagcgttattttctgatgcatgatatttaatttcccaaatcctaatcatcgtattataattaatgatatgtataattgtacatattcaaataatagagcttaaaaggtagctagtcatataatatatatatatttatatgatattaatgttgaataactcaagtttgaaatattgattaaatcgttacctaattatgaaaaatatatctatattttattgtatttggtgaagaatacatgaacatagataaccttatatagacaaaaaaaaaaaaatgataaaatgatccgtgttgaatatcatcaccaacaagaaatttttataatagtacttaaaatactgatttaacgccccaatattttgctttattttacaaagtgttaattttgatgcattaactaaaaagatttaaagttgtttgaaaatacacagtgagttt

SEQ ID NO: 50985 - DNA, 1217 bp, Cannabis sativa
gtcgaacctctttaaaatcttgtgtgtcctttacatttattatcgtttcacacgtggcactcataagcaatgatcctagtcagattccgcgtcgattggctaaaaccacagtcaacactaattaactttactttttgtgtagttcaatgaacgtgtacaataaaattacaaaccgaccgacttgtaccattacatggataactcaggcatgtccacaacagtcagatgggatacaatgtgcatatacgtaatgaagttcattaaaaaattcatgactgaactaaatccaattcattgattacggaaaaggtaaatcaattattaagtaattttaagtattttaattactttatttcttttattttgataatttcaatgttactaatttaataatttctttcttttattttacatgccatcagcgggttcaacaccccatacacaaacagtcagattaattttttacgtgatcagtgggtagattacgtgaaagtaaaggtgatttgctaagaactatgagtatttttctcaaacattaaatattttttgattaagttttttacaaacattattattttcatgttcatatgaaattgtataaatctaaaaaattaatacagagaaaatatgtatgaaatttacctttttttttccaatgtaccgtcagaaaaaaaactatcggtgaagaatatatttttagattttaacccgtagctcatactataagctacggtttaaaattatagcctatatactatatgcgacgattttaaatagtgacctatattgcacactatatacgacagttttatacagtggagaaaatttttgcagataattttcaactattacttattttattcattttatgacagttaaataagcaacaattaattataaagaccaatgacaatattttatcatactctttaaaatagtccaaaaaacaaattttttagtagtgaaaggcatgtacacatgtatatatatttactgtatacacataacaaaactttttgagcggaaaaaacaaaaacaaatctagttatattcactcgatatattcagcatgcatgcactgcatattaaccatttattttaatttctaatattatatatataattttctaatattaatcatgcactacatattatatataattaaaatcttgcaagagaccgatatagctaagtaggacatatttttaaggctaaaa

SEQ ID NO: 50986 - DNA, 2237 bp, Cannabis sativa
  modified_base (2018)..(2019): a, c, t, g, unknown or other
taataataataataattaaaataataataataattaataataatatggtggtggtggtggtgagtattataaaaataaaaagaattcatttgatctattaatagatagtgaattataatttttttattcattcatttcttttttttgataaaaatgtaaaattctcatataataataaaataaattgaaatataaacagaatgtcaaaacacttttctttatatatatttatatcatatacatatagaatatatatatatatatatgtatagataaattgattgttattaatattacaataacaataaatattaaaaaaaagaatgccaacaattttcagtactgttacaaaattaatgtatatgattttttttttattaccaaaattgatgtaaataagtatttttttctttttttttttgctaaaaggattgatgtaaattagttgcttcttcttctctcttttttttgggacaaaatgtgatgtcctcactaaaataaaagaatgatatgtatattaatcttcaccattctctatattgatctaactacataatacagtaatatatttttatttacaatatatatgatctttaaaaaataaaataaaaaaacaaattaaacaacatataagtaaagaaccatattaaaatttgataaaatgtaacaaaaataataaagggtaacatatgaaacttgaaagtgaaaaaataaattaatatatcttagcaaaaatatggccttcttttggactaaaatatcaattctaatttgtccgactaatttttgaaatattcaaactttaaatgttgttgatcgatcattctataaccacatccatctgtaatagtgtaaattagctcttcatatcactattgatgctctcatcactatgtagagatcgagactttataaatgatcttgtatttaaatatgatcacaattttaaaatcaatgtcatatatatataaagtgattggtaagctttttcttaaaatctattttatatataagatgattacttaaaaataatataatatatataaatatatgtatgagaatatataaaataaaataagtacattcaacaatgataattgaaaatgaagaatacataccttattaatcataatcataccaatagcttcctttctaatcccacatgataattttctaaagaactttcaagttctaaaatttatatatatatatatatatatattatggtacatatatgatagtctattctatgtcttttttatatgtctaacattgagtaatagtagaatatatatattcacagtacagtaagaatagtaagaatattgagaatttttggtgatgaaaagtctcataaaagagctatacaatatgacatatttaaaaatactaatagaaaatagaaaatgcataccttattagtcataaccataccctaatcccataagataatttttttttaaaagaaaaaaatcaagctctaaaatatatattgttatggtatatatgtgatagtgtgtgaacaatacatatatatatatagtatggcaagaatacatatatacatagtatggcaagaattatgaagagatgaaaagtctcataaatatatacaaaaaaatacaaataatttttatttttaatggttgaattcaaatagttaatatgttataatattgtaattatgatatataaacagattttattttagaatacgataagccatgttttagaatactataagccattgatgattaatttcttttaattagttagttttattttagtgttattataaaaaaaaaattgaaaaaaattaaaccaccataaaataaaaagatgataatactatctttatgaaagccacctaaattctcataaaattttcctatatatataccagggaatagattcgaagcgcggttttaataattttttaaaattttacattaaataaattaatttttatttatgaataaaatatcaagtctaatactattttatattttttttatgannatataaaattatataatatatttatgtaacaaaaaaaattatttgtgattagcacaaatattaatcataatacaatgaaaaaaatcacattttggataaagatatttataataattaaacgctattaaaaatataattttttaaaatgaatcaaatattataatggtataaattttttttgtaattaaaaaaattatcatttttttatttattcattt

SEQ ID NO: 50987 - DNA, 827 bp, Cannabis sativa
ctcacaaaccaagaggcaggacacgactcaggaaaccctcaaaacgcttaggaaggagcctggggaaactgagggtccccctaaaaaagaacaaccaaattaccaactgaagcctctcacatcaatgagaacagaaggcaaaccgagatcagggagcaggaaatccctcgtgagaactaaggaaatcctaggactcaacctaggacaggtgggttgccgccgaggcatcgccaacgtccttctcgcacaaacagggaaggggtgcgtacaaacctcaacaggatgcatacatcgacccatacccaacggagaaggccgagacgtgacgagacgagtgccagctcgagacgcacaaaaacccatagtcgatcaacgcgaggaggagatggaactcatcccaatactgatcaagagagtgcaggcacaagtaaaaataaaagttactcaaggacgagatccatgagtaggacgaggtccaagagtaggacgaggttcgttagtaactataaccagcagcaaccggatctccgtaatcacttgaaccagaaaaaacctgaccttcaccaacagctcggtcaaaagcaagaggatcctatccaattgcgaattgatgagttggaggacaaattcaggatgtatcaagtcagggaatatggaaagcagcctgaatacgactcagacgaggaactcgagcatttccatccagacattatgaatactaaattcccccagggatttaagaaccctcacgtcttgttatatgatgggaccacagatctggtctcacatttaaataattttaatactatcatgcgagccagcaatgt

SEQ ID NO: 50988 - DNA, 1518 bp, Cannabis sativa
gaggaagattaaggatacaatttacaaccacatcggtcaggcgtgatgggcatttaatttttttttttaaataaaaagcataaaaatcatccattttattacaaagaaaattctaatacttatatttttcacactatcaatgtgtacttataaaatacaaagcatagaaattacaaaaaaaactctacactattttttacactatcaacaataaaatccagcctttgattcaatgctgtattctcaaactcggaatccgaacaacaccaatgaacagaattaaagtaacagaccatcaattacttagcacaattagtcctcaagatgatagaattcctaactgtcattagtccaagaataacgaagaaaagagattccaacgccaaaacaataaaatttcttgtaattacatccccaatatctgtttgtattggcctcatgaattttttaaacagacttaagcaaagtcttgtccattttcaccttatactttgatttttgaactaatgaatttcttgtaatggacatttaattaataattaatatataaatctaatagttaataagtatataatttacatattatgtataatacaatctatatatctagatatatatctatataaaaaaataggcggtgacatactttaaaatttctctaatcacttctatcttttcattttaggagtatgcataaatcgatctaatttaataagaatcgaccgatttaattacaattgaccgccaaacattaaatattcaattttgatcagattcgattagatgttatttttaaatatccaattggatcggatcgaatcgaatggtgaatagggtgtccaaaaattcaattcatccaacatctaatcaaactaattatacgtaaaatctatatgtatatataaaaactaatattaaaattttactatttttcttggattgtatggattcagttcaatctaatacataccagaccaaaatactaggtctaaaatattaggtaaaaataactaaatatatatgaaatatatccaatggatagaaccaatccaatccaacattagatattggattgattggatgactaaaattaattagatcgaatagtaaaatctaacatacaatatataatttgatcggatctagatagacttaaaatcattgaatgtggtccaataaaagcccctcttaattatcttatttttcaattttttattaaattaataaatattaactaattaattaatcaactaacaaaatatttggtaccttaaatattttttttattaaatttaattgagaaaattagataagattatgttgagtgttttttatataaaaaagtagaaaaataaaaaaaaaattaaaaaataaataaataggttttaaataattagaaattaattagaaaattgataaatagattttaattcattagaaaaaatgagaaaatagacaaataggttttaagccatttaagataattaaaaaaataaataaataggttttaaataatta

SEQ ID NO: 50989 - DNA, 1024 bp, Cannabis sativa
atactgcagtatgaaacttattaaaaaacacagtaaaaaagtaaaaaaataccgtctggcagtatttttgtaaaaaaataacaaaagtttcgcgacctaccctacagacggccctgataatatgtcggtagattgaggtctttgaatgggccgtgatgaaagacaagcaactgcatttgctattctaattaattgcattgacaataccccaaaagcttcaaaacgtttttgtggttgctcatctgtgatgccactgcaacttcatttgcaatcattcccaaatctttttctttaattacttattggcaaaaacacaattgtctggtctaacactgcagctccattctttacaaagaacccatttttctgtgtagtctttgttcttcttatcttttgtgtagcatgaaaacttcatggcagaatagaagattgggattttggatgaaatattcagttaggtaagagaaagtggagtcgggagttttgggaaaaaaaaaaaattggaccatttctcgatttgtgcgtgtcatccttgcgcaggggccatgctaatcttctctgtatcgttccaattttatcggatgtccccgaagggacaaactaaaacactgaggtaaggatatataaacactctaaggaaatgttatattggcgatgtgggacaattagacttgtactttgtacaaatcaaatctgtgggccgttatttacaaggtaacacatttgttgttgttggtaaagtcaggcccaatacgaaagagagcttactatgcttataattgagtcacttatgtgttgtttttatgatattttgtatcattttcctaaaaacttaaataaaagtttctatattttattcttaaagtttctctattttataactttcaattttttgctttcccttaaaaatcttaatcaattatataaataattatagaaaaactcctaaggccatgtctaattttggtatattataaacttttttctttttctttgaaaatttttaaaatattttatagtgctt

SEQ ID NO: 50990 - DNA, 1997 bp, Cannabis sativa
ttatctcgttgcaagtggtataactccaatccaaagggtatattcctgtaggtagaacataatttaacatccatcaacacatctagtgatgtgtatcctgatgatccatttattttggcatctcaagcgcaacaaattttctatttgcttgatatgagtcgttgtttaaattggagaattgttcaaaaagttaatcatcgtttaatttatgatattcctgaagtgtgcaatactcaaaatgattcattaaataatgatgtcttccaagaggaagaatcatttcaattgcctccttttcgacctaccgaggacttgattgaagtttcttctttggtttgacaagatgttgcacccataactctttcagataaacttgttattgaactgaatatgaataaccataatcaatcaatggaaaatcgagaagaatatgaagattttgatgatggaactatcttcttcaataattatattatttactcaagtgataatgaaatgatttgctcagatgaagacatttctgaaatggaattcgaccaacatggggaatcttaattcatagttacttttatcaaaatatatgttactatttattttatctcaatatatcttaatatttttttattcaattataatgttaatttttttcttattggtttgctatatgaagaacaattgttgccatggcacctggacgtcgcattactcgctctacttaacatagtccacaagttgaccagaccattgatgctatgccacctagacgtcgcaccgctcgttctactatacagagtcaactacctggacccaacaaacaatctattgtgcaaaggcaaccaatcagtcacacaacatgttctaatgttcaaagtccaccaccaagaccaactacatgtacagtggacctattcaaccacttggacccactacacactctatatacagagtccaccaccaccagctaccacacattttgatgtacacgttcaagttcaaccacatgcaagcaccacacactctactgaacaaagtcaacaacttagacagagtcaagatagtgttacttctcaaacacatcaggtatgtttattatattttacattaagttattttcaattttaattgtttttaatttaaaaaattccaatgtaggaccaaccgcacagtctactgcacatgttcagccacctagatgcatcacactctctactggacgaagtcaagaagatagtgttgcttttcaaacacaatcaggtatgtctaatacattttacatttagttgtttcataataataatttttatacataataaatttctaatgtaggtcaatctgtctccaacaaatcatgtgggcaaactcgtggtgtgagaactgctagcatggcaaaggcatcggctaatggaaagttaccagtcaattttgataaggagtgtcatcaaccaatttgtacaaatgttgagagatttaataatgacattgggtttattgttcgcaactatggttcatttcaatacaaggagtggagaatggtccctaaggaagttagagcaacattgcgacattatcttctggtaagatatttgatattaggagatgataaaatcaattcacataaactattgtgttaatattacattttaaaaataaattatacaaaaaatatcataaattagataagaagtaaatatttgaatataaaaagttaattaaaattagttatttattaataattgtgtattctacttgtttgtgaattttaaattgtttaaagaagcatatatattttacaagagattaattagagtttgttttctattcaaaaaagtagtttgtttgctttttaagaaataggaacatactaaacgtatatactatagtctctaccacatttacattatatttttataatattctccattaaaagtagggttgaaagtaaagtattttactaaccaaatatcaatttttagaattttacttggcgatttacttac

SEQ ID NO: 50991 - DNA, 941 bp, Cannabis sativa
ccccccccccccctatatacatcaacaacactctgaaaactaaccacgagctcttgtgcaccggagccacgagatgcctaaatagtaacccaagggacaaagagatcagagaaaaaaagaagaggaacaacgctccacagcacagcccatgctcgcgcctgagaaaggccaccgtaactcgcggtccccaaaatcgaaaggtagatagcccaaagaaacccacctacattgcctcccaccagtccaagaaactggatctctacccacgaccaccaaccttgggcttgagcacctcaacagagacatccatcaaccgtggtcggcggtcccttgccaaaaatctcgggcatcgaaaggccggtctcaaggaaagagaaggagggcagacgctcatcccctccacacattaccgctgctcgaccgaggaacttccgccctcaacctgcagcaacgagtagctaagaccctaggcgccaccagtcagatttggccggtggcgcccaagcaccaaaaaccctaaaacgggaaaagaaagaaaaaatggagcaaaccctaatagaattgagagagaggcgttttactttgtaagagaatttttgaaaaattagatagagttttcaaaagctttaattttgcctttttaattgccttttgcttatttgtacaagcactttcataaaatgtaagactaatctataatcaccggtgacgtttggttgggaggaatataaatataggaatatgaatgagaatgggaatatgaataggaatggaatagaataaaatttaaaatacattaaaaaaattgataaaaaaatcattaaattttacattggaatgatctttccttcctttttaaaatagaatagtcattccaccaaaatggtaggaagaacattctcttggaatgccattccaatactttgttttctttccatttc

SEQ ID NO: 50992 - DNA, 1698 bp, Cannabis sativa
tccacggcttttgctgcgtccacgaagattctggggattttgacctccccgattgcctcctgtttcgaccatattaccacgacttcttgtgttgtgcctggagtccatatattaggacttagcttgtgaacccataagtcaagtaggtcagatagcgatcatatatattctatgtactgcacttatagattttaaggcaatgcatttaataaataattataaactactatacttcctaacatgcttttctaatcacaaaaattactaaataagtaaaggcttactgaaccgtgagttgagcttcctagcggctctgatatatatcaaaattataacgccctaaagcttaggcacgctacagtaattttctaattactctgctcgcctttactaatcaaagtgtttcttaaaaatcgtgccaaattaaaactttgattaaacattaaacttttattaacatatacatatatttacataaaattgggatctcgttttaaaacttttatattcaaaataacaactacaaacatgtcgcgcagcgactataaaatatagcccaagtcgtcccgagactaaactctttaggttgcaccgtctcgacatgtacaatcattccctcagctcagaactcgctgttattcaactttggcctttcctttacctacacaagaaaataatatctgtgaatcaacacttagtaaaaaaagcattttaacatacaatatattaccgacttgtatctagccacccatacacctatccacaaggcttattagatgagttaaaacattctttactaaggtacgaccattgtaccacatgcactacgtaccgctactgtgtatagtgttggtagggtttgcaccgtacctcgagtaccactaagtgttgtaccacatacactttgtacctatccgtactagtattggtaacactgtattatactcattgaacatcatacattgtacgagtacacttagtaccgctaccgtactagtgttggtagtatacgaatcacaaaaagcatgcatatatcacacatacacatattcatatataactatattctatgatagtcttacctcgtttccaaattcaagtgtgttggccgacctgaacggaaaattacacgttggatggatgtcctatgtcacattcacaaaattggataaacaacttgttaaaacccgatccgcgcctaaactcacaactaaccggttctacgaacaggttaaccggttcctaccaagaaacccaaagaaatccataactcacctaaatcgtttccaaacttcatcaaaatgtccgaatcacctataataacacccaacaacagaattcaattaataacaacaacattaaacaatcactgaaacaaaattcaccattgttgagttcttggaactcaaacttgctcaacacaagaatcaagctttcaagacaaccacaaaaccagctctaatcaacctaaaataaactcaaaaaacaaaccctaactactacaggtttagacagagctaaaattacaatttaattacttggtacaactcaactaataacttcaaaaattcaatgaacaagtttttctagggttatctttagctttagctacctcaatcctttgttgaaactcaaaaaattgcaaggaaatgagctaattccttctggttctagctagggtagagagagagagagaga

SEQ ID NO: 50993 - DNA, 845 bp, Cannabis sativa
aaatctcgcaatcatactctccatctccttaagaatgccttttgaaattctgaaacaactcatgatataacaaggaatagcttgaatcaccgctttgatcaatacttcctttcccgcttgtgagaagagccccatcttccaacctcgaagcttagcttccaccttatctctaattatgccaaaaacttgttttttatttcttcccacaaaggaaggcatacccaagtatttagtatggttttccaccaaagaaacgcccaagtaattagctaaagtggctgccacggctgttttgatcttgctgcccacacacatttcagatttctcaaagtttatacactgtccagaaagagtttcataacgttccagcacctcttttattgccttgcactcctccatggtagcatctagaaagatgagactatcatctgcaaagaataagtgggagagcctcatatccaagcttccaaaccgtaacccgtgaattctcccagccctttcggcttcctgaataaggcaagagagtccttctggacagattaaaaataaaaaaggggagagggggtctccttgtcttaagcctcgactcggatgaaagaatcctttgatcgatccatttaaaatgattgagaaagaaacagatttaacacagttcaacactttcttaatccagtcctcctcatagcccaaatactccatcattgcttccaaaaaatcccattctactctatcatatgccttagacatatcaagtttaaaagccatctttcttccattcccgaaccgacctttcctcatacaatggagactttcgaagcctcatagcattatcttgaataattcga

SEQ ID NO: 50994 - DNA, 959 bp, Cannabis sativa
gcctacgtgtcacgttattagggtgcatttttttaattaaggttatttctgttaattgattatattataggtataatactaaaattttccctaatttaatttaatataatggaatttaatacaatgtaccgaacaaattctaaatctttatttacatttattcaattacctttgacagctttttttttttttttttgagagaaaatcttcaatctagcatattttattcaatatcagtttttaactaacgtcgctagatatattggcactaactaattaaacatgcattattgatattaaatattaatatcttattgttgtgtcattttcttctttttggactaccaccatttttttttctttctttctattaaaaagtataatattcttagaataataattttaaaaaataagaaaaacattgttcacattatgagacataattatttttttaatttcaaaattatagtattatatatttgctgctccaatcataatgaagatgaaaaaattgagtatatattactcttttaggcttcatattttatttgcaagatattttttgcccaaaaatttaaaatatacgccatccatgcatgcactattcgctcgcattgtttattaaaaaatgaaaaagaaaactttctatattttggttatagtttaaggatttggttattttttattcttattaaataatagtttcttgtacactgtttctaaccttccaccactaaggatgaaataattaattgtacaaaatcttgctacaaatctagcacttaatgataattgtatgcagtttcttctgttttgttggatcaaaatttaattttaaatatctcaaacaaatatatatatatgcatacatatgggtgactattcaatggttacatttttattgtaaccatgtggttacattttttgtttaacctgtaatagcaggttactaataggca

SEQ ID NO: 50995 - DNA, 682 bp, Cannabis sativa
gatgatgatacttcggaaaggtaaaatagcattgtaaaaattacagtttgaaggtatttattatcccaaaattctgattaagttgttgctctctgttagctactataaaatcgtaagttcatcggaaaactactctgcaatactgtcgaaactacgcgaggaaggaataagtttcgagactgataatggttctgaattaattccaattaccactattgaggtttgtttatgatttcagtctctgcttgtttgaagattgttagcactaattttgtcttaagcataaacaaatattttctgttgaaacaatgtcaatgtaaaccaatcactttcaggtagatgatgaggctatggaattgaacaaggagcttatgtccaaattacttgatctagacgatgtcgacgctgtttatacagatcagaagtgatcgaaaccgtctaatgttagtcataattaaaccccttaattagtttcggcattgagtggtatttataagcttttttttgcttaatttattcttgtaaacttatcttccatatagtttgaatgataatttaaaggggattgtttattgttgtatagctcatctttatctgaatggtttatcaaaatcccttttaagtaataagatttttctttttaagtattactattacatgagttgtttggtactagacattc

SEQ ID NO: 50996 - DNA, 1725 bp, Cannabis sativa
ttattttattatatataactaatattttattattttattaaataaaaataaaaagtcacccataaatttctcataaactaagaatttcagttatataatgaaaaaatacagaaaaagagtttaccacaccaagtgttaaaaaaaaatagagaaatgaaggttgtagatattttcttcttttaaaaaaatacaagtattagagatatttttttagaaaataatttgagttagtgtatagtatgtttgagctatatattttttgttatattttcttttgtatttaaattatatatgtctataattattaattgtattaagtgattttgtcaattatttaacatttaatttaatttaataaatatataaatattgttttaataaaaaactaaaaaattgagagaattaaagagaagagatagaactatttggagtcattttagaatgacatgtcaccgtctcatatctctttttatatattaaaggtggctatctaacggcaattcttagtttaacgattttttagttttttttaacattttaagtaacgccattaacctataattcttatggaaaaaaaaaaactcaaaaaaatgtaaaaaaaaacttaaaaaagaacgtctcacgaatcgatcgatcgattataaacaatggcctcacggctgcaacatcaacgaccttacgatttcaaggaaagtctcaaaatcccaatcgatcgatcctctcttcttttgaaaaattcaaaatcaaagaacgactgcaacaacaatagcctcttccatttacgaccgcaacaacaatggcctcataaattcaaagaatgtctcaaaatcccaatcgatcgatcctctcttcttttgaagaaatcaaaattggagaatgactacaacaacaatggcctcctccattctctataaccttgcgattagtttcaaaagcccttacctaaccaggatctctcactcccactctcaattgattgtgagctctttctccacacccaaaattccaattcgattcaaattgtttattctacatgtcttacttcttatgttcttagctgttgaaaaatataaaaaatagatatggatagtgagagaggtgataatttttcattttatgtaagcaatgaacaacaacaggaaagtgatattgatattttcttttgcataacttgctatagaaatttaattcattacctgatgattcttttgaggctatgtctgcaaacttataagctattctactgggaactagcatctcatctacacaaagaatattcattatgcattaagatttttggtactgaaaatgaaaagaagaataagtattgaaaaaagttgatatcctactcctactatactttaatttgctctgtaaggcctagaaggaaatgagtactcatgaagatattattaaagatagaagataagattttgaaaactctctctgaagatgacacaaggtgttttactaatattgtaacctcaagaagaaagcagtaaatgcttctaataaattcacacattcacctaaaaaaagaggaaaaataaaatttaaagcatactgccatcctcatataacaaaatctaaggtaagttccttttgaagatcactaatgggattgtggtgaatccacaattcacctcattcaagaacacacaacaaagaacaaattaacataaaaccagaaatcgaaaatgcagtccaaaaaccagcaatgaattc

SEQ ID NO: 50997 - DNA, 842 bp, Cannabis sativa
ataaaatatttttttttttaaaatcatattttataaaattatttgtactttttaattaaaaaaaaataaaaatctaaattttaaaaataaaaaaattcacttcgattttttttttaaacaattttttaatcaacattttggactacaactctaacttttagactttataaatcggacccgaactcggttgcagacttagacccgcccccagtctcaacatcggatccgacttaaataaaatcaacaaataaatataaaataaaatttatagaatatacttttgttttttatttttaaaattgaaaaacaaaagtggttatagaacaaatcttttttttttcaaaaataaaattttagaaacaaaaagtttacttttatttttgtgattaaaagatttaaaaataaaaatgttactaaaagccacatttttttttttaatttgtacattctaattatttaaaatttcttttaaatttttagaaaattttaaataatttacataatggaaaataaaatttatatagttttttaaatgagtaatttttttcttaaaaaaaaagaaattcatatataatcttaaataactgcactcaccaaatatcaaaacaaataatagtaaaaaaacatgtttttaaaacgtgtactatacatataaataactactatgggtctggtctctcaatctttcctttcttgaccaactatgcaggctcacttctagtttttcaaacatcatgtaccaagtttccacttctttttctagaatttttttgggattttcttttttccatttccatatgaaagattgtaagtaaggaaatggcacaatcacaatccccaca

SEQ ID NO: 50998 - DNA, 1914 bp, Cannabis sativa
gggacccaaacccagaccagattctggacctggacctagaatctggatagggacctgggcaatggaactaggaccgcaacccaagacccgaccctagacacgaacatgaacctaggacctagctcgtgacctgactcccaaaatggaatcagaccaggacccgagaaagagatccatatctagaccctaggcttggaccgaacccatagtcggtgtttggatctaggacttagccctggacccaaacccaaataaggacccgaacctaaaccgagactcaaacccagtcccagatccaaacctggaccagaacccgtaccctgtgacctaaaattggaatgaaactagaagtagactgggacccgggaaagagactggaaccaggacttagacctggacctggaaccgtaatcggacctgcatagacctagaattgtaaccatactaggaccaagactacaacccagacctagacccaaaccgggatccacacccaaatctgaaccgagacctggactaaggacccaaacctagacctgacctctgacccaaacaaggaacaagactcgggacagttttatggttgggacctagaaccgcaccccagtcacggtcctgaaccccaacttagacctgggactcgagacctgaaccaaaaccagatcgggacacgtgaaagggatccagatttgggactcaggccaggacccaaacccagactaggacccaaacccgaaccctgaccctgacccgccagacggaccctcgaacaagactaggacactgactaggacttagaacaagacctaaaatcgaactcgacctagtcccagacccaaactaagaccgaaactcgggcccaaacacggtcctttacccataccgggaccaagacccacactcgaacctggacaaggacctagagttgggacccaatccctgacccaaactcagacctagataggaatctcgatatgaacctacactcaaagccaaacctggaccaagactgggatcgaaattgaagacccagatcaagaccgagaccctgacctagactcaaacctggactcgcacctaggactcgaacttagacctgacccaaacttagacccagacctggatttggacctagacccaaacctggacctagcctcggacaaggactcaaaattgactaaaacccgaacccaaactttgaatcaaaatctaaattgggacaaggacccaaacacgaacatggacccagactgggacctaggacccgaacctgaattggggacctagacttaggcctcaagtccagacccagatcgaaactcgagactcggacccaaacttggaccaagactcgaacctagatctggacccaaatcgagaccggaacccaaacccaaactcgaactaggacttgaaccccgaccaagtcttggactcgaatcgagacttaagacttagacaaggatgtgggggacctggactagggacacgagcatcagaactgggatcgagacccaagaccagaccccagacacaaatcctaacctaggttccagactaggacctgggacccgaagtggaactagactgggactcgagaccgtgatctagatcaggaccaagggcttggagctgaaccgtagttagtgtttgatctgggacccatacccggactcaaacccaaacccggactcggaccctgacctagacccagacctgtaccccagacctgggtccgagttcgaaacagggtttgagttcgggaactagactctgactaggacccaaacccaagacccagacaaggatgcagacccaaatcaaaacttagatcggtactcaggtactcctggtcggcatatttgcttgtttatcgttcgatattccgacaaaacactcatcttgtgtgttgtc

SEQ ID NO: 50999 - DNA, 978 bp, Cannabis sativa
attttttgccaaaagtactttttcttcatcaacatgtcaaaactaagtgagaaaagctaccaagttgtatagaaaccacttggccaatcactgccatatttttagcacaatggtgacaatggtcgaccaccacatagaatggggagtttctttgacgaaagtgtatttttaacatccatatatcaaataaaagtgggaaaagtcacccaagggtccataaccctcatatgcgaccactgccacctttttggcaaaaattatggcagtattctcttaaccgattggccaagaaccaatgtgaccaaagtggttttctagcatccgtatgacttaaaaaagcaagaaacaccatccaagcttcccataagccatggcccgccattgccacttttggtgcccgattggtggcagtggtctcttgttagggtttcggacgtcgaaatgagattttgaggtcttaagactccaatacctcgagaggttaaaaaaattcaaaacacactcagagaggtccaagaacatgcacggctgagagctgccatttggtcgtgttagtgctcgcatctggagcgaaataacacaaactgcccttcattaaaatgggcataactctcttaatttttatccaaatgacctggttaaacttgcattggaaagatattttcaagaaaaatctaagtgtctatcatagtcatagctcaactatgaagttatcatgttcaaaagttgcccacaaggtaggccgatacactttactcgagaattgagtagtgtaattaagtgtgcgatgttggagagcaatgccacagcccatgtggcatcatgtgtgagcaggcacccaaaaatacttgtttccaacacttctcaccaatatcttgaattctaagtcgagagatgacatccattgtcacttcactttaatttggtgcatatctttaactgaaaataactattttcctaatatttgtggaattttgg

SEQ ID NO: 51000 - DNA, 1322 bp, Cannabis sativa
tacataagtttaaacatttaattttgattgctaatttattataatttttttaaaaaaattttaatgattaaggtatgataagactcttaaataaaattgtaaattgatcatgatataggttacgtattattaagtttgagtgctaattcatttttcaggtgttacatattgtttttaatggactaataaaaatctatggttacaaaaacatatatatgatacggacatatataggatgatgtgaatttattttaacactgatgagacaataattttttcttatattctatattattgaataatgctttaatagatgtattgaaaatgattttttctagagttttttttttaataggtgtcattgtttcattttatattcatatttaattttattttcttatttatttttttttataattatttgtcaaaaatacttatatctacaaaaaaaaaataaataaataaaaaattggtggacatgatttgagatgagagatatgtacaaaaaaaaaaattgcattgtactttaacttcgccattagagaatttctgagtctcaacctctatttttctttttaaagaaaaaatataaaattcttagagcttgtttggctgtgttttcaattttcagtttttagaattgtgttttcaaaagtgagaatacaaaataatttttttatcattttaaaaatttaataatttttggcacaaattttttaaaactatttttagattttttcttacttaaaaaattaatattttaacatcataccccatgacatgaacccattatagaacacctgtgagccaaacccaacaagacagtataaatatcaataactacaataatgtatatatcacataattattaatgccattatacttattgtctatttgacatagacctgcgtgttacgctcacacacctacttatgtctatgtggcaaagaccctcgtgttacgctcacacgtctatttacaataaggctttagaacagttcatctcggttctaattaccaagtccaaccaaattatgccttgaacgcataattctttacttcagcatatatagcatggcatagtattcaaaattaattaatcactagaataataaccctgggccatataactgttcactttagggtagtaaccctaatccgggttctcatttaatcacaatcataatatcaaacatgagtgccaccgcgcttaattctacgtgctaactactgtcttacctgatgtcccaagtatgtagagatttcaaattctcaggtgctcctgaacaagtaccggtaatcttagtcacaattttcgagat

SEQ ID NO: 51001 - DNA, 813 bp, Cannabis sativa
  modified_base (194)..(195): a, c, t, g, unknown or other
cttggcttgctgtccatggatgaaggttgcgcatcaatgtcttgtaaaggaaaagctggtcggccatactcctgccagcatctggcaagtcatgtgtctccctgatcctgcaagtcatgtttctgtcagatttactaagaggaggccagcttttggatgtggaggccagccttcggagatggaggccaaccttnntacaccttttccttgcagaggccaagcttccttggtcgaacggaccttcccttgatctgaaagtcaccttttggccgaccagcttgtgcccatcctgggcgggcatataagttcatcctgcctggcctatagattccctttggtcagccagacatggtggtgcagctgcttgacggatcgcttaacttctttcgcttgctgcttgacggttttgccatgccttgtaaggagattttgtcttgctgttggcaaggctgtattccacatgtactctgtcttggcttacataaacatatcacatcaggtgaataaaatttaggataatataaaggaaactgagagtattcattgctcaaaatatattttattagttattttgtattttaatatttttttttatatttagatatgtagataaatcactattatattttgaaaaacttgagttttattacaatgtgttgtaaaattgagtaaattaaaaacaaaaagtagtgatgtaatttaaaagattaggaatatagtttagtggcccttccacaaagagattttaaatttgtttataatcatccatagtggcagagagaattgggcattggattcatttgacctgttggg

SEQ ID NO: 51002 - DNA, 928 bp, Cannabis sativa
tttaggtataaatttgaaattgtgtattatattcgccattttcaatccacaaaccttcaaacttcaaaaaaatctccacaaacctctcatttgaatttgcatgccctctttgtctctcacatttttcctgcgattttcattcaattgcattccttttcctcaaaatcatcaagacccaattttttgatcgttggaatttctgtcgcgaagctcttctttatccagaatatcccatcaaaatagtaagtgacactttctcttattgatttttcttctgtgctttcaattttaacttcttggtatgtatttcttttttgcaatgttttgctgtttgggtaaactgaatttgaatgcttatgtaatctagggctagaaaatttaaggttatgtgattcgcagattttggattttgtttgtgctctatttttccaggaattagggcataattatctataattatgttccaatttatcctagaatttacaatcccaaaactcctagaatcagtttgtcctcaaatttctgccatagaatttaaacccaaaccatacttgaaataaatgatgaaaaaactaagaaccatttcattaaatctggtcaggaagaaacctctaaccattataggcgattcttacaagaggttattaagggtaggcatcattatttgcgagaagcagcttggcctgaaccttccaatttagttgatatccccttagcgaggcccatgtttttagctccaatcactgttgctttttcaccaggtgacttaaactttgaactaatggctcagacagttcgtaaatcaaagacccccatgatcccactatcacctttgaagctgagttaatagaatccaaagttaggtccattggaccaaatgttggggacgtcttaaggtcatgcggcatcaagaatgagcaaggaagtc

SEQ ID NO: 51003 - DNA, 571 bp, Cannabis sativa
aattgaaaaaaaaaaatagtattataacaatactcttttggtgatgatttaataataaatttaggttttaccatttgagttgtccttattgaaagtataagattatctctaatggagaagcatattagtgatgcaaagctaaaatatagcatacttatcaaaaatcatacttcaatagtgtgtcaaaaggtgataggtacaaatttgttatatagcaaatattgtgtcaaatttaccacaatatttactacgatgcaaaatttacatcaccataatttcataataatttttttcatttaattagcgtatttcgtgatagcattaaatggtgggctatttatattattttttttattactttacatgataaaataataataaattaagaaaaatttacatcatagcccaaaattttgaagaaaaaaaattacaaaaatatgtcaacatgatgttttttttttttaatctttgaactttttttatttacaaaaatacatttttagtaaaaataataaaccttttttttttggttgtttgatagtttatgtataattgtattatagttgttatt

SEQ ID NO: 51004 - DNA, 1210 bp, Cannabis sativa
catatatagaaaaagtgaagaaaataataataattaataagaagaagattagcataccagagagagattgagagaggagagtaggtgcagttgcagaaatttgaagagaagatgaaattggtttgcatttgtgtggtttggtttggtttggttataagtaagtaacttatatgtagtatttatatatagggaactttgctctcccttactacttggcgggaaactatatagtaagaggcgccactttttctctgctaatcaatttccattttccaagagattttttttttccaaaaaaaaaaataaaatactgtatatattgtttttaatgaattttcattaggtttttttctatattgtttttaatgaattttcattaggttttttttttctgatattagaggaggagttaaattttggacctccattttgtgaggagaagtgtgacccacctaccacttcattagaaattttaactctaataatattagacttttttttgtttgatatttttataaatacctaaaaatgattaaaaaaatacaatttttatttataaaaatacagatggttattaattggtataccttattattattatactatacaatggacgtgtacttagttatatttttagtttttattttaattaagtatatttttaattataattcttattttttttagaatgtgattcaataaataacattattttttattaaaaaatatttaatataaatgttatttattataatagtatttaaaaaaatcattaatataaattcagtttaaccataatatatactttaatttttttaagaaatatcatattttttatttttattaaaaaataataataaaaaagacatatatttaggtgactacttaataattacatttttattgtaatcatgatcattttttaaacttgtaatagtaagttactaatagataaaaatttattttttagagcagcaaataatggattttagagtaattgaagccaatagcacttttggttattgaatacttgacttttggttagcaaatagcttagttatttgggaaatagaaagtatcacatgaattttaaaaaaattgaacaggtgtcattagctcattattgtgacagaggagagacataatattagtgacagaagattttttcattcgtcttcataaggcgagtgttgatattttgatcagctag

SEQ ID NO: 51005 - DNA, 839 bp, Cannabis sativa
ttaacccaaatttcagtatttttgtaaatttccctttaagtttaatatggtttggactgtcctttaattttgggtcaaagacaagtttcatatacatacaattcttttagaagcattttggcatcatggcccatattttagaatatgtataatatttggatgatatcagatcaaattgatatataccaaatttaaaatgaaaaccatatatttagtataacttaagtagaataaaaatgatttttacccgtaattattacaacattgtgattgtatgattattttttatgatactccaaattattattttttacgaaaaaattacacttttcatgattctatgaaaatagtttttcaatttacagttgttgctcgtacttttactctggtaacacgtggccttcggaagaacgcccaacaagttatgggctcacctatggctctaaagagtccacatgaggctccaaccaacaatcccaaactagatttgggattgtagcagcaactactctaacatatctttttccaagatataaacgacagctcatgcattgctcgtcgacgttaatagtacagtgaacaataacaatgtcctacttttaaaggattaggcctcatctatagagctggaggaaagggagggcatgtgaggttatttgccccccacctcccttaattttttattcatataaattttgtatataatttttttattattttacattttgattccataaaaataaatttttttcatttttgtccttacatatttatatattctcacatatatttacttttattctcataaaattcgcattttttttaataaaaattgtatt

SEQ ID NO: 51006 - DNA, 796 bp, Cannabis sativa
caaagtttggctgaccataccctaggagagtgtatgttcaaggtcggctagctctaagcctagcagttgttcatggctggcttgccctttgctggacagggcctggtctcccattctttcttaactagccggtatagcttgtgtgttgacagggggtagattccaccaccttttggagtttggtggatccaagtatttgaagtgattggtctcacttcttaagttattgttgtcttggatgtttccacctaatcttaggcctcaccgattaaagattggcctccaggtgacttgctcctagacgtcccaggacgggaattcaccttgttggccagctagaggtacacttctaaggtgttggccagctataggttggacaattgggcattattgttccagagagcccaagctgacccctcacaccaatggttgccagagtcttcctgttctcgccactagatcttcgtggcaaagctcatcatcctttgagttcgagaaggtttgttctagttctagaggaacttggttagatagtttgtcgatagaccctccccgattttttgattagtcttccttgaagaggatctatgatgagatcctgacctcttccaatagttctttcattgaagtaccttatcaaattattagcttgtccgttacggtggtctaattttgcctggtgagatcaaaggatgtactcttgatcaactatccatctcagaagtttgcatctcgtttttgcaaatgcattgtagccaacagtgtgtggtttcccattaagaccaactgggttggt

SEQ ID NO: 51007 - DNA, 1023 bp, Cannabis sativa
atgccttctttcaaactttgaaactcttctttgcacttatcagaccacacccacacaacacctttcttcaacatctctgtcaagggttctgctcttctcttagagttttgacagacacatgacaatattttattgtatcaccgagggagtcttgtaatttcgcctgtccattttgtagcccagtgatagcagtctttatatttattattgcttattctaatgccctaatgcgatcctccatctgaggcgcatctgatgtttcggtagcagcgtctttccactcgattgtggctaccctggccaacaagttagcatgatcttgagccaacgtggcaagttattgttatgtcgtcgttggccctaagttacaagcttcaaaggatagatccctgaccctttcgtctagttcatcaagttcccttaagcgcttctcaagtgcttcaattctttgagtgttgttcaccatcataaacgtgttaccaagcttccccttctgttggctctgataccaattgtcacaggccgactatttagacactcccaagtaggcggagcgtgtgacacttgttggcacaccaagttagcaagccagcctaaacacgcctgtaggcaaacaagcttaatggttaggcacgatacatgtctcgcacatgttgagtgcaaacaagaagcatgagcaagaaaacataagttgtccccaatgactaatatcacacaacccacaagtaaacatataggcaaacgacacataatggcccaacaaaggtaaaaaataatcatcgcataggcagcatagaagcatatacaagaagtatggataaatatcgatttattataatatggccttgatagactaagggagtacataattgtgcccctattatgctggtgacaagttgctttctaagtcaccaagtcactccccccctaaagagcttaatggggtttcaaagaattttcaggaacatatatgattttagctctccatacatatgtgaatagaattataaaaaaaaaaaaaaa

SEQ ID NO: 51008 - DNA, 931 bp, Cannabis sativa
gacatctagaataacaggctccccctggagaggtgcaataggttgaggaagctgatcactggcatctaatagttgaacttgagactctatagccatgactattgcagctggaggcactatagacaaatcaaatcctcaacaacaatgaatacctattctcgacactaatgtccaagtcctcttgacaaaattgaatccatcaaaaatataaattgcatactcttgactcaatttatatttttaaagtttttattttggctaacttcatttacttaaatagacatgtcaacaaattttaaagtacaattatgataaaccactacaaaattttgtgtttatgctggttttgttttttagaaaaaataagggtttgtgccagaaaagataatttacatttgccaatattttttttttttttgcataaaatcaacatcagcaaaaataaatatttttagtgtattaaaatgctgataaaaaaagagcacgttgcaaaagagaatcaggtgaaatcttttaattttagtggtacgacctcgatctatttggagaagtaatttgtaatagccaaaatatatttttgggctttagaagaaggtggcgtaaaaggaccaatgacgtccattccccatattttgaaaggccatgatagtataaaaagatggagtggttgaggggggttggtggatgaaatctccatgtaaatggcacaacttacaacacttagcaaaattaatctcatcttgaaccatagtaggccaatagtaacccagccgctttaattgaactgatagttttgggctagcttaatgggcgccacatgtacgtaccagcacgagtctcttgaattacatgtgccgcctcttctattgagagatcattgaatgaatgcttgtacaatgtgtcattaaagaccacaaatcgaggcgctctt

SEQ ID NO: 51009 - DNA, 1041 bp, Cannabis sativa
gaaaaataagactgatgccggagtctagaagctagagtatcgaagggaaaagcctcctcctagtgattccagtaaccacgatgaggatgttgacgaagtacattaagtatcagacgacagtggcagaagcctttccacgaatgatcttcaaaaaaagattgaatgctaagaaggaaagagccaaagcaaaaaaaagcaagacctcgtgagaacgatttgagaaaccaaatcaacaattgtgttcgtggaagagaatcttcaagtgataagactccatgcctaaaacgtaaggttaaggagttaatgaaaatcacagaaaagatttctagaaaataaagtggtgtcgtatttgactttgaggaagaagatatcgagccttttatgaagagaatcattgatgcaccactactagagcatttcagaatgccacggatggagctgtatgaaggacgtacggaccccagggaccatttgtccaaatacaattgcatcatgcaagtcgccaaggctagtgatgatgaaaaatgtttatgtttttcattaacagtaagcaattttgtggaggactggtggaagaggttgtctccaggattgatccacaactagagagacctacaagtaatgttcagaaagtagattatagcaactaaggattatgatttggaagttagatctttgactagcgtcaagcaacaaccaagagaaagcttgaaaaggtttatccaacgtatgatggatgtagctgctaaaaccaaggtcaccgatgacatgaaaatggtggccctaacattaagacttaaaactggatctttattgtggggagaccttcagcgtaaaagggtagatacattgagtgagttcttaacaagagctcaagggtttataaatctggaagatgcttatgctcaagcatatggagtactcccaacaccttccactaaaataataaatgcccaaccttcgcagatgacaactccatccatttaccctccaccaactacttttactgttgggttttgtgccctaaataaaacccattac

SEQ ID NO: 51010 - DNA, 1327 bp, Cannabis sativa
  modified_base (889)..(917): a, c, t, g, unknown or other
ttaagaacttttagagagagagagagtgaggggttagaagaaaagaatagtgacaagaaaaatgataatatttttttaaaaataattatatgtaaaaataataaataaaataacattaaattaatatggatgaaacaataataaatattaaaaaaaaataattttacaaaaaatcatttttaatacctaatgaatcattatcctatagtatagtgatccttgtatatattctatatatggtttcattccattatacaatttttgtttcatgatttcaaaattaataattttaatttatatacatttatcaaatataacaaaaaaaaaaaaacatagtgaagaaatagattatcttttattattatttttttaatgttagtttccaaaataatctttattaataatttcttttgtggcaaaatatagcctccaaattaggtagtctcaagaatttttcaataaaatttaaagtaatttttaaattagtcttgataaacaagaaaaaaattaataattactactcttaataactattttattttatcctttaaaatgtattgctattttttttattttactttacatatttacattacacaccatgcactgacttatttatatttttctctattttatttaaatattatattgttacatatattttactaataaaaataaagaaaaaatcacaataaaaatataaaatatgtttacctctttactattcatcaagctatactaaagaaaagctttttagaatttggaaagatgtataaccaagaatttaaaacaattgatggagcttaattttaaactcttagctattttattttacattttggttattatatagtgagtatgacctaacttttattattattattattannnnnnnnnnnnnnnnnnnnnnnnnnnnnattattgttgttgttgttgttgaaatcacttcaatgctttaagaaaataattgtaagaatactttcagcagcttctttactctatcatttaaaatatatcattaaatttaacatttttatgttacaatacaactttaaattataccatacattatttttctttttatatatttttctctacatcattaaattaatattattattattttctacactattaaaataataatttttgaacatatatacaatatacataaagaaaatattatttatatattattaaaattagagaatgcactattcattctctacatgtactagagcaagttatatatatattagtttgagttacttgttgttgctatgtgtaacctcttatatattaagtgtattgcacatcttaatttaaa

SEQ ID NO: 51011 - DNA, 873 bp, Cannabis sativa
tccaatgatttttcgatccatagagtatgcttgctcgagaaaatatgtgtttcccaaagaagataccaaacctaacaaacatattggaaataatgatatgaggaatttggtttcttcgactcttgttattatttcgggtttttcctctagtgatggttcttcatcttgatctttctctttacccttgttaaagaaacaacaacaacataatctgcattttccacaaaaaaaaaataataaaaaagatttgtaaaattcattcacaagtttgactaaaagaaccaaatttctcatgcattagttagcaaagattgtctcacttaataattaccttagagtgacaaagtttagcttaccattcgttctactttagatatgtgaataaaaaataagcttatttttgttaaatttggcaaatgggttgccaatatatttatttgtttgcaaattggtccacaatttcaattttttggcaccatgtatcagtaacagtagatgatcgtcgctaccaaaaaaaatcaaaattgagggaccaatttatcaaaaaaagttaggtgatttgccaatagatctctcacaaattttcaaataatttagaatgacgaaatcatgattcaaatagcttatttgcacttgtgattgtttcaatatttatactagttgtaaaaaactatttttgaatcttgatctcgacatattctaaattatttagaatacttgagagatcagatctattatgactacaacattatatactgtatttacaacttatttaggtagcaaaaatacttaatataataaattttatcactatatatatgaatatgcttaattaatgtgtacataccttaaagggcacaagacaatctctat

SEQ ID NO: 51012 - DNA, 1517 bp, Cannabis sativa
caccaatacaaacaaaaacctatagagttaggtgcactctaagaaataaaaacacacaaaatggattatattgttaaatatgaagtcacttataagaagtgagttactcttatagttgttgtgggtatttaatccacacctattttatcagtgtgttaaaaaaaatagagcacaacaataaaaggaattggagcatatatttttcaaatttatttgttcaattaaatattttatttttattttgaatattaaataaaatagagcattttattttattttttatcaaaataaaagtaactttgttttcaaattttacactagacagtctctaatttggaacaattctcgctgcttacaaattattgaacctgcacctcattttgtagaccccgactcctggcccagacctccgatgttggccctaggtccaggcctcaaacgttggcccccaatccaaactcgaccctcagacctaaaccccaatgtaataaccgcgtagttaaatcatgagagttagcagataattaagggtttaattattaatttatgattatgtgcttcttagtaaaaattagggcttattgtcacaaatagaccttaagaaaatattttctcaattatagagatatatttgaatgctaggtgattatatgtgttatatgtaaattttcatggattgcatattttatgtctggtaatagtagaatgcaatgtttggcctatatagtcacatagatatggtatagcatgttaaaatcagcaaggtaagatttttagatatttggaatgtcggaaatactggaggtcatggtttggactatttaaccctaaaatatttgagttattttttgggtaagcaagggtaaaattgttatttaccctagattattttatatggttttagtgggattttagttggtttattttaagcttattgttgataaatataagctgaaaagataattatgctttaattatcttaagtttttaaaaaataaagataaagacttcatttaccttctctctctttgttcggtcaccaccaagaaccaaagaaaccaaaatctttccacccaattttagacaagaaaaccatgaatttcagtttagattttggtagattaagtgtgggatagctcaaggtaagcttctcccccttttctttgaaattgtcaagatttcttgaattaggtatgcatttctgtattttgggtgttgtgcgagttggttgtggttaagtttgttttctagagttattttaacattgttggaatagtttttagctggttttagttttgtggtttagcttagacaaatttgagtttttaagctcaaactttgctctttaattttagatatcaagtcaaagggtaacattcatgccatactcctttttttttaaaaaataaaatcaaaacaaataatatattcaataataacgagcgaaaccatagtagcaaatttgaaggtttactagaggagtatttttaaaagttaccaaaaataatataaaagaa

SEQ ID NO: 51013 - DNA, 1889 bp, Cannabis sativa
  modified_base (1623)..(1624): a, c, t, g, unknown or other
cttttaattaaaccttacataatagtgtactatggtgctctatttttaattgtctcagctctcaacatgtttcagcttgcgtgaataacttttgtataaacatacacttactaagattgacttataagtttcaactattgtttttaagttttttaatttatccttacagttatgacttcggttgtttacaattttaggaactttcttattctcttttgtgtctgttagagacttaggattatgactaaatttaaataagtttgattttgacgattgatttatgtttacttttctcttctttttaattgtatagtatcattgattgtaatttatgattttttttttaaaaaaaaaaaaaaactctatcttatctatgcttatctatatgcctttagaacaatcaaaatatgggttaaatatagctttaagatttattatttgaagttacatgaatataattttattattattgactttattaaaaattcatttagtttcaaaaaataactatatatttaattatcttctattagtgtaattctttattagtgtatatattaaagttggtattttttattagtgtatacattgatattaatatttttcattttttttttgtagatattaaaagaaaaaaaaccagctatatatttactctctactgtttcttcaatttcaacttcaataaaagtatatttttttattacttacataaataatcgattaactttttgttctatttttttattaaaacattgtttgttttttcacaaacctatatatataattcatgattataaaatattattcaactttcttgtaaataataatttcataaacttattatattattgctatactcttaaaaataatagataaacatgccactcgacaaggaagaaaaaaggaaacgggcaaatttagctactaaaaaatggcactaaaatctatcggaagctagaaaaaaagaaataaatgagaaaaaccgaattgcatatcgaacaaaaaaactcaaacaaacagaagctcctggttaccaaataggttagtttatattctgaaataattcagattacacaatcaatataaataaaaaaaaatcttaattacctctgctaaattgataatcctattttcaaataaaacaacaataattgatgatcgttaccaaaataggagtacagtatttgaagttggttagttatatatacccttatctcttactcaatttttatgtatctacaaaaaatattaacttaataaataaactattataggatctacttcttcgcaacaagaacacaacagatctaataatggaccaaaaatacacaccagtcttcttatacaccaaactctaaatgatataccaaatgaaccaacattattaccgcaaccttctacttgcaaacactgtcaagcaaagcgatttacccacgaacctaatgacttttgttgcctggatggtaaagtctcattaaaattaaatgattgtctggctacactttatgaattatttacatcttcaacagtagaatctgaacactttagaaagtatgttcgcgcttatattaaattattttgctttcacctatttcggggctaaaaatgacaaaactttanncaaaagaaacaaaggaatatacacatttagagtacaaggacaggtttatcattatattaatgaattacttccacatgaaggcccgccatcttttttacagttgtacttctatgatacagagcatgaagtagaaaaccaaatcaatacatcattaaaaatgaatcaaacaatagctgcacaacttatagaaatcataaatatgaatccttattctttaattttttcgaagtctaagaaacattcctaacttacaaaactacacaat

SEQ ID NO: 51014 - DNA, 2269 bp, Cannabis sativa
aactagtaacttcaaatcttcaaataacaagaatttctagggttacctttgattaagtccacttgatttcagctaactcctccaaaacacggcaagcagcttagattcttgttggttcaagctaggttcgaagagagagggagagagggttcaagacttggtttttgtttatctaaatgagtttttgttttttcttatttgattaatgaaataatacctaggattttaggttgaaataaatcaagatggctagctaccactcttctaagcaaccacctaatccttaaatgtgaaattctaaaaatgcccctcttacttgtaacttaagcaataatatgcctaggggaaaatggtcataattcataactccgcttaaactcgatatttacaatatctcaaatgtttgttctactaataggttctaaaattacccatgtgactctaacggccatccatcacattttccatcgtcgccgagcaaaaattataaaaattgtataattaatatttagcataaataatatctctagagtttaataaaatttccgaaattgaaaaattataactctaatgcccatttctaaaaataggacccacaacatattaaaatcataaataattataaaaatatcaataattaatgctaagtacctttactaattcatattctaacatgcggtcattacattttgttgctttctctttcaccttgcagaaccttgccatggcgccaactcagtgagttgagtgaagctcaaagagagaaaaagcattttaattttccattttttaacttttacaaatttctacaatggtgctttattattgattatttatatattttttcacaaaattataacataattttatatcattaatactttatttgtgatgtgtatgggaatatatatatagtcaattttttagcctcggtgttggtttacttttgtttttctttgataattaatttacccacttcacatgacactactacaaaatctactttaggtgtcggttttaaactgacacatatacttttagtgtcagttcataaaaccgacacctattctacagtgacaaaaagtcaatttttggtgtctgttttaaaccgacaccattgagttttggtgtcgttttataatcgacacttaaaatatacaaatttatttttttcctttagagtcagttctaaacagacacttaaaaggaattaaaaaaaaactaaaatcaataagaaaaaaaataattttaaaacataaaaaaaatataatttacaataaattacatttaataataagactactaacattctacataaaattataaacttatttattcactactacaaacataaataacaaacttatagaatcaaattaaatcaactagtaacttcaaaaatactgccaacatccaatccaagaagttagttgacatttgactagaactagtgaaaactccttgcttgattatctttaatatatatcctgttcaataaaaatacagattagaataaaaaattgattggcttataatacaagatagaaaaatacttcaagagccaacaaacaataggcttagcttataattagtgggtgtatataatccttaccaaacattaataaagttctataacaaaataaatatattatttacaaatcttaaataatatgtaataaactgtcaaaaaaaaaaagagtaagtacacaacaataatcctaaattaaaataagaaatgttacaaactaagttctaaaaatgtagtagatcaaaaggaagcccccaagcaacaaaaaggaaataccacaattaatcaagtaagctattaaatggaactagatttcgaaggatgtgtttttcctcttcatgaactcaagtctagtaaattgcatgtagcatattaccaaaacctatatcatatattaaatatcatgatcaaaacctttgtatgtaaaataaaataaatctaggatatgattgtttcgttgtttactaatgtactcttgatcctatatgcaacagtacacagcataactcatctcaaaatataaatgaatatgtatgtcatggtccaatgttcaactgtttgtctctatacatttattaattaattcttaaaatttctaagaaaattatatagatgatgatatttaagttagacttttcatgtctttattggtatagtggccacatccaatttaattgagcactcatgaatagatggtctatatggagttaacaaggcaccatattagtgctattagaagaa

SEQ ID NO: 51015 - DNA, 1376 bp, Cannabis sativa
  modified_base (31)..(69): a, c, t, g, unknown or other
atgcaacataaaatattatttctgatctttnnnnnnnnnnnnnnnnnnnnnnnnnnnnnnnnnnnnnnnttagggcacaaaacccaatagaatgagactatttgtaggcatacatggggtccagggtttaatgttccacacgctactgaggtctatactatgagaggacgatcttaccattggctagtaggaaccttcttcatcgtgttgtgttcagctgctggtgaggacttttgcacaaccctggaaacatgtcgcgcaaaggtctttcctttacgaaatagtatctacccaatccattgggcaaaaatcatactcgagggtgcttacccgcactatcataacctagcataggggacaagatctgatcctgtgtcaaaaaaatgtataacaatctatggagcgatattttacaaggatctcacgtgtctaatgcctccaaaacccttatcgccattccagttcctcaccgaaaagagtcactcccagagatcatcgcctatcgttgccttccagatctaagagtcattcgatttagtaacctttgatgattaatgtagtgattgtgtcctttccttcgattatccctcgtatttgattgatgaattcatggataacatttaccccccaagctttcaagattctctagattgcagaagcttgctgtggtcctcaacgctggttgtggatacacccttagatgagttgtattcttctaacggtatttacgtcatttacttcctttcgtgtggtaaccatgcggaacatcaggaggtttttctcagcccttttagtgcgtaggaaggcgtgctaaataagaaaggaggggtggtactagcagctgagtgatgtgggaaaaaggaccttgacatttttgtgtgccctaggccaatgacatgggacctctcgcttccctagccattggatttactataaccactctaaacagttgatctctcgtagctctatctcctttttcaaataaaaaccgtctatggtggtgtcagtattttttattctttttatacaaaatttcatactttctttgcaacttcttttaccctttttctacaatcttttgtatgcaagaggcattagaggatctgatcaagagtttagtggtcattccaaaggaaatcttcccagacgttgctccccttcagctgaactagcaaagttcttcttcaaggggaacatttgattttcaagttaattatgtccgcaacatctactggctccaaagctttcaagcaaacattgtagatatgccaactatcccttctgattcgataagtaagtgcactaaccccctatctgagtttcttggcatttcacatttagggaaagaaagcttcttgcttaggttagggctagaa

SEQ ID NO: 51016 - DNA, 1145 bp, Cannabis sativa
agtttaatatttttattagatttttaataatttttgttaattttttcagaattaatagagcattataaattttattttttaaaaaaaaataaaaggggacaaaattttatattgttcaaagtttatgggataaaaattttaatttttaatgaaaaaataaatggaatttaataaaagagatataattatgtaactgttctatgctaggaaattttttaacaaattgtatattttaagagtatgatcaagtaatgattaaataatgtctaaagttgatggaacaaaaatattgattattcaaataataatagtatgtaatattgccacaaatgaaacataattgctaaatgtaggtttgatttattttttgaaatcaaatttgatccattgaagattgaagatggtgtaatatgagattgtaatagaagatttctaatgaggaaattacattgtatatccattttattttgcttgttttaatttttatctctcctttaagttaatgtaaattatatgctagagtaaagatatattgggcaacccacttaaaaaaaaatagatatattttaataaaatataatatgaaagtatttttgattaatggatatataaaaaaaaaaagtatttttgaacttatcctatttccaatgctacacagccccattccatgggtaaactattattttttttttttgattttttaataatatacttaaaatataaattatttacaaaaatattttaataaatttcaattacaataatattttgttacgtcattaaaatataccttaattctaaaataatatgcttgaaacgaaattaattttaaattttatttttgttattatttttctgagttttaatcttttagttacttatgatcttgataataaactaattaattacttttatataaaaaaaaaattatttttaaattatataatttaagatactcgatttagttactactaaaattttatttataaatagtttaataattaattaactaattttaaattatattatgctattttatttaaaaatcttttggcagtttgccttgaatgggaattacacttttttttccaaaaaagtaattcacagtttgcgacaccgaatgcatcatttgggccgaaaagttt

SEQ ID NO: 51017 - DNA, 1342 bp, Cannabis sativa
tcatgtgtgggacaaaattgacgatgcaacaagtattttagttcattccacgattgaatggggtgtctctaattttcccgacagaaccaactcaaagcaacttctaatttttttgtcggtgtcaattgctacaaacttgtaagcccattcatctccagcatcatacactagtaatttaattttcaaggttcaaaacttagatcgatgctccccatcatccatgattcttctgtggcaattggtgagtttatcaccaactctatttcgagcagtttccaatctatcctgtactatctccatcgacctcaccgtagataatactgaatcagatccatccactcttgattccattctcgtagtcacatgcaatcatcaagaacttttgttgtaataccaaaggataagaatcttgttgtagattaatcaactagtagccaatgcaacacacacatctaagaaataacagtagaaaagtattcaaaccagtagcaaatagcacaaacacagcaacaagaatattatattgagtataagagagaattacaagagatgggagcccttaggccccttttatgcaaagagagaactctccatacattgcataccccaattctttccttacttacctatatgtagaacatattctcactcacaaacccattcccagtacaatgactcaaatacacttttttttttttatttaataccttctagctcacccaactaatcctaaggcctaacattcaattcaatgccatggttttcgataataaccccatggtcattgagttggtcctaaaagcttgcaacagttgtcaaataaatcatccactcgagcctccatccttgtcgctcctaacattcaccgagttgagtattgagagtaagagaatagagaaggtttatgcaatgtattgagagttctctctttgcatcaaagcgacctaacggctcccatcacctgtaatactctcttatactcaatataataatcttgtcgttgtgttttgtgctatttactactagtttggatacttttctgctcttatttcttggctgtgtgcgttgtattggctagtaattgattaaattaaaacaaggttcttatcatttagtttcagattgtctactagttgattaatatacagcagggttcttatcatttggttcctaaggcctaacatatggtcatggcaatcaacaacacttaccaaaaacttggatttaagcagacagtcgtgactttttgtttggcaaaagctgtagagagaaatatgagagaacgatcatggtcgagaccaaatttgagaaagtttcatgatgaaaattgaagaaataagag

SEQ ID NO: 51018 - DNA, 981 bp, Cannabis sativa
tgggggtcagttgaaggggctgcagagtaagtttggtttaacctggccaagtttggatcttgatcggtataccgtgcaacgttgacagtaaccttagcctcaaaagttttcttcactaaggacaatccgcaatcctctagcaaggtgtccgggatacatggccggataatatatgtccaagaaattggaagaaatttcctccaacctcggttcagttcctaaatgaaccgactgtagttctctcctcgaattcgttcaaacgaatggtggtgttgtatttttggttcaagagagccactgctgacttccaagtcaaaataatagctcaaagacctggccggagaatcactagatgatgaactacttgcccagtgtcaatttgatcctcaaagagaagggtgaggagatatgcgtctatctggtgttcacccccagtagtcatccggattcatctgtgaaaaagggaaagggatgtgaacattcggacaacataaaaaccatacggacaacatttaaatagccatccaagataaaaacacctcgcataggccgatagggttcctaacagatctaaaataacctattctacagaaagaaactatggaaccctggttcttcgtgttcttcaagacccataatctaaaaatgtggaaattagagccaagattcaacttttttaagacaaaatccctacatatatctaacctaacacacctgtgcaacccattgaggatggattttcctaagttcacggcatagaggtttttcacctcataaaatggcataaaagtaaaaacaaaagaactttcaaagaaagagaaagattctgagaagcttactcactggacagagcctaagtaaaacctggatgctgaagatgattgtttaacgcccaaatgtgacttccactagcggtggttgtagtatagatcgggcggtcgattccacaggaaggtgattatggacaaaagcgttagtaga

SEQ ID NO: 51019 - DNA, 1095 bp, Cannabis sativa
tttttaccaaaaaactgtctctaaatgtcaatttcgaatcaggtgggtgttttcacaccctttagcttccctttttataaaatgggttaaaaaaatggaagctaaaggcccatatttgcatcgaattcatttagaagaaaatacaaagccatctcgtgagtgtcaaataaggctaaattgaaacatgaaagaggtagttaaagaggagatacttaaatcattagatgtacgtataatataccctacttctgatagtttatgtgttagtttgatccatgctgttcttaagaagtttgtgattactgtagtcaagaatacaaataattaattctcactaaaatctaaattggatggagagtgtgcattgactataaaaaactcaatagcctcaccagaaaaaaaactattttcgttacccttcattgactaaatgcttcaaatattagttagtcatgagtattattattttcttgatggttattcaggatacaaccaaatgccgattgtatttgaggatcaagaaaagaccacttttatatgtccttagttatggaatgttgcttattgatgaaagtcttttgagttatgcgatgaaagtcttttgagttatgcaatacacctgtgacatttcaaatgtgtatgattgaaatttttgcaaatatatatggttgaatgttttttttggagatctttatgaattatttttctttatatggatattcttttgatgaatgtttataccatttttttcttgtcttgtttcattgtgaagagaataatttagtgcttaattgggaaaaatgccatttatggtaaaacgaagaattattatattaggacatgagatttcatcaatggaaatcgaagtttataaagctaaaattaatcttattttagaacttcaccacctaagatagtgaaagaaattagaccattcttaggccatgccaattttttacaaaagatttataaaaggtttttgtaatatcctggaaaacaaataatatttgaatagacatattttattaaatatgtaattattttggtaacgaagtaagattgtgatcttacttagggtaactaccgagagtttat

SEQ ID NO: 51020 - DNA, 1647 bp, Cannabis sativa
ccaatgttctctctctccctctacaataccacctccgaatccaccttgaatccacttggaaggcaaaagcccacgccaactccacctcaacgattgaagcccaccttgactctacctcaaatcaacaccaacagccttaagaccttcactagagccacttgcctaagaagacaatgaccttcgtcgctcgtgcaagcttaggtactgtttctgactcattctcatttgcaatctgcttctctctctctccttctctttgttgctagctctctctcttagcctctctattttcgtatgtggttggtggtgcgcggtttgagcaactatagttggtggcgacttctcaaaaaatgtttgatttgtgcattacacaatacatatatgataattttaatgtaatatatatatatatggtgtaatatttgtatttgatttgtatttacacgatatatttctaatttgtgctatttttcatttgatttgagattacaaaatgactagtttttatttgtataatatgtgagatttgtgtttatttttacttttgattgtgctcagatctgggttcatatgggttcggatgtgaggttttttttgtgattgtttagtgtgtctcttataaacagacaggataagtgtaagaattattttttataattgtttgtgagtgttgaaatccaacaaaaataattttaaatgacgactgataactaaagcaaatacaaacgttttttgcatctaaagtatacacgtcggtagggggaaccgatgaaaaaacttttaatgtcaattaaaaactgacaggaaatgtgctttttgtagtagtgtttagcccatcaagttgtatgattggctaaaatgttaggccagcaaggaccaaagactgaaaaattcttaagtctaaggcagtcataaacatcactcccagaactcagtcttgttgaagaggatgtgagaaattgtgaaagatatattttcacagaaagaagccatctccgggtaactccggacgattaacttttcgaatggtgggccaaaatgcatcacgactctaggagagaaagggtcaaattaaaaagcagttcctaaatcgatcaagagataattaagactaatgggaaaaggttagagcactggccattggaactaggtgcttcgataacacaaccatcctttaagagtttaccacaccaaatctccaagggcaaaatttaactgtctctgtggctaaagaagtatggttaaaggtgggatatatatatatataaaaaaaaaaagaaagagaaaacaacattagtctgggaaaactaacgaaggttcaacgttagacactgtaagactgggaggaagagcatgcactggacattcgtcccacggtctctgtgtaaagatcatgaacaaccttcatgctccgtatgaagtgtgcctagtgggcattctcctcctctacctactagttttcttgctgcaaacccctaatctggaacctagcatccgtaagttctgtctggaaggtctcatcggtggcacataggtcacagttggccaccttgacttgctccgactccgtcaccagcacaccagcctctgcagcagccttctccatcttaagggttgcatgtaagaacaagccaagtttaaaaaggt

SEQ ID NO: 51021 - DNA, 1629 bp, Cannabis sativa
aaagtcaagaccaggtctttggtggaaacccttagccactaagcgagcttttagcctttcgaggctgccatcagcattgtatttctccttaagcacccatttgcacccaacaacgttgagagtatcagttcgaggcacaagtgtccaggtacggtttcgaacaagagcaccaatttcatctgacatggcacgattccacccctcatgctgaagtgccatggccacggaagcaggaagagttcgactggaaggaaactgggagtgaccaacaaaagttcgaggtttaaaaataccagccttaccccttgtgatcatggggtgagtggcctgtaaaggagcagcaacagtgatattggcaggattttcaagggaggcagtgacaggttctggaagagcaccagtaggtgagcctgcagatgttggtgaatgcaaggaaataggagagccaatagcagaaggagagtcacttacagagtgtattggtgaggcagggtcaggtgatgctgcaggaacactttgtgaggatgtagaagcatttgttgaggacaaagggacaataggcagagtgaaccaagactgcggagtagacatggtgacatactgttcaggttgcctagtattaagaaaaccagcagagaaaggaaactcagattcgttaaaaatgacatgtctggtgatgtatattcgaccgtgtggactgaggcacttgtagcctttgtggacttcactatagccgagatttacacacttaatagagtgaaactcgaacttatggctttgatagggtcgaatgcaaggaaagcatgacaccccaaagacctttagaaacttgtagtcaggtgctttatgatacaagatttcaaaaggtgatttccatttcaggataggggtaggaagttgattgatcagatatacagccgtttagaatgcatctgaccaatatttgagaggcatttgggcttgtgcaagtagtgttaaaccggtttcaacgatgtgtctatgtttgcgttcggccctaccattttgttcagatgtgtgaggacaactatgatgaaaataaatcccatgttcactgactaaatctgagaaagcctgtaattcaccaccccagttagttctcagttgcttaattttcttgtcgaattgattttcagcaagttttttaaagtgaacaaaggcagacagtgcctcggatttgtgcttgagtgggtacaaccaagtatacctactataatcatcaaggaaatgaatatagtatttatagttggtgtgtgaggcaatcggggcaggcccccataagtctgtgtgtatcagttctaaaacctgagatgcatgactagttgaagtagaaaagggcagagagtgagccttgccaaattgacaagcatcacagaagccatgtgtttcattaacattaaagggtacatgagacactttcaacacttgatttaatacattaatagatggatgacctaggcgtctatgccaggtatcctttagggaattaaaactagacacaacagacttagtggagacattagattgataacttggagaagttgaggaagtacagtgactgcccaaagctgagtttatttgatatagaccatccttaagtgttccttgcag

SEQ ID NO: 51022 - DNA, 966 bp, Cannabis sativa
ataatagggatgataccatttggaaaaatagaagttacaaaaagttaagaaagatactagtaataggctagttttttaagtgctaagaagataaatagagaaaacctattattgtaatgaattttttagtatttgtaaatttaattggtttatttgtgcattatataattgatcaggttgtgttgagttttttttttttttttttttttttgagaaattatacagtaaaattatcttatagattgtgaagaaaggggtttgttagaaaaacccaaatctaagtatgaattgctaataatcatctatgaacaaatttaccaaattaaatgtgcatcttcattcaaaactaattaatcatgtaggtcccaattatattaaataccctaccaatagagttttttatgaattcccatattaaaaaaatcctatatatacaataggatatggagtttcatacacttaatagtcaatatctaagatatccatatatatcatgtttgaataataatattattattgctgcaatccacttcttaaaaccaacacctatgcttgcttgtgtgacaccttttgaaactgtacacatatttttttatataaaaattgcattttggtcaaacagttctaagttttaataatttctgcgtaattatgagtagactaaagacaaaaaaaatagtcgtccttgaaaataaaaataaaaaaatatatatttattttagttaattacaatatatatttataattaaaaataatattaattttagtataattattaaattaacttacaaatataaaagagatttcaaattccaacaaaaacattttgtgtttaactatttaaaatttactttttaaaccaaagtcaacttttttatgttattttttttaattttaaactatttaatatttaaaaatacaagtttatatcagtttttaacatgctataataacaaatatcgttac

SEQ ID NO: 51023 - DNA, 1399 bp, Cannabis sativa
taaacaggttaatgtgtatagcatctgttctctttgtaatggagagttagagaccatatatcatattatggttggatgtcccttcaccaaagcttgtatggatcaggggctgggattttcttttagcgatgggaaagacgaattcggttgctggtttgagtgtttctgcaatactcatccaggtgacagtgttgataaatggctatgattctttggggtgtttggggagctcgaaatgacttgctttggaacaataagattacttttgtagaaagagtagtatcggttgcaattacttaccttaaactttggaagtttgctcagattaaaaatggagttgtcttgacatcttctggtcagctcttgactggtgctgagctctggattaaaccgtctatgggtgagttaaaggttaaatgcgatgctgctctattttcaagggaagagagccacggtttggggtggatagtcaaaatcacgatggtgtttgtattgcagctgctgctgtaaaaagcagtggtgatctcaacccttttatagctgaagcaatgtctttgaaggaggctttgagttgggttaaaaacacctggggagatggagcctcttttgaaggatttgttcctaatgcggtggtgatggaatcaaattgtctcatgttggttaatgctattaatagtaataagcaaattctttctccacttagtcttattatttcagattgtattagtcttatacgatctatttctttgtttcacatttcagttcagtttattaaacagtttgggaaccaagcggctaattggttagctcgttcttctggtttatgtcctgaccctctttccagtaaaggggttgtccttacgggtttggaagttattgtaatctaatttgctttaataaaagttacaatctttgttttaaaaagaaaaaaatacaaaaatttaggagttcaattcgtgaagttttaaagcatgctcatgaataagttaaaattttcatttattcagatcagttcgcaataactatgtttagtaattgtttgacttttgtgaattgtttgaagttgttggctttgtatttcacatatccttcgtcgaaataataaggtgggaaaataataaggtgagaaaaaaaacgaggaaagtgaaattttatttttttatatataaatttttcaaaagtttctctcttacattcccaatttagaaattaaattttttgtactttatttcctttgtttctcactaaaattcgagaaacttacaaaaatactaaaatttaggttaatttttataaaaatattgtcagataaaaatcttttaaaaaaatactatttttttataaaacaatagtggaacacaaaatagaacaactaaaaacaacagtgaaacaactaaaa

SEQ ID NO: 51024 - DNA, 1079 bp, Cannabis sativa
  modified_base (124)..(129): a, c, t, g, unknown or other
ttgttaaggattttaatgttggtctcgacttattccccatcaaaggatgggacggaaaatcccttaataggggcagggacgaggcagagaatttcctaataaaaaaataaaatttataataaannnnnnaatatataaaaatattaaactacatgaaaattataatgttacacattaattattatttaataaactaattattatccaaaacacaatttaaattcataaaaaagatactaatatactaaaaaaatacaaatataacttataacttataaaatattattagaaatataaaataaaatactaaacgggtccccatcggggcggggattatcatctccgtccaatttaacatttagggacaaaaaataatcttcgttcctgccatgtttcccatttagacagaaaattcccgtcccattaggggcgggtccctacagggccatccctggaaggaaatgtgcatccatatttatggtgctcaatacctttatgatgtataatattgttgttggtgtaattttatatcgagtcccacttattttagttaataaaaattataaaaaactactaactgattataaaaagtcatgtcataaaggtgttagacacattaataccccatctcaaagtatacattatataataagtaatatacattttctcacaaaggaaaagtcctaaactagaagtcattcaaaatatgaacaaaaaatactcaattttccatgaaaattactcattaagctataaataatagaggttagagtgttgttataagacactagtggtatctagcacaacttataacgacacttcgtaaataattagcgatattctacaataattattacactaaattatataaaacttatacttaattacttcaataacaatataacaccacgtacaactagttcctttttaacatttttatcaacaataatatgagtagtgaaagcatagctttgagtcactagagcactactaacaaataaaagttcccaaaaacattatttcacttgccaacaaatctctcattaaaattggtcaaaaaaataaaataaaatactatt

SEQ ID NO: 51025 - DNA, 669 bp, Cannabis sativa
atttaattataaaaaagaaattatgttatgaattatcacgactatgaataagaacaaaaatctagataaattaagggctccactcaatcaatagtgttataccaatatctcttccatttttttgaaaaaaaaaaaatctcttccatttgcataaagatctaattaaggtctatcatacattttagcgtattcattctgtggtcaacttttatataggcaatcacatggaaaaaaaatcttctgtcccaaaaagcatgtctccaccctgtctcatcaacaaatttaagctacctatttttttttttttcatttattagatattttaataaaaaattataacgttaactaaggttaactgaatagttaactttcatcctatatttaatgctatattctctctctcagaattataaaagtctccttctaatttaataataatacttttcaaagtaaataatattttatacaaacaaattttttttttttatctccactgtagaacgatctttttttttttttggtttttcttactttactgaagaagaaaaagaaaataagtaagctccattttctattttttcatttgatttttttttttttgttttgggtttctcttattttattgaaaaaaacaagtaagcttcattttctattttttattcttatttt

SEQ ID NO: 51026 - DNA, 981 bp, Cannabis sativa
ccataacccaacttgttgtgtgcaaataacacagctgcatcgacattcaatttgcagaaaccaggaggtgacgggatccacggagaatgatcagcaaccctaagatctttttggacaatggagggtgtatgtgaggcttgagtaaaatggctgagataagccatagaaccagcaaagatttcagccggctttttgcaggatttttgatgaacaacactgttcctattcgaccaaatagaccacattaagcatatgatttgttcaagctccaatttggtgtatgtctgagacaagtgtattaaaaaatcccctgcattcattctgttagctgctgcaaaatcaaaagaaaattccgagaagcgccaaaccaatttagcgtgtttgcaactgaacaatgcatgtccaaccgattcccacgcacatgtacataagctacaagagctagaatcaattattttcctctgaaataaactagcagccactgaaatagagtgatggaaaactctccaagcaaatatcttaaccttagatggtaactttaaactccaaaaatatttccactagtttgcatgagattcagaaccagttgtgttttcttgagtggctagagagtaggcaagttgataacctgactggacaatatacacaccagaagagatataatgccaaataaaactatcatcctgagcagcaaaagaaagtgggattttgagaatattatcaacatcaattgttgagaaatcattttgcagttttgtaacatcccacactttattttcgattatgtaatcagctacacaagagtcaggaaaaccagtaaacattattggtgtgaaccggatctgtgctggtatccacgactctgaagcagttcgaatgtgggagcccgatcctacttgcaatcggagacccttaataaataaatctttaccctagcatatgccttgccatgtcatggatgatacaccagcagaagaggca

SEQ ID NO: 51027 - DNA, 869 bp, Cannabis sativa
cggcggctggccctggaaccacttgaggcttgtcttcggcgtcggagtcggctgtggtgttggaattggattcgggtacggtcaaggaatcgggtatggatactcttttgaatccctagaatcttacagatccgactccaacaaaacaagtttcattaatatatgacatttccctttttcccgttgctttcatggacgaacgatttctgtttttggggagacttttatgtacttggcttcctattcttgaggataatgttcgggatttatgattattgggaagaatttcttggcactcctattcttgaggataatgtttgagatttatttattattttcgaaacggatttgagatcttttctttattttttttttctttatcgggaagaatttctcggcacttttctttaattttcttataattttaaattttcataatataattttgaatgatttaagtcaatttatgtcttactgctactactctttaatagcaataactgtttatatgtgaattgttatacaaattaagttgctgttaattgaattaataatttttatatagaattttgaaaaaatatataaaaaaaaattattttaaaatataaaaataaaaaagctcaaaaaaaaaaaataatacattaaaattttcctgtaaaaaaaataaaaaaataaagaaacatgtactaagatttcactacattcttagttaatgtgtaatttcatacttaatagaaattaataaattatagcttgtaattttattttaagagagtttagaaacaaggtgaatctcaataaaaatataatttataatggataataataacataattaggtggcgtttggttgggagaaatgaaaagaat

SEQ ID NO: 51028 - DNA, 940 bp, Cannabis sativa
  modified_base (385)..(396): a, c, t, g, unknown or other
gtggtgcggttttgactatttttttaaattaattcgcacatgtaatttttctaatttctcaaacggcatccgcactgcgaaacttaaaaattgcagaaattacaccataaaaaatagtacaatttgagcggttttagcggtgtgataaacacccctaggagccacacaaccacccatcatgtctaatgctctttcccttctgttggatccattcataataggacctataataccaagttcagcattcaaccaagaataacttttgacagaaggattatctctttttttatttgagtgtagcgtaatgatattttacaatcatttaatagcttaatagtttcaaggtcttaagttcgaacctatgacctctccctttttcccatcnnnnnnnnnnnnctaagctagccttagtggcttaaacagaaggactgcctcagtagcacttgaatatgcttgcttccaaatgaaagcattaaaataacatggtcgtttctataacctgatttttgttcttgttcaatttttcctcctaatatcacttaaaaaaaactctcaacctaattaaattctcacaagctttaacaaaagaataatctacgtgttaaaaaacacgttgttatttaactgtttgaatttagttaaaattagttaaacattgttagtttttgttataactacagatatattgttttagctctaactaattttacattgtataaatattgttgttgtattcattttcatgagaaaaatctctttctttgcaatatcatttttttcttttttttcttctctttcaaataaaaaaatgtttcaccatggtatcaaagcacttcctgatgttaacggcgaacatagcgattgcttccaatcctaatgctactcaagcaaccttgaacgatgcggcaactgcaaagaataaagccaaagttggtgatga

SEQ ID NO: 51029 - DNA, 637 bp, Cannabis sativa
acaaaaaattattaaattatgaaacatagtaattcataccaacaccacaaaaatgatattactattgtttgttggtgtaattcaatattaaattttatatattttaatttaataatttatatagaaaactattaactacagtcaggactaatcttaagttatttagagcctaaagtaaaataattttttgggatccctatccaaatattttttatatggtatataatttgatgaaatggtaaaatttatttgaatgaaaagctaagggattaaaagtttgagacaccatgtaattagagaagaagtattaattatttggccaaagtacgagcttaatctctaacaggatctgctctgagttgaaataggcttaaggaaaaaaaataaagtgggcccttattatatgaataaatagtatttttaaaaacttattaaaaaatatgtatattttttaaaatatatttttttattgaggcccctaagatgggtggattctaagcacgcgcttagtccacctgagcctagggccgaccttgatctaccttagtctacagccagtcttgcgtaaagtatatattaggcaccattgtgtaacaaaactcttgaattatacgctataataatagtatgatatgta

SEQ ID NO: 51030 - DNA, 788 bp, Cannabis sativa
tgattttctttttaacaaaactgttaatttcttcttaaaatatcacgtgttgatattaaatcgtagcataagtccttaaaaagttcattttgatgaagataagtcttcaatctcaaaaaattgtggcaacagtcttaagttgaacattctcgttaatccgtaggtacctaatgtaactgctcaatttgttgttccaaaaaataccatgtgttgatttttattggtcaaaattatgatttattaaaattaatttaaaataaacaaataaataaataaataaattgaaagactaattaattaatcctttttaattcttatctagcttctttgcatggaatcgtgagataagatgaggaaaaaagtggagataaaaggatgacacttgtcggcagcaagcctccaccaccaagaagagtgggtggcgaatcgtagaagttttttatatatgtattttaatctttaataaaagagaataaaaaaatatatcaaattttttacaatatttttattatttaaattattttaaaataaattttatgttgtgaactaataaatttttgacactcttttaagaactacaaacaaagctgttaaattgggtacctacgaattaataagaatgtcgagcttagggaatataaccacaatttttcaagattaggactcatctgcaataaagtaaactttttaggaacttatttgaatcaaaataaaatattttgggacttatgccgtaatttaatatcatcacgtgacatttttgggaggaattaacatatctattaata

SEQ ID NO: 51031 - DNA, 1516 bp, Cannabis sativa
  modified_base (1469)..(1475): a, c, t, g, unknown or other
cttatgcaatctccatttttttttattatttcctttttaaattctctttttttttttggcaacgcttttcaaaattctcttaagacaactcatttggatccaaattattatgattgcctatgtatgcctagtcattagtacttaatatttttttaacaaaatattgaaaacaaaaggaaattaaggaatagacaagagtgattgagtaaaattggatttgatgttgtcaaataaatcaaaattcccaaaatgcccttcttacttaaacttggcgttctagatatctcaaatgtttgtcgtgctaagaaattggttctaaacttacccatggactctaacggccatccatcgcattttccgtcatcgctgagcaaaaaatataaaaattgcataatttatatttagcataaataatactcctagagtttaataaaatctatagaattgaaaaattatgactataatgcccatttctaaaaatgtggcccacaacaaatgtaaaatcatatataattataaaatgtcaataattaatgctaattgcatttacaaatacataatctaatatgcggtcattacatggaggctgcacgcagcctgtttccttagccaaactcccatcttcgcgtgcggtggagtatgcaatgccttctctcattttttgccaatttttataatttttcaacttttaaaaatcgtttgtcaatgaataaattcaaattttagtagaattttacgtagaatcttatatttcaaataaaaatctaattatcatattaaaattaattttttcttaattacattattaatttaaattagtttcagatattagtaggctttaaacttgaaaaactgatttctcaacaaactgtctatttttttttatcaagaaggaacaaacttcattaatcacaagcaattacaaccaactctaagcaacaaaaacaagcttagaccaaccgaaaccttatttacaacataattgctctatgtacattctctcaagtctatctattttcctcttttttgctatattcaatctatacaaggaagcttgtttaatctcctgcactatcttagccgccagccaagaatagcctctaaaaatacaattgttcctgttaatccacatattgtatatcacagcagctaagattaccatatggatcctgtgtagcttgttccttctgtcaagaatcaaccaatttttctagccatcaaaatcaaccggccaagtctttttccccaaccagcacccgatctgctctagcaccatttgagagtagctgcactcgaaaaaaagatgttggtttgtctcggttgtatatccacaaaccggataatcaacattgtccaacacgatgtgaaactgttggaacttgtctcgagtgagaagctgagtatttaaagcttgccaaagaataaatctatgttctggcatgatgaaagtgttggaaatttattttacnnnnnnnttagatctactcacaaatatgttgtttaaacaccctaaata

SEQ ID NO: 51032 - DNA, 1125 bp, Cannabis sativa
tttttatttgaaaactttatgaaaaatatagtaatttaaaaaaataatgccacaaaattatgggtagttgacaaaaaataaaatttaaatatagaatatccacaaagtataaaaataataatactataaataaattaacatgtatatataaaacctacccaattctcaccttctaatttatcaaacaacaaaatggagaataacaaaacaagatgatcactgaaaaaaagttgacaccagagttcaccaaaaatgtcttcttcttcttgcgtggttgtttcaaaatattgttttgttttcaaaattaattttttattctcatttatttatatgacctttatcttatatatagccaagtaacttgttaccataacgacaggtttgtatattgcagttttttatttttattcattttaagattaagcggtaattttgtccaaatttcaattttgatttttattagcataatatgtaatttttatagtggtaaccagttaccatcgcattactaagaaaaagtaaaaagaatattttaataggagtaactagttacctaccaccacatcaatataaaaagaaaaatattttgatagtgttaactagttacttatcagcacattactaaaaacataaaatctaattttatagtagtaattgattactattacatcactaataaactaacaaattggtagtgatagtcgactattttccgccacgaagaaaaaaactattctaatagttactgccacattaacttttaaaataattaatttgatactagtaaaaaaattaacaaaacgaaaattgagtcaaaaccccataggaatgtcataaaatgatgtaaaaatcataaaatatgtacaaagttgaaaagctaatatatttatcaaacttatacaatgtaaattccacttttacatcccattaactgagtttttgggctttcaccttttaataaaaattgggtctatacatttttattaggttttttacaaaaatactaatttttaagtaaatgtatacatatatactggcacgcggcaaaaattatatttttactgtcttagcctttttttttcatttatactgtaaacaccgaaaaaaatgaggcttccatcttcc

SEQ ID NO: 51033 - DNA, 1714 bp, Cannabis sativa
gtcaacctggccaccgagcccaacaccaggttaacttgggtgctggaccctatttctaggggcttaggattgtggttttcttcttgtgtttccttgaatcttcaatatttctgatgaagaaaaaatgccagaaagactttttgttgaacttgatcaaaaatagtccaatgacaatatgtcaacctgggtgttgggcccaaccctagtgccaacctgggcactgggtcccaactttggcctttcagaaattttggttggtcccccaaaatagttgaatctcaatattttttgaaaatggaaaagatgctagaaagaattcttgaaaaactccatttgaaatggtagaggttgagaggttcacaaaatgtcaacctacgcgcaaggccagcccccaagtgtcaacctggccactaggccctatttttagtacccaagaattgttgtttttcctcgaaaaggacctattcccccatttttgatgaagacaaagaatattcaaaagttagatctccgatctgatacttggaaggagcccagattgacagattgtcaacctgggcaggtgctcggggccccgagtgctcaaaaattaacttgcttcgattctgattctaatgcctcaaatatattagtggtttgtctagttgatgtctcaatgcaagttttgtcccttttgcactaagacggtcccagaaattgaaaccctagttgaggatgtcaacttgggcgtagggtaaaactctaggtgcccaggttggcttctgggttgcaggttcatgtaatttcagctcccgaacattgtattagattgctccacatcttcatggtacaaaatattgaaagatagtgagttggattcatgttattgaattctgaacttccattccagagttcccgaagtcaacctgggtgtagggcaatgaacccctcccaagttgacctgctatgacttggaactactcaactctgagatgtcatctttcttggcacgtgtcaaatattaatgtccacgtcatcagagctactcttggtgtaaacacctttctttccattcccaccactcttctctctaaatctactcattttttcccattaccttcatctttagaaactccttttccccttttattattcaaaccattaatcttagaagatttagagcttgaacttcttgtacacaccattgccactataatctcacattaaattcgaatcctaacacaaacaatccaacaactaaagagagaaaaaaaatggaaccctaagagagcaaaacccacacattttaaacctaacagagcacccacaaagaaggaaaagaaaatgaaaaaggaaactaaaaaaaattataagaataaaaaggaaaaataatgttttcactttcctttcgtatatacgtgtaaaaaaaattgaaaatatttggacttttttttttttttcaaaatttggtcttgctagataattctcaaaattttatgtgaaaattacatcaaatatgggattttataaaaaagttacaaaaatatgacatttataggtttgccactcttttatggtatttttttacatttaagattttttatggtatttgatatgccataatatccaaacccatatttcatgtttacgcttatagcttaattatttttatttattttttttttagtttattttacatttatattttagggtttctttctatttgaaaaattta

SEQ ID NO: 51034 - DNA, 718 bp, Cannabis sativa
agcacacttgttgatttatataggtggatagctggatccaagatgagtaaatttataaagagttatttttcaagtatctttgcttctttagcatgccatttgtggagaactcgaaataagttttgtgatctcaaaaattaacaaaattgtgtgtacttgtaaacaaaatcattgaaagtacaacaagtaagattttattgatttggacttatcattttagttttgaaaatggtatttggtttgaaaatcttataccaaagtaagatgagaattatgtatagaactcagacctttaaaaaggtgttgttagcttttaaagtttggttttatgcaaggcacctttcataagtgacatggttaatgatattctttaaaagttattctcttaagttatataggacctgctacttatttacactaatagcggtatgacattaaggagggtggtaggcactagtaccttttagcaattctctttctgatttttcaaaaaataaatatttaataattaatgtataatattttaatttttatataatttaataattttatacatttaaaattttaaaataatctttatttttacaggggtttccttctgtctccacctcgtctccgataagaaataattccagatggaaactaaaatctttaacggaaatgaggatggagacgggtgagaacttcccacagaatattcatatactagacactaggg

SEQ ID NO: 51035 - DNA, 2109 bp, Cannabis sativa
gcaccggcccaccattagaaaaatccatgggctccttagcccttaacacattcggcccaatagccacacacggctcacacacatttagagaattagggggtggggccccagccgactgtgcacccataacagcgccctattcaacggcccagaaggaaaaggcccagatgtatcactcagcttagaaactggcccagcccttttgccattagaaaaaaacaaactaggcccaaagcccaactcagctttcttatcacttggtttaagagaaaccaacgggtataaaggtgtattgattttttatgttattcgtttcttttttatgattatttagcattttgtatgtttggtatggtggttgtttttaatagatttttaatagttgtattgtagttgtgttacaatgtgttgaatcatcagtcattttgactttttttttttttttttcagaaatgggaatacaagtactttgaaccgatcacttcaaattgaaggtcccatgtacttacacttacaatatcattgagaaccttcatgtatgaattatgtaattagatattgttaagaaaatatttaaacaactattatgaactgataaacaacgaattgtagtttgaggttatttttgtaagaaatcattgctttaaatacttcaatatttgttaacaactataaaaattgttaacacaacatggaagcaattgaaaaaattaatatatcaaatatgatattttaatcgtattaaataatattatatctaaaaattgttattgtaatttattatcttgagattttcattgcattactttggaatattattgtagtgtttactaaaatgtccattaaccaaattgttttcattatttgatcaaattgtgcgttgaactatattagaaatgaaattggttcattttcttgaaattttgaaattttgattataattagaaatttataaagaaactgaaatgcaacatggcattgataatacaagcacgatagctaatattttatataatatatttgttgtaagacgactattatacaacttaaaaaaatgaataacctccccttgttattataaacaaacttactacaatatagtttcttgcatatgactcctacattttcaattataattcttgatttttttcattataagatattagtaagacaactatttgacaatgcataaacaacatactggcaattatgtatgaaatatgtgttgaggtattgttaaggacaattttaactaactaacaaagatttgtagtttgaggttattttgtgaagagaacattgcaaatcaacatccactcagcctttgtttagatatgaacaaactaactatattagaattgcttttatgagagctctgcgttgggttgtctatactaagacagtgtaggctaattaatgcataagtattgctacatcagttctccgaccatcaataaaaataaaagacaattgtacggcaactaaattgcaaccaaaatatcaaaatcatgtggtcaaatttatgatacgagatgaatgcaaatttagtttaaggtcgcaattggaattgattaatttcaagattgaattttcaaaaaataacgttaatgcaacaattagaatgtaacaattatatgatatcttatttggattggtcggaaaactctagatcaacttcttaccgatttacatcttggcaatctttaaattttatttaagaaattagtctttcaaaatttgaattaatcttcatggttgagtttaatgtttagaaccagtttttttatagtttttttgatcgaacgcctttggttgatttttggtttgggtttttaattttttagtttgttttgccgaaattaatagagtttttgtagccgaagttgttgcgttgttgcagaactgggattatcattgtataggtttgtatccctggtgcaactaggatttgtgagcaagaggtatttttgtaataaaatatatttgggctatataaaaatttaagggaaaaaaacaaaaaaatacaaaaaaggaaaaaaaattacaaaaatactttgggccggcccattaaacatttatacagtccacatacaaatatttataaaaata

SEQ ID NO: 51036 - DNA, 904 bp, Cannabis sativa
ctatgtgtcaggcttggttttgttttttttttttttttgcttcacgcacgttaatggactttgttcttttaattttattttttcttattataaaaaccaaatatattttattaaaaaaaacacatatataattttgaatcccacccctatataacttggcactgaccctggacccggactcgacccaacatccgaactcgaatccgaactcagacccaaatctagacctaaacccgacctaaattaaatcaaaaaataagaatgataataaaattcacagaacacagtttgatgaggaaaacaaatatgagaaatacaatagataaaactaataaatatataatgatgatatattcatgcaaaaaaatataccataaacaaaactaatgcaatatatagcaaacaaagaaaatatgagaaaagttaaacaagaataatatgtatgattatggttaatgtgatggtgatggccggtgctgttatggcgatcgttgtagggttcttggtgaattttgtccctttctcgaagggaagcattatttattgtggaggtagcataatcgggttgggttcggtatgtatgtcccagacttggtgagtgttgcttctacagtcagtttaggcagtcttgttgctaccccaattttactatgtaccaaatctagttaggcctcaagagacttgtgtcgctcctaataatattaatatcgcacgaattagtagtagtagtgatgatgattatgtctcaactattactactatttgatcaatttactgattctaataataagggactacaaaaaaatgttacttctggtaataactttttagtcacaacataatttttttgtgattaaatgtgacattttagtcacaacaaaatgttacttatgactaaaacata

SEQ ID NO: 51037 - DNA, 690 bp, Cannabis sativa
tttaacacaggtgcaatccaacgctcacagttaagaaatacaatcaagaaattctttttaattggctcctcctacaattaggagctagttcggccactatttattagtggtatattttttgctagtagagaagcaaatgaggttgcacatgttttgggccaattatgcttttttttttttgattaaagggagggtgcaagcacccattcattaaaaggccaaaacagaacaaacaaccaaagttcaagagataacagaagataaaaggaaactaaccaccagctaactaaaaatggaaaaaacaagctgtcaaagtgccacacagggcgataaccaataaaccaaattagcctattcctttagcacctggattccattcctcctcgttggagaacactcccacctcgatcgctcccagatcgatatcacctgtaacattgtgtagcttcgcccatttggccatgttgtgcgcacagaaattctgcgatcgcggaatgtgacatagtttaaagctttcaagagggtgaacattgcttctgaatcggtcagcagccccggccagcttttggtgatagttatcagggatagaagaattaaagtactgcaccacagggctattatcacagaagaacaacacgttgtgaagattgtttttggccgcgtagttggctgctatcaccagcatggtag

SEQ ID NO: 51038 - DNA, 2311 bp, Cannabis sativa
caattgagttgcggttgagaattttaacattgaccacaagaagagaggaggtcgatattcaaaaggataagaggaagaaagtgaaccctagtgttaattaagattatttttaaccttttaaatataactgtaaggttagtttcgaaagaaactatttaaggaaggtgtagagttataattatagagtaagtaggttattttatagaatttctcttataaaatcctttaaatttgaataatacaaagactaattttcaaaagtaggataatccaactaatataataattatatgggaaaaaagtgtacactttttagcataaacgaagactagcttccactataacatgttatcttaataatatgtccaaataatactagtgtccaatcctattacagatcaaatgaacagaaaacataaaatttaaacatgcacacatatattactgtaggacatgcccaacatccaaaacattcattggatgtgctaaagaatgcatcagactactgtctgatgttagcattctccgaacaatgaaaactaaaaaaattgttaaagatgcaatatctgagggaaaattaatttctctattaacatccatcttttcctcttttatcatactaccatggagtctctaattttctgtgatgtagtcaagtagcagctgatacctttgtgtatgtaactaatgtgcaaggtgtaaagcagaaaactccatctgggtcaacttcaactcggtccagacaacttgctccttagatctttgagagcgtctactacatctgaatcaagattatgcttcaacaatttaccttggaaagaactggatctgcaatggtagaccacaaatcagtagcagttgcatcaattgtcattagcatattttttttcctgatgtatattgaaaatgaattgctttaacttaatcatgatcataacaaagactagtctggattaattgacttaatcaaaggcaggcgagcacaaggctccacaaactgagatctgatgcccaatgaaatatgcatttaaatggtaagccacagataaattagattattaagtcaacaaaaatttaatataacatgtgattatataatcgtggtgaagtcttcttgatcttttcaattaaacgtaactattgttcacccttctttctccattgaattccaagttcatcaagttcagaagtcaaaatacttcaaaacggagcatatgtttactgactcatgaggatgtacaacatacctatgttcttggagcatcatctcaacctccttctttgatgctttaatctaccaccaaaatcaaaataacattagaattcaaggtattaattttatgaaaaagaaaactaatcaatacaaacaacttgaattcttggtcaagttttttcttcacgttcaaatccaatagaacatctatattgcaataacctgacacttaaaatttaagtagaaatgttttgaatcgaacaagagtactgtggccatgtgtttatttatagggattatagttaatatatatctatagggattatactaaatatgtctatatagcataaaatgtttttttaatattccaatttaaaatttaaacacactgcacatatctaaagagtatctttctacattattatttttgttatccaatccgcatctgaaaaaaaaaatattttcttttattattattttcatttttaacaataaaattgaaaaagtgttgatgtttcttaaaattaatattttgaattacaaaaaaaattatctttctattactatttttaaaaaaattaaaaacaacatttataaaaaatgaaaagtattataaaattaaaagtattacggttaaattaaaattataatgaacaacatataaacaacacttaaattaaatattttttaataaaaaataatgtttattgaataacataaaaaaactaattgtacaactaaaaatatacataactaaaataaaaacttaaagtataattaaatataagtgttcatgttagaatttggagataagatgaatgggatccatctcaaaatcaattggcaattggaggagtaactcattcttcttatatatgataatttatttccacacattagcaacgtgggacactctaatagttcaatatatatatatatatatatacacacttttatataacacaatttcatgccaatggacaacaacgaccatgatgcaaaaggaagtttggtttgatcatatttcttactagtttccccaataaatttgattgacaaagctatgagaagttatccttattttttctttttcttttt

SEQ ID NO: 51039 - DNA, 1263 bp, Cannabis sativa
tgagcctaaatatattggtccacttattcttactgttatttagttttcagatgagtggcaaagatagaaaaaaacaattcaagtgaaagccgattaagtttccttaattacagaaggtcctcgaatgattatgtaggcctgaaaagagaaaggtctaactcgagagaggtagagagatttgccaagtggcaaatgactaccaaggacctggaatcctcactatccctccaagtctcgaagaagatcgactaacttgagtatacagggaagtgccgaagagccatgcgaagagtccaagtcagatggctttattgacggttattcttttctgacacagaatcagattttgtcccctgcatcagaccatggtagtacacgtacctttgagtgttttgttcaccaagtgcagacctttgcttgacacgtgccatgaaccagcaatggtccccattgtacggatcactcgcctcacgagaaagaaccatcatgggggcccaatagtcagatgtttatgtattttaccccaatagagggtggactttttgcaaaaaccttagacgggtcatgggtatgttcatgcccgcactttagcctataaatatccctttatttctacacaaaaggggggagttgacgctttgccaaattctctctaagctttcttcttctttaagaaaaaccaagagagaggagttagggttttactgtaaacaccatatgtaatacatttactagtcttcaagccaatatactgactcgtggactatggataattaacgcctgaaccacataaagattataatctactttatttactgttattattagttcttaagatcttatttaattagtttctaaaaatctcgataaatattttggtatttttactgagagctgaggaaagacttgagccacgctgttactacaaccatggtggctacacccaaaatagtgataaagaagactcctcacgaaaaccccgacgtggtcatggaagatgtaaaccctctcttctagagcacacccagccgagcaatgtgagagaaggggatacatcgaaagctgacgacaaaggggatggcccaactcaatgtcgtaaacaagtcaaaggcaaacaccctaccgacaagaatgaagaagaggatgatgaagcatatgtcaagattgttactacaatgatggatactattattaacaagacccagatcttgtttgagtatccaacgaactacacgagacccagtagaagttagcccatcaaga

SEQ ID NO: 51040 - DNA, 2015 bp, Cannabis sativa
ggatcaccttcgaaaggttgctcataaagataacaagtatccaaaactgatctgaatttgtccatttgttgttcacttcgtaaagccccacccaacttgttttagtttgaaagaatttcattgaaatcgccaatcactagccaaggcatcaaaggtgcaacatccttacatctctcaaggagtgtccaagtatgagttcgtttgtgagtttcaggagcaccgtaaaagacagagaaatgcaaagatggcccattatcacacttcatgtagcagtcaaatatattaatattataattaagaagagttacatctatattgtctttccataacaaaagcaaacccccacctaacctgactctaggaacttctaaaccattaggaaaacgtaatgcctgacgataacgagtaactacattacaatctaatttagtttccataatatataatacatgaggagtttgctccttgacaagcaaacgaagttgtctgaatgcgctaggattccccaggccacgcgcattccagctaagaattttcatggctggttgcagggctgtgcatcagcctccgcaatgttgtcaaaggaaacggatggatctatagcagaattagaagaaatccggttcatctcagcaccagtggacaaatctgaatttgaggaggcgagttgaagacccttacaacgctttaaagcctttctcattgacatgctttcaggcagcctctttgaagatcggtttggtgactggttttctttgccaaatgcaacagcagtagtcatgcaaatggtggaatcggatatgataggagcatgaactggtgaactagccattttggaagcagtgttgataatgttggagttggttgattcaggcggatatgtagcaatgtatcccggtggtggtccgatgttaggcatgaaaatttcagacaggtcactctcatttggggaagatggtaaaggattgggagatgatggaaccttatttttttccataaaccagtgaaggagagacttcctttgttgttgaaaaagatggattaatagacagcccattgttttgaacacccctctgactcccaagagaaagtttacttcgattttgtgtaactgtaagaccagaagtaatctcagtaataggtggattcatatctactttagccttatttttccctgctgcatcatgattagttagtgtcccagccatcgtagcatgattatgcaccagagaggcagagtttaaagttgctggtgcaaaagagaaaaagccactggtatgagggtgagtgttgtccgattgggggagattgccatcagcaaaatgttgaattgagatgtcattagaatgttcttgctgttgacctgaagattccccataaagcaatttttccggatgtggttgaccacgaagagagagagcagggatggtacttgttattgcatgactactgctgttgcatttgcatatactgattcctcatcaaaagcaagtactgattcctcctcttcttctaaattgataatacctttcattttatgagttcatggatccatgttacagggagaagttgatgatcaagagtggagaatgggatcgataaggtgaagatggctatgataactgcagaaaactagaaaaatggatgaaaaaaccataaaggaaaataactgcctgagagcaaataacggcagacgctcttttaaaatttcccaattttaactttaaactatcataataaataaaaaaaaaaaaaatatcacactatacttaaaaaaatatcacgatttttttcctaaattaaactactacactatcaccataacaaatatttttttgtattttttccaacaaatcacgtaaaaattccaatcatatatgctataaacttaaaaaaatataacaacactaaaaaaatatatctaattaaatctaatcaaactcaaaaaaaaaaaaaaatcactaaaccatataatataagtatggaagaggtttcaatggttacatttttattgt

SEQ ID NO: 51041 - DNA, 561 bp, Cannabis sativa
acttaactttttaatctaatatattaacttaaattttatttccataaaaatattttaatgaattaaaataaaaaaaaaattaaaaaggaattttttttttttttgggaatacgaaagggttaaacccttatccatcttcttcctcctgccttcttcaaccaaaaagaaaaaaaaaattacaggctgttgaacaaacccagaaaccaatcccaaaccaaccccatggttccccacagtcacaaatgttaggattcctaacttcagaaatatttttcatgatctcatagtatctactagggctaaatattcgcaaatggcttcgaggacttacacgagatgaagaggaagcatctcccattgccaatcaggttcgtcttcctattcggtgggtctggttcgtcgatgcttttggctcctccgtctagctcgtcagtgagtgaaaaacgatgagatttggggttgatttctttggttcgaagaatggaccatgagagaagatgaaaggaatggaatttggggttggttcgcgattggtttctgggtttattgcaactgcctgta

SEQ ID NO: 51042 - DNA, 1166 bp, Cannabis sativa
  modified_base (1119)..(1127): a, c, t, g, unknown or other
ggtgagagagggaggtcggctaagagataagaaaacccaaaattttttaatttttcaagaattgattttgttgaataataaacttaattggtcaaatgaccataatgcccccaaggcatatatatccatatacaattaaaaatggtaaacatgtcatttaactcacacttatacatcacaataattcaaaatttctcatttatcatataaataccaaaaataaatcccaaaaatgtattttgggctccgaacccggttcggcccaaaatacctagttgtgactatattgtgccgacttattagaaaatacttgtaaatacacccaataaccatactatataataatatagtccacaatcacattacatcataaaattatgattttacccttcacggatcaaaattacgaaaatgtccataacacaccaacggggtcttaaaatacaatacgccatgatagtttcacaaattaaattatatattgatataattccttattaatacataattaatctagtaagggttgctaatccagttatttaaccttaaggtattacggtattgcattagtattatttaatacaatactatatttagtattaacttgtattaatagattgtgtaaaattataatatattttcaataaatttgaccccaataccaactacggtcgggtccggctccaggttcgggtccgggttctagatccgagttctaggtccaggtctgggtttgggtcagggttcgagtttggatcagaattctagattcgggtctcggatccaggtttgggtctgaatctaagattggggttgacccaaattctttgtaaatattataatacaagctaatacaaactattttttatgtattaaataacacaacttatattgtgttaaaaaattttgtagtaataattaatacaatacattactttagttaaataatactatttattatttaatacaatatgattcttatacgatgtagccttagtacattttctaaaatacatatgaaacatatatatttgttaaaagggtatgtagcaacataagtacctaaagttttattgtttgtaagcggcataaactcaatatttgtaaaattgtaatttnnnnnnnnntttgtcagtacagactctgttattgtcttaaacaaggca

SEQ ID NO: 51043 - DNA, 724 bp, Cannabis sativa
gccagccaagaaggagctgatcattgacgatccactgctcaaaagcagggtttatgtcacctgtaatgttcacagtaccatcgttgttagtaatggtgataaattcttgtggtcttagtaaggtacctttgagatagccatcaagtctgtggcctcgcacaatggccgacaccatcgttttccatagcgtgaagttgtttctgtccaacttcaaagcgaaaggttgattgagagtattcccaaattggggcacaatgatattcggagtctaagcactgctttctccaagagccatgtttgaagcggtctgagcagagtcgacttgcttctgggtttctctagttgctgaacttccatctactggtgttttctcaccaactccagccattaaggatgacaagcgtcagattcctgctctgataccaagagaaaatatgcagaaatataaaaaactagagaagaagagtatgctcagctcaatagagtctgaggtattgtgtattcgtttatatagagaaagaagattacaagaatattctagagcaggacacgtatgccctgccagcctatgatttgcacagaaagaaatatgtacggtacaaggtacaacggttaaaaaatcataacagaaaagattctctaatcatatcccaatgatgaggtgtccaaggtaaagaggctgctgcataatttctattttaccctgcctctgttgtgtctattt

SEQ ID NO: 51044 - DNA, 1081 bp, Cannabis sativa
aattcaacatggtatcagagctcaactcgttttaatggcgtcgtccgttgattccactcgtcgttcaaatgaatccaatcaattaccaagatcttcctcaatttcgttcaatcacagtctttcaatcaaacttgatgagaacaattttctcccatggaaacatcaagtttatgcagctattaaaggtcatcgcctactcaagtttctcgatccaacatcaacaccttcaaagttcacaacagcagcagacgaagcagcaaatcgaatctctgaagagtttctggaatgggatgttcaagacagtttactcgtctcctggttactttcatctatggcagacaaaatcctcacgcgcatggtaggttgtaataccgctgctcagatctggtctactctcgaggaatattattcagctcaaaacagagcaaaggtcggtcagtttcgcactcaacttcgtcgaacgaaactcactggcaatctcaatgattatcttctcaagatcaagcatatcgtcgactctcttgcctccattggtcacaatctttcaacgcaagatcatatcgaagccattttcaatggccttactcgtgaatactcagtgtttgtcacatctttgtctacaagaaaagatgaatactcagttgctgaagttgaatcgttactcatggctcaagaagttcgaaacgaaactacagaggctgatcttgatatttcgaagccagaggctaatcttgctgctcaaccaaatccaagcagacctcctgctcctcgaggtggacatcagaacttttcaccacttcaatttggcacttttactggtggtcgtggttcttatcgtactccctctccattctttaatggcaatggtagtctctcccatcatccatcaggttatggtaatttctatccaccatattatccttcttactctaaccctcgtactcctagaggaggctttcgtggtggattcacaggtgctggcagaggttcttccactcccaaaattcagtgtcagttgtgccataaactaggccatactgtcaaacaatgtttctataggtttgacaaatcatttaccgga

SEQ ID NO: 51045 - DNA, 714 bp, Cannabis sativa
gtgattggccacgatcttgatgatattctgtttactggtgcacctcctcctcaggttttggtcaatggcgcacccaatcccaagtatactcagtggcgtcgtgaagattagctgcttctttcttggtcacgatctttaatgtttgacagcattcttgcattagtggataatttcatctcttcatccactatgtggagggctcttgaacaaaattttgcttctcaaactaaagctcgatgtctttaactcaaaggtcgattctcccacattcagaaaggtggtttaacaatctccgagtatgttgacaaagttcaacccatcacttatgctcgctggttcccctgtaagtaatcaagacattatgttacagcttcttaatggtttaggtccaaaattcgattcaattgtgctagggataacctcaagaagtgatgctctatccattgaggaagtacatgcattactttttgtcccatgaaagttgtcttgaacatcaccatgccatggtcgatctctcaatcaaaatgcaggaaaatcttgcccttggcaatggttgatctggtggtttgagaacttttaccaactctaaaatggggacaaatgacaatgcgcaatagactacttgtaacgccttaatctatagggacgccacgtgtgtgattttataaactactttaatagattaattaattattaaaaactgtgataatatta

SEQ ID NO: 51046 - DNA, 1342 bp, Cannabis sativa
ctggccaaaagccctaccaccagaggaggcccaaccaacatggaaggatgggctcaggcccatcctaggcccaaaggatgcacttttgagataggagttatccagattcggaaaggcatcctaccttcttgagaagaagtgattgaagccctccggatgtgcatttgggatacatctaaagagagcattctaagaggtgccgcctcaaaggtccagtacaagatgacatggctgccctctaacaccaaatcccataagatttggggtttgtccctgtgtcagagcctaagagtgcgcacaccaacaaaaggaaaccacccttttgtccaacaacatgattctgacacaacattacatataaacaaaccatgcaggacatctgtcaaggatcacgtgttccccagacatacagaacgcctctgccccacgagttgggcttcaactagtgggcccatagtcatgtattgcatgtatttaccccattagtgggccaagtttacatgaaaaccctaacggatcacaaataaacctgaacctagttcctagcctataaataccacattataccttcatgcaaatgatggagaaatcatttcaaaaatattatagtaagaagctagggttcttgagcttgtaaaaccccattgtagtacataaaggccattcggccaaatacaattgactcatagactaggattcactaataactgaaccatgtaaaaatctcaatctttattctctattaatttatataatctcgcaactcttattttaatcgggttttaaaaatctcgataaatacaatctaattcgcatatgtgtagattgatcaatcgattattttggattggttactttttaatattgaattatttaatatttattaaagtatattttttttcacataactaacaattgaatcaaacatatgtttaattttattttagattatatttttcttataaataataataaaatttacgtttgacctcttaagtgttgaaatttttgtatcatatgtattaaatttttaaattatttttttatattaaaatattaattgtatgtataatatttttttaaatatatattcgattggatcgattatttttatatgtcaattaacatctaatacgtcaaagtacgaatcttagatttttcaattcaagtgctgattggcgtgaattagatcatacaagttgaattaaattggagtatgaacaccgttgtacatttgtatacacttaaacagtctactttaacacttaactgaactttttcaacgaaaaaataaaaatttaatttctaagattaagtgtcccttattctaaaagtcaaaaca

SEQ ID NO: 51047 - DNA, 2266 bp, Cannabis sativa
aaataaaaatgaaaaaaaaaaattagattaaatcatatagtcacccctaattcactttattttttgggtaggtagccactttcattaaaagacttttttagtggggtatataggaagataaaatatttgttaatttctttggaaaatgaagaggcagagactagagattagaaggtaaataacatgtaacacatgtggataaaaaaaataaattgaaagttccattaaatgaataaatactactttcagtcttgttaaaaaagaaaaatacatcaatccagtgccacaaggtttagatattttttgttatttgaaaagaaaaagtttaaataattttattaattattgaaaaacaataatatataatgaatgtatttttcattttattcttctacaaaagtggacaaaaagtaaagttatttttttcttattcatttaaatgataatagcttttaaagaaaagtcaatagagctttccaaaaataataataaaaaaaaaaacagttgaaagagtaaattattttggtaaatacaaatattaaaaaaatattcaattaatatgataatttgatatttcataaaaatatatatatatacggtaattatataacttatcatgctaaattattattattatttgattagttagtatttttggttcccgaagtttcacttgtactaaaaataaatgatatattttaaatttttttggccgttaaatttttctgaactattgagattgctaaaataaagaatttttgtctaattttatttaattttactaattcgataattgtccctatactaaattatactcttcggattttcacatctatcaaattatgtcactcaaactttgacatgtatcaaatcatgtctcctgaactttaattcatgttagactttacttactaaaattagataaaaattcttaaatccaacaatcttaataattcaaggagaatttttaacggcctttaaagttcaggagacatgatttggtatatgttaaagttcacaggtaaaaataaaaaaaaatatttttttaatttaaaaaactttttggaagaaggtatttgtagtttctcccaaaatgacttttgagaaactattttacaaattaaaataatttactcacaaaaagtaattttttaatgatattgaaacactttaaaaaatatttttttattaaaaaaagatctttatataatagttttccaaacagtaaaagtaaaacaaagcttgtacttattttatacttctagctataagtaaaagtagaagcttaaccaaattagaaaaatattgggtaatcatttttattatattctctctccaaataaagtgttatttatcattatttattattacttttatattattttaattgataaagatataaaaaatatatattatttaaatgatataaagaaaaatataaagtaaccaatgtaaaaatgtgaggtaaaacaaataaaatgtaattttggtgagatattttaatttattatttctatttttggcatcttttatttgacaaaaatattttatctatcagctatattaatctgatctatatatggaagagaatatgtttagcttttttatttatggaaaataagacataaagagtaagtttgataactcattttttttatatatatccagctatattaatctgatcttgtgtgaatttcttaatatgtttgatcagatttcttgtgaagaaaactgaagcaagacttttcttttctataaaaggactactacgattttgtaggtacagaaacgaaaatttcaggattgattgaagatctattttaaggaattgtctaatgagttgtggtcttattcagaccgtgtgtgagctgtcaataaagtgtatatattgattataaatacaccttataacaattaggtcttgtatctctttcatacactttgaattgtattcatttcttaagaaaatagtgtctttgatttgtggagaagagagtgttcgtctcttactttgtttatatatattttgtattgtcttgagtctgtattcaagcctagaaaagaagaacaacagtgctaccttcgggagaagattctacaaagctttcgggagattgcttttcaagtcttgctccaagaggaagcaagcacttttcaaggagatcgaagggagttcgagcacttgaagtttcaataaaattcaattataaggtggaatgcatcaagcttgcggtatacaataagagggagtctatttatgcataag

SEQ ID NO: 51048 - DNA, 943 bp, Cannabis sativa
ttgctagtttgctttccagtttttttgagacatccctaattcatgttcaatataaagttgctcatgaattagctatgcaagcacttagggtggatggtgaattggcttggattgattttttttttctcattgatgtattaaactttgatcgttgtgaataagagtttaatttcaaaaaaaaaaaaaaaacaattaaccattaatttagaaatattctaaaaaggaaaatctgaaaacagttcaaaacaggttgtaatttcgttcggctacattcagaagaatttagacaattaattttgaaatacatcaaagaataaattatcaaataaatttactatacataaagtaaataaatatttcataaaacaacacacaataatcataaaactccattcacaccttgaaacatgccaaaaaaagattaattaactatgtcaattttacctccctttcaaaaatttagtagacaaattaattataaaactttataataaacatgtagtgatagatgtaaaacaccctctgaagacaagcactaataacaaggctaaaacacaaaaatttgaaactcaaaccacataacttcccctaaaaaatattttttttttgatgaatcagtaaaattttattgctcaaaactattttgtacaatcaaatagcacctaaataaagggcctaaaataaaaaacctgctatacaattataaactcttcacaacagctgccacctttttcaattataaacctgctttacactaatcttttttcaatctatacaatgcatacaacagctgcaattactcaaactcataaactttgaaaccagatggagtctacagtcccctaaaaaatattactaaatattctttataataataagttttttctttttgaatgagccaataagtcattaagttaaatgtcaatatatataaatatacata

SEQ ID NO: 51049 - DNA, 1454 bp, Cannabis sativa
aaccaagcctgacacataggcaggggcaaccatttttttctttctcttttttaacgaaaaaaaacacgtgtacatacagactaatatgccatgtaaccttttattgactttaatctgattggccaaaaaaactaccccatgcaattaggaataaactaattaaggatcctacaattaaattactctatatatatttattttgaaatattactgatatgatcatgtactagtagtactactccaccaccataacaccacccatattattaactattgttattaacaccacaaatagtattatcaaaatttgtgactaaaagtaaaaaattgtgacgaaacataaatcattaatactcctatattaccactaaaaatctgtgattgaaagtgtatttagttataaaataatcacaatttattatcactaaatgtatttttaactacaaaatttattgcagtttttgaaattaaaataaattagtgtctgattaaatactacttcttagtaacaaataatttttgttgtgattaaaataggtatttagtcacaaaaaatacatatgtaactaagaccttattactaaaagtaatatttttggtaatgtatatattaaccttttcctgcttttctataaatatatatattatgataatcttgttttaatttttcttgatgatatatgtgtatgggcaagtgtataagtagtcatatttataggagaaattaagctagtagatagtagggctgaatatttgtcgcccaaacccgaccaatctgcacgaacctgacccgtgaaacccaaaaatcagtttgaactcgttcatgataaacgggcaggtttaggttactgttttaaatttatacatatattcaggtccacttctttatatagatatattgaacaagcatatatatatatatatattcatgtgatagtaccaattgggatacaatacatacatcttatattaccacattataataacatggtttgacatatatatatatatatcctagtctatatatagaagtactttcttattacaatgcaagcacaaaccacacacacaacatacatatatatataattattcatcaacatgacttagtgacaatattgatgatggtgtagaagtagtagtagtagtggtagtagaagaagggaccacacatactgaaccaggggaagtagtaccactgcattgatatgggtaacaacaagcgttgaaaagagcacaagggtgaccaagttcacgacaatctgccactttcacacatctgttttcactactcagaaacccttcacagctaaacccttcacaacaaattttcatttgccaaggtaaggcactgcaatactcaccttctatatagcaacgattacttggaatgagagtaacactatgtgctactctagtcccaaagcacaaccccatgttattaaccattgtta

SEQ ID NO: 51050 - DNA, 618 bp, Cannabis sativa
acctcactcgcttcccaatcctatcatctttggctaggatgtcattgaagtcgcccatgacaatccaagcctcatttgtagccaactcatgaagatctagccatagtttcttccttccctcttcgtcattgaaagcatagatgaatgtaacataaaagtgcgctttattatccactgttgacacgtcaaggtgaataagttgactagtactttaaagtcctctgcccaaacattcgtatcccggacgctgaaatggtgctccgggcggacattatagcctcggcagaggaccggtatcaaaagtatctcttcaggaaagaataggagttagcctatatcaaggctcaggctgccgccgggaggacccttcgactggaagcgggtacagaacggacgccttctcggactaagttgctggtcccggttcccaatactgggcctcctgatgccagcacatccggatttggtaagtctcccttaacggtctatcacgtcccttctgcccaagattattcccggtgtaggcctatagaatttgacgagcgtctccttagatttaagatgccccccgctcggtggggtttccatgccaaagccttttattttttcaacttaggt

SEQ ID NO: 51051 - DNA, 784 bp, Cannabis sativa
tttaatttaaaataaaataaaaggccttactaactttagcttatctaataccttctctcaaacttagtgtagttaagaaagttttttatttaaattattttataaataaaaaaataaaaaatttaataatctaaactaatccggaattgcacgtgatcattgacttgacacttaatttaatagcaaatacttatgaaagttctggaaatataacttagttattattactttcaaaaattaaacttagatatttgtctgcaactaaagttaattatgtcacaaattactttataaaacatatacaattaaaatctataactaaaactaatatgttggctacaatatccatgaattaattagagactaatgaacaaaactatacttgatgatattcaatgctattgtttcaaagacttgaaaatcttgataaggcgggcgttcgacgagaagaagatggcagcgatcgatgaggtaactcttttttcaacgaatcgaaagaaaaaaaaattaactggtttaagatccataaatagtgaaaagtgttaagattgagatgaaaatgaaaataaatttaggactgagttttataaattgagtatagagatgatgagaaaattaatggagataattattatagacatattgttaattttacaacaaaataaaatggataatcaaataataaataagaatgaagggcaattgatacatagccatgaaattaaaaagatttcataatctccaataaaaagtttgagtttctgaatagaattatcaaattcaa

SEQ ID NO: 51052 - DNA, 1163 bp, Cannabis sativa
aaataaagttaaaaagaaaacaacgggatttgatacggagagtgaagcttctgaatcctctgtttgaggaattgagggacaacgataaagccctggccaaagaagaattgaaaccaccgaagctcgacctttctctattctacgccaccacacgaagccgttcctcagcctccaccgtcacctccattagcaaggtaagattttaaatttgattttaagttttaggttcaattcttgataagtttgaagtcgatacgattgagcagttgattggttcaattcttgatttagaattgatctgttgtcgattggtcctattgaacatcagaatggtctcgatgcttagagcttcaccgttctaggtgaaatgtgattagtttaaagtccattcaattgaccagttgattggtctgattcttaattcagaattgggttttgattgattggattgtcgattggtcctattgagtatcggagcctcgtcgagtaagtatccattcatactacgattatttccatggccaaattttacacaatgttgttttacaaatttctttgttaaaataaataatacaatctgtatatatttcaattgaaatggaaaatatctacatcaagggctgccatagatgaatatttcagttggggtagcacaaggattgtaatatctacatcagggttgccaaagatgaatatttcatagagatattgaggcctctaacatactactcacccaagattacgaggctcaggtactttcatttcattatctcacccattcaaatccaatccaatgcacaaccctctaagtaaattcatttgtttttttaaattgattttgttgttgtatagtaataattaatgcagattttttattttggacttctaaatgtcttactggaaaaatagactcaccatattgttttcccaattgaaggcacattcgggtttgcaaacactttttattactaccctttctttcttcaattaatttgttttgttctataaattatttagtttatggatttgttcttttttcaaatggttttaaatatttggcaccaggatacttcatgcatggaattaaagatgagaagtaaatgtctttgcttatggagttttactgctcgagctcataactggtcgtcaagcagtagattcaa

SEQ ID NO: 51053 - DNA, 1183 bp, Cannabis sativa
  modified_base (1077)..(1109): a, c, t, g, unknown or other
  modified_base (1150)..(1153): a, c, t, g, unknown or other
cttggatccgaatcaacatcaacaataatttaaaattgttaatgttcggaaaagaaagaccaaattgtaatgtcagtaaaacagtaacataaaatgctaagctaaagctgtcttacacagctaaaagacatgttcagttggttgccaattatttgaccatgttaacattcaaatatagacagctcaactggtgttacgatggcattttaacactagcaggattttttcaatagctatacatatcactcaaagtcaaaagtacattctttgatctcacaagcagaattagattaccgtaattgagaggccaataatctgataagacagttcaaccaaagaaccaacagaagaggccaagatatgagatctactttaaagaagacttgctgatataagggagggtctatcgacatgatgatcaacttagtttctcaggaactaggacaaatcttcccttgatagggggaggactgacctttcctcaatggtcaaatggcgaaaatagccaaatcttggcaactagcggtatggggggccgaccagggatctttggcttggcaacaacacccattgtacagctaatggccatcgaaccatcaacaggagcatcgttggctgactagagtacaacacttcctccccaaggggagtgaggtgcctagaggtttatcttcaactgacaaggactgagagcgggtggaaacacccaaaatggcgattcaataagtgaaactgataacttcagacatctagatccactaaactctagaaattggtgtgatatacctcctgtcaacacatccaacatcagttgactgtaggatcactggcggccagaccctgccctttgtagttctggctgaccatggaggaatactaggcggccacaccctaaccaattcaggtgtggccagccaagcacaactgccaggtgtaggcctggcttgccaaggtcagctctcgtacttgggaatggctgaccagagtgtacaatttagcacaggtctagccgaccttcaccataccctctcaaagggtatagccggccagccccttgttgggttttctgccctaaannnnnnnnnnnnnnnnnnnnnnnnnnnnnnnnnttaataaaagattagaaatcattttatgttgcatagttcannnnatttatttcatgattatatatttaatgtat

SEQ ID NO: 51054 - DNA, 1442 bp, Cannabis sativa
  modified_base (1279)..(1281): a, c, t, g, unknown or other
aattcaatgaagtacgtgcaacatcatataatattatgagtactatttaagataatatatctatacaattaccataataatcgattagtctatatagtctactcaatcactatacagttatatatagacaatacatataaatgataatatcagtataatatagtatagtatatatatatagtacagtactgaccaatgataccgacgacattccgggcagcttcggcgctcatcaccatcttggattattatgagagagaacgaatgagatattaattaagaatatgagagaaagggttattatgagaaagagatgatgatccagggtttggtgaatatgattatatatatatatataattttactttgaaagatttaagagaatgagatattttctccggataaaaatgtatctatttattaaaaaattaaaaaaactaagtgttatatattagtaaatgacgaaattaattatatgctaaagatcatcatcaaataattttaaataattttaaatttagatatgtgaaaatatgatatactttagtaaagaaagaaaatcttgttttattttttctttttttttttaaaaaaaaaaatttgaatttatatttgatagtgtatttgaaattaattttttttttgaaagtaacaaaagatcagaattctgttaaatatctgttatatatatctgttaaatatatttattattatttaccataatgatactttttaaaataaatataaaaaaaagggattagtaaccatttcttttcaaataaaaacaataaaaaatagattctaatataaatatctaatttttaagcctttatatattatttaaaaaaaaatataacaattaatcacatcataacaaatgatacaaaatttaatcaaattgataagtttttttaaaaaaaattaaacaagtattagtatactctcgacaatggcaagttaagtaggggtaatttcccacctattaggccatttataatgtatgagctaaacatagaaaaaaaaaaatataataattcaaaaattagattttttttttttttatttttacgctttaaattttgttattaacaaaaatacttattcagtaaaaataataaattattttttctttttggaggttgtttaattttccagttatagcacgtcaaaaaaaaaaaaaaaaatttccagttatagttaattggtttagggtgattattattttggactccgtgttttataaaaatgactaaatggaccttctattttgttaaatgannnaatagaccctatatttttcaaaatggtaaaataagaccctaagcttaaatttcaacaatttaatttttaatataacttactttaagacaatttctaacacgaacaaatacagaaaatgtaattagttttgtcataaaatctctagatcagattattattaa

SEQ ID NO: 51055 - DNA, 1880 bp, Cannabis sativa
cttgcgaccggggttctgggtctatgtgtaatgtgttcaacgataggggttctgggtcggggttaatgccggagagtgagagagttagagagagaagttttttttgaatgtaagggtatttttgggaggaaaagatattaaaagtatatatatacatatactatttcgaattgagtagtatattaaaataatatattttacatttaagccaaatttctcattataatttaatttttttaatggtctacattacatagttgtaggtatcttttgaaaaattctgaattttaaagaattagttgtattgtacatgtgtgcttgtttgatatttttgtacgcacatgccgttgaataatgtttaaattttatattttttttttctataaactattctaattttttcggacgaaatatctactataattacaatctacaaaatcatatagtaaaactttataattataattttttccaaatactaaaaataaagataattgaccggcagtaaagagaaaagtgatgacatctctacactcaaattataattttcctataatacgtgtatattataaaatattattcaataattctttttcaattacattttaaataattgcaatatggagagttcacatttttaatttttttatatatatatatttatatataagggtgttggtgctcaatcatgggatgcagctcttgctgttcaagccattatatcatgtaacctaactcaagagtttgctcatactcttcgaaaagcacatcactttttgaaagcttcacaggtttggtcccaaaaaaacatatatatatatatatatatttattttatttcacatagtagctaaccacatggctttattgttgttattgtttagattcgtaaaaatctacctggaaattacactaaaatgtacagacacatatctaaaggtgggtggacctttaatactgccgaccaaggttgggtagtctctgattgcactgccgaggccttaaaggtaacatacatataaataaatatgagtattattattgcgacatgtcgcaacgcgttgcgattggttagcaatactctctaaattaaagctattatattaaattatatgagacccgatacttagttggaccaataacaatattgacacataagggtgctagtcactactggtgccctttaacatttctcatataaatatgagtattattattgggcacaaactccagtggtgcctaacatcttaagtgacgtctcacgattagttagcaatattctttaaaagttattttcttaaaatatataggacccgatacttaactataacaataacggtgtgacaccgaggaagatgctaggcaccaataatatattttaactctataaataacaaatatgtttaattaataataggccacacttatgctctcacaaatctcaccaagtctagtaggagagaaaatggacacagaatgcttctatgatgcagtaaatgttttgatgacatatcaagtaagtcttaattataacaatctctactacttattttacttataactataataagtatcgtgtaaaaaaaataagacacttttattatagatttttgtaatttttattaatatatgactatatgtacagaataatgaaggaggtttctctgcctgggaaccccaaagaggatatcattggttggaggtaatattttcaatatttttgttttatttaaaaaaatggtggagaaattttttgttaataaaatcagtttgaatatttttgtctaattttctttctaatcatatcctttcagtacttaaatcccatagagttccttgcagatacagttgttgaaagagagtaagatcattttatatca

SEQ ID NO: 51056 - DNA, 1650 bp, Cannabis sativa
  modified_base (43)..(54): a, c, t, g, unknown or other
aaaaaaaaaaaaaaaaacaaaaacccccaaaaaaaaaaaaaannnnnnnnnnnnaaaaaaaaaaaaaaatagagaaagggaaccatcacacataccttgaagagtgattttacagttctgtgtgctggtccaattctgacagtcatagccctataaatcccagtgacctattgaaacagaaattcattaaacaagtgagcaaacaaataaacatccttcttaagattctgcaacatcatctgatctgtctttacctcaactctatctcctggttttccagcatcaacaagtttatcatgcatcaacaagctaacagtatgtggagtccctccctcaagaatctcatcaggtgtctcctgtagccttacaatctgcttatcagtaaacctgatctcagaaggagaactagttagtagtcatttgttggaatttacaattataaatttaagtatccaagtacagtaaaccattatttgcaaacaattacatacacaatctctaaatgcatgtcctttgaccaaattagtctattcaaaactaattttagctctagaggtataaaattaaacttcaaagaggcaaaatgagtttaaaatgaagcaaagcatgggttgtaaaggaataattcagaagagcaacaatcaaaatagcatgtatagccgatcaaacaccaaatgcaagtgacaattgcatataaaaacatgtattttcataaaatcaaagctacagtacctgcatcggttgtgaacaagtgtcatggagtttcttgcttggcattcttccttcaagcatcttgttggttcagttatccgtcctgaaaagggaaaataatttagaatgacattgtgatatagaaaagaaaaaactagcccatgccctaactaattacctttctctacagcaacaggttcagagtagtaaccgcacacaagacatctaaagattgcttctctgatttccggaattattgaactgcaacggataaccattcccttcaaagacaccattctttcaatgtctagtatgaaaaattagacacagttaatacaaatattcagcgaactgggaaattttaaaaattcaatttttaaaaaagtacacaaaattcttaccacaggggttgagatttctcattgaagtcgaagttttgagattatatattcgagtctgaatgtgcttttcgaacaagggttcgattaaagggaccatttccatcaaaacaatgtcgaaaattgcaagaacttcaagtggatacctaaccatcttcgcatacagatcagaatcataatcaaacacatcgtgtgcattaacatcaagtgagtcaccctctatttcaagaaccctcttgatagtttcaatatactttccttcagtatgaaactccgaatcaggagtctgagactgttggtccctaaaattcttcaaaaacctcacaatagcagctttgacatcattaacactaatgttcgttccccaaacaaaagtagggcggtcctcatccatgtcaaaaccatcaccaccttcagaggaaggcggcaaatcgtcggtcgaagtgggagttgcagcagctgagggagctctccgcttgccattggaaccgttacggcgcgttccagccgatggtgtcggcggtgcttcggaagaagcggc

SEQ ID NO: 51057 - DNA, 831 bp, Cannabis sativa
accatttcctctctgggcaataaggttcgcgttggagaagacgataggcaaaagggggttcagatatttccttgttctaatttaaatgtggtggaccggaccttgactttgcaccttgggtcaaataagggtgttgggcttagtaagaaagacattgggccagcgctttcctccactgggccgataatagttgacaaggaaaatttaaatggggagggccctagctgtgggccgagtatgccaagtgggcttttaaatgaatttaaagcctctcacttaaattgtgggaccccacccactttaatgaatcagcttcacgtgagaggggttgggcctaagtttggtttggagtctaatgggctggtagttaaggataagggccttgataatttcactaagaactttggtattggtaatgaggatgttgggccggccacaactatctctaatgaaagctctatatgtggtcaagaggcaaatttccaccatgatgaaaaattagctttgactaagtttttccaagctcaagacacacttgtacaagagcttaagaaatttggtaacttggacctttatgagattaaatctattggaggtgacattggggtcccaactgcttctgagactaatgaacgaactactccgtttaagaaacggaaatttgatggggcttcggcgtccctttgctcccgcccttggaagcttctccgccctcatccatgggccatccgcgactttccttgggactcggaaggtagagcaaatgatactaattattcagaggaagagcctacagaggacatctcactatccaacaatgacttttctggc

SEQ ID NO: 51058 - DNA, 1294 bp, Cannabis sativa
  modified_base (962)..(968): a, c, t, g, unknown or other
  modified_base (1224)..(1228): a, c, t, g, unknown or other
taaattgatttttgcatccatatttatttggagaaagataataggggaattttgccacaacaaaacacattttaaaaatgttttgataaaatgaggttgaaaaagacggccacaaaactaattggagtttttacaccatatactaaaatttataacttttttacttttttattctggggcatattttttttcaaaaatactgtgttttgtgttaagtttgttgttctacagttattttttagttgtttcactgtagttttaattattctattttgttattttatagttattttataaaaaaaataatatttttgtaaaaaaatccgtgtggcagtaaaattataaacttgtaccgaaaatccggtattttttgtaaaaacttaaaaaagaaaatttatgaacttttagacataatctaggccaaggcgtggagagagagaaggcacatggctcaatcagagtcgtggagcttcagcttcggcaaaggtccaccacaagaagagggagaagagacgagagaaagaaatagagggcttgagaaggaagatggagagaaataaagagagggtaaatggctcaagctccacaccttcggcgaggtccaccacgacgacaccgaatttcataatattaatggtgttagattttaaatctagataactttttattttcattctaaatttttatttttaaagttatcttaaaaataatcatatattatttcttgataatatatataattatatcataaattaattattataagttattaatgtaaataatataaaatattaaatattttaaattgtatatatatatatatttagtttgaattattagagttgttacattaaaaataataaattatgcactaaattaatgaataaaaaaatacactaaaaatagtataagcattagagatgatcttatactttaccatcattatcattattattattatnnnnnnnattattattattattatatagaatattactaattcttacatgggtggcaaggcagccataattgtgccatattcctaaagaccatataagatccacacattccatcacatagccatcactatgtttggcattgaaaactactattgcactggtaatctagtatgaatagtaggctaattagtatttttgtcctgatatgtatcaaatcatgctctttcaatttttttagctgctaaaaattccccctaaactattnnnnntgttggatttaagaacttttttctaattttagtaaagaaagtctaacatgaatgaaagtttaggag

SEQ ID NO: 51059 - DNA, 983 bp, Cannabis sativa
taattagccaatttataataatattaattagaggttgttcttgaactcactttctcttattttctttaatgaaaagaataatatagcttggttaggatcaatacatggtgacatcaaagtacacaaatggatattatattcaaattgttgacatgcccacaaaataaaaatttagaaaagaagccataaatagagtcaaggaactaacaataaaattctaatctatgttgaaatgatctagattaaactaataaatattccacaaatctaaaaacactaaacacaacactattagaattaacaaaaagagaatcaaacagcaaaaaacagtactttgagaattaaaccatttcggaagtagcattgccacccccaaaattctaagatggagcaaagcctaacgtgttattgaaacaaaacaacaattataattagaagtcgttcttgggctcaaactctcttttttaccattgatttactttgttgctttattaaaaaagctcacgagtatgatgttgagtcatccacatgttggcctccattctaattttcactctgttttccttcatacaattaattaataatatatataataggtcgatcaaataagtaaaatagaaaaattggtatttgctaaacacttcaacaccatggataaaatacattcaacttgtaagtaggtagatataagtcagacatgcccacaaaaccaatatataaaaatctaaaataaaaatccataatatatattaaaaaatcactactatagaatgtaagaggaagaaaattaattagcaaactaagaataaaaatgttgtgccttaactcagaaagatactctctgcataagtaccaaggtaggaaccctgcggctcttgggcttgggatcataaatggacagagtaaataagcagtctccatctccatcaacactattattttgatttgattcaagtaataagaggttaccattatgtgataca

SEQ ID NO: 51060 - DNA, 958 bp, Cannabis sativa
attggcactacaattgaatgatgtcgggcctaatacaaataatttttgaataaaaaaaataataatatattaaaaataaatatatataacatattgttttacaaatatatatggatcgtatttataaataaaattttataaacaaattgatatacataataatatattatttatataaatatgaacatttaatataaaaaaattattatttcaaaaaaatttatctacaacaaatattcaaagtgtataaacataaatatacaaatatctattaaaaaatgacaaaaaaattattacagaaaggaaaaagaaaaaaaaaagcattgaagatgcttgaactatcaatatgaacatgaataaactgtgtcgaagccttgaacttaaaatgggccattatactgcctcgtcaaaacccaacgctactaatcggggtcggctcgcaccaccaatttatgcttttcgcctcgctgggcgcttaacgccacaaaccgccgtttctcgtcaaactgcaccgcttcacaaccacgggccggggtgtgccagatctggttaaatcacttgtgagagagattgcgccgaagaggtgcgacgtcttcaaaggactggaatgtgtgagacagaaaccagagatagagaggagtttgaaccagaaaaaaaaagagtgaagaggaagaagataagtatgaggcggctagggttttagttttgtgtgggttggaagagataaaatacatttatatatatgtaaatataaaataataaaaaataaaattaatatgattttagttttaaggctttcccatttttattgagaagtgagaaagaaaggattggactgcagcatagggagccgcgtggtcccattaattttatataatattatttaatttttttaataataatatagaaaagtaaagataaaagtaatgatagaaagaaagtttaagagagtagctag

SEQ ID NO: 51061 - DNA, 1169 bp, Cannabis sativa
gattcgatcccctcctcagaaaaatcgaaccctgcgacaattctaaactgcataccaaatcccataaaaacttgtaaacgcaactaagagcagggcagactaattagtaattacacataaaattcccacaacgaccaaattttttgattgcccaatttttgttcagttctttaaattgcatgttggggtctgagatgattcagatgaaccctagctgttagaattctatgcttgctgaactatattcaagtagaaatgcaataaaaaatttcctcactaaagattcaactaagtaattatacatataatagaatccaaacgaatagggagagaaaaagggaagtacctaaagagcttggggaaggagaagagtttccaagtccaagagaaggcctaagcatttgttcttattagtgccacaactttttggttgtttccatttccagaaggaaaagatcctaatccacacttgtcacagacttcacacgaaaatagaatcttgtatatcttatattcacacctcacacctctcttttagctatttcacaaaggtttatatagtaattgtagattcattttgtttcttctcagcctattttcttgcataccatcaacaaattgacacgaatcaaatgcaagccctactgcttgcttcaccttcttcacaccttcattcaaagtttcactttctaatgttaaaaccaaatatccataagttactaatttgttggattctttcagcctcttccatctccatcctttcgactctttgctatagaatatgagtttttactattccgccattggatatcagactctacctcttagttaggagtaataattgttatcttgatttttgaatttttagtataaataataagtatgtgttctgtcaaaaaggaaaaataataataacataatttatcaaatgataattaaactaaataatttcttttaaattaatttacacatttgatgaggactattttgtgcttaatcatagtaatctgtaagtttgaaagactttgataaatcatatgtctcaactcttgaatattaaatatgtctctcaactctaaactatgcttattccttcgtggaaatgtagagttgtttcaagaatcacttatttatactacaccttttttttattattatttttaacaatt

SEQ ID NO: 51062 - DNA, 636 bp, Cannabis sativa
actgctgcgggttggttggttggttttttgaaaaaaaaaataattaattaaaaaaaaaccgcacaccatcatccgcaccgcgaacacccctagtctaagtgtcggggatggtcttgagcgttggtgtgtgcctcaagagaatagtgttatggtcaatgtaaatgcatctgtatttgatggtgaccaaggctacggtattggaatggtggctaggaatgatcatggttttcagtttgaaggaatcacttgatgctttactagcagtgttcggctagaacttattaaagctatttgggtgaaagaagctttaagttagatcaagagacaaaaatcgcacttgagatagattatttggtagtgatacaagcaatgaaaggttcagttgaaacgttttctagtttaattattttaaaaacaagtaatatataagtgtatgaaccgaatatattaagtatgtaggtttcaaatcctcccgtgtttgaatattatttaacggagtggtagtacagaagtaacaaaaatctaactttaagaatttaatattttgaaaaaaacatataatatataaaagtatgaaaccgaaaatataagtgatttatgatgcaaatattctaaaaatatatattatttatgaga

SEQ ID NO: 51063 - DNA, 685 bp, Cannabis sativa
catacttcatcattagactatgagggttgtgtcatagtttatgctatcattgccagaatgacatttgacattggctgggttatcttgagaaacatcaaccatttctctgagatcaagacaacagcaggtctggtacacagtgccttaattatcgcattattctcgcaacaggatgtgcctatgattgaaggagacatcttaaaagcacccatgcagaccatctcacgccggatctactatgactttccccttgcatcattagagcctccagaagacggaagaaaatgccaaaagggtgatgccgatgtcgaggaggaggacccagcaggtgctggtaccagtgaactagtgccgcctattcccctgcctgagccaccactagactcccgcacacaggacacttacgatagactcgatcacctcatcaggcaaaatcattatcttgttcagtctaactagtaccttgtccaggcccaccaggccttagctgcttattaccattcatatctttagcagcaacatgattttgctcaaaggcaagtctaaaagttgaattctaccttctcattatggacaatggaccccgatgctcccgaccatttcttgcagctcccaccatggcagccataccagccaccaccacctcaaccgccatactgaagtggcactcaggtaagttctcttt

SEQ ID NO: 51064 - DNA, 976 bp, Cannabis sativa
tagtttattaccattaccaatggtcaaatgttccttaccaccataatcttgcttgtgtagcatgttattctcatcagcatttacatgattgcttgccccactatccatgaaccatgcatcattgtcaatcacttctggtgttgctgtgtaggctgctgggggttggttagatttctgatttgtttgcccaccaatcttcggatcagatcccatgtatgcttcatcatatctgttgtaacagattgcagcagagtgaccgtaacgcccacagacttgacaagttggcttgggtccatttgttctaccaccacgacctcttccactattgttgtttcctccacgactgtagttgcctctgcctcctccttcctggtgttgattttgatgatgatttccttgattagagtaagagttgctgcttcttcctctgttgtttaggaaagaccgattagccagatttgcatttggtatgttggtgggttgagtggctttgttactgctgttgatgcttaagttctgaagtctttccatcttgttgtcaaaggcaagaaggattccttgcagctcttgccaggttgttgaggatcgggcttcgatctgaagtacaatgggtagatactcgatatccaagccagaggtgacattggatatgagttggttttctgggtatgcctctccagctaaggcaagagaatcagaccaggccttcttttgtttcagataatcttccattcatgttgaacctttcctagttgtttgaatcaatgtacgcgtatcatccatccgagacttcgagtgagctccatagaggttttcgagagctttccacagagcagcagcagagtcgcatcccataacttcagtttctatcccttcagttataaagctgtacaaccagcccattagcaactgatcactgactatccaatttttgtactctggattgatgatgaaaccgaaaccagtctctccttct

SEQ ID NO: 51065 - DNA, 1984 bp, Cannabis sativa
tttttttgtttttccaatttattcctaacatttttgtcattatgtgacagtacacataataatgatgtttagtgaatctagtgacgaatgcaccaaaatgttacaaaaatgaaacacgatgcttcaaacaatatttgccaaaaataatagcaaacaaaatctgaattattatgtaaaactttattaaattataaagtgtagctcaatttgtaaaactatcttccttccttagctatgaagtacttcacagaagaagctacttatttaaaaacattatttattggaattatataaaataaagtctgtttgcatcattgtttacccaatatttgaaatgggtccctttttccctctcgggaatattagtgatcataataagttggtattattaagtcccatttgtttgatctgcaaatacagatagaattataaatatatttgtacatatgtatatattatcttgtgagggggggcagtactatttgcagactagatccttggaaggattaatagcctaataatacatttgtttattgttccactagatcgttggatttggtttctacttacaatatatattattggttctacttttgtatggggcaactacaattaattatgacataaactatactttttgtttgtatattttttgttttgtttctgtaataatattcctctttatagtgtgagataactttttctcattaattcgatattctaaagagaaaattatacaagtcattcatatacttgcactgagactttaaattttgggtggattattcttttgcatttattctctttagtattttaaacttctaatctaatagttaaaatagaatcagcaattaattagcttggaacataattaatcttccgacatttaaaaaagatgtgtctgataaaactatagtgtgttaaaaaatgatataatttgatttaacggcgcagacagttacttgtaaaatgaacaaaaaatcgtcagtagaactataacgtactattcactggtgtgagagcacatggggagttcttttatgcaacatacttactggcgttactggcaaaaccctaatctcttctcaccaaaattattattacaatattctttcttcagcagaaattattattattatattaattttcttcatattatttttagagaaaattacgattctcaagtaagataaaaaacaaccgcaatttatgataaaaaaagaaataagttaaatataataatttgtatatctcaactaaaaatagatttccttttaacaaaacaataacaccaaaaactaaaagcaataatacaagcgggaattctatataaaaactcctcttgcaattagcgatgtaacctaaatcgcaacaaaaaatcgtatagaaacccatattgcaactaaagctacaaccactttagaaactcaaacagtaaattttttttttaaaaaaagtaactttaaaaaaaataataaaattcaaaataaaaactacttaaatttttaattattaatattatcataatatgtataaaattttaagtgtatacaagccgtcttatcgtaagaatatgtataccttacatcataataatcacatgatctaaaatcaacagtaaaaaaaaattctctagcggtagagaacttttgctatcctatcatacttgccctatatatatacataatacatttgcatatgcctgttattattattttttttttcctttaagttttttgttctatatatctttgttttaatcttttctgggtattaactagattctcttctgatggcatcaaattaaaatattttgtaaaatgaaaatgcggatgcacaagaccactattcttcttatttcattctattgcaccactcatgcatggttacatcatacaaatattcttaaaaatgagtcaaatttggcatacaaccaacacaatatattaatcatttattatagcatcattacttattttttttt

SEQ ID NO: 51066 - DNA, 1206 bp, Cannabis sativa
aaactacagcaatagctatgatgcccagtaataattcgaacctcaggacacaagatcaaaccacaaacttgatcattataatcctctagagtcaaggttgatgatatattactgatcaagaactctaaacgatttggatcaactgacattttccttgaaaattttaatcttcaattcaaaatagtatttttttgaaaaagagaaagaggtctttctagttctcctaaaaggcaatttaaaggacacaagatgacggaaaaatcaacctaactcatccaatgatcaggagtatgactgttgataaacatttgatcgcagcaattcaacagatcaattacatgagcatcacaaactatgagtaattctgattaatttaaaggcaagtatcgcactaaggattgattccaaacacaattaaattgttgatgctgcctgctagaataagttaattaatccagtcttcatgagcaactgtcacaattgatatggaactaatatttcacattggaaagcacactgttgaagattgtatctatttagtcatttacaatcttttaaatcattcatcaaatgaattgtagtgtgagaagagtcttcttattggagtggagagaattgttgggcttggttctttgaagtgttcaactaagtagataatgcctatagttttttttgtacatgttaagtttgtgagttgagtgtttcagttaacatatttccatggattttgtctgtgctgtttctctttgttagtaacaagttctcatcgaggagcccccactaactaaatgcaggacactgattggtccaaatcaatattgaagttagtgtttttcatgttctgttgacattaattttccaaaactaacatctcattcaaaacaagttacagtttatccagctggattttcaagcaactcactcttgatgagagttagttattttctgtcatttcttgctcattagaataagtgctctataactatgtataaataccagctcggtttcatttagaattaactttagcttttgtaattagagtgaaagaagatcaaagtgagtttttgagagcacaagagagaagttgtagttgggaatggtttaaagggtactggatgcaagtacttgtgaatccgagaagctttgatctttgactgtgttgagaattgtaacagctattattatagtggattgttggggatgatg

SEQ ID NO: 51067 - DNA, 651 bp, Cannabis sativa
tcggggtgcatttgaaacactgcctttttcacttcttccaccgtgaccacttgacgtaattcagaatgaacaaagtctggcgttgagttacgaacataatcaatgacttcttggaagctagtatcggctgactgaaaaagagagttgaaataacttgtgaccacatttgacaaaccattgtcccaatctacccaatttccatgattatctctcagtcggtctatacagttctgtcttttacgagtagttgccatcttatgaaaataactactgttctggtcaccctcctttaaccacagctgctttgaacgttgtttccaaaaggcctctctttgatctaacactttgaagagttctttttttacctcactgtatcgctgcacagaatcagagtcccttttgctcttcaagttttttaattcagatttgtacctccgaattttggccttgaaattccctgtcacttcttttccccacacactaagtttatcagcacaaagtaacaatttttcagagaaattagcttcccttgctacctgccagcaatctcgaattatctccaagcacactggttctttaaaccaggcatgttccattttgaatttgcgattagggacaccattatggacaacaaccggttccagtaatagg

SEQ ID NO: 51068 - DNA, 1534 bp, Cannabis sativa
cttctcgcacccaactctccccagatcctctgcggtcggtcttattctacgatcatacaacccttcattctccggacacatgtacatccacatggcatcatcatctgccgcacccccaaaataagggtgcaccaacaccgccctttcaactcggacacccgataacccgattgacccgacccgagttaaccattcatgggtgagcaaattacattcaatactcattttttgtttcatattttaaattttatttttattttaatactttttaatttatactcacttttataaattatattttcattatgtgcattaaaaagtctaattttgataagttttaagttttatgatgttatatttagtattttgattataaaagaaaatcaattaaaattattttagagttatatttggttaactgtaataaaaaaaagtaaattcaacgtgtcccttatttccctccagcactatctccaccaatgaaaactcggttgagatcagcgtattcgttcaaccaggcccgggcccattacagtctttatgggccgaaacccattggctcgcggcccatgaatcgtcgtagcaagcgggaatgggtcgatccgggaaaagcccgtcgtcgacggcggaaacgacggtgctgacgaagttgtgaaatgtggtcgagaaaggagattccatgcagaaagttccgccgtggaagtacaagaggacgggaagcttccgacccggttggagcgatttggggagaaagattcgggctgagacagaaaagttagggtttgatgatacgacgacgtctttggaacgaacccctgtagttggatcggactcggaaggtggaattttttcgattgggggtgtggttaagactatgtggccatctttatagactgtaaagaacatgaacttgtgggcaatttcggtttcaagggaagacgccattgaagctgcaaagtaagaagattgaagtgtgttttcttcttcttgtttttaattcagattgaattgaagtttgagataatttatagagcattaatcaaagcaatgactgatcaaaacgttggtattgttagaggacacccaccatatagctaccgttctagacaccattttccattaaatcttacttaattctccaaatattatattaattgattcaagaatttttcagtccaattttggcgcttaaagatattctataactattttttttaaagttatatgagagcataaaaaaatatatatatatatattaacgtgtgtaaattttgcaatatgtttaaataattataacttagatcattataaaaaatttgactagcatcggtatataaaggttagttatagaattttccattgtaatatttacttaaaaagctcaagtaataattttttctaatccattttttaatgttgtgctcactttactgttaatttcacttttaatttgtattgactttactactgttttgtttacaaaaggcattcccgccgcagcttattaaggtttaactttcttttaaggtttttg

SEQ ID NO: 51069 - DNA, 1298 bp, Cannabis sativa
  modified_base (1203)..(1205): a, c, t, g, unknown or other
  modified_base (1249)..(1249): a, c, t, g, unknown or other
tcaaagcagccatggttttaaaaggtcttaaagactggtcgggtttgtacattttccataaagacaggttgactcatggtataataagtatttgtattaattgctattgaattacatgcctagattattataaagcatgttggaaaagatataacgatgattgtgataggaatatgtatgcaacatatgcacattgatattgatatctattgaattctgaatggttggaagttttgaattgtaggtgcattagattatgcagtggcggtctgaccacttgaaccgcgagctggggctcggggtaggtggtgaggaagagcatcctccaccaccttagaactgggaaaaaaaattcctgccatgcaaaagacaattaggcagcaaggagagcagattcacgacctaaaagagcaacatgctcatcctgcacctatactagcacctaaagtagtacaacagaatatgagggattgtatggaaccgatttatgataagtttaagaaacaaaatccccgtgtgtttgagggtggtccagacccactgaaagtagaacaatggataagtatacctctatctttgactttatgcaagtggaggataatgacggggtacaatgtgctatatacatgttacgtgatgatgcccatatatggtgggagatcgtatctaaaggtcatgatttgaatactatgacttgagatgcattctaggcaatattttatgagaagtattataacaattccattcatgctacccaagcagaagagattgcacggttagttcagggtagcatgactatgattgaatatgctaccaagtttgacaggttggccaagtttacttttaatgaagtgggcattgaagctgtacgaaaagccaagtttattagaggcttgaggaatacattgctagggatgttatatggtagccaaacaatcaggggttttgaagacttatcctcagattatggatttagctctcattgtgtagggggttgaaggtttgattcgtaaaaagagtaatcagaagaaggatccgtggaagacaccatccgatactggaatgagtagaggctttaatcccaatgattagaagaggaagccaaatgaaccaccagtaatgggtttaaacagaagatttcaaggtaaccaaggtttctgtcgagtcaaaaatgaagtttcgttgtaaagaccgcttagtttnnnttggaaattagcagttaatcacgtttaattatgaaaattatttntagctatttaaataattattatacggttattattgaattcagagatgca

SEQ ID NO: 51070 - DNA, 1914 bp, Cannabis sativa
agagagagagagagagagctttttttgtttaaggttttagtgttttcttcacttaaaaaaacttcttgcaaatcaaagctctaccaccttttatttattggctctctattggactagagttagattaaatggactaagaaaaagatagtgagcccaaaaccataagcctaggctgaattcactatgggccttaggactttgatttttaccattttattaaatgaaacaatctcatcctttttcaaaaataccatttatttaatctatttatttaaatattaattttatctatttaataattataaataattatcaaaaaattattatttaaatatatttattaattagatccacaaagaaagtgtcttaattaacaaatacactcatattctcttttcttctcaaattttctcatacttagtgaaaattgtcaaataagacatagtcttattttagaattctaagtgacttattaaatcaattaattaggtctacaaggtagtattatctcagataatataaggaccatgagcctatgtaatcaagcttttaataagtagatttgaaatttaccaagtagatttcttagcttattaatttctcctaactccactatagattcgaaattacattcttgattacataaaacgctttatataccaaatatagatacgttatgaattatccactgtttcaatctaaataatcaacgatcctttatagacagtttacatcgagcaaggacaaatttaccgttttacccttcgatgtattttatcctataaagacttagctccttataaatgatatttcagtaaactattataattactgaaatatgagctcttccatttatatcgtttagccaagctctattgaaatcatcatttcacttctaaatagttatagaagttgtagattctatatttatgattaatgctcccactcaattgcactaccgagctcccaacatgtaagcgggctagtcccacgagtaagttggtaacgaacaagtctaagaacctgtatagtacaatcaaactaaagcttaacaatctaaggatcatgattaattgatctaagatcaactaagtgacattgacttagaaaaaatataacattacgtttatgatatcttttccactttcaatatcagtccagtccgatgtatagtcaatacatctgataaaagtttactttactaatgccttagaaaagatattctacttgtccaagtgtaagtaaatcacatcattgattatcatgtcagtgtaaattcagtgcactgataaatcatggtactaaatagtttgaagtatataatcatgattattttctactgtgtagacaacactataatgttgagtgactatatgttagggatttaataggatttatatattaaacatatgatcatgaatgtaatcatgtgaaccaagcaaattaaatgatttttgatcttttattaattagtaaataagattatattgaaatgggttttatttaggacataaaaccccaaaaagttctcacttgcactaatataaaactataagtgcattttaataaatctcatgttcttgatgtctagatcaagtgtaatacatatccttctccatcattacatcctccttagtcacaaaatccatgcttttgtgaaattcctatctatatgtttactcctcttggggttatggattctttactgtttggaaactatatttgtgttattacgaagtaacactagtagtttatccatgtctggaataacatgaaagtctgtatagaactttcctaagtctgaataattctttagtagttttctgggccactgtaatattcagcctccgattctagctcccattaaaagaatgcctcataatttggatggagatcaatccaatcctcattctt

SEQ ID NO: 51071 - DNA, 1110 bp, Cannabis sativa
caatacttcgcatctcaatttgctgcaaaaattgatcaatatcaaactcagcttcgtaatttcaagaaaggatctaagtcgatcaatgactatcttcttggcattaagactttggtagatcggcttggttctgttggccaatctttgacagcgaaagaacacatctctgcgatctttaatggtttacccccagactatgatatcttcatcatctcggttaactcttaacatgaagaatatacggttgcagagattgaatcgcttcttttagctcaggagcataggattgaaaaacagagtcaagatttggactcagctccttcagctaatctagctcattatcgtggtgcgttcaagaattgcacttccccctccgatccatcgaatcaaggcaccaatggtcaaaatcgtgggaatttccctcagtcttcgaggtcacctcactggaatccctatgctactggtcgtcgaagctctgctcctgctaattttggtcaatcttcagctcctactttaaataacccccgtggtccatctcctgcttcaatgaattctaaactagtgtgtcaactttgtggacggattggtcatattgcctcaaaatgttatcaacgtttcaacatggaatttcctggtcttggtgctggtaacacagacaaaggatcttcacagatgcaggctatgatagcctctgcctccactgttagtgatccgtcttggtatccagattctggtgcgacgaatcactgcactttcaatgaacaaaatctgatgcagaagcaggaatattatggtacagatcaaattcatgttggtgatggtactggactctcaatcaataatgttggtaagaccttctttcatactcctcttacttcacaaactcttgttctcaataatctgttacatgtgcctagtatcactcgtacccttctcagtgtctctcaatttgcacatgataaccatgttttctttgggtttcatcctgatttctgtcttgtgaaggatcaggtatctcaccaagttctgatggaaggaaaacttaagaatggtctggatgccttcacatctgattctgttcatccttgtttagatccacctctgccttct

SEQ ID NO: 51072 - DNA, 1549 bp, Cannabis sativa
tatatacacatattttttttggcattatattattagttgagaggtatttggcaacaaataataaattaaattttttatgtataattattattttataaaatattattctatagacacattcgatatcctgtctaacacattcaatattttattatactcaacttaaagtaattttgtaaaatatgataaaagtaagccatttaataaacattaaaataattttatcttcaaccattattctatattaggggtcatctacaaaggctttattactatcaatgggggtgacatattataaatacatttctttagtcatgaagaatcattcttctatttcgatccattccacttgtgagataatattattagattcttgaaaaaaaaaaaaataatggtgacagattatgtgcatgtacagtatcacaccataaaatctttttatttcaggaaaaataattaaataaaaaaaacaagtactctcgaataataaaatagaataatatgcatagtttatagactttaataatcgaacctaatcaaaaacgtgattagggtaaggtgaatagattgatcatagtggcaactcaaagttaggtataatacatgcaaacatggcataaagtgactttggcagcactctatgcatggatttctatatggaaaaaaaaccatttgcttaaactttcagatattaattattattattattgttgttgttgttaaaataaatgagcaatggatatagataactagataagcacacccttttaattttttaggggcaaaaaataaaaaataaaaaaaatgagagattaaaagtacaagaaaacaaaaagaaagggttacgtatctttttcaaatgacatcaacttcctctaaggaccataataagcttagaacattagttctagtctatgcttttagtatataatatggaagaatagtccgaaaaagaggaaaaaataaataaaaaaacaccagggctgctaaaagtgtcatgaaaacatttaaaacttgattgattttagctcttcatattacaactaagtattatcttaataattattatataatattactaaattatttttaaggtgtcacgttgtaataatgtttaacatagataagttataatacctcaaattttagctcatgaatacatctccacatttaattaaggtttatctcttagttaaatatattttctctatttttttgttgttttcttctttttctttcacattatttatatctatataaacacataaaataaattaaatgaataaaatatataaaaaaatatataatatttaaattatataaatagaaagtacataactaatgtatgatattatgtaaaagtatgaggtacaacaaataaattaaagttttaataacctattttaaagaatgaaataaaaatagactctaaaactaactatatatgactctaatatttcaagattttgatcaatgatattagagtattaatataagaaaccaatagtagttacactatgtaaataattagtgatattacataataatt

SEQ ID NO: 51073 - DNA, 979 bp, Cannabis sativa
tgctctgttcgacttcggcgaagaacgacagctcaggcagtgctcgagtggagagtggtcgcagcagcacgaaatagagggccaagctctctcacattattttacccaaacccacccagcgcctttgatttatgctattatggggagttcaagagatttggcggtggggacagcggctgtgggttcgcttctgacggcttcaatgttgggccaagaagttagttttactgagaatccttctctttatcttcaccttgctttcacaggaacatttttcgcaggagtacgagaaacctatatctctcaatgggcaaaggtttgattttcttcttcccaatttttttactctttactctagttattgtgttgattcttcacttcttggagcatgtaatttatttctacaattctaaaaactaaaaccctaagttttgtttctagattttattttagaaatcaatcacacttcacagtgtaatgactcaaaaaatttgggctctgcaatatgtaacaatagcaatctgattatatatagtcaatcaatccacgctcagatagctagaccgaatccacaatatctcaagtctatgaatcatccatcactagttggcagtctaactatatataatcagattgtcctttctcaaggtatgatttatttttttggttaaagctatattgggtttggatagattaaacagaacaatttgagggaatatattggtgggttttgaatttttcttgtcctttgcctactaaaatctggttctttggcctttatagttgtggaatggctttggcagttgtagattttggtacaatgtcgctcgattgtggctttggattgcagcgactatgttgcggctagtagatttttattgaggtatatttttagtatcttgattgatgaaaaatttccaaggttcatgatgattgttaattgtttattgaggcatgttttgtttaaatatatgattca

SEQ ID NO: 51074 - DNA, 709 bp, Cannabis sativa
ctgcggctctcaaaatttgagcatcgcagtgccatacgctgcgccacgaccctaactgtagattttcaattttatgtaatcgagatctcgctagtcgccatgagtttcaaaaagattagcgtcataactcaaagtatgaataaaaggtgaaatgatcaaaataaaaaaaaataaaaaaaaaaaaaaaatagaagaaaaagaataaaggaaaacaaaaataaaaagacaaagataaagataaagataaaggagattaaaaaaatatgagaaaaaaataatgaaaagaaaaattagaaaaataaaataaaattgattagaaagaaaaaagtagcagggaaaaaaccataggaaaacaaagatgaataaaatcaataaaaatttggaagggaaaaattatgagaaaataattgtttgtaagaaataaaattacaaaaaacccaacttctataaactaaaacaccataaaaagttaaaaaaaaataaaagccatattttttattaaaccccttatatataattattttattctttagcctataatatcattttaatatgtgaatgattatacctttttcttttgaacacgtgatttgtttaatataaattaattgtgaattaaacatgaagtatattattttatttatttatttactttagaaaaaaaaaaaccaaattgtattatttatttagatgcaaggaatataatgca

SEQ ID NO: 51075 - DNA, 1182 bp, Cannabis sativa
agaataattgaatacaaaaaagaggtatttctcaatttattcctaattattatggagaatatacaaaaaaatatgagaaaaaaacaaaaattttgatatttatagcatgaaaacttaatacactaaattatggttttttttttttaaagaaaaacttaagattatgggataagttattattaataagaacataaaattcttttaaaaaaatagttttattttctttttcaaaatctgaacattttaataaagaaaaaaatcatctgaaacaaaaagttcttataaaaaaataaagcacgtcaattttaattattataaattataatataaatatcataagaaaatactaaaaaaaaaaaaagagttttacaaaaatattgcattttgggtaaaagtttacatttatactatcatacggaaaaaattacatttatgttgtccttgccttttttcttcttttatattgaagacacggaaaattatatatcaagcatctatcttccacactcacggacagaaccacccagcaacacgagaacatccgaaaaataatcattaattctagcgaggttgagcaaaaacagagaaatcgacgtcaaataaataatcatggcaaaacaattgtaaaacaacactaaaacaaatcaaaaaaataaaataaaaaaaatgattaaaaaaactaaccatcttttgtatagcctcaacaccagatgcaatagcggctatatttgcaaggccagtcctgaaattagaataaaaaaactacgaaaacaaaactaacccaacacaaaaataaatgtaaaataatgaagtagatataaccacttagaaaaacataaaagaaccacacacctcaaaattgttttgccagtgagctcgtcaaatgtgtttataagaaaataaaaataaaaaaaaaccacaaaaaaaccatagagaaggaagaagaaatatatttatctttcacgctgagcgacagaaccaccacaacaacacaagtacatccggaaaacaatcattaatttcggcgagattgagtaagaacagtgaaatcgacgtcaactaaataaattatggcaaaacaactttaaaacaatactaaaacaaattaaaaaagaaaaaaaaaaaagaatttaaaaaactaaccatcttctacacaacctcaacaccagatgtaataacgac

SEQ ID NO: 51076 - DNA, 2632 bp, Cannabis sativa
cattttcccttttatttctatcttaagttactatatcctccaaattatccaagatgataaggatttggattgctgcaatgtattccgaaaatggggtcgagtgggcaccaaaatcggaagtgagaaaatggacgagatgtcaaaagcagatgcaatctctgactttaaacgtatttttcgtgagaagactggcaattcatgggaagcatggcttgaaaaacaaaattttcagaagcaaccggggaaatttttccccttagatattgtatggtcttattactttttctcatttatttttctagcttaattgctcataatttcaaagagttatttattctttcgatgatgggaatcttaggattacggtgttaacaaaaaagtatcgaagaaaaatctccaaaaagaggatagcaaacttgccccaccattagccgaactgatgaggatgcttttcaatgtcgaaacatacagagctgccatgatggaatttgaaatcaatatgtctgaaatgccacttgggaaactgagcaaacataatattcaaaagggtaaggcatcaaatcacaacaatgtattatatttcggtgtgttagtgttcgcgagaaaaattcatcctttttgtatcaaaatgatgtattataagttataatgccctttggattttctttatttatccaggatttgaggcattgaccgaactacagaatctgttaaagaacagtaatcataataatgattcaatgttagaaagtttgattgttgatgctagcaaccggtttttcactgtgatcccgtctattcatcctcatgttattcgggatgaagatgattttaagtcaaaggtgcaagtttctgacttttcttatcttcaatacatcttaattattatctttctaatttaattttgttataaagactcaaaatttccatctttttttcggtggcagttgaaaatgttagaagctcttcaggacattgaaattgcttccagattagttggttttgatgttgatgatgatgaatctcttgatgacaagtacaagaagcttagatgtgacatcgatccaattcctcgtgacagtgcagattacagtttgatcgagaaatatctcctcaatactcacgcccctactcacacggtaggctctatttacaatgccgggcttttattcatatacatatatacgtacatattgaactgtttttaaaaacctcaggattggagtcttgaactcgaagaagtcttctcactcgaaagggaaggggagcatgataagtttgctccttacagggaaaagcttggcaataaaatgcttctttggcacggtaagttgctcttcacctaaacgaaatttacaagtttaaagaatgatgctcggaagtaaaatcaacaataaatgctcctttttctcaggttctcggttgacaaacttcgtaggcatacttagccaaggactgagaatagctccacccgaagctccagctaccggttacatggtctcttgtctcattcttattcactctcttatcctcgttgctcatgtgtgttgcctaatatgccttttcagaatactcaaatttacctttttgtctttttctcggaatacagtttgggaagggtgtttattttgctgatctcgtgagtaagagtgctcaatactgctataccgatagaaaaagtcctgtcggtctgatgcttctaagtgaagtcgctcttggagaggtctacgagctcaagaaagctaaggtgaacttctaactcgcttgttataacgaattttttaactcgttttattaacttcgtgtcatgttatcatttcattcagtatatggataagcctcctcaaggaaagcactctacgaaaggactcgggaagaaggtacctcaacaatcggaatatgtgaaatggaaggatgatgtcgttgtgccttgtggaaaacccgtgccttcgaatgtcaaagcctctgagctcatgtacaacgagtacatagtttataatactgctcaagtaagtagaaatctatattcaaaccgttaaatcgttgacataatcgttatggttgtgctcatactcgtcgattgtttatacgaacaggtgaagatgcagtacttattgaaggtaaggtttcatcacaagaggtaaaaacaaaatcggttggtcataatatcgttcatagtgtacagaaacagtttcgatgaattgcagtcttcgtcttaatcgtgatttagatctcattttgggggtttgttcgagatctaccggcttttgttttcggtactaatatgtaaagggggtgttaagtactgcttttgatgaacaaaaagtgtcgaattttcagcatttccttccccgaccgcacggggttgaattatgcatttttaatgaacactttggttctgggtgtttttttttccactgtgatttcaatgaaaaaacacaagtattaaatttcatgtcttccttacaaagtacggacttgccgtgatctacaagttacctctctttgtttatctttgattatttcaatccctaatatcttctttgcagtttcaacatctttcatctcaagatccttgatgttagacaaaactaataaaaatctaataaaaacttgaattttaatttacaag

SEQ ID NO: 51077 - DNA, 2617 bp, Cannabis sativa
aaaaaaattatttaaaaaaaaatattctgccatatattttcgagaatgtatgttaactaagaagttgtaatatatgaagttgactctaacactcatcataataatatggactcactttttagccaatacaaattctttatttgagggtgtacctaaatagcttttgaagggtctccaatgaagatttaccctataatatatatagaaaaattttacagttgatccctaaaaggttgtttttgtagatctttatctgttttgatatttaaaaaaaaaaaaactcaaaacaaagcaaaaaagaaattaacttaattttttctttatgatcgcatatgttgtaaatagataatttgtaaattttcaaaaaatattgtaaataatttacaatgccgaaaattaaatctaaatagttatgtaccatacgtataagataaatagttgtttatgcaataaaatatataaatcttattttcggcattataaattactcgaaattttttgaaaatttacaaggtggttctacaagatacatgatcattaaaaaaaaatttgactaaaaagctcttcagtatgccaaaataaataaggggtccaccgatatactcattgaggaggtgtagaaaattgatttacttttgatattgatatattatgatgtaaatatctatatacataattgcagcatatggttccagcattctatgtaagctgcaatgaaatgttaacgaaatgggagcaattaatggtgaagcagaatggaagtgacaaagaatgtggtgagatagatgtgtggccttaccttcaaaatatgactggagatgtcatttctcgaactgcttttggagtagctatgaagaagctaagacccttttccaactccaaaaagagcaagctgaacttgctaataaagctatacagactgtttatattcccggatggaggtgcatatataaaaatataaattattactacttacattcacttataaaatatataaatagctacatacatatatatatatatgtatctttaattgtgcatctacttacagatttttgccaactaagttaaacaagagaatgaaacaaatagataggcaagtacaaactcttttgaaagagttgatcaataagagagaaaaagcaatgagagagccggagaagctgccaaacgatgacttgttaggcataatgatggagtccaatttcaaagaaatcaaagaacatgggaacaacaagaacgttggaatgagtattagagatgtaattgaggaatgtaagttgttttactttgctggccaagagaccacttcaagcttacttgtttggactatggtccttttaagtaggtttcctcattggcaagctcgcgcaagagatgaggttttgcaggtctttggcgataacactccggacttcgaaggcttatcacaccagttgtaagtatatatatatatatcaccttgttgttttattgtttaattgcaataaagtatttcaacttttatattaattcattatttcacaattgttatgtgatgagtatattaaaaaagttctatgtaaacaataatataaaatgcataagatcataattcattaaaaaattagaatttcgtttagagaaataatagtaaatgaaataaagtgtcccaatatttttaagctcataaaaaaattgattgtcaattttattttcttgagtgagttaacaaacaacaaaaatggcagccccagtcaagacccgagtttttagtgtcattttgtgaatgtatattcatataaatgacggatgcaggtgacgatgattttatatgaagttctaaggctttacccaccggcaatctttatcaatcgcactgttcacgagaaaacacagcttgggaatatgtcaataccagcaggggtagaattgtcaatacctaccatccttgttcactctgatagggagttttggggagaggatgccaaagagttcaacccagagaggtttgcagaaggagtttccaaggccaccaaagggcaagtttccttctttcccttcggttggggacctcggatttgcattggccaaaactttgctttgattgaagccaaaatggccatagccttaatactacaacgctttatttttgaactctcacccgcctatgcgcatgctcctataaccgttctcatactccagccagaatttggtgctcacttaattctacaaaagcgttattaattgtagcaaccaactcacgaataaatttatctagttacaaataaattgcatgaccttttctttctcaaaaactttatgtatcagtaaacatatcttgttttgagcagtattatatcattacgaataaagttgcaaaaaacttagtaactaatatataacattatggttacccttatatcgtggatggtaatatagggtagcttttgccactccaattatttttcctatggacggtttatatgctccactacaatcaaataactataattatattggcatccctcctacaagtgacaaatcacaatagtaaaaaagatcactgttattataacttaaaaatcgtttaaaaaaaatagagaaaatgggatgagagatttttcctgtccaacaa

SEQ ID NO: 51078 - DNA, 868 bp, Cannabis sativa
aaaaatttcccaactgaaatgtgccttagcagttgaaaaatgtcattccattcttcattcacaaacacgtgattaatcttagaatatatccttttgtccccatcttgattatttgtccaggtgaaaccccaacctattttggccatggctttagtgtggctttgagcaagccaatttgaagcatcttaaatgtctataaggtaacatcattgccccttattctatcatccaagtcgaacacaacattgaaatttcctactattaactaaggcttaacacgaaattttaatctcaagaggtcagcccacatatattttctctcttcaattatgttataaccataaacaaaagtaatgcagacaacattcatatgaccagccattttaacataacagtggatgtattgtggtgattcatctataacaatgactcaaacaaagcttttcctccaaataataagcaaactaccctctatagtaggaatggagtagtaatctcaattaaagaacttcctttccatcatctctctaattttattttccttcaatttagtttcaagcaaagcaccaacacctattttattcatatgacaaaattcaaagacaacatcatgtttatcttttttattgatacccctaacatatcaacatgctatattgcagctatccaggattaaaagtagtgttaccagaaccccttgtctccttgtttctctgttcaccttcttgatcaactccctgctcttgtaaagctgtgaatgagttgctggtttggtctgcttctactgcaacttttgatgttagcagctcatgctttaatcttattttcactggtgctgtcttcttggggactatccactgtttgttct

SEQ ID NO: 51079 - DNA, 1290 bp, Cannabis sativa
tatatttatagagtataggttagggactcataattttcattatcataaatcaatatttaggtctcttttaactaacttatttaattttgtgggattatttttatattttgcagtataaatattaaattaaaagaaaaatatttaaggtgtattggtaatattttcttaattaattttttatttttaaaaatgtgaaaatattttttaaatcatgtcctgaaaaattgtttttacttttcaattttattattaagaattaaaattttaaaaattttgaaaataaaaaaaaaatcactttctaaaattttttaaataatttttttcttaattaatattttggactctaactccaacctcgaccttagaactcggaccgagacccaattctggctttgacctcaaactcggacctggcccttgatcccgacttcggactcgaacccaacttaaataaaatcatgaataaaaataaatataaaatttatagaacacatttttattttatgtttttgaaattaacaaacaaaagtggttatagaatacatttttgtttttcaaaatcaaaatttttaaaaaagaaaggtggtgtttgtaacacttttgttcttaaattttttaatcacaaaacacaattttgtttttaaattttaaaattttgcttttgaaaaataaaaatgtgttctatgacaacttttattttttaattttaaaaacaaaaaataaaaatgtgttctgtaaattttagttttattttcatttgttgattttatttaagttggggttagggttcaagtccgggtcgggatctgggtccgggttccaatgtctagttcggtacagaattaggttacacccgaactcattcaactaaaactgaaatctattttttttttttttttttagttttgagctgggtgagtttgtcgagtgaatagttttcgcgtgtaaatgtgcactcctattgtaaagtaacaaaaaaacaaaaaataaaacataacaaaatagaacaatactattccaaaactcaccaaacataggtagaaaggagcattacaacctttcaaaaagcaatggttttccaaactcaactttccataaggttcaaaatggtaaaagagacaatacaataaacatacctctaaaaaaatgggtgcatatcttaattagaagagataccattactttttgtacactaacaatgaaaataattcctgagattgtatgaatcaatgctgaaactaaaatatgttattgatatgggagtttgtacaataacagaagattcttata

SEQ ID NO: 51080 - DNA, 1771 bp, Cannabis sativa
tcaaattggtcactagacttaacccaaaagtctaaacttttccaataatagaaagctggtttgataatgttttgcataatctaacctctcttttggacatttctgcatcattttcatatccttttaatgtttcttgcacattctctggtgaaaatgcagctgtatgaccttcctttttgatctctgcattgtattcttcttcatttaacttttctgcatcttttaccgtgtcttgatttctcttactggtttcaccttggattgtttctagtatagaaaatttgacatcatcaacaatgtgtcctttgctttctgatttctggctctcatcatcacctcttgatgtcaaggcttcatcctcatgaatctccacttgatcacttgggttgtccgtcatctctcttactgtgtcatcgactttaatgtcatctaacattgaaccttcttcagtttcatgacctgcatcatatgcaaatgcattacttctctgataaactccaaacattataacattctcataaaatatattatctattttccactcttaatctccatatttaaatttctccttattgtttccaatggtaaacactataattattgattagctaaaacaattttcccaacttgcatattttggccttcgacctatagtttgatacaagtttgcattttcttgtcacaacatagatgcttatactggatagatagagaaaagaaaatctaaaacttactttttgtagtgagttcttgtgtgtccacatcaacaaattcggtctcctttttcacctcccctgatatgtcctctctagcagcttctgtctctaagcttcctttagagtgcaatccacaatcctcctcaagcttctcagtgctttcacttatttccagttctattttagtttgcactgttctctcggatgttgtatgctgcaaattatctttctctgagccttgatagactgattcatctccataaggcttttcatctgttttggatgtttcgtttgttttgtagtcttcttcatgcgattcttgatctgcttcgtcaaccttctcttgaacttctgcttgttcaaccaagagacacggtacatgtgaattgtctgcttcatttatcaggaattcagctactgtactttgaatcttattatctgaatgaattgacaagggattctgccagaaagaagaggcacccgttagttatttgttggaaaaagtataatgtaatgtcaagagataaaacttttggaaggacctgatttactatataaatttcatatagtttaaaagctttagaaactgaaagaagaggttgcaaacatgtattaccataatctctgtttcgcaagtagggtctggttcctctctcttctctttgttctcaaagatttcttcaatgttttcagtttctccatccttgatgacagaggcaattgttgcagaatctccaccaaaacctgcatggttaatctcagaaatcacgttcaagtctgtttgaagcttcttttcttctggttcattttgctgcaacaaactatcgtctatgtgctcctcatcccttgtagaatctaattctgtaagttcttctgcttcaatgagtttgacagtactagtatccttggccaacacagaaccagatacctctgcttcttgtgcctcctctgcttcagccccatgatttctagaatccaattctgtaattttttcttggacgcattcgacagtactattaaagtcatcggtggctacaagattggatccttctgtt

SEQ ID NO: 51081 - DNA, 1693 bp, Cannabis sativa
aaaaaaaaaaaaaatttatttatcagtttaatgttattttttcctcttgaattgatatagagtaaaatattatttgttaagtaatttgtggtcaaattatctgatttttaaaatttggcacgattaattctttagactaaaatttgagggttgaactcctcaatttataaaattattttgttctatactccttctgattactttagtctgtaaagtgcaaaagtgaactactattttgtacacatgacgaaatttcattagtccacctaatattgattatataaatatttaaaaaataatttaaaattttaaaagttaggaaaaaataattatttttttctcatttttttttcctttttcttttttctttttttctttttctacttctttcttctaaaaccaaattcactcatattctctctctctcttcccctcccaacgacaaccctctgccatggctaaattggtcacttatggtcgtttcctggtgaagctaacttcgaaaatcgaagccccagcctagaaaactccttgacccaaagaacccgacccctctctcccgttctatctctctggccaacctcgaccggagatgatgggccactcccaactgtcgtacgcctaaatagagatggcgatcgacctcgctagtttcgaaacgccaaaaccctcgaaggttccttcctttcccctcgtgaaccctctcgatgttcttgactcaacgccagtgtctcagatcatctttcttatcctaaattttgtccacctgatgtggcatgtccatgtaagtcaagacagagtacatgtggaatacaaccttgcctataactgaacaaagtctccttataaggtaaaaattgtcaagcagcaagtgaaagaagttaagcgacccgtcaaggagttgtaccactatgtttggctggctaaagggagtctataggccggccaggatgaccttgtatggccggccagggtttgagcacaagctggtaggccaaaatgtgacttttagaccaagggaacttccgttcgaccaatggagcctgaccccttcaagaaaaaaagtgtacaaatgttggcctccatcttcgaaggctggcctccatctctaaaagccagcttccacctccaaaggctggcctcctctttccaaagttggcaagaccttgacctgtaagatcttggcaggagcatggctcaggccggccatggttccaaagccttgaaagggtcagcaaaggtcccatgactcagccaagaactgtccagggtcaccaaaaacaggcatgaatcgactagctttatagggtgaaacccaagagctgaccaactcccatgattaagtcttaggaccgatcatgtctcaagcaagacctccaaggctggccaaggttagttttggatccaaatgtttttttttttttgaactcgaatatgtgcctcgtgttctttatgaatcaaagagtcaagaatcataacaaaggccgaaattgtatcttttctatcaagaagtcacaaattatacattcaaaaactatcacgtggatcaaaataccaaaaatattacaatctaacatgagaatcaaaaagtttctaaaagcttgaaacttatcaatggtaggtacaaaggagagatatcaaagaaaagaagatgagacgtatatagagaaagaagatcaaagatctaaaagca

SEQ ID NO: 51082 - DNA, 2520 bp, Cannabis sativa
  modified_base (27)..(28): a, c, t, g, unknown or other
actaatcagattgtaaagagttttatnnagggcataaaacccaacaaccagtacactaagaggatgtctttcataatgccgtcctcttccaatatttttgcaagagccaagaaggctacaagtcaaaaaatcggttgcaaggggcaatcatcaattatgggaccttcaggcgcttttgcgtctttgaaggatgttgtcacttcgaaaactaatgttagggaagatctaaataagagatgtagagttgacttggggagcgacgacgaagagggcactattattccaagaaatgtttgtgtgcactcgaatctgtctacgattgaaggacatgttgaggctctcttgagtcctctagatgagaggcgtttacatgagcttggacgcgctgcttcttcttatgacttggtctcttcaatattttgagtaagtatcttttcaaagcttctttcttattgaggtttttatttgttctgatgtttgtttgttcttgataggctctttctaatgcgatttttattcgttgagatcgcaaatagctcgacaaggagaacattgtccttaagaagtctaacaaagtgattcaagaggaaaacaagaaggtcattgaaaagcttaacactttacagaagaagattaaagagattgataaagagcttgtaaacgaaaaaggagaaatcagctggatgacattgcatttaaagctatgtgtaaagctcgcctgcagttgttcacatatttcaaaaaaggtaggtctgctacgtggaaggtagatgaggagttagaagtttataggaaaatgtttcctgattcagttgcctctggtgacgaggaatctattgcttctgagtttgacactggtgttcctgaggctgaagaagatggcaatcatgttgtcgagttcgacaaaggtaccattgaagttacagttgattttaaggcggctcattagtatgttatttctacttgttgtatgttcattttatttgagcgatgtcttgtcttatttaagatgtgaaccttgtcgttttttggacttttattttatgtgtaatgctctatgtcaagctcttttgatgtgggtttatgctctgtggattgagctttctcgatgtaagactttgctctatgtatttagctttcttgatgtaggactttgctctatgtattgagctttcttgatgtgtattagacctctttgatgcacaactttgttctatatgttgagcttgtgtatcaatgtttcttgatgtaggattatgagtatcattcactgaattttttagatgggatgttttattcaaatggaggatttgatttgattttcttttttggttatttttttacttttgtatctacaaggtagtcatgtagcatcctgtactagttaggattcttatatccatcccgtagcaaagagtgccactttaggactctccatccgtaatgggatttaagcatccttcataggatttaagtatccgtcctagagatgcaatgtagcaaagagtgccactctaggactttccatccgtaaaggaattcaagcatccttcataggatttaagtatccgtcctagagatgtcacgtagcaaagagtgccactctaggactttccatcgataaaggaattcaagcatccttcataagatttaagtatccgtcctagaaatgtcacgtagcaaagaatgccacgctaggactctccatccataatggaatttaagcatccttcataggttttaagtattcgtcctagagatgtcacatagcaaagagtgccactctagaacttttcatccataaaagaattcaagcatccttcataggatttaggtatccgtcctagagatgtcaagtagcatagagtgccactctaggactctctatccgtaatagaattcaagcattcttcataggatttaagtaatcgtcctagagatgtcacgtagcaaagggtgccactctagggctctccatccgtaatggaattcaagcatccttgatatgatttaagtatccgtcctagagatgtcacgtagcaaagagtgccactctaggactctccatctgtaatggaattcaagcatccttgatatgacttaagtattgtcacgtaacaaagagtgccactctaggacattccatccgtaaaagaattcgagcatccttcataggatttaagtattcgtcctagagatgtcacatagcaaagagtgccactctaggactctccattcgtaatggaattcaatcatccttcatagtatttaaagatctgtcctagagatgtcacgtagcaaagagtgccactctaggactctctatccgtaatagaattcaagcattcttcataggatttaagtagtcatcctagagatgtcacgtagcaaagagtgccactctaggactctcaattcgtaatggaattcaagcatccttgatatgatttaagtatccgtcctagagatgtcacgtagcaaagagtgccactctaggactctccatctgtaatggaattc

SEQ ID NO: 51083 - DNA, 808 bp, Cannabis sativa
ttgtacctcctaagcggcatatatggtcggagcttgtattctagaagcttgtttgattcttactccttgaggagaatttagagctctgggctgtctaggaatagaaacgtgtccatgtgctactagttatttgggatagatgattggaattcagacccagttgtataagtggcctttgaaaactaatccttccactcatccctcaaatagtcacattagtttgttgtatgcacaattccacaatggtactcacactttttattagggtccctcttttgctttctatcattgttcattggtggaggccttttgtaatgtaccatgttgctagtatctttgtataaattttcccgaatatcaattaagatggtgtacttagagtatcttggttcttgggtttttcctttcttcacagatttgctccaacttggtactttggaacttcttttgccccaagaactacttacatttgatttttgtgcttcattctattgattcattttttttgggagcgacattatatcaggtttgtgccactccaaagctgaagaaacttgaatgtatagttagctgtgtagaagtaccaaatccatagacaattggtgttgtgaatttaggtgtcgaaggtaaaatagccaaagcagttgattaagttgtataagtgattgttgatggtgctggaagtactccataaacctgagcataagcatcttccaaatttatgaatctttgggctctagataagaaataagataatgaatctgcttttaatctttcaagtttgtcccccaacaaagatctagtgatt

SEQ ID NO: 51084 - DNA, 2224 bp, Cannabis sativa
tgtgagagatttgacacgtcagatggatctaggacattaaatgtcccaagaagagtggtgagtgctctcggataggtctttaggttcatattctttaccttgtctaatgtgggtaggacttttacggtgactgtgcccattttggtccaacaatctaggaccattagttaagccgaagggcttatttgaaactagctagatgtccagaatcgatgttttatattagcttgagttggagacaatgctatcttagtttgggacgatgtccgttgtttgggaccattttgcttatccgattccaaaccacaaggtcgagttcttgccagatttgggccttcaatcacacttgggcttttgtcgacttaaaatggacccacttatcttttggactttcttaacgtgtctcctcaataaaaacacgaacaaaaataccaaaaattacaaaaatgtaaagaacaaaattacaaaaatacgaacgcccatcattgtagatacgaattaattttatttcaataaaaaattacaaattaattatattattataaattttgattttttttttcaaacaaatatttaaatttttccaaaaagaaaaatatttagtgggacacaaagtcacatgtatcatgtatgtctttctctcttacctactatatgtctagtgccattgaaaatatagttggaatcttcctcaattgtttgatcgatgattttttttaatcaacatcgtataattctaaatattatatatgaagaaaaatgaatcttttttcagatcctctatttacaagcaatgaaagtcaatatcgtataattgttttcttttttttttttttgtcttcatgactttggccacaaatcacgccacttacaaatttcattccctaaaaagaaaaagaaaatgtgtgcaaatctcttgcaattaataataattattataaataaacagctaatctattactcataactaaaaaattgataaaaatagagatcatggtattattttgtttaattttgaaaaatacaaaaaatttaatgggtaacttttataaaatataggatcgaaaattgattttagtcttcttataatgttaagaattttgttttggtattaatattagaacaattatgttagatactttttatttgttcgtttgttttttcttttctttttttgaaaatttttgtctatcaaagcctcaagtgaaaaataaaaccacatgaaagtcccttagaatatatgatctgaaatgtaaaattggtttattaagtactgtaatcatttttttataaagttgtaagtacaactgtcataactgtcctctcggcagttatcacaattaatactcttaaatgaatagataaatctatatatatatacactagactctaattcattagtactctaagtaagtgtaatacttaatttgtaaggtattactcaatttaataaaaatagaggaagaatttagagcttatatgtgtgtggttgtacctttggttctgtaaaatattttcgagcgtgttctttggagatctcttgctgtgagatcataggctattcctaacaggtggtatcagagcttggagatcaaaaatcagagtcaaaggtttaagattcttgtagaacaacccaagaagcaatggggaatgccaattttgatctagaaaattttactgtggaaaaaataactttgatgagagctctacttgttcaacaggatttacaagctgctcttcttggagaaagaaatctactagagggattgactccaaaagagaagattaaaattcttgaaaaaggctcatagtgctctcatattgagtctcagggacaaagttcttagagaagtgtcaaaagaagactctgcagctggagtatggatgaaactggagagtttgtacatgacaaagtcactggctaacaggttatttttgaaacaaaggtattcttttatgatgacagtaaggaagagtattgaagatcatattgatgatttcaataaggtgatactcaatctggaaaatataggaatcacgattgaggatgaagatcgatcatagtattgaattttcttcccacagatagttatgagcattttatagatactatgatgtatggtaaggatttattgacattagaggaagtttaaattgcattaatgtttaaggaattgaagagaaaatcaatacaacaagaagaaggtgttggagatggattgtt

SEQ ID NO: 51085 - DNA, 2184 bp, Cannabis sativa
  modified_base (119)..(120): a, c, t, g, unknown or other
aactatcacattaaattatgaaacatttatattatttttttattatcttacatattaaaataataataaaattgattataaagattagattttatttttaataaaacattaattagatnntaaattttacatcaaaattttgcaattgttcattggaaaacaaagctaaaatttggtgtaaatttatcacaaaactactttttgtgctaaatatagtacaatttttacatttccatggtcttatatctatattatatatagagtttatggagcttgataatttattcttaagattatttttattttttaaataaataatttagttgttaaaaaaattattttatttttattattttatatataaaaataatattgtaaaattttaagattctatatatttatatgaaaaaaagtttaagaatgatgaaatgtcatctcatatttttttttcaatattttagaagttttgagttttcactatgaaaaaaagtcatatcattttttactaaataaaaaaattcacattatttaaaaatattttaagtgttgtggaggaagtatataaataaaactcttagttttgttactttgatatgacctaatataagatttaattattttttacttatactggttattgattaatgttttacttaatttattataaaaaaatttagttcaactaatataatatttatatatttaagtttaattacttatatctatattgtatatatcgagttcatagagagttgataatttatttttaaaattatttccttatttcagactaataatttagtagttaaaaaaactattttatttttattattttatgtatgaaaataatattgtaaaattttaagattctatttatatatttatatgaaggaaagtttaagaatgatgagatgtcatctcatatttttcaatgttttggaagctttaatttttcattatagaaaagagtcatattattgtttactaacttagtaaaaaatttcacattgtttaaaaatattttaagtgttgcccatgaagtcaataaataaaattcttttttttttttactttgatgttacccaatatttgtcatattctatattattgactcataatttggttaattgacagcagagctttattaattgttgataatcaccacgtataaataataataataataaaagtaacacatgaatttatagtggttcgacctctttgattatcgggtaacgacttactccccatttagttgtatttatttttgagataataccacacagattacaagtttgaaccttgaaatatattttaacgaacctaaatttactaacaagtatgtttttaacatcttaaatatgaatgtctaaaacaataaaacttaaatacatataaagtacgagaaaccttacattagtttcaacagaattaaatgactccttagttcttagatcgtgattagaaaacaacacaattacactaatttatgtttcttactatttcacattttttttctttttttaaaaaaaatagtcttttacatcttatttttgataatatttcaaaagcttccccaataattataatatttatcgtacatttttttttactaattagtgtagaaattattatttttaatgtaataactctaataattaaataccaaaatatgatataaaaaatctcacattttatattgtttatattaataatcaataataattaatttattacataattatgtttattgtcaataaataatttaagattactttttaaataaataaaaaaaagattaaaatgaaaagaaaagttatacactaatttagtgtagatttaaaattcaatattattatagcatcttcggtgtacaccattctactaaattggtgtgcatcgctgttaatagtgttgaaatttgaatctacactaaagtggtgcataatttgttattttcatttaactttttattttttttataatttgttttaaaataaagctaattaggatttttattctcgaatttcaatatgaactaaattatatctctcgaactttttagactattataaattctcccgaactattgagattattgaattttaaaatgtttatctaattttactaacgaaagcttggagtagatgaaagttcaataggcacgatttagtacatgtcaaa

SEQ ID NO: 51086 - DNA, 1022 bp, Cannabis sativa
tcggatgaacacccctaatagacaggctggagcttctccaataaggggatcaaataagttaatcatatttgtagccaccaacaaaattgactccgtgtggtccctacaaagccacaacgcacatggattcgcacccaactctcacatcaaagttgatcttgacccaatcatcaggtggaggggaccaaacatgagactcaataacttttgacgaagcaaataaacaggacccatagtccgcataacagatagagatagaataaaagtggcaacactcaaccgtctcacattattcataatgtggagatcatctcgcattattaatacaaatagaggagtacaccaagatgaagtgcatctaacactaaatattttttcctattaagatggataagaaggagaactcatgtttcacgagatgcaaccttcctagtcaatataactgtctaaaggacaaagataaggaacgattgagtagttattagatattatcccatatgtgaaataaatgaaatgtagggaatgtccatgtttcattaacatttgtaaatgaatcaatcctaaaaagaataactgtccacctatattcttataaataggggcagaatcaatgaaaaaaaagacgacaaaaaaaacagagaaaaattctattattttaaaatatagagatttgtattctgtaattgattaaaaaaatatagagatggtatcataaaatttatgaatttatttatttatttgttgtataattttttttaattataataactagaaaaaaaaaagataaattttatatatatgaagggtaatatggtcaatttaaagcattctgataacctttttttttttttttgaaacaggattcattcaaacaacaatcaatacaatggattaggcgaatctgttttcacagcgtgactcgcacaagggggtacaaccccaacccaaatggcactagctttgttaatcaaagcttcattggctaatacatgagcaacctgatttgcttccctataaacaaa

SEQ ID NO: 51087 - DNA, 975 bp, Cannabis sativa
  modified_base (65)..(77): a, c, t, g, unknown or other
gaaggattgcttgaagtctaccttactccccttggtgctttctccttttgatcttttcaagcaannnnnnnnnnnnnatttttatgcaacttcagccttctttcatagaagctgaagcttgcctcataaaaattcaacgtgattctcgtatgcacgatgttttttgttcaagaaagatcactgggggaatgacacgtcttcaacccttcttcccaaaatgaaaggattgcttgaagtctgccttactccctgtggtgctttcttcttttgatattttcaagcgaagtctaagcttgagtttttatgcaacttcagccttccttcacagaaaccaaagtttgcctcataaaattttaacgtgagtctctcatgcactgtgtttttcattcaagaaatatcattgggggtgtggcacgtctttaaccctccttctcagaaaggaaggattgcttgaagtctgccttactccccttggtgctttctctttttgatcttttcaagcaaaatctaagcttgaatatttatgcagcttcagccttctttcacggaagcccaagcacgataaaagtttaacatgactctcccatgcactatgttttctttttgcaagagagatcgctcgggtatggcacatcttcaaccctccttctcggaatggaaaaattgcttgaagactgtgttactccccgtggtatttttctcgtttttatcttttcaagcaaagtctaagcttgaatttttatgcaaattaacccttccttcggggatgccgaagcttgcctcataaaaatttaacgtgactctctcatgcacgatgtttttcgtgtaagaatgatcactgggggtatgtcacgtctttaaccctcattctcagaatggaaggactacatgaagtctatcttactccccgtggtcatttctctttttgatcatttcaagagaagtttaagcttgaattgcttcattaaaattcaa

SEQ ID NO: 51088 - DNA, 2014 bp, Cannabis sativa
ttcaaccccttttcccactaactatttcatttatgatataaaaggaaggtactgtgatgcagccaatgccaaatgatctaggtggcctagttcatctgtcccatacctagaaatagataggcttcataaacagcttccaatgcattttaacaacattaagatattttggaattttaacaatcaccatttgaactaaagtcatttgggaacctaaattccatcgtcttggatattttttaacttccataagtacctgaaaattcaattatagagtttgaagttctttctcatggtaaaattttgtaggatgcaattgttaaagatgtagaagaacctagctctctccttgaggcatatcaattaggagataaggctggggacaatggaacgtctttgcatagacatggtgttcatgacaacaatgccctttccaaggaaaaagaggttcaaaatttgcattcttttgctgactatttctgcttattcccattctaaaaatgcaaaaggatgtccaattgtaatgcccttatctggatgaacaggccttaagtagtgcacttgaggagttagacgatggttacataaccaaagatggaaaattagttcttgactttttacaagccattcatgcagctgaaagtagacaagctgaattagatgctcgtttgtatatggaagaaaagagagcattgaaggtctgtactttgctttattatcattatgaaacaagttcttatgattggccatctaactaacaaggttcattattacaggaaaagtatgagaaggagttgaaggatgctgcagtaagagaaatgatgcttgcagaagaggcagcaatgctagacaaggttgcagttctttccatccccgtgcatatgcttctttatctcccttagtgttttaattttcaattttattttgtcttctgctggttgctttttattggggcctgatcaggtagaatatgtgtatttatttctgatgaaagaccctcttatcttttttttttaaaaaaaaaaactggaaaatatttggaaaagagtaaaagaaaaaggagaattttgtaatcatgcttgtgagtcttaggacataaagtgctggtggctttagataaattatggagcatatggtagactttggttttacctattttcttacaatttgaaatgctagaaataaattttaaaatgttgaagtcctacaatcttgaaggaagaattacaagcaaatgtgctatacaagtttatatctatttagataattctacgttttctttggtatcaatctctacccttaaaaaatgagcaaacaaactgaaactgaagatataaattttctgttacttgctcactatttagagaatgacagctttaaattactgaactttacagcttttattttgcttcaggaactaaagagagaaagaacaaaagcagctgctgcactcaagtcacttcaagaaaaacttgaagagaaatacaagacagagctggaacagttggtacaaaatattctctgcctcaaaaatggtttatcagtgttcaagcatccgagtgataactattaatttggtaatttacaattgcaggaacatgaagctgaattcaagctgaacaagatggaagagttggcgaaagcagaattggctgcaaaaattgctagtgagaaggcaacccaaattgaaaaaatagcagaagcaaatcttaatgtaagtaagatctgcttattttacaatcagttctcattcctaattcatatgtttgaagaagaaagggtcaatgaaatgatgaggcagaataggattgtgttaggatcccaccttgaccaagtatgggattggttagtagtatgtaacccacttgagcaccctcctctcttaggctaaattttgatagtgagttctacccaagtggttgtgtctagtggtataagagtcatgcaccctcaagtgggaccaacgtcgcgaaagaggcgacctatggaaggggggacatgcataaggggcaaactg

SEQ ID NO: 51089 - DNA, 1744 bp, Cannabis sativa
tgcttaaggacatatattttgtgccatgtcgtgctcaagcctgtactttttcgtgcctagtcatcctcgtgtcttctgagctcgtgtcgttttcatgctgtgtcaaaaagttcggcccatatttttaacactatgtacaaccacacagatcaataatgttttgcacacactgtaaaactagtagtcatacaatgttcaaatgctataggctacataagcattcacctggacaccaattacatggaagattttctaatcaaaatgctcctcaaatttaataaattctgctagtgccaattttacaggagcacaaaatgatcaatcaaagcaaggaggccaatcatctattgaaaaatattttatgtcagccctcacttcaacttagtgctaaaaattaatggctttgttgtctaaaaaatgcaagagcaaccagaatcttcccactcaggccatccacgccaaccactggcgtcacagctttttggtactctcaatcccaatatttttgataaatgaattattgatacaagtgcagctcatcatgtttgctataatatgtcattattttcaaatactttcattgatccttctatcatttttgttaaatagcccaatggtacttgtaccaaagtaatatgtattagctctttagcatagacttccacatttgagttcatattttcctttgctaagtgtgtgattcaggacacacagaacaacctacaaattgagatgggtgaaagaattgagcatctttattacctaaaaactactgtttctagcaatgctcctattgtatttacatctttaatatattctaaaatttcaaaagatgctacgtggcgctatatataaggtcattcctcttgtatcaaaactcattcattgaataaaaagttgaatttttagaataattcttgtacccatttttttagttccatcgttcattatgctaagcagaaaaaattaccttttgtgtcaaatcacaatcttacagaaaaatattttaacttaatccatgttgatattcggagaccctttcataccttaaccattgatgggtgtagatactttattaccattgtagatgatcattctaggtccatttcggttccccttatcaaaaccaaatcagatgcccaaactatattccaagtttcattcaacttttcaaaaattagtacaacatgaccataaagagtgttagatcagacaatgccaaagaattacaatttggagagcttttttaagcattaggcatcatacactaccactcttgtgtgcgtaggcctcaatagaattatgtgatggaaaaaaaacaccaacatttattaaatgtagccagggtattattgtttcaatcctacattcctttagtgtactgggatgagtgtgttgccactgccacctatttgatcaacaaaatccttatacccaatttgaagaatgtatcacccatttaggctcttcaatctaaacctcctaattatgatcatttaagagcttttgggtgtcttgcttatgcctcaaccctaccagtttccagatctaaattttcaccaagagctgtcccttgagtgtttttagggtaccccactggtatgaaggcttataagctttttgatatgaaatgtaataaagttccctatttttgagatttttcttttcataaggatatatatatatatatatatatatattcttatctcaatgttgattcctcgcctaatgaatatcatgattt

SEQ ID NO: 51090 - DNA, 1148 bp, Cannabis sativa
atatatatatatcatttcaatctttgaagtttaaaacaacgaaaatgcttttaccttagaaggtctattgattttaaagcagatgcactaataataaggacagcgggattccctggatcaactttcccttccaacaaccgctttccacacagaatttctttccatgatgagccaaaagcagccatcatatctttccccaaggattctgtttcttgacttgcacattgagatagttctagaatgcatgtatctacaatgattatcaatcacaaaaaagattaaagcaagtgcataaaatccactgtacaatttcgtttgatcaagggaaaactaagtacaaaaacaatagtatagaacaagttttcatatttcccatattgacttgatggtagcgcattatggttaaaaaaaaaacaaattttctgatatatttctccagcattttctactcaatctaacagaacataacaaagcaagacgaagataccttttaggggttccaactcgagggaagagagttgaatgccattagcggactggaacaggtccagaaaaaacttcagttgtgctgaagctgaggctggagctgcaacgacgtcatcagaagttctgccgttggcaggtcccgcttggccatcagggttgctgttatcgtcgttggtgttgctatgccgttgcttcttcttcttcgacttgtccttgaggtcagttttgttaggggccagaggttgtcttttcttgctagggtttttggaggaaagctttgacggcttcttcatttttcagctatccatttctgaacttgcgttataacggtgaagaattagggtttagtgtttagaacttgcggctattccaaaatgatagcgaagttacagatatttactatttacatattttcaaggaataattacatataaaacgctattttttgtaaaatatttacatttttacgtttaaagaatatttttttatatttttacggttttctaaaaatcaacaagaaaataacatcaaaataacaacaacaaaaaaaaacaaaaaaataacatgcatatgacaaaaaattaacaacaaatgaacaaaatttcaacataaaagaccgtattttatgtaaataaaatcaaaaaaaatcgtaaaaatattta

SEQ ID NO: 51091 - DNA, 1335 bp, Cannabis sativa
agcaaagaactatccaatcaacccaagttttaataaaaccaataaaatttaatgtaagcccaaataaaagtctaacaatatgtccttcaaaaatctataaaaataaaaaaataattagatacttccaaccaaactcctttaatatttatgtttgttacaatatggttccaattaaaaaagtggcagcaaaacttcttttctgttacaatttcattaaaataatgtccttttagctgttaaatgtaagttagataggttaagtgtcagcccaaaaacacgtgtctttatattattaaaccacttattgataaaataatttctcttttaaaaataattttgcttaattaaaaaatgttaagtttttaaaaaaataaatattttcttaataaaaaaaatacttttattttccttggcaacacttaacaaaaaacatatcttttattaaataattttaaacctaaacaaaattaaaggaaaaaaatatcgtcttttctcctcctcaagcttcttcaaactaattgaaaagttggttatgttcctgtttcctggttcaaaaaccaatcgaatggatttttgttgttaagtttagtggacttgctatattatggaggaataaagaagagggtaagcttttgaattttttctcaaatcacatgtatattgagatagtatcttttgagtcaaaattggatacgagtctctatggagaacccaacaggatgagacactagcagacctagaatttgctccaaatgttgactaaccagttgacgtttcaatggtgtgttatgggtgacatcaacaacataactcgacaagaagataagagaggtagtaggccatacccacaatggcttctagaggaatttaataaattaagttgtcgatgactgtggtctagaagacaggagttgtctagtcatcctttcacttgggagaagagcagatgtacaagatcctggataaaaatttgcttggattgagcaatggtcaattcctctgagaaataagttttgcctttagccactctcactaatttgggaatctctcagtctagtcattccccaatttatatagagcctatcgttgtggataattttatgcccaatcatcatttttaatttgaaaacactttgctcaaggaaccaatttgcttttatatagtgaaggattgttgggaattcgatgatggaaggaatttttttaaaaaaagttgaattttggtgctgaaaagctatctttgtggggaaaggaaatcgctgacactttcaagatgcgtataaaaaattgtagggttgaactaaagcagctttaaaattaaaagggatgatgagt

SEQ ID NO: 51092 - DNA, 853 bp, Cannabis sativa
aaaaaaaaaaaaaaaaagcccctaggaagatagaatcatacagtagatctcataaaattcactaacgtgtgtacttcttttcttaaaaaaaaataacaataagatatataaaacttgatcacacaaattaatatgtgagattctcattccatataaagattacccacttcctaccaaatatttggctgcctaattatatgtttggatatatgtaaaactcagtacaataaacaatacaacatcacatggtataaaatatttttggaaagaagataatgtttgatttaactttataaagtaataataataacacaattgtggtccaagaaaagtagaagcaaataataataataataagtaatgaatatgatatggtgagaaattgaagagggaacatgacgggtacgagggtacaaaatgtcattatatatgcgcactgcgcacccatgcctacttgcacggaaaccaccctcattaatcctccacctctttctccttcacctcttattattattattattattattattattagtgaattcttataaaattagaagaaggttttctttttctttgaataaatattattttgaatcctgtattttagataattttgtcaaatgacaaagtagaccttatattttcctaatagtaaaaataggatcctgagcttaatttttaacaattttattttttaatataaccaagacaacttttaaaacgaacagatacagaaaatgtaaccaattttgtccatctccatatcagattattataagttttattttgacaaaaaattaattcaaggtcttatttatacaattttggaaaatacatggtccattttgtcatt

SEQ ID NO: 51093 - DNA, 959 bp, Cannabis sativa
gcaagaggagtgttggagctgaaattattttgatattatttagatgttattttcctgttacttttatataattttcttattgtttttgtgttgtttctatgaaaaattctttaaatgtaataaattaagaaacttaaattatctctattaataaattaggaaacttataaaaatactataaaatgaggaaaattttataaaaatattgtgacacgacatttttatatttttaccgtactaactttacaaaaatatttttataaattataaaaatattgtgtttcagtaaaataaaaaatctctttgagaaataccaagtcttgcctcttgaattatttttgacgtaaaaaattctacctaaacttttgagaatattaagtttgtgctattctgtcttgttctattcatttttaataacggtggattgacgcggctattatctatctcgcgtggtggtacacatatgaaatatttagtttttttttcattaacaataaatcatatggttagattcatggcttttgaaatcttattttgctcatacacaagaagaattttaccctttatttttgtcttcttcctcctttcttaaatctttcttttctcccattcaagcccaatctattgtgggatcactcaaaatcgaaggactttgaaaggttgaggtgagattttagacatttgttttgtgttttctgtttttgtattaaaatttttttttacttagttttaacaacttgatttatctttttgtactattacattgtttcttcatgaaattataaattgaaaaacaattaaaaaataatataaaaataacaatataaatgcacatatatacaataaaaatattttctagaataaactgaaaatagatacgataaaaaatgcacataaactaaacaataactgtacaaaaaaacaattaagtgtgtgattttcttctctctctctctctc

SEQ ID NO: 51094 - DNA, 2353 bp, Cannabis sativa
taacttatttgctttcagattatgggccacttctccctgaagttgcaaataacactcgttataatagtagtaatgaaagcactctaatgattcagccagctgatgaaatatctaatactgagagcttcttgagcggtaactgatctcaccaaaataaaatatttccttttactgatgcaaaactatatttggattacatatatgtaattattactactttcatagtcatgaactcattagctatgattttattattttatttggtgggagtagctgccataatttttattacaggtattttcatgtttttgttcattcgttcattttaagtttcggtacttggtaacttactgaatcttataattgcagatgatccaagtttagctctactgtatgaattacttgccaatgtcttggaaaaccctaatgcagctggtcacttgcagagacacagacaaatggatcccataaaattagaatcagtatgtcttttggttatgttatttcttttttaatcaaaaatagaattttttagtctctctatctgttcctttgttctctaatttctgaggtaacttttggggttgctcattacttatgatttaaatgcagcatccgattatttcaccctttagtgctactgctaacgaggagaaggtgatgccatctgtctacccaaataatgtccaagggaatgccattctatctgcttagatgtgtttggtaacaactgccaaggcacagacactgtatatagtgtccgagtacacacatgaccatgtgaagaattagtcttagtctctctgaagtgaaagcttgccaatcaaggtaaatatgatatggtagtttttttttatcatttttgggaagtaggaattttagagggttagtatttagacactggaagttgacttctaagtagttttttcttatcatttttgggaagtaggaattttagagggttagtatttagaaactggaagttaacttctaatttagtttagtttcagattcagaggctatcttgtacagagttagagaggtatttagtgtttggctgtttatattttgcattagtttgctttaatgttttgctactttcagtgacattagaaaattgatctgtgtgaattgcattgagccagaaaaaggtacaaaaataaaaacgttatttttttttttttttgggtctttgatgcattttattgcggcacaatcggtactttacaccaatgcagattttctgtcatttttcatgacaatgcacagtaggaaaattaataaagaaataatatgccaaataaaagataaattactattttggcttttcccgtgtttaaatactattgcctgtttattaattttaagaatgtttttagattagtcaaaaatttattctgaaatgcaaaatattttaaaatgaattgattttacagttctaaattcaattttttttttaattgtcatgtttgttaattaatttataaaaacaatttacaaaacttataaacatatgcaagattcaagcataagaatggttatataggtttgattgactttaattttataaagtaaaaataacataaattaaaaagagtattgttactaagcaccagtagtatctaatatctctagatatgtggcgattggatagtgatacctcttaaaaggtattatattaacctatataagacttgatatttatttagatcaattgtgatattgatctaaataccattgataccttttagtatttttcaattagaaaacatcagaaggaatggattaagtgggtgaacatcacaagagctaagaatcttgtccacaatttgtactatacaatagctgaagttgtatatggaatatagaataattcgaatttatgtgttcttaaaaaataatgtttggcttctttttattttgtaaactaacatagttaagatgagtattaatacctgtgttagttttcgagtaatttgtaatctacatgatgggatatgctcctaaattgatgtaatctacatgtttgattaatgaaaatttttacattgataaaacaaaaacaaattaaataaaaacacagtttttgtatttctattttactaatcaatcaatagccagctatttaatatattcttccaagaagtgaaaattaagggtgttcactaagtatccgatccaatctaatttgcacgatccaattcaatccgcaccatctaatccaattcaatttgcataatgcgggtatccgcacttggatgggattagattgaaaaatctaaaatccgcacttgtgcggattgaatgttgtttgacctcaaaaagtaaccgatccaatccaatctgcacttaa

SEQ ID NO: 51095 - DNA, 854 bp, Cannabis sativa
agccgtctgtgtaagcacagcacaacaatataacaaattagctcagaaaaacataaccccagaatacttacagtcttatgacagtattcagctgagttgacaatataacaaatcactctttcatctcgatccgatgtctgcttgaaatagtaacaaaaaaaaagtattaaaaaaatatactttctctgaagtaaataaaaattatttcataaatcagaatagaatcaaaacaattatctgttattacctttatctgaccatccatacccgtagcagctgcaacaattcctgtgccacccttgggtagtcttgcaaaaagcttcgtagcatacgctttaagaattctttggaaaacctgatgatggaaacagatatgaagttcggccactagattttttttttttttttcaatacttttgctggcctgctcagttgttatatatttatgttttgtggaagcttaagagctgtttagacccgtttatattattttgaggaagcatttgaaataaatgtgtgcatgatataccagtcacaagcacatataccttgactattgttagtccatgagcagactacattaagcaaaacaagataactcggaaatattttattttcagagcacaccttgaacaaattaaacaatgtctggttctttgttaaagcgctgcatctcttcaaactcctcttgattataaggaacaactacaaaacacagaaactaagcagtgagcatgtttcaacagaactcatttaacggaatctggtcaaatacaaaacaaaaactcgtatataaaacaaaattccaacaaaagacaaataaatttaagattaaggatagtaaaatggttcta

SEQ ID NO: 51096 - DNA, 2551 bp, Cannabis sativa
gtcttagttataaattttcactaagcaagggcttaattgagaaaaaaagaaattttagggtttatttattaattaagatactttgataagtctgattaataaataaataataattttatttaatatttaattataattattaaatagataaaaatggcatttatagagttagagttcaaatatggtaatttagacagaaagataagttatttaataaagtggcaaaattgaaacccatagggcccacaagggattcagccataaggttcaattttaaagccattttatcttttttttttttaaatcctaacctaaccctaataagaatcatataaatagataattatatgctcttatttttataagttgataacctaatttcactttgttagaaaaaaaatagagactcctaattatttcaaaatcctactcttctctcctctataattcgtgtcctatagtgaaaagagttcttttccacacattttaattcaatactcaatcatagtgtggaagattgtgaagaattccatcatctaaggaaaaaccaagtttagatatttgtaatactctgtcatagaaaggatcaagggttagaaatttgaacagaatgagtcattatattccgctactaccaaggtaagattttctataactttatgtgtttattttaattttttagaaaattcatacttaggatgttagattatattcctataatcaacatacatattagtaaatttagatcctggtaaaataacttctaacaggaggatctcaatctcttcctgatttgtgttataaaagagtatatatacatacatatatttttaatataattatcattttttgttgttgttattatttagaatagaaaaaaaaaaacatatatgtcacaacgtgatctagagtttgggcgattagcaccgattccagatgcttgacagaccactcatcataagtagggcaaatgatgggtgactgacattgcaagagagacatggatatattttttaaaaaaatatatcttctttatatgttttgtctaaataaattatataattaacttaaatattattgtgtaattggagaaaatgactaccatacgtgagacacaacaaacacagtttacccaaaatattgaagagctaggcaattcatgaatcatgaagacgaagatctatcacttgtgcaaactatttttggaaaacatcgtgggcacctaaaagattatggacatctaattagcacaagagagatgacatcaccacctacattatacctagcctcctccacctccggctggtgtatatgttagagctgatgtcataaatgatatgcatgagtatattagacagttggaggaactggttcggacaaattctgtgacttcgagatcacaaattttgatttaacaatctgattatcccggtgatgaaggactaagttggtagttatgtttatatgtagtgtttatttctttcactcttttattattatgtttaagatttaggtaactatacttataaccttaataatgtgaaaaaaaaaattagggtatatttattaatgaattttacttttatcattatttgagcaatattaatgtcaaaatgtagaatatatatttaacatggaaattaatatttattatccatatttttggatggaggatatgtgtaaatctaagatagtttcagcttagatgctctagacccaatcacaggcgcaatcaagatacttgattggatccatagcaaagttaagtgttctgaattctagacagatgactcgtccagataagatacacctccagcacaacatatgttcgaatggcattggacagatctttcaaatgagtaattaatagaaatccagatatccagctccgtatcaaagtaatttattcccaaatctcgcaatatcagggctttattttcaggattgtatccaggattcgcatctttcgaataaggaaataaagtaattgtcaatcaagcattaatgtgtctttattatcaataaaagtaggacaaaatgtgataactcaacgtgatgtggcctccacatcatcagaagatcaaagcctcacgagctgggctttaccaaatcaacccaattttcattatactatttgtattcgccccatcagtgggcaagaaccctagcattataaatatatgaaaactcattcatgcaaagggttggaatctcatggcttgagtgctcagataaaatctagggttcaaacacttatgtaaatcttaaggcttttccggtctaaacacaataatattgactcgtgggatctttaacaccctaaccacataaaactctattttgattcttcatttattagatttccttagcttatcatattttattggtttttaaaagttttggtaaacaataatgaatgaaaaaatataatggttttaaaaaacaaaaatagcatctgttcgcgataaaaagttctgtatcaagaacaatgtccacagtataaacaagtcagttgggccaaatgaagagaaactatcgagaaaatttctaa

SEQ ID NO: 51097 - DNA, 1984 bp, Cannabis sativa
  modified_base (1926)..(1950): a, c, t, g, unknown or other
atcaaaaaaacaaatacctaataaaaggaaaaaggaaaaggtgaggtgaaacaaaaagaaaaaaaaaatccttgaagcttaattattatatgcatatatataaatgtatgaatatgtatatgtaaatgtgtatgtgtggctacacattgcagatgagtaacaataattgtggaatgatccttaaaaattagaatagacatgttgtggtccaatgtaatgaggcatcttactctatttgaaacaaagattttatcatattcttttcatcactgcaaaagaatatatttatttatttatatatacgaatcttcttggtcagttgcacgcatcaacttataaatatatatacacaatatttccttatttaagctaacacaataccatttgagctttttcaattattcatcaaaaatattcacatttatttttatttcaactaatattatcttcatattaatgtgtgattaagaaggcttaagattctttatgagaaaggaaattaaggaccccaacagccataatcacaaaccccttttgattgggcatcacaaaatgtgggttgggttggtgagaggcaaaatgtcttttacctttcattttatatatatatttatatatatcttctaataacacaatcataaagtctccatcgactcaatttatccctactatcagttttttttttcttcttcttctattttcttttcacataaacacaatattctatcatttcaccaccacaaaattaatttgaaataattataattaaggtctctcgtattaagatattaataaattaaaaccaattaataacatattttcatacttatatgtccatttggaaatatttattttgcaagttgaaaagatgatactttgatctttgttatcttcttaaacttcatattaattcttattcttttttctaaccctaaaatttcatcttctctaatagtatagactttggtcaaattttaatatatatatatagataattccaaccttacaaacccatcaacgtatttcccaatttttatttatttgtgaaattaatatggcgaacctattagttgtttgagctaaataatagtactatcactgcttacatttatggtcgctagagaaattatttgaaatcgaagttagtttttaatttcttttatatttttgttaaccaaaaaaaagtaaccaaattttacacaaacaaaaattcaatataacgacaaattaacttcatattttaaatttaaaagttatgagatgacattctaataaaaaaatgtaattacaaaattttgatagattgctaaaaaaaaaaactaatatggtaactaaatgatgtcttaaacttatatgactatgctattttgctaataagaatgatcactttttatatatactttataatgattcattagtttctttaatataatttcaaaagtaaaatatatagtaacattcattgggtcgggtttgggctaacgcgggctaaacttgcgcctaaggcccactcaacccaagggcctaaatatatatttattttttatataaaatcataattttaagaactaattgaaatcatgtaaccaatatacgatataatattatttaaaaataatctttttaatgaaaaagtaattattatttggtattgtttttatgcatcgtaagcaactaaaatgttacttttgaaaatctcataaaattgaaagtaaaaaaatctaaaaagtagaattatatttaaataccctaatggtatttcaaatatagtaattttattatcattattatttaaaatttatgtttaactctagacttatattcctatttattacttgattaatttaaaatataatataaattctaattatttactattaggattatcgagatattacaaagatttaggtcgatctactattgatnnnnnnnnnnnnnnnnnnnnnnnnnttatagtaaacgacatgttagataaagacatctt

SEQ ID NO: 51098 - DNA, 1293 bp, Cannabis sativa
aataataataataataatacatcaaaactataactattcacgcgcatgaagcaactgtagagtgcaggtacaacacaaaatatatattgtgtcgaagatttcttttttaaaaaaaacaattattataaattaaattgagtaattaacaataacagagaaaagagcaaagaaaatttcctctagctaaatacaattaatatccaacactaaaacttgtttagctaatccatgagcggcttgatttgaattatgccgaacatgaaaaacacaaactataaagagataggataaatgacttttaacatccacaaataaatctttaaaaacaaagaatggtgtggtgttttaaagcattaagggatttagcaagaattatagaatctatttccactaaagatacactcaaattaaaatttctcgcccattacaaaccatgatacagtgctttcgcttccatctcttgtggttcataacaccctagaacctgttttgaaagagcagccttaacatatccaaataatctcgaatgataacacccaaactaattttattccttagagaatcaaaagcaacatcaacattcatttttaggctattgagaggaggaggttgccatggaaacagatttgtgtcgaagattctaccataatatatatgtgtcatcatttttctaaatacgcaattgtagaaggtaaaatctatgaagaagatgctaagcaagaacaagaagagagaaaacagagagaacagagcagaaattatgagctaaaagcttccctagaaaaaggactaagttcctttatttataaaccaagaattacaaagaaatactaacagaaaagtagttattctaataacaactaacaacaaataattaaccactaaatgttaaaaaatagcttcagtaattagttggttaacatccctcctcaaacgaaaaggtatgtcagacatcttgagtttagactgtagatagagcattcgatcagttgaaagaggctttgttaaagcatcagcaacttggtctataactagaacggatcgaattgataatttttttaacattatgagatcccttacaaaatttaaatcaatctcaatatgtattgatcgagaatgaaacactaggtttacaacaatagcagcaacattttgattgtctacctaagagattggacattgttgagaagaaatgtgaagcttagataagagggaaactaaccatttcattttggcactagcattagccaaaagccctgaactcactttcactactagatcatgcaacaacct

SEQ ID NO: 51099 - DNA, 1952 bp, Cannabis sativa
  modified_base (166)..(175): a, c, t, g, unknown or other
  modified_base (941)..(942): a, c, t, g, unknown or other
tctccacccacccctcctcccgtccgtctccctctactctacatcgcatacgtcggaccaccaccacctttcgtcggcgtccctctcatctccgtctcatacgtcacaccaccaccacctcccgttttgtctccctctctctctttctctctctccgagctcggtnnnnnnnnnnttatttatttatatactttttcatttattatatatatttattttgttattgtataaatttaatgtttttttaaagttagttgttattgtaacaaaattaattagttgttttattttaatttaggtaaaattataaagctaatgtaggaaaaaaatgggaaaaaaaaaaagatttttctgccattaattcccgacggtttaaaacgtcgagaagtccacattagcgacggttttaaactatcgcctattttttctattttaccatggtcgtataggcgacggttatagaaaccgacgggaatactttaaatgactgtttaaaaatatcgagaaaaaccatttttgtagtagtgtaaggtgtatttataatcaatatacaccttatcgacagcttacacacggtctgaacaagaccccagcccactagaaaattccataaaataaatattcaattatctcaagaattttcatttctgtacctacagattcgtgggcagtaagtaaaactttccatttatagaaaaggaaagtttagctccggttttctcttcaagaaatctgatctaataaagtgggaaactcacacaagatcagaatataccagctggttagataagaataaattgtgtaatcaaacttaccatttttaccttaattttcataaataggaaagctagacaactttccttccaaatttagatacacaaaatatggacactaatttaaatactcaagccgaagatatacaataaataataaaatatttnngtcaattaaatatgccaaaaataaaattaacagacacaaaactgcagtgtgccgcgacgtacatcgcgacacatcaccacatatcgtgaaacttcatccttgacctcccacatactattttattgctaaatatcgctaacaacattgtaaaagatcgctaaactcgcaaaaaaaatccaaaaaatgcagaatcacgacatttcatgtttcattgacataaaaataaggatatgtgtagatctattcatatcaacataaatagtggaaaataaaaggcaaccaaggatttatatttattttcttatcttttgttatcataataatactaaacgcacttcttaactcatagataaattttaaatattttaaaaaaattaaactaaaaatacatgaaaatttatcattatatgcttaaataaatatactcactaaaaatatgctaccctattttgcatcatgtaaaatatgcttggataagatttttcatccaattttaccactaaacaaataaaacaccaaactttccatctctctctggtatctctcttctctctctctctctctaggaaactcacaccacacacactctaccagtcggacctctcgtcgtcggagctattgttgtttgaccaccttacattactgtggagttggttggacaaccttggaatcaaaacttttagaaagaattttcttcaaaaaataatgggtatgtaatttctttagtaattattgtttgatttagttgtgtttgttaggcgtgttcaacaaaatttacaaaccgcccaaaccaaaccgaataaaccgacaaaaaatacaactcgaaataatacaatgaaaatccaatccgcccaatatatattgggcagtttacaaattattctaaaccgcccaattaacccgaataaactgaattaaaccgatttatatatatttttaataaaattgtatatattgaaaaacgtgtttttgaaaatgtcagttgtatataagaaaatataaaaactgta

SEQ ID NO: 51100 - DNA, 844 bp, Cannabis sativa
  modified_base (712)..(722): a, c, t, g, unknown or other
gggaagttttggtttctacatcaattgatgattctaaccatatatttacgaatctgttgctacaaaatttggaaatgaagtcaaattgaagaattcatgtggtgccttgtatgagtatgattataaatagtaaatactcatattgacaatatttaggattagatcatctcttttgtttatcattattgaatattataattaaaagaatgtcattattgtatagaggttagtaagttcgattttacttatgtatatatagtgtcttttgtaagtgcaaatcttctgagaaggttgttcaagttttgcttcaaaagaaagcaaatacatatgtcaagcatatcgaaaatagtttgaatctaataaaaatataaaatttatttgtcaagatggaatatattaagttcacagtatataaaagggaatttattatttatgcataaaattttgtatttttgcaattgattaatgattactaattatatatagcaataatgatataacattttaatacgtaaaatatttataagatatatgtataataataaatgattttaagcttttttttttggaagggcatgaatggtattaagctggagctggagatggtaaagattaattatttctcctattgatttctcttcttcttgacatgagtaactacctaagttaaaccaaaaattcacaatttatgaaattattattattattattnnnnnnnnnnntattattattattattagatttaactaatatcaaatatagtatttatctaattaaaataatatatgcaatgttttaaggaataaaataattatgacacacattaatttttataattatttat

SEQ ID NO: 51101 - DNA, 1123 bp, Cannabis sativa
ttagctaattacacagaaacaaatatatagttctttttttgcttttttcattagtaaaaaatgcagattctgcgttgtattagcttcatagcttgtatattggagtttcagaatcctatatggttaaccttttatgtatgttagaggctcttaactgctacatgattaatgaaaatggtttaccttttatgtatgtttaaggtaaaacctttacagtcaatggtatatactttgtccaacagtttatccaattcaaggtgtgtaaacgatgaattgaggtactagcagttgcatgaagctacttgttttcagtattgttctttgctaaaggaaatatagctaagtttattttagatctgcctatggttattggtttagtttgtggaagagaattcgacatatggtacaagttaaagctattgccagtataggtggtgaattcaattggtaatctttgtcctgtgtcacaaggaaaatacacaacttagataccttccaagttctattttgaaacatttccaacttcatcatgaaagctcaagcacaaagatcacgctttcaaaacacaatattcatcgaagagatcaagttaaagtaaaaggagaagcaaaacaaacatatgaaagggaatatattaatgttattgttaaatagttatttaatagagttattttagtcctttattttattttagtcttatatgttagttgtctatgtaaggctttcttattagttgtattatttacaattgaatgaaatcagagttattcttttttattttctgtatcttttttattttttatttgttattcttcttttcacaaataattattatgacatcagagttaggtttacgagagtgaatttcttaagtgtgatcacataactaggttcacaaataattatcagttatcaccacacaagcgaaattcatatgcatatgaactgtactagggaaagcctcaataccctcaaactcatctagttctaacaaataatggccctctctttaagtttaactgtttaagcgcattgtactcccaatctgggagctctcagcctcatgttcatggagtttggttgagctgagtcaactaccagacttgcttgaaatcttgaaaga

SEQ ID NO: 51102 - DNA, 3049 bp, Cannabis sativa
  modified_base (402)..(404): a, c, t, g, unknown or other
tatatatttttaacttattggcaatttaaaaaattgtatggttcttatttaatttggatcgaccagtcaattattgtattaatttctcagaagaacccttgtcgccatggtgcttgaatatataagtttttttagtgctggcaaataaattctgcattgacgtgtatggagataaatctttatttgcttaaattataataattagtttgactgtattagaattactctagaataatcatcacattcatatgatatattcttagtgtcatttaattaagcccccatttttcattattattgttatacactgtttagtcactcattctttttacacaaatttggtcactcattttaaaataacatattttactacatccttacaatatatatatatttatatannnatatatatatatttatataatttaccaccatagtatttgtaatttggcataactatttttttcttttaggaaatctatttttattcaaaaaaaattacaacttaaccaaaaaaaatatatatgcaattatactttggacatttcgtaaccaatgactagaaaatttaataataaaacctattatatatctagacggccatttatttatgatataaattattaaaaaaattagactaaaaaatttaacggctataataaaactttagagatagaatttgtaatttctttgaaaaggatttttaagaaattatttttaaaaaaaataataatttacataattttcatactcacaatttttttttaatgatattcaaataatttgaaaaatacttttcattaaaaaaaaaaaattcttattcaaacaataaaagtaaattatatcttatacttattttatacttctaactataaacataaatagaaacttaatcaaataagcccatattccaaaagaaagaaacaaaaaacactctttttagttaccttcaatattaaaatacacttgtatttttaacacaaactgtgatatagctaattaaacattaaaataaaattaaagagtatacattagtaaattgaaacaaaaaattcagtagatgaatcgcaagtattagtaggagagaaaattataattggacatgatgctcaacattatagtaattcataattttttaatttatttattaaattaaaatatatggaccaaaccaatacctattatagtgtttcacacttgcttttagcgtttattagtagatgacgtgaagttgaacacaatttataaaaataataacagtgaataagcaattttttctttcaaaagaaaaagagaaaagaataagcaatttttgcgtttcaaaataaataaataaataaataagcaatttttcgatggtgggatttcgtactaagcaagtactagttatagacgcactcacttataatatatattttgtattcaataataatatatccgtgccacggaaaagccatgtgatccgtacatgcaccacgcacttaatttccagacttttctctggtgagctccattccaaaagataatgaaagagaaagacacttccaaactctgtcgtttatgttttttattgttatgattggatattaaattagaaaagtgggtccactgcatttgccatgtgtcggccatccaggggctagttgctgcatcgtcatccaacctgatcctcaaaattgggtcccaccctacttcaatacttccaccgcaatgcatccgataaacccttttctttttctttttctttttaatcccttcttttcttctcttaataacataattagtccttttcttttgttacaagttcataccataatcacctaatatatcattatttaacctttttttacagtaattattgggttattatttttttaaataaataatattattatattagaaaattataaatatttgatttaagctttaaataaagaaaatatgtaatagctaaaaaacatttctattccacttgcttcttgactaaaataattagatgaattttataattaataactctactatcactctttttttttattattactttcaaacattgttttaaaagacttagagaattttgatttttgtgtaatgtaaacttaaattcttacataatatataatcaattaataaaataaacttcacttaaaaatacgaagttcgttatcgattcattctatatagaaactaatactgaatcattattgaatttattctataagatttaactgcaataaatttaaagtattattgaatagtccactaatatatcctcatattgtgtggtttgaaatatatatgtgatattttatgtatttgaatttagattaaatattttctttaaaatatttagattaaaatattcttatataaaatatctgtataattttatttttatatataataatatttaaaattaattaaaaatattctgttaaagttaacaaaaaaaataaaaaatatcattaaactaaaaattttgttacatactacattatatggaagaaattttaataattaaattaaaaatgtaacttatatttttctataactgctataacaagttgtaataagtcattattaaaaaaaagtccatttataaaattgaactaataattaattatgtagtatttaaaataaattattatttaaatatgatatttataatttttttttagttttttttcttttttttttttataaaatattaaaattagtgaatttcagttacaaaacctcaaactattggcaatggctgtggggactaaattaaagagaaacgttcatacaattgtgaacatagtgaatattcagtctttcttattcaaaattcatgtaattgaataagactttttttttttttcaaattatcaataaattttgatattattttttccattagtgtttttatagttttgtgaaaggcataatttctttgtgatgctatttcattatgatggaaatgtaaatcaatggagagatttggaatggattatggaatgatcgagccatatttgtctctgctgtatttttttttttttttttt

SEQ ID NO: 51103 - DNA, 631 bp, Cannabis sativa
cttagctccctcgctatcctttgttggtataccatggaaggtattacgatggcttttattgtagttatagtaggtcctctacaaattttgcctggactacaatgaaattcaaaatgtgagtaatattattatttggtttgtattgtggcagcttcctccttttccattctttgagttgcagagcaagtggatagcaggtgttctttcgaatcgaatccagcttccaacagcagaagagatgatgaaagatgttgaatccttttactctaattatgaaatctctggcttgccaaagaggtatactcattgcataggagaatctctggtatgttttccataaactaagtgattattaattgagtatagccttgtttgttttttatgatgatttttggaactttttgcagattgagtactataattggcttagtgttgagtgtgagtgtgaatttattgaagagtggaggattaatatgttactttcaactataaatagagggagtttacagccagagacataccgtgacatttgggaagatgaccatttaatattgcaagctcaccacgactggaatcacttatgaaaaatacacaacttacttgcttattcataaattgtactctgtctcaa

SEQ ID NO: 51104 - DNA, 1443 bp, Cannabis sativa
ccattccactcggtcataagctttctcaaaatcaattttgaaaaccaagccgctcttgcctctacttctgtagtcttctactgtctcgttagcaatgagaattgagtccaatatttgtcttccttcaacaaaagccatttgagtttcgagaatagtatctcccagtacactcctgagtctgattgaaagcaacttagcaataatcttatagacacttgttataaggctgattggtctaaagtccctaaccctacaactgttcaacttcttagggattagacaaataaatgtttcgttgatgcttccttgaatgatgccatctttttcaaaggccttaataacattcatcaaatcctctttaatgacctcccattgcgactgaaacaaggctagagtgaaaccatctggccccggagctttactaccttcacaactgaaaactgcctctttgacttcgctctcatcaaatgacctctctaagtgactagcgtcgccatttggtattgcctgccactcaattccctcaataccgctacacaatcttctttcagaagtgtacaggcttgagaaaaaagaaattatctccttggctatttcttccttttcctcaagaattgatccatcttccctttcaattcttgatattgtgtttctggctttccttgcattcaaaatattatgaaagaatcttgagtttgcatcgccttccttagcccatttacacttggatttcagccacacacttcgttcctcttcaaataccaattgttgccattcctttttgagtgccctcctttcctccatcagtatctgattccactcacctgaagcttctactctatccattgccaacagtcttctttcgagagcattttttaccacgtgtttgttaccgaatgtcttcttgctccattccttaatttttcctttaacttccttcaatttgctcatgaatatagtgcccgcccagccggatcctgcagccttacgccaccaatccccaaaatctttggagaatgtattgtgttctagccaatgattgtcaaatctgaaagggccgggaccccaagaagggggattagagtctagtacaactgggctatgatctgaaacaatccttaccaacatttcttgttgcaagaaagtgaacatgttactccaactattggtgaataagaatctgtccaacctacaacaaataggtttatttcgaaagttcgaccacgtgtattttccattgttcagttttggatccataagcttcaattcacacactaattgatcgaacatcttcatactcttggtccaagacatgctgtttagtttctcttggaccctccgaaccacattaaagtcccctcctaaacaccacacctctccacaaattgcgcttaacccagccatctcatcccagaatgctagtctttctctatatgagcatgg

SEQ ID NO: 51105 - DNA, 1227 bp, Cannabis sativa
ttatgttgtgattaaaaagttatcactaaaagtaacagttttttctagtgactttttaaatttttaattttttttttaattaggtaacgtacttatgtataggctagattcgtaaatttgatataaaaaaattttattcctaaactttatgaaaaatatggtgtgtgaatcagtttaccacaactaaaacggaaagcaatcaattctttattacaatcatttcaatttaaaatataaaataaataatattaaatttaaaaatatttataatattttaaacttaaatttctttatataaaatatttatataattttttttattttaattcaaagttaaactgataagttttaaaatatgattaaaaatatttataacattttaaatagttgaaatttaaatcaaaatttaaataatttttatttttaaatatatatataataatattgtaaaattaataaagaatattctattaattaataggatattctgttaaagttaacgtagaaatccaaaagaatagttaaaccaagaattctattacataaccacattttatatagaatagatattaaatattaatatattagattcttaaaaagtatgtgcagggtgagtttatttgctatacatgtagggacggacccacttgtgttaatgtggggctatagcccccactaacaaaaatattgctttttaaaaaattaagttaatttttttatttgataattatagactaaaatagtagaaaaaaacccccacaaaattaaataaatttagtgaaagtgattataacttatgtataaatattttttaataataaaaagcccccacaaaaaaaaaattctaagtctgtcattgtacacatgttaggataaatgtatatgtgtaaggttagatgtagcttatatatatggagttaaatttattatgtgtacggtttggctaaataggagatattttttctaattgtgaggcacttaattatatttggtttattgaatcatactactagatatacgactagatatttttatatagtttggtctttttgtttaattaactattcattattaaatatatggctagatttattatacggtttggtgtttaattaattattaattttgatttaacaaatagaaaaatagaggattaaggagagaataaataaaactatttggactaattttatagatataaagatattttaaatattttaaatttaa

SEQ ID NO: 51106 - DNA, 1106 bp, Cannabis sativa
tgtatatatattaattttaattttttcggggcctccaaaattgtggggcctggggccaaggccccgactgccccaccctctggccggccatggcccaatgggcccgtccctggttgtagctatttgaaaccacttgtaaatttttaaaaaaccacttgtaaatttttaaaaaattttaaataatttataatgtcgaaaaataaaatttaaacaattacttaccgtgtatatacgaataaacagtggcacatacaataaaatatgtagattttatttttaaatttgtaaaatacttaaaatttataggtgatcttaaataattataacatacaagatcataagaataaattaaacttatgagaaagaaagtaaagtaaatatcgataaaaacaaatactaaataaattacaattaaaaaaataaataaataaattttgaacttattttatttattttcattattttgattcttattttaaaaaaatacaaaataaaattagttttaccaaaaataaattttccattcctttagacgtctaatgaatatggtaaactatgttttaaaaatgagtgtgcattatattaggccatatttttgcgattgtgctcaaatatacacagcgtaaagctaacttagactgtttgatacaattttttgaaaaattaaaagttatttaaaaaaatctataataaaaatgtatctagtaagtatttaaaaaaaaaaatatcttattaaaaaatttatagaaaagttacaactaaaaattaaagctggtacaacccaattttttttaaaaaaaattgttttgactaaaagactataataaaatattttatactaaaaacatatttaattttctttttgaataaatatttaattatttattacatactacaaaaataaataaataatatttaaatttcttataatttattttgttttgaaaaatatttatatttatattataattattaataaatcacaacaacctagagtttttataaaccacaattttttacaaattataaaaatatttgaaaaatattataaattatttttataaaatatatataaatttatactacggaaaaaaataattaaaaat

SEQ ID NO: 51107 - DNA, 803 bp, Cannabis sativa
  modified_base (32)..(36): a, c, t, g, unknown or other
aataatctggattacattgaaatagagttttnnnnngggcataaaacccaacaaaagcctcaaattattcggcataaatcaaagaaatggctttttatgctggtcagttcttcccgaagagaggagttgtaaccctcgtagtcagtttaatgaggatgtagggtgtacaagagattcttccagaatcggggattggagtttatggtgggacttattttatcaagagctaatttattaccatgtatatttgattattatcataataatttgataacttaaaatatgttttaccaaacgattaaataaacaccttaaagtttcatattcttacattaattacaatagaataaagtgattccttccatttagtcactctaaccctcgattcccattttatagcagggtattgtcaaataatccaagatttattttcctgaaccgacaagcgataaactacatgaacttccacaaagatctaagtaccaccttgactagagtgggttggttactattacttgttgtggtatgaaaaacaaagacaaagagagagatgatgtgtaaaatttagaaagagagagaggagctttttcttgtcagtttttggcttgaatcacttatctgaccaagctctcatatctttctttatatagctatcacactagagttaggtttagattaaatgggatcaaaataaaaaataaggaaatttacacttgacaccttatttttgatctaattgtcaaaaatggccaagtatgaataatatttttatttgtttggaatgtttcaataccctcatttat

SEQ ID NO: 51108 - DNA, 882 bp, Cannabis sativa
actaatatggtatcagacgaaatttcctccctctgattctctctctgcaactttctccatcgtcttccatggcgagaactagagctactggatcaagaagctccggccagactccattgccgcacaattcttccaatattccagatgctcctcctccgatcattcctccagcttctaacattactggagacaacaatacacaaacaacaatcgttcacagtcgacctgttcacgaagacagttcaagtccttattacttgaattctggcgatcatcccggccttactctggtttctcctcccctttcagacaagaacttccagccatggcatcgcaatttcgaattatcgattggtgctcgaaacaagacagactttctcaaaggtactctgcctaaaccaccaatcgacgatgccttgcacaaccattggcagaggtgcaaccagctggtcatgtcctggctccttcattcggtttctcctgatatcaagagcagcatcatgttcttggacacagctgcagagatgtggaaggaactcaactcacggtatgaccaaggcaatggaccacgcatattcgaacttcgcgaatccttgatcactcttcaccagggtgaagatactgtaagttcctattttactaaactgaaatgtatgtgggatgaaatacaagaacttcgtccaagaattccttgtaattgtgctgcttctgtcgataataatgcgttcttgaatcaagaacaagttcttcaattcctaacaggtttgaatgagtcctttttccctgttagagcacaaatattgctcattgagccttttccatccctgtcgaaagtcttctccatgatcatccatgaagaacgacagaggaaacttaaaaatc

SEQ ID NO: 51109 - DNA, 1223 bp, Cannabis sativa
tcaatctgctgcttaagctctagccggggtccctgatcaatgcaagctaagttcagcttagaatcggctaagcttctactccccatgtagcttcgaaaatgagaaacaaaatgatcaaccactttgggaaagtagtcaataataacaccctgctcagtagtataagaaaggattctattctccattttcctttttttcaaacaagcatgaaagaaggaagtattctcatcacctttgtggagccaagaaatcttactcctctgacgcaaaaaactgtggtacatcttctcttggttcaaaaacatgactgtggcttgcttctctttttcaagataagttgggtccttcgggtgagcctgagcaagaagcctggcctcaagaaaatcatctttagctgcttggtaagtcttcccaatatctcctatagagtccctattgaagatcttgagacagtgctttagacgcatgagcttaagataaatagcaagcaaacccctggctaccataggcttcttccaattttggagaactgtggatttaaaatcagcatgattagaccaaaagttataatatctgaaaggcacataaccaattttgttagacaccatattagttatggtgcaagagcaatagtctgagacagtttcccaactaaaaagcgcttttgaattgggaaaactatcaaaccaatactcattggcaaaggcatgatcaatcttcgagtaaatacgactctgcccatcctggttatttgtccaagtatactttgatccattgaaaggaatagaatcaacatgtgctgacattaaccactggcaaggatcactcgtatcactgagcgtaataggatttccacccactctatcttcaatattaaacacagcattaaaatctcccaatataagccacggcttaacaggaaattttaatttggtcagatccgcccacagagacttcctttcctcagaagtgttgtatccatagatgaacgtagcacaaaaagcttcatcacatcctgacatttgaatgaaacagtgaaccaattgaggagattcagcaataactaatgttcgaacatagccttttctccaaacaatcaaaagtctaccttctatggtggcacttgtgtaataatcccaattgacaaacctattatccatcatctctttaattttattctctttgagtttggtctctaaaaaagcaccaactcctactttatt

SEQ ID NO: 51110 - DNA, 1576 bp, Cannabis sativa
tgatgtggaggtggagtcttcctcaatggaggattaacaatcatcgactaaccaactagtgtaggcccttaaggagggggaggtagtgaggaccctgtagcatcattagactgggtggtctgtgccgccttggtcttaggacaacctgaagaggctccacccaaaggctttccagctagatctctcagtgcgaaaaccatatttgtaaaaagaaagtaagaaagttagaatacaagttataagtatttaatgcaaggaaaataaaaaagttggcattatcaactatcaactaccatcatcctcagaggaagaatcatctgaactgtaagcagcagccttgcccttccctctagaagtaggcagggggcaagtaggcctagcaaattcttggcctccaagcctaatcgataaagtggccttgccaatagtgccttcatgagccaagcgttggtggagggccatctcttttctctccatggtcctctcaatcttagagagggggatatcggcatccatattaggagtacgcccacctcctaggtaagtctcctctaccactagggccttgtgttagcctccagagaagccctcagctcccttaataccagactctagagggtctagaccacacctataaaagttggcctcacaagccaacctcaatatattccttctatcgacaaggatgaatatgatataattcgatctatctcacatctagagtgtgggaatcgagcatgcgtaggtcgacaccctttagaagaagtggtggacctacgggatatcccaaacaatgaaataatccctggcgtatcctcccacattggataaagtcaagttattggtttcgctcaaccattgataacctatctagctgaagtaaaagtatccggtctgttttgctttggaatgaatttttgctcaaaaaagtaccctatcttgttgggggagggctgaggccaacctaactcagcataaagaacgaacaccgccaaaaggtacttcaaacctttttggatgatctgagtcagacacaccctaaagtatagggagatgtctctgaaataaggatgcatgggcaacaccactccatgctttatatggagctctgaccatgccatctagttgaaggccaagcgatgtgcttgttagtttctcaaatgcttgttacatcggacatctcccaccagcccactttccttaatcttgttaagtgtcgggtggtgatagcggatgggggagagatccaccagttctgctgctctccataatcaaggacttgaggctttgcatcctcctctaaaacgtggttaacttcaaactcagaaagatgactaaggatattcaaaggacatctatcctcttcatatgaatccaagaagtttttgaggaaaagagggtgattcttgtactgcctcctctggacaagcatgacctcctcgatcgtagactcactatttgagctcctctcatctcggtcagccacgggctcagccacaggtgcctcaacctggtcaacccctggctctctatcatcaagaggctatgcaacatccccagcaatacctactctccc

SEQ ID NO: 51111 - DNA, 709 bp, Cannabis sativa
catgccaaattgtgtaattacctccaattacacacaaatctaattacattgtggctttccaaacccaccataacagattcataattctatcatagtatattgtgtattataataactagagacgtacacaaaaaatgacataaataatttaccatgaatatatttgtaaagaatttatagataatatatataaaaattaagaaaaagggtatttgaaaagattttattatattttacgatcgtgtatgttataaatattttaaattatttttaaaatttttgagtaattaatttacaataccaaaattaaattttaaatgacagtaatataaactataatgtggatttttttttttttttaaatacggaaagaaataaaagatttactagaatactttttagaacgtgtagtacatgaatttcctaaattatacatgatgataatattatgagtattattatggagtattagtgagatttggtatttgttagacgtgttattttatgattggttagaatattctctaaaagatattacattaatatataggacccgatatttaattacactaataacgatattgacacgtaagaaaatactaaacaccattgtgtcttttagtatttctctaatattatagatatgaaaattgaaaatttaaaggttcacttttgtaattagtgaaaattgaaaaaaaaaataataata

SEQ ID NO: 51112 - DNA, 867 bp, Cannabis sativa
tataaacgggtcgtgttcggatttcattttttgacacgattattaaacgagttgtgttcgggtcgagtatatacctattatacatgagtctcgacatgacacgaacacgatccgcgaacacgaattgccacccctagttcatgtctagggaaagaacattggaaagccatgaaatggcttatcagatacttaaagggattgatatcccaagcacaacaggcgcatcataatttgagggatttatagacgcagactatgcaaggatagagacactataagatctacatcaacctattttttatataactactggaggtaattttactagctggaagagctaaacctagctaagaaagtacctactatctactcagacacccagagtagtatctatttatgcaagaattctatgttgaattcatgatagaatgaaacacatagagattaaataccatttcgtcatggataaaattacttaagaaaaaattgagattgacaaggtgcctacagtagtaaaccctgtagaaatgggaactaaggtggtttccctaaataagtttaagctttggttaagcttattagggattaacacatgttggtaaaacccttagaatatctaagtctagcaactacgtaccagtgcatatggagatttaggtagaaattattggaaaaaaatctccatatacactatagatcagcataacaatttattacaacttgcatggaaaataaaaggaaaatttcaataggtgaccttcgaccttaacaaactcttcctgaacaaaggttagttgcaaagttagttaaacttttgcaactaacttcaacttactctctcaactcactacaaatataaataatagt

SEQ ID NO: 51113 - DNA, 2590 bp, Cannabis sativa
  modified_base (494)..(506): a, c, t, g, unknown or other
  modified_base (654)..(655): a, c, t, g, unknown or other
aactcgtgtacaccattatgaccccaacagagaatcatgatatgaaaaacaaaaaagttacgagaataaattttcagtggctagaatattggtgagatagaatcaacaatttaaaagagtaatatatgattggtaaccaaagagaaacccattaccaaaacatgactagcacgagaacaactcaaaaactcaaaaaccctaatagagcgctacacatgtatttataaagcaagaagttaaaacttataatacatctaaatctattgattcaatcaaatattgtttgagaaaataaaaaaaaaaattggattccattttttggattctaagaagataactaataatacaactctatgaagatttaggttcgattcattcttgtgtatttggcaaataaattaagaagatacaaaagcttgattgattcagcaacaaaatcttgaaaaactatataaaactcattattatgatcattaattattattattattatnnnnnnnnnnnnnattattattattattattcccttttcatttgcttttcttggccctctcctttattctagactttgtttgctgaatctgaatgtatatgcttgataaagacttgttttttgctatattcacgagatagttttttttttttattattatnnttttatttttttttatatatatatcatattgtcctcatattttttttttactaatatatgcaaaataaatataattataagtatttctatggcccaatgacacatgttttaaacataaattagtcaaaagaaaagataagagaccagctctgtcccaaaacctagtagaataaaaaccacacacccaacatatgtatgagcaaacaaacaaaccccttcttattagctaggttctcttacaatatttattactccataatgctaaatcataaataacatctcgaaaattaaaagatcaaatgttgtcaactttcactgaaacacttgttttaaatagctagatagaacgaccaaggaaaaagagagctatttttctctttcattatttaatatcttatcatttttatgatgatatatgaatttattttcttgatctagaagcagtctctttctgtgcattgaagtatgctgcagcaactgggaggcccagattattgtcttgagaaaatgcccttgtgttgaaacagtctctcatagttggaggcctcacagtttgtcttcctctctgcttaaataagatgaacacaaatctatgaaaccccaccattggttttggagcttcataactcacaatttcctttcctgattttcaatttatttgtacaaaagaatctcatttagattttggtatcaataaacttatagacactaaaataaatatccataaatattatgttattattagtagcagcttcacaaaattaaatgaaggatgaaaaactcaccaaacaacacattagttgtaccagggatgtctgtgactatcctgaaagaggttaaaatatatagttaaattaatgaagtgaaatttaaattaatttataaataaacagtttatactgaaatattacaaaccagtgaaggtgttcttttaagtagggatcactaggacttggggcatctggatctgtcataatctttaagaaatttaacaaaaacaatcattcgttatttttgatgaccacacacatatatttatatatttataagactataatgatataaacttacaagtgtataagatgttctcatatcttctcctccaatctcaactagaggtttagagataaaaagagaaggtgtgagctcatgaccattgataagttgcctgttggaattataaatgacagtcatttttacagtagggataaaattatccaccacatctcctactattctttccaaagttaaatcgacacttagatcctcactgaaaggtttgaagactgaacttgacgacataatataattgaaagggaaaataaaaatatggaagggccgggtatgagtaagagactagtatctctattggcttgtggtagtaggagacagttgatttatgggggtatttataagcccaggaaaggagagattttatagggcatgaaagtgtaaaataccattgttttcttattaaatttttattgaaattaaatttaggttacatatagctgcttttcccaaaaggccaggtattgtttattctgtgcaaaaaagtaagaaaatgaaaggaatttgcaaataccactttatttaaatatatagtttatatgagcattgttattatgcattagtggtgcctagtactttcttgatatgtcgcattgcgattggctaacgatactccttaaaagctattatattaaattatatgggactcgatatttagttaaaccaataacgatattaacacatagaaactaatgctctttagcatttttcattttatatatatatatatatatattatggggtctctccatattcttaaaaatcactatatatgtgtggtgacaatatttttatttttaaccattaaatgctctttgaaagattctgttccaacacgtggataaattatatctctcagctttt

SEQ ID NO: 51114 - DNA, 1460 bp, Cannabis sativa
aaatcatgcatcttaaactttaaagatcgttaaaaatttcccttaaactattgagattgttgggtttaaggacttttatctaattttagtaagcaaagtctaaaatagatgaatgttcaaaagacttaatttggtacatgtcaaaattcgatggacataatttaatagataccaaaatctaccgatcataatttagtatatggacaaacaaaaaatgagtaaaattgaataaaactggataaatgtccttaaatctaacaatctcaatagttcaggagtaatttttaacggttaaaaataattagaggtataatttagtacatattaaattttaagagacaaaaatcctaattaacttttaatttatttaaaaatttagattttttttcaataaaaaggacccaccaaaaaaaggaccattaaaaattaggaatgaatattgttttttccgtcacttttatttaagataatcaaataaagtatatactaattacatataattaaattaaaggagagtggcaaaaataaaatatattagttagttttaaccttttttttaaaggaaatgaaataaaatatattatttagctggaaaatatatatttttattaaatggaaaaaattatttaagtatgataatcttaggtgagaaaataataataaaataatatggttgccgccgcactcaatgtagaaaagtaattaacatatattattttacaaaatactattaaaaaatttactattctaaaatgattaatataaatatatattttaaaatttataacacgtttataaattacctttctccatataatcaagtcaagttgcaaaaaaatcctttaaaaaaaaaaagagagagagttaatatttttttggtaaagaaaaaaattattttaataatgactatttacaaattacattgtttaagtattgttttaaaaagttataataaataaataaattaacaaataatatgcaattactctaaaaaaaaaagttcataaatatgtaaacatgataatgacaagttggtaggttaatgatgaaccccacttaatcaataactttactaataatgataaaaatagaaaaaaatccaaaaataatagtctatatactatatggtgctcttctccttttctcttttttctttttcctaataaattatattaacttttttttaagcatgttttcactaaattaggtggtgtttggttacaaaataaaaataaaataggaatagaaatggaaatgataatagaaatagcaatagaatgaaatagaatttctattcttttgtttggtaaaaactatagtatcaataactgaataagaattgtgatgattggtatgatttaaaatgaaatgaaatttttattattttgaccaaaatgtcctttactcttttaaaataatttttgttttataaaattaccattatggtataaataaaaaaa

SEQ ID NO: 51115 - DNA, 624 bp, Cannabis sativa
aacgaataaaggaaatggaattaagcttggtgttgtcgctccctgccttccaagtatggctggctgggaaatggagagagttagattctgcgatagattgcggccgatgattggagaagacggtcgaccagatcagataaaaaaaacgcaccttgttcttaagatgaagaaaatagaaaacgcatctgaagttgagatggagatggaggcaaaaccagatcagatctgaagggttccgttaggagtgaaatggaagcaaaggagggtaggagagtggaagaagaagaagaagaaaggttggatttggatctcctttgatgggattggattgggagtcacagagaaggtgagacaactttcgttggtttaaatatggggttcaaagttgtttccaaaaataaaaaataaagcatattattttatagttatttatttcaatcagtgttagtcaccacactatcaaatatttttaattatttaatttgattatttaatatacggaaattattttatttttaattttttatttaatttacagtttaggtttcctctaatagtttttatgtggacttttatatgaatttaagttgcttttgtgcgtgaaattttataaaaatatatata

SEQ ID NO: 51116 - DNA, 1587 bp, Cannabis sativa
  modified_base (1111)..(1113): a, c, t, g, unknown or other
gagagagagagagagtctaaactacaaagagaaactttttctcgtaatctctgagagtttatgaggattcttgtaaccttgataaacactgatgtcaataaatgttactattccaaccaagacgtagagtattgtacaagactcgaactcgttaaaacctagttttattcttctctattttactgcttttattcattactgcaaggtttctaattatgactgctacgaaatacgatgtcaaaaagtttactggtacgaatgattttgtattatggaagatgaagatgaatgctttgttagttcaccaagggttgtatgaggctatacttgaagagaagtctcttcctgaattgctatcgagaaaagataagaaagcaactcttgtaaaggctcatagtgcgatcattttgaatcttagagataaggttctgagaaaggttagaaaagaagatatagccgcaggtttttggctgaaacttgaaagtctgtgtatatgactaaatcgttggtgaatagtttatatctaaaacaagccctacattcattcaagatgatggatgacaaatatgttggagaagaactttatgagtgtaacaagttgattctagatcttaaaaatattattgtaactattgaagacgaagatcgaaatttgttagtacttagttctttaccaaagccttttgcgcactttaaagataaaaatattgtatggaagagattcaatcgctcgatgatgtgcaatcagccttgaattcgaaagagctgaataagaggaatgaatcaaagaattctagaagtggtgatggattatttaccgtgggaagaaatgagaagagagaaagttagaaagattcaaaagggaaattaagatctaaatcgcagtctggtagccaaaaaatgttagatgttagatttgaaagaaatcattgttggggattgatttaccaggatctagatttactaccatgtatgttgtctaacatcctaaatatgaattacttaaacaatgaaatttcaacacaaataaagttcaagaaaccttacattgattgcagcagaattaaatgactcctttcactcagatctctaacccttattcctttctgtnnnagagtattatcaagatctgagtcggattctctttcaggtgttagattcttcacagtcttacacactatgattgagtaattacttgctatgtgtgggcatgtactctatcactataagggacgaaaatttgaaaagaaagaaagagagaaggattcaaaatagagagagaagagagaaggctcaaatttcactgaaggcttaagttgcgtcaactgccagttttgagtctatcactatttatttataagaatcactatctatttataagaatccttctaggtttaggtttgaattatttgacattaaaaaattgataaataaatggctaaatagagctttagtggtcggccatagggtgtggccccaccatttacaattttgccatttttctcaactatttatccttttcttttacaaatgccatattttctaattcaacaacttaaatgttaaaaaatatttatttaataatta

SEQ ID NO: 51117 - DNA, 1405 bp, Cannabis sativa
  modified_base (1185)..(1185): a, c, t, g, unknown or other
atatttaggatgaagtatcactttagccagtagatctgttctctattttttttgtatataataaataataaattaaattttttatttacctaaaataaatagaaatattaaattactaacagaccatgagtattgatggttttactatcaaaatttgagtttttaaggttaaatacaaacaaaataaaagtattaaaggttttgctgcaatttactcttataattattttatctatttttaaagaatatatacagcaggatcgaaggatggaggaattgtgacgacccgaatcctgccacgatatgtagtatttatacatttgggtgtaaaagatcaagctttgattttttgttggaaaataatattcttaaataattatttattatatattacaatattatatataaaagaataactcttacaataaatagaaagtaattgtaataaattatgatcacttattaatatatataaaacaataatattcttagaattatttagttactaaatagttaaatttaacaaagtaaaatatatatacttatccaccatattccttattcttaattgttcatgactatttagatgatacagactatcctttgatagttagaactttgatagttagatacatattcaatttaggagtgtcaatggagcgggtcggatatgattcggctataatccgacctgatctaaatggtgtaatgatctgccccacccgccctaatagaccattacttcgatcggatctaatcgacttttttaaaaaaaataattttatatttaaatttataatttattctcttaaatatattttttaaaaatctaatgtaatggattattttttcttatatatttttattttatttgccaaaattaataacaaacgaagagaaattcttatcaaataaaaatataattttgttatagaaaaattaaaaaatttatcaagtttttaaaatcccactaatattatcatcagtaataatgtagtataataattacacgaaataaatctcgtctaaaaaaaaatacatgaaattaactataaactgttttttttttaattattttgctttatgatcaaaataaattaattaaaaaacttatttaaggatctctttctcttttttcttaaatgcaaggctaattaggatttttgtcccctaaactttgacatntaccaaattatgccccctgaacttttaaggtcgttaaaaatgccccctgaactattgagattatttgatttaaggactttttttccaattttagtaaagaagtaacatggatgaaagttcatgtgccataatttagtacaagttaaaattcgaggggcatgatttggtagatcaaagtctggggagcatggtttagtatataaacaatctttgaaatagt

SEQ ID NO: 51118 - DNA, 983 bp, Cannabis sativa
aggacgttttcgactatgaggaagagagagtcctcgtcaaaagactcatcggcatggacatgagtagcgtaaatgaggtcaagtattttttggtcagtcatggagaacaagttgaggtcgggctcggtgtgtttctggacagtcgagacgaccttactcacaccggacaggagaatacttgccatgtttggtggctaaagaagcctttgaagctaggcttgtaatattacagagtgaaaaaggactgtgtagaaagaaagaagagtagtagtagtagtggtggtgaaaatgtttgggctgtgtgactgactattattctttcaccactatttatagctgggctatctattcccaccttgctccacgtatgaacttttaccgtttttgaatatattgtcacgtgaaaaatgttttggtgagtaggtaggtagtgaaaattgaaatcactctgaaaatcgaaatcacttgaattgcattgtgattttttccgaaaacaaaaattatagaattaaattggataaattccaaccactcaaatttcgacacactatttggaaagagggtacatttttaaaatcacagaagaactttttaaaaagaagaaaagacgacaaaaaattctaaaaaataatatatttttctaatatgaagtatattgttctttttatacaatttttttttaaataaaatgcgtagatatattaaaactcgaaaacgttaaatttcatggtcattacataataatttatctggtatggaagaccgatcgaccataccagttacattattggcaaaagcccacttagccacattatgggccgcaaaattacacagtctagaaataaacgaaaatttacaactaatcaaaaggtttgaaagatttttacattgaagcacatagttaccaatactccaaacacaacaagtccccttcaacgtgttgatcaccgtctcagaatcactctcaattatcacaaacgaat

SEQ ID NO: 51119 - DNA, 1512 bp, Cannabis sativa
  modified_base (1391)..(1405): a, c, t, g, unknown or other
tggattgattgactagttttgaggttgggctcttattttgagcccgtgctcctattggatcgaattgcagagcccaaagtcattttttgagtcactacactgtgaagtgtgattgatttctaaaataaaatctagttgtacatgtagctgtagggtatatgagtatatatatgatcttcacgtatgtggtggtgattggttaatggtgatcactggtcccgttcatgtatgtgtttgtgatatggggtgtgtatgtatgtattactatgtatatatatatatttatatacgtggggactggggataagttgtatatatgtatgtatgtggatgtgggcattattattacccctgaaaattgtgaagaaagctacagcgtttttggagtttctagtgtagtagtgctcagtacccaagaagtaattaaatgtaacaaaagagagagagagagaaatgggctaaagaaagtaatacctgtaacactaagaaccgacacggacacccacataacatcaataactgccttacacttgtccttacttcaggtgcctctctctctctctctctatcttcttccattggaccaaaaacttcatgcctcttctatctatgctatatatcactttattaattgtttgaattacgtactaaattactaattgcttcctagctactgacctcgccaaaggggctcatattgaccctgtaatcaccacaagataattgaatcatatactgtatatattatataactcaatcgatgcatccttatattattcgtatgatccagttaatttaattgctagcgagatgcatgcgagtcgcactagtacaaaaataatcaagatagcttgttatatatcagcatctataatcgtataccattctcctaagagcatgtttggtttattggaatgaaaattgtaatggaataaaagttactattacaatgtttggtttgtatttttaacctttgtaatagaatttcattgtaatgtgtattacaccaattccaagaatacccattacactcctacactacatttatgagcattacaatcactactaaataatgaaaagacaattttaccctttttgtttctttataaataataaataaagcaaaggtatttttgtcaattcaattttaattacaatgttcattataaaatatagggttatttgcggcaaaacctcctaaagtggataggtttttgcaactaaccccctaatctaaaattttagtgataaaactacctaaaccactagtccgttagcagttagccctttccatccttttttggctgaatgtccacatgtacacagtgtacacgtggcacaatgttattagtccacgtaaataaatatttttaaaaaaataaaaaaattannnnnnnnnnnnnnnaaaaataaaaaaaattatttttctttaaaaattaaagaaacaattttaaaaaataatttttttttaaaaaacccctaattccctcacgcccttcttcttcttcttct

SEQ ID NO: 51120 - DNA, 955 bp, Cannabis sativa
catctacccctgcccctaattctgtctctgatccatcacctgctgcaaaccaaacatcaagaaacaaaaggcctcgcccacactgcactcattgccaaaaaccagggcactacaaagacaaatgttactatcttcatggttttccacctggttatggaaacagaaaaccagctgaaaacacaaacagaaaaccagaaactggttctaccagtcgaaaccagcctcaaacatcacaagtttctacctctgatttctctacaaatcaactcacttccgcacaatgtcaacaattgatttctatgcttactcagcaactaaaccccacaccaaatgcttccacatcagatgcaccagtagcaaatcaattttctggtaaattcaacacttctttaaattggattatcgatagtggtgccacacaccatgtttgttgcaatatacattgtttctcttcaataacatccaatttcaataacaaatatgttacattaccaaatggttcccaagtaaaaatcgaaagaataggcactgtcattataaatcctcacattacattaaccaatgttctctttgttccccagttttgatataatctgctttctgtacgtgcactgctcaataacaactcctatttcattaaaatgtatactaaccactattacattcaggagcattctcagactttgaagattgggacagctaatcgacatggcaatctctactacttgcagcaagattcaccttctgcaacaactttacaatcaatttcttgtagtatcaatgcaaataaaaaccaatggcatacacgccttggtcatccatctgtactagttacaaataaactcaataaacaattgaattttcaatccgatattacacattcttttcactgccctatatgtcaattagcaaaacagaaaaagttgccttttcactctgctaataatttttccaa

SEQ ID NO: 51121 - DNA, 1275 bp, Cannabis sativa
ttccaccaattattgcctcatctacaaacactacttcaccaagtgctactccaccaatggttgttactcatgataccaccacaaattgatccttcaaaaggcaatctgtccaagttggctactctcttcttaatatgcttaaacgctgctgtctccaaccaaccacgggcaaccccagttctaatcatattaccattactacaattgattttgaagcagaccttgttgatgatgtgtaatctacacattttgcagaggatgatgatgctgttttggtgggtgttgttgagcaaccccgccagtcgccatgaatgttttaagttggaacgctcgagatttgggaaatgaccgagcattccgtcaactgtgcctgcttaattctcaacatgctcctcatcttttatccctcatggagacagttaaaatctagttctgttaatagaattcgtaatgctttaaattttcctaatgggattgaggttcctagacaaggtcttggggtggtcttatattattgtggaaaggaaatcttgatgtaaccttactttctttttcaatgaatcatatttcttgctatgtcggtgtgatgatggtttcacttggcatttttttggggtttatggtgcccctgctacacatttaagaaagcaaacttagaaaattttaaaaagacttgctgatgttgctccccagaatccttggttagttgttggggacttcaatgaaattttctctcatgatcttaaaatcggtggggtctctagagacaatgaacttattgacaattttcactttgccatcaattatggacatttggttcgacttgaccacaatgatgaaattatttatacttcgactaataaatcctctggtaatgctcatatgaaggagtgtttggactattgctttgtcaatgcctactggcagcaagttttcccatactcttctcttcatcaccttgactatactcatcggatcatagggctctcaaggtagttatttctcactagccgaacaataatccttctacaccaaagcaaagatctcgttccaaatatgaagccttatggttaaatgatcctgaatgtcaagatcttgtggctcgtcattagggctcatctactcatcagaatttgaggcaagttgtgaccaacatcaaataatttcttatattgggttttgtgccctaaataaaaccttttacaatctgattagttatcaatataagaaatttgaagtgatttatatttgcatgagttttacatgctaatggtt

SEQ ID NO: 51122 - DNA, 1110 bp, Cannabis sativa
cccaccacaaacatccccagaatcttaccggtgcaggaagtagatatgaccaccatcagcatgccccatgcctccgcgcctctttgtcacattcatcttaagcccaatggacgcaaagtagagcgacaacagcaaccccgacacgaaatcctctatcctttttattagtctccctgtgaactctccttcttttggaattgtcagaccgacagcagaacccagatcgacactaaggagttgttgctggtttgtggggttgattgctgtgggtagtgtttggttggattttgttgattattgttgggtccgattgggttttgggtagtgtttggatgggtggttgtgcgataatgaatagagggagagagagaggtgcgttaggtttaggttagggtttttttagcaaagaagaagaagaagaagaagaagaaggacgaggatgaggaggaggaggaggaggaggaggaaggtgtgggaatggaatagggaattagggcttttttttaattttattttttaaaaattgttttttaatttttaaagaaaaagaatttttttttattttttctttttaaaataattaattttttattttaattttaaatatttattacgtggactaattaaattgtgccacatgtatactgtgtacacgtagactgtgtacacatagtttaagttaattttttttaacacgtgaggtgtactaaaatataatgatctctattattaatacggtaagttattcaaaatttttaacaatttataaaaataatgttataggtctcgtcgtcccgaggcagctggtgataggtcccggaggtcgagggcttgatgcctgccaccaccacaatcttctccagctggtgggcgcatgttaaggtagaatggagctcagccgcctcccacccgttggcacgggacttgtagccttcctgggccacaggaccctgcatgacctcctccagggtggccagacgtgcttcccctttctttgaagacttggaaccaaatgcagaagtagacattttcgttgctgaaaaaatcgaaagaaatctagcagttaggccccaaaccaaaccctaattcaaaaagggaatgggggtcccc

SEQ ID NO: 51123 - DNA, 754 bp, Cannabis sativa
agatcacatcaaccatgatcaagtgatcttacaattcctcaaaggattgaatgaaacttatcatgctactcttgatcaaatcttgttaattgattcttgcccaccactaaacaaagttttttctatggtcattcaccaagaaagacaaagaacccttggcaatcgattaacacctcccattactactgcaataaacacaaatcctcatgcaattgaccccaatcatgctgccaatcaaagttccaaaaaacaaaagaccaagacctcattgcactcactgtcaaaaacctggccattacaaagacaagtgctattttttacatggctttccccctgaatatggaaaacatcgatccaatgctacatcttccaacaccaataagaaaccaaaaaccggttctctcccctgaacaactcttcagactcatcaactctcaatttcacaaggtgatccccaacatctcaactcactgcagctcaatgtcgacagccgatatccatgctaagccagcaattgtagccaactactgatgcttcaacatcagaaggcccaacaatcaacaattccattggtaacaaaaaatctcaacctccactttcttgggtaatagatagtggtgccactcaccacgtttgttgtaacattagatgtttttctcacatcacaaaatccacaatacataaatctgtcacactccctaatggtaataatgtacaaacagaactcattggcactgtcactttaaattctgct

SEQ ID NO: 51124 - DNA, 749 bp, Cannabis sativa
agatcctggtaaaataattccaacatcacatactaagcttaaacaaggacatcttcaccaaacaacaaaagaggaggtcactggatgaggtcagatttgcagccttgaaagaggaagtgagccttttggctattaatttcattcgtgaagccttctatcctttatgagtaacaaaccctgttttggtttcgaaaccaaacaaaaatgtgcggacatgtattgacttcactgaattaaacaagacatgtccccaggattacttcccgcttcctcgcattgatcaactagtagatgctactgctagccatgagcttatgcctttcatgggtgcatactctggatataaccagatacccatgaacgtggcagacctggagcacacaagcttcactactgacatggagctctattgttacaacatgatgccctttggattgaagaatgttggtgctacctgctggaaacttattttattaggatctaaatttacatagacttcataggttaaccaaaggcggtccatcaaaaaatatcaccttgggtgaattacgtatttttgaatcttgcctaaaaggaaaatgactaagcgttctttctctacgaagggagagggtgctaaagaaactctagggttagtacattcgaatgtctgcagacctaaatgtaaaagccagaggaggttatgagtactttatcattttcattgacgattgctctagctatagttttctttacctgatgcaaaacaa

SEQ ID NO: 51125 - DNA, 2025 bp, Cannabis sativa
taattatgtatcagtatgttctgtagtagcagcttcttcactttgttgtatggtggtttttaattggtgtaaatatcaccagcaagcttaattttctgtgtatattagggtcatttgctcaacaaataatataatcatttgaatctttatattgtgttaatatactacagctttcctctttcgatttcagaaagagaaaaagaatatatatgtttcgtattataataccacaatcaattttgttgtacgataaagttttgtggcgatggttttataaaatatgagacttgtttagaatcaaattttagatgagtggcactatcatttttagccatttaccattggaaacagacaaagatgtgttactgaatttaccaagattttctgaggttgctaccattgtgcttttgtgcaaaaaaaaaagaaaaaaaaagctaagattgggctatctatgtcgaataggattaaggtttatctaatctttagtttttacgtttgaatcatgaaaagatgagatgcttccaaaaaattaacaactacagagtaattttacacatatatttataaaaaagatgaaccgtgaaaataaaaaataaaaaaactatctttctcatcttgtgctccatccacattggcatatgcattagcctgcccttgtatatatatacaaaagaaatttgtattacaatatatctacgttgatgatcccaaaaatataaaaaccttacgagttatgaggaagaactagcctcaatgctagtagaagaaatctgctgatcagcaagcaattttggtttttcttcaacccatttgagaatctcgccaccatatctaagagcttcatctacagtatcgtactccaatccattaattaaagagacaaagagctttctatcagtcaaagaatggaacaatcttttgaacttcatggcaacatactgaaatgctctgtgagccaaagtggtgttattagtgttagtgttgctgctgctgctgctgctaggattggagctggtcactggctggaagtcctgaaaccattcgcaggtggaaagtgggcaaatcgtggcacactcaatcttctcctctagcagatcatacttgttgagtagtagaaggaattctttcttctcaaatgacgggtgagttactatgctttcgaagaggtgcttgctcgccatcatcttgttaaccaggtctccatttccatcatctacaaactcatcgtagtccgatagagaaatgcagaacagcactatgtctacgtcttcaaacatctgaagccacttgcagttttctcccaagcttcttggatgaactcttatgagttggcacctgcagatgacatgcaaagtgtggctaaagcttaagattgcgacagagtagagttaagatgtctcactcctgattaccaatattggacatgggcatggcataataggagaactaacctcatcgtgggatcactatgtgaaagaccgtccaccatgctctcttgctccatcttttgacatgaaaactctaccgaagcgacaccgttggatggggtcattccctcagcatacaagatatccatgtcagagggagtgtaatctgctcttgaaatctcagcagcctgtagaaaaagagggcaatattctagattaatgaaagataagtttgtgctaaatatgtggggtaacactatcaacacataatagagaacagccaaacggttttttcatgctagccaaaatgtggagacgtttgttttaactttaatctttggctacttgctgaaactaaaggaaagttgtcataggagcgtaatctaacccggtttaggaaatatgaagcattttggggaagcatttcgagttcatttcttcggttgtatgtttcttgaatggctgggtcattccacagatcctcaacgaactgtgcatattcacgagtagcagccggaaatatggcgtccaaattacctgaagccatcactttaagcagccaatctgagaaagctttcaatcgtttgccaattgaata

SEQ ID NO: 51126 - DNA, 839 bp, Cannabis sativa
atcaatcatgaaggatacacgactgtaggtgaagcgatacgctattgtgtagtatggccggatcctatctttggcatgaaaaatgggacttggtatatttatattagtttatttaacttatttttttattgattagtctaacttttaaataatattttctgatatatgcaatagcctaaaaaataacttgggaggcaaacgagacataatgtgaaagatttattcggtccacggatacagcctctataacattgagaggccgaagaaacgacctagtggtgatcgttacatttcccctcgaatgacttgcaagttgactggtttatagaactcaatttcttggtggtcaatgtgatcatttggaagtctgaatcacataaacaggtaaataatttttctttctacacttatttattctctttcctattttcataaatttttagttgccaaaaatagtagtcaacattacttgttaaactagtgaagtatgcatgtggagtagatatactatagtattattcaaattatcattgttttatcttattaattatacatatgagttattattaattatacaaaaaaaatggattgatgtatttctaactcttttgtacctattgtaactattatgcaggtaataattatttaagatgtattaagtacaattttaaaaaatttaaaataatttataatataaaaagtaatgttcaaacaaattattttacatgtatataaaataaaaaagtgacgaatacaaaagattgtttaaatcttatttttacgtattaaaattttctaaatttaaaaaaaaaaaaaataaatttttttaaataacttag

SEQ ID NO: 51127 - DNA, 2861 bp, Cannabis sativa
tgccaagttgccaaccattcattttctcacacatataaatgaataaattaaaaatgatgtccatagatttcagctgaataaatttctgttcagaacgaagcaagacctcaaattttgatctggacagcaaaaaaatccagatgccatacttcgtttttcaagtgaaatatcattttcatattatagtgcagtaacattagcacaaggagaaaagaaaagcttaagaaatatggatctttctttttcattctaataaaaaacttcattgaagaaatgtgcaggtaagtaaagttcaaagaaagcttggtttgctgaacaaatgggatattgaattaatttaagctttacaaattttctaacatgtttgtacatacaagtagtcctatataaagattgtgtagcgtgtgacataatttacagccaatctaccgtataaaaaaacgaagaaagaaagttacaaagggattcagaaagaaagtataccttatgtgggggtggcccttttaaaaggtatagatagctctattatatgttgtagtgtatatccaacaacaatgaccaaaaactgcagttgatacaagattatgatcaagtgattataaaagaaagaaattacccacgtgtgatgtaatttaattagtgtaaatgaaataataattcgacttacatgaatggttaaaacaaagggtcaaatgagaaaagagtcctttgttcttgtgttggattatacatccatctgcagtacataaaagctgagcccacaatggatagaagtgacagcattgcgagatatctgaaatgtgagacatcattggcaataattgcaacccctaacattgtagactctgccaaactagcaacagcaacctctgttgtcccaataagattggctttcgaagatggtatcccagtttgtagaatctgtgcaccaaccacatcatatgacatgtgccccactcttgacaatacctaaagcaatattattgagtaaatattattttggactccgttttataaaagttataaattagactctctattttttaaagactaattatttcctgaactttgacatgtaccaaatcatgcctctgaacttttaaggtcgttaaaaatactccatgaactattgagattgttagatttaagaacttttgtctaattttattcaattttactattttagtaattgtttatgtacaaaaccatgctccccagactttgatatcaaccaaatcatgtccctcgaactttgacatccactaaatcatgccctctgaatttttatccatgttagacttttttattaaaaatggaaaaaagtctttaaatccaacaatctcaatagttcatggaacatttttaacaactttaaaagttcaaggagcatgatttggtacatgtcaaagtggggtaaaaatcctaattagccttttttaaatgacaaaatgaaccttgtatttttcaaaatggtacaaagaggaccctaaactaatttttttgtcaaaaattatctaaaattgagctcggggtcttatttgtaccattttaaaaaatacagtgttcattttgtcatttaacaaaacaaaaagtccaatttataacttttgcaaaacacagagttcaaaatagtatttaccttaaaaaaaaaaaaaaacttcactttaaaacaccaaaataaaaatctgacaaaaagctctaaaccaatgtgctacgtacagcaaagaagagctatttgacacaataatagaatggaaaaatacaatatgagtaaatctaattaagttgttttcactatagaggaatagagagggagtcgtttcacaactacaacacaagtatccttttattaaagcacatgccactacaatttgcaactttaaagtaaacatttgtcatgacaagtttacccaagaataattgaagttatacataccccttttaacatatttaaactatacattattatcccattagaataacagttactagtatgatgctcactattctataaaactttacattcatctgtttggagtacacacctagtgaaaactttatcaattattggttatcaaaaacaagaaagcaagatatatgcttacaatcatgcacaattatgaaagctgaaaatacaattcaaaaccatagtaaagtagaaagaagaaaacatagagaacctttaaaatgccaagtcgcttgatctggattgcagacacaaatgtagctgtaacactcataattgcacatagtccaatgaagcatagctccctatgatggatggattaagacctgtcaaagaatataaattcagtacaaataaaaagctaaggctgaagacttaattgccatacagaatcatttatagatgtgaattcaagaagggacatttaaatacccttgacgagcctaagggtgaaaacattaaataatacagtaacttaataaccacagatcataagtgggctgtattacatgcagaatgtagcaagaatctataaaatccactatcatttgaaataataagcaaaagtactggcatgtattgtatattatattactcatatagaaagttgatgtaagcttaatgtataacccaaagtagaattccccaaaaaaactgaggcctgatatatgaagaggaaccaaggccatcaaataaagctgcatgttgtggaaaaagaaaagaaaaaataccatgctgcgttaaaaatgctgtcatcatgctccggagtgagaacaatattgaaatataggagcacataggctcggcttgcaggaggaaccggctgctgcatgtattccttccaccctagcttgatagctgttagagatattattacaatggaagaaaatcaaga

SEQ ID NO: 51128 - DNA, 978 bp, Cannabis sativa
aacaatactttttaatatttctcttacaataaggacaaatcacttataactacaaaagtcaatattccagaccctaattattaagaccttgcattttttgatgagtttctttcgaattgaattgtcaaacgtttatcactagataaaattcatgacaaaattaataagtgtcctctagtcaaattccatctctaccaattaattggtgttgatattttgcgttgtatttgaccaagtctcattttgtgtcattttccattgaggatgacagaaatgataatgaagtgagatgttataggtctcacacaaaaataagttacagcttcagatttttttttttcataagtgatatgaatcattttaagaatttaccaaatagacatcaaagatcaattgactaatcaaagaacaattactaaaataaattgtcaccaaaaatttagacaatataactataaacagcaacaagccctccaaactttaccaaaataaaatacccacaaaatcaataaaattaacaaatgatatagtaagccatataataatattaataagattattgatatatacatatattttgatattgaaaagagaaaacgtaagaacaacttatctgtgaactatatgtaagcaatcaaaactcaaacaaaaaatcaaaacttgtgaagaatataataactaaactctattgaaaaactaataactgaacaaaaataaatttcaaaatttatattttaataaaagtaaataatataaaataattcaatggattaaaaatattcttatttgtgaaaatctgtaagagtttttgcgagcggtaggatccatgagtactaggtgagttaattgtgatataattcctttaaatgaaaagatctccataaacctatctaaataatggaaagttagttgtctcctggaagtatattcccgaatagctacttgtccatccagaagaagtctcgtagaatgatagtt

SEQ ID NO: 51129 - DNA, 1333 bp, Cannabis sativa
gtgacatcaatgagcaacatcaaaacatcgattttctattagcatttcttttctctatattttataatatatttctttgtatattacaaattattgtcaatattctctttactttttttttctattatatatatagatttatatatatagattcacaatctttctttcactcatcaaaatatttctcgataagttggagaagtataattttttttataatcgatgacttcaccgttgtcgataactttgaattatttatgatttattcattagtaagaattatttatatttaaatgatatatgttacataataaaattaaaatttaacatttatatatatatcgtaattaaaaaaagggaaatttgcggcaaaaatacctattttgtttggtttgttgctaataaatactcaatttctgataattgcagcaaaagtactcaaaacttaatttccgttaaatatgtaggtaccttttttaacagatgttataatttctttttaaatgccacatgttaatttctaattggtctaattatttaataaaaagctaattaaatttaaataattaaaattaaatccttaatattataaagaaaaaacaaaactttttttaattatttctcaatccccacatttgcttctccttccctgtgagccacaagaagaaccatgtaaaacggtttccaacatgtataggttgcaaatcaaatttattagcaaaattttgaaaattggtaaaaacataaggaggatcagcactacaatgtctatcatgaatagagagataattattaaaatcgcctttaatgagccaatgtataagagatgcaatatcaaaaagcctattaagcaaattccaaatatgaactttatcgtataaatagggaaagtcatgaagcaagaaacatgacacttaatattatcattaaacattataatactgtcaatatgattcaaggagaaattcaaaatactaacattaacttcttgtttccagaacaacaaaagccctcccctaaaacctttcttaggaacctcaaaaacatgatcaaaagacagtttaactctaagtttatcacaactaccagacaagaatttcgattccataacaaaaagaaacataggattattcctatttacagcaagggaaaagtttcgaaatactctgaaattccccaatccacgagcattctaactcaaaaagctcacttttctaggcagggttgttcaacaagacccgcttgtacaagaggatttttatcagtagatgtagaaccaactcgagctctcttcaccatcttcctaacaacatcacccaccagaatagaaaga

SEQ ID NO: 51130 - DNA, 728 bp, Cannabis sativa
tgttggaaattatttgttctaaccaacacacttaaagaagtaaataatacaatagtatgcaaattggtatttttctaaatttattttattttatgcatccacacaataatgctatatctatttcaggcccaaagacaagagtccaacaacaaatcttcaatcaaacaatatatcacattctcaatgaaccacttaatggttcggcccaaaaatcaaagcagccaagagaaaattactttctctctccaatcaccttttctttgattaatgtcttcggtcagagcacaagaaccaagccttttatattcaagctttcttttcaattgaaccaataaatggttcggtcaaagaggaaatgagtcaaacaagactcatcatttccattcaacaatttcggcccactatgtctaaagaaaagcccaataacaaataaccctaaatacttatcaaaacctaatataaaaggttcaatatcaggtatgatctcaaaaccctatttcggcagccacactttattttctctaaaattcaaattctttcaaaccttttctctctttccttctaacggcagcaaagaaaatcttagggttagggttacaaaaattttctttctcttcttcttcttctctcaagaacaaagtagtgttctaggctttctaaagatttctttctctgcttatttttccctacagccgcacctattccttcaagatcttttcttctcactt

SEQ ID NO: 51131 - DNA, 1095 bp, Cannabis sativa
ttagcaatggagaatattctgacctggggtttgtgcagcccggaccaatggggccatccttaacctgaagaacgttctggttctgggactatgtttgggtggtgagaaaaagtgaagctggggacaagaatagtttagagagtggaagttgttgttgttgttgttgggaggacatgaatatgaatatggtagtgacagtgtcagtgatgaatgaaaactgtacaactgagttcccattcctgtcctttcccgctaaccaaacttgtctttccgaaaatgttttaagagactgtgagttcctccatagccatatccttacatttttcttttcataatcctaagtaacttcacaccatccatggcctctcctatcagataatatttaacactaataaaccacactaattacttcatttgcacaacttattaaaagatatcttcattttttttatctgataggcagtaagttaatttaaacattacaccaaattttacaacattttcaaacaagtgcaccattctaaattagtacttacttgattactttacattcgttaattttatattatataatctaacagtaatcaggccgcgctgcttgcggttatttataaaaaatttaaattacataattgaacaattaaattatattaaataattttaaatatatatttaagtataattaaaaaataatgtatataaagaattttaaagctatgtttggaaggattttaaaaaaaaaaaatagaaaaaatgtaggaaaataattgtgaaaaataaaaaaataaaataataaattctcatatttaatatgaaaaaaaaaaaatttaaaaacactcaattcaacaaaattttcatatcaagcttaaaaaattaatttattttttttgttctctaaatttttctcttacattttctctttctttttcttttatcaccaaaattacactcctaaacatatagccgaaagaattctaaaaagaaataatcatcacaaaaattcttatatatatatatatgaaaaaaagcacgcaaagaaatatattcaaataattgtcatcatcgtattttactactatatatatttgaaattaa

SEQ ID NO: 51132 - DNA, 975 bp, Cannabis sativa
gaccgggacccaggattcaaatcacaacgagactgggaccaaagattgggatccagatcttgacccacgacctggggcttagacccaactcgtagtcggtgtttagatctttgaatcgtactatgacccaaacctggaaccatttccagaccaggacccaaaccgagactttgactcgggacccgaaattgaaagaacaagcagaatcaggaccttgaaacagaaattggacctggacaaagaacgggatctagacgcaaagccgaacacggactcaaacctagactagtatcaatactcggacccagacttactccagaacgtatgacccacaactaggaacctagcacctgtgacccgggacctagaccagaacccagacctgaaccagaacccggacccaaaccaagacccagacccaaaccaagaccgaaaattaaacctggacctagacctagacccataccaaaacccggacattgagctggactcgtaaaagaacttggactcgaactctagacacagactcgaacccaggactcaaaccgagtttaggactagggcccagacccagactaggatggagccctaaacctagactgggactagagcccagttttcaagaccaggacctaggacctgagactcagacatgggacctaggaaacaaaccgtgacttagatgagggacttggacccaaaactgggccttagaaccgagaccgatatccaaaactcgaccccagactcgagaaataggacccgaccttggtttgaaacccaagaactgcctaccgggacacaaccccgaacccagacccaaacccaaagttaagactcagccttggactcaggacccgaactggaacaagaccgggatccaagatcgagatccaaatttggacctgaggcttcgacctgacctgtagtcagtgtttaaatctaggacccagatccgtaccaagacctggactt

SEQ ID NO: 51133 - DNA, 629 bp, Cannabis sativa
ttggaactaggatgtgaactgaaatatagaggacaaaaatgtaaaaaaatagatttggaggtgttgaaattaaaagtacaagaaatacgagaaaaagaaaagttgtgaatatttcatctaaatggatcttggcctgtttggcatggctttggaagaactttttaagtaaaaagtctcaaagctactttaatctgcataataataatagggtagctcaatacttgccgtgctaccctttgatcataaatcttagaaagcagaatatatgtaaagtacatgtgcccacacacacacgcagaattgtaagtgaccaaatttaacaggagagaaaggccttaaagaatataagaaatgttgagggtactgatgaacataaacagtaaaatcacagatttactaatataaaccaaaggatgtaataggagtacattgttagaccccaggatagatttactaatatatgtgctgcttgtataagttctttggcagagttgtaatattttaacgtgctatctttttccttccatcctgttggttggccaaataagtagtcttagctttatgagaggtatgattgagattgtatttttgggagactttaaagtgttttctgtggagtttccaagttt

SEQ ID NO: 51134 - DNA, 3267 bp, Cannabis sativa
ttcttgttagtggtacttattataagatactaaaaaggtcgttttggtacatgtcttatttgttttggtactcgaaagagtttttttagttaaatttatattatcatcgtgtacgttgtacttatttaggatcatttaggtaaatttttaaatttttttgaatagtcatattgtcaaaaataaaatttaaatgtgtgataaacaattatttaaacctcatgtttgattttttaaattattcaatttttttaaaaaaatttacatgtgacattaaataatttaatgtgtatgattatgaaaaaaaaaaactacatttttttcttaaatgttgaaacaataagagagtgtaccaaaatactatttttgagaggtgtactataaatttttcccctattatatagtattatttactatttgttaatatttatacattcaaaatgaattttattacatttgtatttttatgttatttgaactgaagtttcattttcaaagcactaattaaaatttaaaattctactttttcaatattaaactctaaaaataatctactcttaaatataaggttatttaaaaagtaaatttttttaataaaatatttttctaacatttcgaaatgattgcaggacaaaccagcattattcaaatcattcttcaagtggttgaaaccaggaggaaaggttctcatcagtgattattgcaagagtacaagaactccttcaatagaattttctaactatattaagcaaagaggatatgatcttcatgatgtagaagcatatggacaggttttgtttgatgtttagttactagtatcttattaccattgaaaaatgctaacataacataacataacataatattattttgttatgataatttcagatgcttaaggatgctggatttgaagatgtcattgcagaagatcgtactgatttggtttgtaaaaacacacaatattgtttcgagatttattgaaaaagtttttgatgtgttgggagatttcttataagttaccaattgcttcatttctttttttgtatcatagttcattgcagttctgcaacgggaactcgatgttgtcgaaaaggaaaaggaagaattcataagtgatttttctaaagtaagattttttaacactcaaaatgcatattgtgatcgtactttaagtctgatttgccttagctcaagatcgaccctaaatattgtgtacatacattaatgtgttaaataaatgtgatattattgatcacttctttcttatgtaactttcttttgtttgattgaataaatatgtaggaagactataatgacatagttggagggtggaaatctaagctgattaggagcacatgtggagagcagagatggggtctcttcattgccaataaaaagtgaaataatatttgaaaattgccattatatttatatatggttggtttgaatttataaatttctaataatgtttgtactatctttctatggggtatgtacccataatgcttatgtttttcgtgactgggtaaatgcttttattatctgttaggcttagtttggtacgatatgttatattgtattgtattatgtggtataatattaattggattgcattgtattgtattaatattatttaatacaaaactatatttgatattgacttgcattaataacttgtgtaaaattatattatttttaccataaactagctaaactccaactccgacctccatctagatccgaggtttgggtctgggaccggggttcggggtcgaggaacgggatcaaggtttgggtctgagtctggatccaggattcgaattcgggttaggtccaagtacgagccgaggctagggtcgagtcgaaggctggggccaggatcggtttcaagtcgagggctggggttggtatcggggccaggtccaaaattgggtacctatagagttctaaaaatataacttaagtatttacactgtaaattattactctttaaaaaatcacaaatccataaaaatatatctatataaaaaacttataaaaatgtaaaataagtacaattttagagatatatatatatatatattttcatccatacttgaatttttattcatttataaaaatagaaacaacataatttcgaaatggaaaaaaaataatcttaaaataaaaataatttttataaaattaaaataactcttataaaattgaaaaaaaatctaaagaaattctttttttttaaaaaaaaagaaatacatggcaattgtccctttttttaaaaaaacaaatttctataattaaaaagtaactaatttaaaactgtaataatgctataaggagtctcctttagtatttttctttccaataataattataacaacaataatgctaaatagtgtgaacaccacttttattaattattatagtctaattaactaatgtcatgatcaagaaacaagggtccaataatagtacttaatttatgtaatttaaatatttgaaaaatgcttacttaaggaataaaaagtgtattttcaactaagacttgtaaaattcgaagacgacaattattattttttttttcttttagtgtagatttacacatataatattttaattaaagtttgatataattatggttaaataaaaagggggtcaagagaagattctttattttatttgataaagacaccattgagatctaatctctcatttgttgaaaagatcaatgtttttgtgataatggggacaaaacatgccggactgcaacaaatcacatctccataaaattagggcccatgcaaacatgcaactatccttcacctctaaattaaataaatatacacattaaaaataaaataattttttatttttacattttaaaataaattttttatatttttacaaaattttacatagaaattcctattgcaactagttctgcaacctaaatcgttacaaaaaatcactttagaaactcaaatcataaattttttaaaaaaattaaaaaaacagtatataagataatttcgttttaaaattataattttttttttataataaatgatagaattttatcatcacaatcaattaaaataatatcatataatttaattaaatttgaattaaataatcatcgtattattaaaaaaatttcaaaaatttacgaaaatatattataaatataaggcttatttgtgtggcaggtccttaaactatgtaagctttggcaaattagtcctcaaactcttttttttggcaaattggtcccca

SEQ ID NO: 51135 - DNA, 1296 bp, Cannabis sativa
tcgaatcccagcagccacactttttcataattactatgatcatttttcataatatatttatttatttattttgaaatgattattattaataaatttatttttgataaaattaatctcgagaatcaacatgcattaatttgaatatgagatcctttttttttccattttttttacataatgattaaacctactaaaagaaattaataatgacattgaaaaccaagatatactttgctgaccatgagttgcaaaaataataaagctacatgggacaaaacaaacaccaaaaaataaattatattagaatgacaatctacaaattattataaaataatatagaatagataaagaaataagaaaagagaataaagaaagaaaaaaatagaaggttcgagaacctttttgttttttacttttttttttttaaaatttcacttaacaaaatcttgtagtttgttcatggtttttgattaattaattagaaaattgatttttttttttaatggttaccgaacaataccaaaatgagagaatgaatgcaatttttcttagtttattttaatagaagtggtcccatatttatacaaaaatgagtcatagattaggaaactaataaagagagaaatagtaattacaattaatggtaatttaattgaaaagatttaggtaaattggacatccatatatatatacataatattttataacactctcttccatagtaactgtcccattaaaaaccttgtcagaaatcctaagacaaaaatttggccaaaggaaaaagagtgcagtgtgaaataaatcctccttatttaggcatttgtggagatcttctaattgacgaattccaatcttgcgcgccatcttctcaaatattgatattggtaatgactttgtgaataagtctgcaagattgatacttgattgaatatgttggacaccaatatgaattctctggaaatgtacaaaaaagaatttggcgaaatgtgttttaattatatctccttcaatgtaccctccttttagttgaacgatgcaagcaatattatcttcatagagaactgctagtgttgaaacttttttattgagtgtaatccatatgtttcccgaatatgttatatcatgatctcactctcacacattctctacttaatacataaaaatcttctaaattttgtcttgttaaaaatcttgccaaaaaaactcaatgggacaaaacttaagctaagggaaaaagagtgcaacatgaatatgtctccccctcatgcacatatgatccataattcttttggtgat

SEQ ID NO: 51136 - DNA, 1745 bp, Cannabis sativa
tgtttgaaatgagctagaaaatgatgtttaaccttgtcaaagtcatcttcaattgtatttccttgagaaaaggttgtgattctattctcgagctttcttttcctcatagccgcatggaagtaacccgagttttcatcacaatacttgacccaattgatcttgctttgctgagtgataaagctagagtagttcttttgcaactgttggagatgttgcaagtgttgggatgcagattgttgaaggtttttatcagttggattcttggcggcttcctcctgagttctactataaacatcctttgcttccctatacttcagagtaatatcacccacttcacttttactgaattgaattagcatctgtctaacccggttaatcttctgcatgactccctccaatccacttctagtcgagtgagaattccaaacttctaacaccctttgcttgtagtttggataatctacccagaagttacaaaatctaaagggtttgaagcctatattactcctcttctggttccggattatggaaaaactatgatccgaaacattatcccatttaaagatagattccgtttcagtaaacacacccagccacattttattaacaaacacacgatcaagtttagagaaaataagatcaccaacctcatgcttattagaccaagtgaaataggatcccgtgcacttgaattcctccacttggcaacagaaatgtaacttaaggtatttaatccgtcgaaaaaaaaacatgtggtatttaattgtataaaactgaaaacgtatggtatttatgccacaaatatcactaaaaagtaataaagagagtgtgttattaaccttcgaatagattgagatcgccaaaggaaatcatctgcagtaatgaaatagaatgcattccccacacgatccaactaatattactatgcaataagaatttaaaaaatatataggtaataaatatattatcatagattgatcaagtcatgatacattaaaattttctataataataaaaataaaagaaagatatgtgtgttatgtatattcttttcaggaaaaaaaaaaaatactcataaaaatattgaatattaagtacttataaaaacaattaaacaaaggttgtaaactattgatgctccaaaaaaaaaaaaaaataaagaaataaagaaaaaaattaacaaaacttttaccaagaggttatatattccataataaatagttaaaatcttcaaaagtcaatataatcaatggctaataaaatgtcactattctatggggacaagtgaagtgttcttattgtagggatactttggttttgtccctatggtagggatacttttctagcccttgattgttgatctaatattaataaagttgaggaaatatgatatcaatagtgctagtaatatttttacacattttttatctttacactattatcttcttcttcttcttcttcttcttcttctttatttttcatttttctaaaaaactaaatttaatggttattttattttactttttattacatttaattagtaatttttttatattcttttaaagatattttgttagtatgttgctttcaaaaaatatttattttaataagcttgttgaggattaaccctttttaaaatttattttctaaaattttatcaaaaaaaattattttctaaacattatattttatgtctttcttatatttgttttctttacaaaatcagtttttgagcaatacgactt

SEQ ID NO: 51137 - DNA, 1627 bp, Cannabis sativa
aataccagaacaattatagatgtcacaagattgatagtttgttgaaaatttggggatttttggattgtgaatatagtggttggagtatttttggattgtgaatattgtcatttgaagattgtggactgtggtgtttgttgttggtattattatgttattttggtgagtttgaaattttgggaaatcaaggaatattaggggaggtgctgtcgaaatttctcaaaaattttgttttgtgagaaattggtgtttgtgttgattatggaacccaaaagaacaagggttaatgaagagggtggttcgtcatccaacccaccaccatcatttgataggactcggtttgtgagtgaagcggctcaacaacgctttcttaggcttaaaagtaggccgcatattgaagaccgggggattgattatcccgataccccgttgagacgtcaaccttggaagctcccttggtccaaaagttacttttgggccgaccaacttgtgcacagatcctggccagcctataggcttctcttggcctgccagggacgtaggtacaaccccttgagagctcgcctcactcctttcggttgctgcttgacggttttgccatacctggtatagagaccatgtcttgctaccagtaagactatattctacatgtactctgtctttagcttacatagacatgccacatcaggtggacaaaatttgggataacaatatagttaagctagaacctagccatctcagaattaagatctattgacctaagatcaactaagtgacattaacttcgaaagatataacagaagtttatgatatcttttccattgtcaatatcaatccagtcagatgtatactccatacatccgatactaatatactttactaatttccttaaaaagacatatcacatatcaatgtataagtaaacattattgttgattatcatgtcagtgtaaattcagtgcactaataaatcatgagattagaactttgaaacatataatcactattactttctactgtgatgacatcactgtaaatttctactgtgatgacatcactgtaaatcatgagattataacagaaattgtatattaaaaccataaacataaaaaagacatgtaaatttaaatgacttttaattttctattgatagcaaataagattatattgaaataggttttatttaggtcataaaatcccaacaccaccttatcaggtcactggcttctctgttatagcgatctaattctgcctggtgagatcgggggatgtactcctagttatccatccatctcagaaatccatacctatgttgtgcgaatgcatcgcaagcaacaccgcgtagttcttcagtttggctatggcctctttaagtctggcaaacttgagatcttctcccaagtctacatgaggcttaccaagctggctcaccaattgctaggcctgtctctctatcgtaatactggggatcaaataaaattgtggtgcccgggggttgttccacgttggccattccttcagtacgaggcaccaatagagggtcctcccttggcagtagaggttggccattaagaccaaccgtgtaatgaccgctctagtaatgtagattagtaaaggcaattagcac

SEQ ID NO: 51138 - DNA, 832 bp, Cannabis sativa
aacatcgcctgattgaaagctttcgttgaacgaaaaccaagacccccatgaaactttgaaagctaaaggaagatcattttttccaatggattttacgattgtgctcagttcctccccaccaaaaccgagccatcatagattcaagcttagaatgaaaggaggccgggatcttgaaacatgccatggcataggagggtatggcttgaactacagatttcaagagaacttcttttcccccttaggagaaatgttgtgaattccatttgttcaaatgagaccaaacccgatctttaaggtagttgaaagcctctttttgtgttcccaaaggtttggggtaggcctaggtatttgtcaatcgagtctcgaataggaataccaataagagatgtgatgtggttttcaatgtcgttgttggtattgggtgaaaaaaagaaggacgacttggtataatttaccatttggccggaagtcaggttgtaatcacgcaagatgtccttgatggtagtcactgcctttatagatgttgagctaaagagaaagctatcgtctgcaaggaaaaggtgagaaattgtcagggtagtacgggcaattttaatgtcttgggagtgtttgtagggttagggctattgagttttctggtagatgagtgaggagagaccttctgagcacaagaggaaaagatatggggtgaacctttcctagggcctgttggttaatggagaaggaaaaggtggtcgtagagatacaggccatgacaagattaatgaaatgggttgcgaaagtaaatttctccattacttttcgaacaaaagtccactctactcagtcaaag

SEQ ID NO: 51139 - DNA, 714 bp, Cannabis sativa
aactttttaggagtttatatcatttggtaactataattggtatagagaaacttgttcattctgattcttattgtgtgttgagacttgtttgttctagtcaatatagtaattttccattagagcatttgtgtttctgtggactgtgtgtggtgttgtgtttcaagctgctgcaattaattgcttattagctgctcttttataggttgctaagattaatgggtttagatattgtggatggttggggtgtttttggtttttgttatacatacttaaatactctaatgaataattatataccttattatgtcatgtggttaagtgtaatgggaatgatgtaaatgaaattttataagaataataatggaattggtattatgatgttccatttattttttgaatggtaatgagaatgggtggggtaaagaaaggtataatgattattttgtttttatataaatgttgcaattgtgattacataagtatagagttttaatgcttattcatataaatggtgcaatgataattacattgtaaatatattataattataaagtttcattacaacaaatcaattaagtttagaaatgaatacttttatgtcgcaaaagaaaattaaaattattttattttgtttaaataattaaaacaagtaattcaaatattttaatttgattttttttttttgaaaataatattttaatttgatttaattgt

SEQ ID NO: 51140 - DNA, 968 bp, Cannabis sativa
atgagactcgatacttaattgcaccaatagcaatattgacacgtaggagggtgctaagcaccagtggtgccctttagcatttctctatttatttgtatatgctacttggatttaccattccatatattgatttgcatgagtgtcataaaatttataggagttagggatagaatatctctactcagtgatgtgtagagaataagttataaatattgtttggaaaaaatagatttgtttcgagtagttacaaaactcaaaacgagtattttgctctagagcacttagcgctaaatcggttggtgctaggagcatcttgagcagaaacgtttaaacgtttcttactcggttccaactctcagatgtaacttcaaaacaaaaccataactaataacaattaatatatcacattttctttaaatttgatgatccccactactttatgcttaaagaagactaataactacggagaatcttgctctctacaattttttttttttgtgcttatttagtttatttatgttcatcttttatttgtgttttcagcactgtgttataagttatctccattcttcttcattctgatcttctatcatttagtggtacctttatttaataaagccattgagttgtattttcttaatatattttcattccacattgttatatacatgtaacatacatggtatatggtactttctttgtgatttcatttttcttgattttcatcattgtgtggtgtttatgattaccatatacacaaaagagacaaaactatggttagtaaaaaatttatatgtacttttataatattcttaataagtacccactatgtgtttgtaatattgttcaaatgaaaatacaagcttgataaatgtagtttatgactagcggtttaatttcaaagtaatatatgtatgcattatatatatactaggtgaatgtacgtgccgagccacgtattgctagtt

SEQ ID NO: 51141 - DNA, 2377 bp, Cannabis sativa
ttacattgaaatgaagttttatttagggcataaaacccaacactaatacctcctcagaaattagacaaatcatctgtactagaatgggcatttaggaggcggctgagaatagcaagtacttgggacttccaagtacggttggaagaaataaaaatgttgtctttggctatgtgaaggataaggtgcataaacgaattcaaacttgggacaacaagtttctttctagagctggtaaagaagtgcttattaagtcggttgttcaagctcttcctgattacacaatgaatgtctttcttatccccgttggaatttgtaacgatattgagcgagctattagtcaattttggtggagatcttcttcaaagaagggaattcattggatgaattgggataagctttcggctcacaaagctaatggtggaatggggtttcgggatttaagagacttcaatcttgcgttattggctaagcaagggtggagactcctcacttgtggtgataccttgatggggaaaatttttaaagctcgatatttctctacaggctctttccttacagctacacttggctctaatccaagttatatttggaggagtgttcttgaagcccaggaattggttcgggcaggggttaggaagatggtgggcgatggttcaacaacgaacattttgatggatccttggctagctgatgagttgaatcctttcattgagtctcgacatccagctcttgttggtaatttagtaaagtccctaatgaagcccgatgaaattgaatgggatgatgaggtgatttcgaatgtgttaaccgagagagatcaatcactagtcttcaaaattccactctcacagcaccatgtcaatgacacctggtgttggatgaaggaggaccatggtcttttcatggttaagaacgcatacgcactgcaacaagagatcaaaggcagcaatggtatgacagccaattctgggttttggaagcaactctggcagttgaaactccctccgaaagtccttaattttttgttgagagtctcaacgaattgcttacccacttggtttcaacttatgacaaagcatgtgcctatcaacactcattgttccttctgtgatgcagcaccggaaacacctttgcacgtcctggtaaggtgccagtttgctcaagaatgctagggtatgtctcgggtacctggtgtagcagctgctgctatgacttttgcagcttggttcgaggaaggtctggactgatggactatggccgagcgattggaggcatccatgttgtgttggtcgatttggaagcacagaaatgaactggtttggaatgctaaaaaaccggaggtgagtgatgttgtaacattagcaaaactaaactttattaattggtataatgcccaaaagaataaccagccttctcatgagattaatggctcggttgatacaaatttggagcatcggacccctcctcaatttcctacaataaaagttaaatgttgatggtgcaattttcacaaacgaaaggcgttttggtattggtttggtggcaagaacggctgctggaatagtgttacaagccaagaccatgagcaaagtgggtattttgaagccacatgtggttgaagctattggcatcaaggaagcattgagttggattaaagcaaatgcttggacaaatgtggtagttgagtcggattgcttaagagtcataagagatattcaaaagtttaaatatatggcctcgccttatggtcatattatttctgaatgtatgactttgtgttcgggtattgtgggtgtttctttcaattttgttaaacgatctgctaataaggttaggcatgttcttgcgcgatcttctctttttgaggctgattgtactttgtctggggatgctttacctatagtaattgcatctttggttttggatgatttgatttaataaaattcattattcaaaaataataataataataataaatatattaataaattatgaaattttaacatcacgtgtcatgtggtttagttgattctgatatttactattacaaatttctttcaaaaaattcataatttcaataattatcataatttttataccacaataatattatatattgcactcattcggtacaaaaaaaaaaaataatgaatattatattacactcactcggtacatgtgaaatattaaaaatttaaaaaatcctttaagttttttaataaataaaaataatagattttttataattttaaattgttaattttagtacaatgtatataatacttaggggtattcatccaatccaatccgctctattttgctcatagtgcatccgatccgcactaagtgcgaattttatttttttggatccaatcca

SEQ ID NO: 51142 - DNA, 686 bp, Cannabis sativa
  modified_base (589)..(599): a, c, t, g, unknown or other
tagaaatagtgtttataattcttatataattatgatttttctcatttttaataatcaagtaggactctagtagtatcaatatttattgcatgtttccatttttaaaagaagaaaccctgctcgtccctttacatgtacagtgttttgtttattaattagatctttctttatcagtaatagtgataataatgatatgtatcaacttggtttaatttaggatattatcattatataaatatgaatatgatgttgggatccaatgttataacgtacgaaagcaactacttatttatataccttctgttcctttacacttattaattattagtatcgctttgtctattatattaattttctatattattatttattttattcttcgatttgacaaagtcaagcaatagcaccatatcaatatcatcctaattcttgatgaaatagttgcattgctactaccacaatgaacttggcagtcactttaagatttaaattttttaaaattttcgaataatttagaatattaaaagttattgtcaaactttctattctctataaagatctaaaataaaagaaaggctaattagtaatnnnnnnnnnnnaactttgacatgtactaaatcgtacccctgaattttttttgccgttaaaaattttccctaaactattaagattgttaaatttaaata

SEQ ID NO: 51143 - DNA, 617 bp, Cannabis sativa
atcccaaattgtagtgtatttctagcatatgtatttctataaaataatatttttgaaagaaaatgatacatttttgtatgaagtgactacattgaaaaataataacactccttttattatttaataattgtaatgaattaaacttgtgtgtaggtacttagaggagaaccctcaaacatggcatccaatacatcgtgtggtggtgcttgagattgagaatgtgaacaaattgaagatggctctctatccaaatcacaccataaatttccaagagtatggggagagaaaccgacgccgatccgagctagtcatggagcttaagaggatcttcgaagaaatccatatcaaatactatcttcttcctcaaaccgttcatcttgatcagaaaatatgatgactaattaaatactaatttaaagttgttttttgttttgttttgttgttgttattatcgttaagttttgagataatcacttagtagaactttaattagcaagttaagtagaaaaaaatgttgactattactattttgtatgggaattgaactacttaaattgaatgtatttttttgggttcgtattttgtcgtgtttagaaatatattctattcttatttac

SEQ ID NO: 51144 - DNA, 648 bp, Cannabis sativa
ttctcaaaaattgggtataacagtaaatttttaatcaaacatatttttagagtttaaagttgatcttgttattataagcttatttatcaaagtacatgcgtggcatccctagaagttagggaattataatatgtgtatggtatgatttcatttagcatggacacatatgatataggttttcatgtatataataatttaattattgttataagttaaagtatgatgttgctatacttaatacgttgatgatatgatgatattgtatataactgcacagttgtggatttaagacatttatatatgtataatgtatatgtgttaaacatttttttattgggcttttagctagtagagaagtgctagtagtgagcagattgagttttggtgtgtacactgtgaggggctacgaatgggcaaatgatctagagtgtcgatgtgtcttaattttgtttttagtatttgattattctaaacatagtacaaatatattatttaaaattatttatttactatattttgttttataaatgaatgatccttctctattgtattttgatttataaaacccaatgttgtatttcaagtagttttgaatcttttcaaattatacaataaaatggtatatttgtaaagtaaggtaaaatatca

SEQ ID NO: 51145 - DNA, 603 bp, Cannabis sativa
tttaatatgttttgaaaaatgagaggtaattgaggaatcattaaatatgaaagaggtggatatgtagttttgtttgtgttttaatataagatgccagataactaatgctattcattttattaaactacccatgtagtgggcgtgtttgagttaatagggtgttaaaacatggttagaatattactaaaataaatacttagaattaaaataagggaagcataataacaaatttataggtttggtacttaattatattaaagactaatgagggctatataatatacaataatataaaactaataatgcaatgagaatttttaatttgtgggtagttcattttttccccctaaagtaggctgacaatagatatgatggtcaaatgttaattgcctagaagagaatctattcaaatagatagtgggtactcatcaataatttatcaaaaaaaaaaaaaagttaaataaataaatataaaaaacctaaaaagaaaaataagatagtgactagttaaaatattaaaataatacaattattattatatattggtttgtaaatattgactgaggaactgtttaagcaacccacatgttaaaatatatttct

SEQ ID NO: 51146 - DNA, 520 bp, Cannabis sativa
aaaaaaatattaggaaccgattaaaattaattaaaaaaaattacatacaaacaagagtcattagttccaaaaatattgaaacatgaattaaaatagaaccaggtccacaataaaataagtaacaataaataacacacaataactcagaaaattaattataataataataaaaaaagaaatcaatttaaaaaacattgagatataaattaaaaatagaactaagacataacccgttataattaaattgcacaaaataattgcaaaaatttagtcaatagtcaacatgtgagctactatcgtagaattcaattcaccatgaaatcaatgtttaaccattggtaaaaaaaaaatacaattatacatacaaaacaaaaaataaaaaaatcacagtcaaataaaaagggatctacaatcaacaacccaaaacataaaatttgtgtgaaaaatctacaaaattaaacaacataagaaacaaatacaacctcgccgatgaaagtacgtgcaaaggatccaaaacata

SEQ ID NO: 51147 - DNA, 628 bp, Cannabis sativa
aaccaccaatgaaaagagagatttgaaccttcctactgttagttatcctatgattataaatgttcagtttgcttgctttcgttatcattttgtattatccttttattgtatggctttctaaatcattctatgaacacatcaaataaatcgttcatggctttgttattgttttaattttcgacagcgtaaaccacatcttaattagtacagtatgaagattgtaaattgtaatggttataatataatatggatctatatcttttataggcattatctaactatagtttgtataatataaagccgaagtatacgtgtatatgtgtaatataaaaagtatacaaaacccgacaaaaaaataccaaatgtaaaaatttcaatttgagaccactaaaaaggaggagaatgatgaattttaatttggaactaattattataattatactgcatattaattatattgtatattaaaatattagatatgttttgaatgtgaagtgacaattacatttacatgtgaatttttattgtacgtttgataagacagtttggcaattataatgtaaattaatattatgtaatatttaatgtaataattattatcattttgtaaaaaatatttaaaataaat

SEQ ID NO: 51148 - DNA, 867 bp, Cannabis sativa
acatactaaacaaagtggttcttatttttcccaacactacatggtagctaacttaaactactcatcatgccactgtaaagtagtactgataaaagaagtaactatagctactgaaaaagagaaaccagcaagtttctagcatgaataagaaaaaaggacaattaccaagcaatgtaaaatggtttcaacagcttgatttcaccttgaaaaagaagatgacacatccacatgccaatcacccagctgaatacgcaaaggaagacaattagagatagctctccacatcgtgttcgtaaccttgggcaggattttcaaattccacatcttctgccataacctagaattatcatcccttaataaaccctccttcatttcttgaataagtctataagcactcttaactgagtaaatacctaagaactcagctgaccaactccatctgtcttgagaagctaaagagaaaggaggaatattaagaattaaaaaagcatcatgcgggttaaaaacatctttcacaaagtccacatcccactgacatgattgtgtaaccagaaaacaatcatagtcttcccagtaaacacgggtgaaaagagataccaaaagaattaccaacattgggtaaccaaggataattgagaacactaatactcatccccaaattagctgttaaatgattgccttttataatcaaagcctaagcttcatgcatgctacgccaaatgaaacttgtattagcacccaaatctgcacccagaaaagaactagatagataacacccttcttccatcacccttcctaccaaagaattatgatatagttgaaactgcaagccttatttacccagtaatgcaatattaaaatcacaca

SEQ ID NO: 51149 - DNA, 1090 bp, Cannabis sativa
gcgggttattcggtttaggcggtttacaaatttttttgtacagccctactttctccaatcctttctctctttctttctctttggttcctctattctttggttctgttctaatggctaggagatctaacaagtttatgccacttacaaatctaaaactttggttatttatgccactattgtgatatgcattggggatcacactttggtacttaatttggtaagtgttattactttatcatgtttttagcaagaacaattacaaatattgatgagagataagggataaaattcattattgcaataagattataatttttgtgttaatgtcaatattgatgtttttaatatgaatagtgtactttgctaaaacttacaaattttaattactttcgtattgattttttcaatactgtgacagattcacacggattatttaataaaactcttacttaattatgctaaaattactcaatgataagtactaaacactcctcaaatttggtaatatatatgatataaaaactcatatataaattatatatttaaccctaatatataaaactattaacttaccataatccatgcattgacacgtacatatatcaattacattaattcaatgtttttttttattattattatattattaattattgttaattcaatactgaaatatacatcatatatatgatcttgtcatcacgaggtagactagagatatacgtagtcttacgtacttatatacgacattgacgttaaataatttcttaattttataaattatacgtacatatatttaataattaataattaaaaataaaactatgattttcttttttgtaatgaaagtcatgtattaataattaacgaataatactatgagaagaagagaacaaaaaccccattatatattatattatattatatatatttttctttgtattgatgtgttattcagtgacggactcagaatttttgttttgttggggcttatttatcattaaaaaatatttatacttatattataatcactcttactatatttatttaattttatgggggcttctttattattttggtttataattat

SEQ ID NO: 51150 - DNA, 1679 bp, Cannabis sativa
tttattgagttaggagtgttgtttgaagatgttatagctttattgtctaaattttcgggggcagttttgtcccatggggctcgctctaagattttagcagccaaagcatgctctgcgattagatgatgagctatcctggttcgaggaggttccagcgccggtggcggacatgggcgtcgtaaattcatgagtgattttaatcactttgtaaaaaaaaaaaaaatggaatggacaacggtcttaagtttgatttgaagccaattttctgaatttctgaaaagctgatggtcatcattgtgccaagtgtataaccatgtcacacctgattaatattaaaaataatataaaaatatatatcaaattgttcgatagctcatgccccttttctttcttatccactcttccaaaaagagtctacttctctggcaatggccaccaccggcgttcaccatttccaactaacccactctgtcagttccattcgcccatctactcgtaccaaactcagacctaactcggtcaggtgctgcaccaccactggaaccaccgaggcgcagaatgtcacagtgaagaacggcaatgattccttggagatatgccgagtactcaacggaatgtggcagacgagcggaggttggggaagaatcgaccgaaacgacgccgtcgaggctatgctccgttacgccgacgccggtctctccaccttcgacatggctgaccactgtaagtctagttgtttatttatttatgtatcgactttaattatttgattcttcaaaatttagtggaaggaggccattaggggtgaagatttggttaaaagtggagaaagttgcgtttgcttagaaatttttagggaggaactttgttgttggtgctctgctcaaatatatggattctgtactcattgcctttgatatggcttgtgttgtgtttgtatgtgaatcacttgtgtaatggaaacttagttaaaatagtcagttccaaatttggttaacaaggaaatagattgaatatgtattatgtacatgtgtgtgcagtgtatttgactatgctgcaatgtgtgaactttttatgttgtgaattgaacttggagtactttggtgttggatttgcagatggcccagctgaagatttgtatggtatttttatcaacagggttcgtagagagcgtccacctgagctgttggagaaggttagagggtaagttggtttcagtgagtaagtgttggaagaagatttatcaatttttcactgcaccatttttctcttatgcgttatttgagatagacgtggaaaggagatggaaaaaaaaatatgcactaaattgaaatatctgaagtttttgtatgctaaggatttactgtttctctttagatcctttatttaacaccagatactatagtgaatcgagtaattagtgtgttttttttttttatgatatgcagtcttaccaaatgggtgccaccacctgttaagatgaccagtagttatgtaagggaaaacattgacctttctcggaggaggatggatgtggcttcactggacatgcttcagttccattggtattaagcctttcattttttccttctttatatctctcttttgtgtagttggtgaaatgttcctgttcttttatattatgcataaccgtgtagcatgccatgttttgctcatat

SEQ ID NO: 51151 - DNA, 1071 bp, Cannabis sativa
  modified_base (213)..(217): a, c, t, g, unknown or other
aaaaaatttattctaattttttttcatattcatgtacgttatagctatttaagatcaactacaaaattttgagaaattccgaataatttataatatagacaataatgttcaaaaagttttttttttacacgtataaaataaaatagtcacgcgtgcaatttgaacgtatttttcgccgtgttaaacttttccaaatttcttaaaattttgcannnnntcttaaataactataacgtatatgaccatgagaaaatatttgactaaaaaatcattgcggatgctaaaatagataaagatgtatcaatgtatccattttaaaaagagtgcattgtagaattttcctaaaatattttattaagattaggatctaatatcaaaaagtttgacattcatttaatatgcattttttcatatatatggacttttccaaaaagtccaaagtcaacttttaattttccagtcttgtcagcctactttataatcaaccattaatttgcgtatatatatatatatatatatgaaaaatcttctccgtgttgtagccgtaaactacataatttcccatcatccgtgaccgtgcaagcaagtacaacacacttctcattaataattaaatcctaaatttctcaatgcctcgaaaactctcagcaacttctgtgatcagcatcataaccacatatatatagtacatataactctaatttctaacaatgttttccacaaaacccaattacaatctctatacatatcattactactactactactactaataataataataataagatggtgatgagcaaattgtatttagagatggaacatgttttccaatactttgatgagaatggtgatgggaaaatatcagccttggagctaaggaataggcttggtgttgtattggttggagatgagttattgccacttgaagaggcagaagaggctgtggaatgcttggatttggatggagatggcttcttggtattggatgatcttgtgaatttcatggaatcgagtactcatgatgatcatggtgagaaggagaagttgcaagatttgagaagagctttt

SEQ ID NO: 51152 - DNA, 1122 bp, Cannabis sativa
ttcaatacgattaaagtaaatgttgatggagctattttccaaccttcgaatttttttggttgtggattcttagccaggaatagtgatggtactcttattgaagtctgaactttactcaattctggttgtgtctccacttaagtggctaaaatactgagtattaaggaggctctaagctagattaaatatcaaggatgacactcggttacagttgaaatggattgtctagagtctagttgcagtccaagcaatgcattatgtgtgtttattgtcctatttcgatctcctgaggtttcatattgcaagcaattgcttgtagatttgccttttgtttctttgaattttgttgtatgtactgctaataaggctgaacattttcttgcacgtagctcttgttcctcgtcagttcatatttttgatgtaaccaactcactatttgagttgttgaacattgtaatggttgttctctttaataaagttgccatttttccattcaaaaaatagtattataaatattagtatttaaaataatttgttgtattatacttaatcgcatcataagcactggtaaaaaaaaactaattggcatgcaacattaaggttaactactaattattatcaaaaaaaaaaaaccattactaactagtatctaaataattagtagttactagaaattgtcatatataaatatatataattatgttatattattttgaataataatatatgtatgtaataaaaaaataatatgtaatatataacaatatatattgagttgtcaatattttgtaatatatagtgaagttacttattactatatgtaacctccacaattatcacctatatcaagtgtgtaaaaaggtgttaaatatctttatttaaaattcttaacactataggagttattatgtgtgcatgagttacatctcttttactcatatttacacgcaatattaagtccataacattcatgggaggttatgagttagaattttaaatggaaatatcctaaacactatatataatggtctaaggtgctaatattgagtagtgtttacccaaattttgataatagtgacatggcaaaaatgatgacatgtggcatgaggatgccgagactga

SEQ ID NO: 51153 - DNA, 2075 bp, Cannabis sativa
cttaattttctttcatcatttcctgttataatgatgtcgtccacgtaaattaagacaaagattatggctgtgtctgtcatgcgaaagaacaaggaagtgtcagccactgaatttgcaaaattccatccgagaagggtctttttgagcttctcaaaccaggctcttggtgcctgtttcaatccgtagagagacttgttgagtttacatacataattaggcttgctgctgtcttcaaaaccagctggttgaagcatgtagacatcctcttcaagagtgccattcaaaaacgcgttgttgatgtctagttgcttgacttcccaccccttgcttacggctatcgtgagtatgattctgatggtcgaggacttgataactggactgaaattttccccaaaatcaatcccaggtctttgatgatagccttttgctacaagtcttgctttgtagcaatttgttgttccatcagcatttcttttgatcctgtaaacccatttgttaccaactaagttgtagtgagaggagtaaggcaccagtgtataagttttcttatttttcaaagctgtcatttctttgttcatggcttggttccagacttttgatttcaatgcctcttcaatgcttctcggttcctcttcagcagaattaaatttggcttccccaacatacacttttggcttgaaaatcccagcttttgcacgggttatcatgggatgagattgaactagctgtggtgcatgttcctgattgttatcttgagatgattcagcagtagcatctgcaacattctcattatcaaaattagtgtgttcatcagttgaaataatatgttcactgacctcttccaaatgaggatcgggtgctgctccatgagatgctactggtgttgcagcatggattgtatcagccgtgttatggaacctgctttggaaaatattttgaaaatgaagattaggcagttgggaccattgtgatgtttgaacaatagcttgtttctcagggcagtaattgtttagaaaacctttcttaaaaggaaattctttttcattaaaaatgacattccttgtgatatagactcttcccattgaacttagacacttgtatcctttgtgatgatcactatatcctaggttgacacatttaagtgagtgatactgaaacttgtgtgattggtaaagtcggacacaaggaaaacaggctcacccgaatactttaagaaaggaataatgtggtttctttctaaacaatgtttcatagggagatttgaggttcaacacgggagtaggaagtctattgattaggtagacagctgtttgaaatgcatctacccaaaattttagaggcatactaccatgagttagaagtgttagtcccatttcaactatgtgcctatgttttctttcggctctaccattttgggctgaatgatgaggacaagagtgttgaaaatcaattccatgttcaatgacaagatcagaaagagcttggtattctccacctccatctgaccttaagtacttaattgattcttcgaattgtttttcaacaaaggttttaaactgaataaaagcttcaagagcatcagatttgtgtttaagtgggtaaatccatgtgtacctactaaaatcatcaagaaagtgaatgtagtattggtaatttgtgttagacataataggagcagggccccaaagatcagtgtgaataacttcaagaactttagaggctctacttgatgatagtttaaaaggtaaagcatgggatttaccatattgacatgcatcacagaaatgaacaactctttcattgacaggtgcttttacattatgggaagctagtacatggtttaaaaccttaattgaagggtgtcctagtcttctatgccaaacatcacttagggaaataaaacattcatcactaacatacttagctacagatttcctttgtaggaccgagacaccagtgaacattggaaattgatttgtgttacttgtcacatgagaagggttagaacttgtctttgataatggtagctttagctgatacaatccttccttaagctgttggaaatttattttacc

SEQ ID NO: 51154 - DNA, 764 bp, Cannabis sativa
aacaacttcctcacaagatcaatgaacgatttgatttcggtttcgatagctctggcgactcggaaaactttgtagacggttattggacggaagaagagacatctgatattaaagccctttaatttttcaaggttttggatcagagaactgaggtcgtagagtaatcgagagagattcaggatatcgaaaaaaatggcgtttgcttcggctgtggttccgagctctaaaagttcttcaatggcgggttttgaatcgttttggtatagtatatcgcgaaagggattgggagagagatgctttgaagctttttttagggcatgtaggaggaaatggtgggtttgaggttgagcttcgtccatagtgaaggcatttgttcagtgacaattaatcgagagaataaaaaaaaggaaggaaacagagttaacgtaatgaacagtctaaagctatataaaacccaaacaagcaaaccaagcaaccattcaaactaaaatccaatacctctgattttgtattatatattatttgggaattttcattacgctttaaattttatcattttcgtttttttttttgataatgcaacatagtcataatgggaaatttagttttctatgcattttttatacttaaatttattccccaaactaataattatagctattgaaaaaataggtatagttttccctaaaacctaaaatactcctctcatatttttcaacctctctctctcttcttcctttctctctcaaatcaaacccaaaacc

SEQ ID NO: 51155 - DNA, 1666 bp, Cannabis sativa
gtacaagcctgaaaaagtaggcgataggcgcttgagggaataagttgataaggtgcaaggccaacaaaaactagtaagttaattaaatagtcttggagtgggagcatggctccgaacattaggtgggtctgactccatgctccgaagccgttgtagttatgattgggtgttttttcgtccctcgaaaggcgatggaaaaccccagcagcggaaggcttgatcccagtaacagtgacgatcttctccaattgatgggcacacgtcagggtcgagtgcagtttatctacctcccagccatttaagtggggacagacatggcctagaatcggtaaagttccaagatttcttggtcaaagctacaaaaaccatggatgtgaagatggtgaagaatctcactcatctgaaaaagaaatccagtagttagcccccaaaccaaaatctaagataaaaaaggggaatgggggccccataaccgctagaaagaggccccctccagatgcctgccaaagatagggaatccagagattctcctaggcaaacattgggtgcaaacgtccgaaaaacaaaaaataaagacgaaaagaagaagaataggagtatgaaagtcgcttcagacactcgacaacacccaaacaaggaaatcatattctagccccaaagaaaaatgataataagcatgcaaatataacagcgtacaatggcctccgccataaccatcgtaccacaaaaatcaaacgcgactaaaatgagaaggtcaccgttctaaatttgccctaacatgcagaaaaaatagaaatatgtgcacagagacttacagaaaggtggtaggaaaaaagttgatgttgttcggtgatagaatatggtcttgcaactgcggaggaacagtagcaggaagtcaaagatttctagaattttttgaatattttggttgggttgaaaatcgtgaagtggtgaaaataacccagcaaaggaaaggtgctagcttttataggccaaaaggggtgcaaggcagctgtgatcagacaccatcgtacggtgagaattcgtattgattaaaattctgcgatccaatggatgcggtgaacgggtgtaaagagaagaaaggacgattgaaacatttcattacctctctgacaacgacattaatgcgaaggtctatcaatagacaagaagcaaatcatagcctgcaaaaagaaaataaaaatcaatgatgacaatcataaatacggcccacgcgccagaggcacgtgccactatatttattagagaccagaggccgcatacaagtctcatttacttgttactaaataggacttggggggtaaatgttgccttagattttcctaaaatacgtggccacggctgcgtatgacacgtggatcaaaaggacacctcatctgagaactagctgagtcatacatatacggataagtgtgcttcagggagtgagccctcggagaatacataaagcatgtccttcccctccgggagcaagaaatataacaaagcatctctaggagaaggagaacctgttcaaacagtcacttcacatttaatgcagcatggggaaaacgtcttggaacatccataagtgaactttccaaacagtgtaagcctcgtttacagtgattacacgataatcaaaggggctagtgacggctccatt

SEQ ID NO: 51156 - DNA, 2837 bp, Cannabis sativa
acatattatagaaacgagtctcacattattagctcatgttggtctaagtatggactatcggtggtatgccatggctaatgctgtcttcactatcaatagacttcccactcttgttcttggtaatattagtccatatgaatgtttgtttggaaaaaacctgattatagcatattaaaatcttttggttgcaacagttatccacacttgcgaccctataatgctcataaacttgaactaaggtctcatgaatgcttgtttttggggtattcttctcatcacaagggttatttgtgtgaacaccctaacggtcgagtttatatatctagacatgtcacattcaatgagggacactttcctgcattttcaagcagcaacaactcctcacaaaaccaggtaaatcatttatcaccaccccctagctttagttttcaaactactggtgttcctacatatactgactttagttttgtgcatactaatcctatgaaaaattgtgtggttcccgaggacaatgatatgtcaattcctcctgttacacaccacacaatgaccatacatactagaggtccctctacttttaacaatgacacccgtaccccacctacacctatgataccaccaaataccactttcatacccattacaaccataaacacggcagccaatgacactcgtacaccacctccgcctataataccaccaaataccaactcagtacctactacaaccataaacacattagccaatatcacctgtacccctaattcacctataaaacaatcagacaccaattctatacctaccaatgccataacctcatcaaatatttatacacatgccattcccaaacctgtgtcaatcaataccactactccaacacccgttgcacaaaccaaaaacccagccacatgtctaatacctgctccggagactattatccatgtgccaatctctttcaatgacagcacctcaacatatatcccatccactgctgtcaatgttgaagctgctaacacctctactataactgttcaagcttcagcaagaacacatgctatgcagaccaaatatttaagtgggtcgggataaggaaacctaaagcctgtaatgctacaaaattccccttacctgagtctctcattccctctgaacctaagaacacagttgttgctctcaaaaatcccaggtggttcaaggctatgaataaagaatttgatgctttgaagaaggcgggcacttggactttggttccatattctccacaaatgactatcattggaaataagtggatagacaaagttaaactaaatgcaaatagaactcttgacatacgcaaatcaagacttgttgcgaaaggatatttacaaacactagggatagattatgaagaaactttatcccctattgttaaactggccacagtaagaataattctcactttagccgtgtctcttaattggtttgtgaagcaattagatgtctcaaatgctttcctcaatggggagctacatgagacagtgtttatgtgtcaaccagaaggattttttgaccccacaaaaccatctcatgtgtgttaactccacaaagctctttatggcctaaagcaggctcctcgtgcttggaatcaaacattaaaagacaaacttctggaatgggggttctctgcctcaaagtctgatacttcattgttcatatatggttcgggtaacaacttaatcatcctacttatttatgttgatgattttctagtaactggacccaatactcttctcattactcagcttatttctgacatcaacaaatccttttctctaaaggatttaggtccagttcattattttcttggagtagagatacatcgtgattcctctggtatgtatctctcataaaccaaatatatatatatataacaaacttacttgttcgacttaacatggaaggagcaaaaccacgtgttaatccaacaagctcctctgtcaaactatcccttactgaaggagagccatttcaggatcatactctctatagaagcactttgggtgttttacaatatctcactctcacaagacttgatgttgcattcatcataaataaactgagtcaattcatacatgctcctacgactatccattgggaagcttgcaaacgactcatgaggtatctcaaaggcactgtccatcttggcttacatctcacacctgcctctactttgagtttagaaggctacttggacgtagattgggcttcctatattgatgacagatgaagtacagggggttatgtgatgttttttggaggaaatcttcatggtctgctaagaaacagcaggttgttgcacggtccagtagtgaaagtgagttcaaggccttggcaaatgcggcacctgaaatgaaatgtttggtatctctccaatccgagcttcacatctcttctcatcattgtccaatattgtgggttgacaatcaaagtcctcctgctattgctgctaacccggtgttccatgctcggtccaaacatatcgaaattgatctacattttgtaagggatctcataatgacaaagtaattatccattcggtatgttccagctatagaccaagttgccgatgctttaaccaaacctctttcaatagattgatatcactatcttcggtccaaactcaagatgtcgaacacacaccctttttgtttgaggggggatgttagcaacctaattactagtgatatcacttaactgtttttgctaattattttagttgttacactactactgttgaccgaggttttcaacaaccaatttaataatatatatttgaaagctgtaggaagtttaatgca

SEQ ID NO: 51157 - DNA, 1338 bp, Cannabis sativa
tatttggtgtattgtggtctagtaaaaagtgttcaagtcttggtataattacttttacaataataaagtaattacgtttttcacgtgttgtggtgtccaacaatattgtaataaattaaaatatgtgaattcaatattttctttttattaataattagagattacaaaaatgattaaaaaaaatccatccaatcaaattttttatctaccctgaattcaatatttaattatagtaaaatatctcaaaaaaaaaactatagtaaaataaatatctgtcattttggaacagaattggcttatttccacgtaaagaaaaaaaaaaaagtaagacaatcactaacggttggttagttacacgtagaaaacgtctttaaccaaaatgaaattctactacttattattagaagcgttacgcttaacattttaagctaaaatgcaaaagaataacagcaccaaacaaatttcatagtgtgaaactttccaataagaaaaccatttgtgtcttcttatggtttttgacacaaacactcaggaacagggtaagcaatgacatcacgctctcgtctgtaattcctcagctcaggctgacctaacgacttagcgtgaagctccttcaccacactgctcaactcagcctcagaaatggtggtgtcttcaaagaaaggcaacatggctctcttgttaggcttaatgaacttcctatggccaacataggctctgtgaccctgcaacgcacgccccatgtttcccccgtgtgatggcacaaacacgtcgctactaaggcacacaatgtagtcaattgcagccaaagcagaggacttgttggcgaaccgggcaagctcgccttggcgcgccaacatctccttcgtcacgagatttggatactcagaaatgagtggctgcatagccctgctgcccccgaatggctctcctcccgcgttgtatattcgagtactcttcggtgcccctaacgccttcaaaaaccgagccatttccaaggcgttaagcgggcataaacctgcgagttttcgctgtgtatggctcatgtttaggctccctgttaggaactcaggctcggattcgcggaccttggctatgactcggtcgaattcgggtcctagaccggtttggcaaccggttctaacccaaacatctttctctagccggagatgtagagcaatgtacggaccctctatccacattctctttgctaattgttctcccaactctcttattggtgctgcaaatctcaaagcatgaaatgctacctaaaagaaagaagagcaatacccaagttattattactctaaaagaaaaggaggatagaaaaatatatat

SEQ ID NO: 51158 - DNA, 1333 bp, Cannabis sativa
gctggaaggtaggggaaggaagacacatacttagtggtatagacccgtggatacctagccacaaatctttccaaccgatctgttactcaagaccatcaaatgggcttgtggcaaatctcattactggtgagcgccaatggaaaattgatatattgaagcaatacttttcccatttagatgtagatcgaattttaactttgccattcagttttttttcccaacaatgattctcttatttggcatcaccatcacatagggctctatgccgtcaaaataggatatcatttagctgcgaagcttgatattgttgaccactcatcctcatcgacttctttggcatcatggtggaagttattttggtctctacaattgccacaaaaggtcaaaaattttgcttgaaaagttgtgcatgaggcactcccatttgctttaaacttagtcacgcgaaaagtcataactaattcaagatgctctctctgtaaacaagcttgggagtctattagccatgccatgttcggttgcaaatatgtgcgctccgtgtggtactgctcaaacctgactttggattggaatcaatcctactcaatgtttaaaggagactatctagtgcacttatcaagcatttataacagatctgaattagaggaaattatctgcatcatgcagtcgatatggtctaagcgtaattgtattgttcatggtggtactgtcaaactagcgcgtacccttgcatcttctgcaaccacttccaagatgctcaggttaaatttttcccacattcaaactctgctactccaaaactactaccatctgctcacactcacatatcgtggctactgcattagatgaccaagaatattattgttggagccatagtctatgcctctcatggtagtgttgttgctgccttttcaaaaccaatcataggtaactttgcatctcataaaatggaagcaaaagctatgttccataatctaacttggattttacagatggagttgccaatcacacaaaaaaagacaaacacttaaatggtttctactgctttaaatgccattttactacaatttttacttttaagaatttaattgtagatgtctttagtcttttattcttttttcctaaagttattaatgtacatgtcaaacatactgccaatatagcaactcacaagttggctaaatctgctttaaagttgaatgatacttgcttttggttggagaattttcctctaatattgtaaataacctttattaatttatgataactgggtattttatctcaaaaaaataaaataaaataaggaataatgccattagaaagtagttctcta

SEQ ID NO: 51159 - DNA, 1160 bp, Cannabis sativa
ttttgcaattatattgtttcttcatgcacagttttgtatataaataaattgtttgattaaaatgaaactatagctatatatgcatatgtgcaatgttatatgtatgctgaattaatataaagattgaacttatataaaatagaaaaatataaagattgaacttatataaaaaaaaaaatatcaattatgtgtacctccaagctccaacaattgattttgataatctcaatctacagttctatatttacaaaataatagaacaagaatcaatatgaatatttggtcttcaaatctttcactaactctttagatggagttagtgaagaatcgaaaataacaacattttagagattagacggtaacttatatttatataggtaatacttttttattaaaatatagaatgttttaatgttaatttgaaaataaaatttaatagcaaattaaatagtgatattaattagaatatttagtcattaatcaaattattgactttgatatattaaattaattaaaattaataaatatattaataataatttaaaatattaccgtatatatatttatgtattctaacataaataagttacgtttgtaaagaataattaaattgtattctaacattaataattgaacattttcctcccaaaaaaaaataatattaataataacgaaacacaatctaaaacaataatacacaatcacaacaaatatctatttttagcaaattgttacagagcatatatcaacaacttccagtaaaaatgaaattcagtttatatatgacttaaatgatcataataaagattttttattaccattaattggttaaaaaataattgcaataggaaaatctatacaagaattaacatttagaaactcatgttttttttttttttgaaaaaacagagcatggactaacacggtttaagcattcttaattgcattgttactctaaaagtttgaaaacgaaattcatatatgagttaaatgaacataataaagattttttatttttgaaggaaagcttatattctattaaataaaatcagttgttacaggagcactaataaatttaggacaagtatctgtccataaatgaatccctaccgaactagtaactgactttcctagtgcatgatgttagacatttataagta

SEQ ID NO: 51160 - DNA, 706 bp, Cannabis sativa
atcacagttgctcataggataccaactgtgatggattgcaccatggttcttgccatgagtgatggtaacatttcattactttaaatttataaaaggaaaagaaagaaaacccttttatctaatgaaagtaagttcattcattttcaggacaaatagtggagtatgatgaaccaatgaagttgatgaagaaagatgggtcactttttggaaagctggtgaaggaatattggtcccatatgcagtctgctgagtcacattgataatgataggatgaaaaagcttataatggggattctagtggggagttctaaggataatatcagttgtgttttaatgagaattagttaatgatagttaaaattctgtattttaatgattacttatttattatttaattaattacttaattagatataaaataataatattgatactaaaatatttattttgtagctacaaaacacaactttgtaactgcagaattgaataaaaaataaacagtgcatacaaataaaaacatacaaagtttttatacgtggtatcaagaatctttttagattgttattaatccacaagggcacgcaagaagatcagattcattagataaatctcaaaaacacaaattaattgacatatgcataaatactccctcttcttatataatgcaactttgatgtattctaccttctcgaatgaatcttgctga

SEQ ID NO: 51161 - DNA, 984 bp, Cannabis sativa
  modified_base (583)..(589): a, c, t, g, unknown or other
aaattgatcatgatgagcttattggattctcaaaatataattaagacatcaaatcttgttgagttcatatataatatatatgaattgatcacacgtacatttttgtgtgacatattattattttaatttttgatatttaaaaaatatatataatatagatagatttaagtatttaattttgttaggtagattattaaattaatcatctacacacgtgcaatatggccccatatgtaaccttggtcgccttgactgatctcactatatataatatcaattaataataatatttgaaccaaacattttccaccaatttagttttaattattttgaaaatatttaatataaatatatattaattaataataatattaatataccaattgatgtcctgatcatgaagttaatctaataaaatctctccattataagagattaattatatataagtcatgttttttggctggttcttgtttaatttaatttgttttgtccaaggataatcgaagaagaaatgataataattacctaatataactgcgttaggtactcatgcttcatgcaataataataataataatannnnnnntaataataataattaaatttaattaatattattattatttgcttttcgccaaactgagtaaattcaaaaaattgttatattcagctatagtggaagctgtcatttatcaaatttagcatgctcgtaagaattctgaaatataatggattataaaaaaaaagatatatttttaagtttttatttagaaaaatgtggtgtttttcataattaataaaaaaaaataggtaatttaaaaaggaaattacttttgggccctaaactagataggcctaattaagcacaaatttagcccacctatatccaaaatcgggtcggctcgtaatagtgttttatggaatcacaagctatatagactaaaagaacagatgataaaagattgtgtaaaaaaatagagt

SEQ ID NO: 51162 - DNA, 1587 bp, Cannabis sativa
taagtaagtgcggttagtatgttgcattgttacatcagaaagacttcgtttcatctttaaagcagaagagaaccaagaaatacaatgccagttgggatgtttctccttcataaaagcatccacgactacagaggagtctggaatgataaccaagtcatcccaattgttgttcgtggcccactgcagagcaatgaaccaagcaaaaacctcagcaaccaccgcattctccccaacagcagactttgcctcataaaaccagtcgtttgtgtcacgattccacgcgaggaaaccagcaccaatctttcctttagagaaagatccgtccaccataatcagcttccttttttgggagccgatatagtccacttcagaacatatcctttccttttgaagaaccacttctccattatcttcatactggctgaattcaccatatttcttccaaactatcctcaataagtcatggatgtttggatttggatctttgccatgccgacattcatttcgaaaaaaccataaggtatcaatgatcacagccagacaaagaaggaaacgataccttggttcaggttctaggccagagcacaactctataacgaaggacttaagagaatctgttgacaccatggaggatcgaatgggaacaggggacccaaaccatatggctacagcagagggacattggacaaaaatatgcagaggagattccatctcctttgaacaaaagcaacacaattgcattgctccaaatttgtctcccgtgggcagagcacctgctattgcgcgccaaagtatcatcctcatccggggatgaaggttctccttccaaatccacttccacagaggctctatgctcccaaaccgacttttttgacccattaaataagcctcttttacagaaaagactcctctatttgcttccttccaaattaacaggtcattacccaactcctgagcaatctgaatctgactaatccgcatacccaagtcctcaccaaataagaagcaaaggtagtttgagttccatttcttttctcttcgatacatcaagtccgcaaccgaaaggagactaggagctttgcatcggatagactccatgagttctctaaaatcttcatagcttagccaagggatccacggttgacaccatagattaattgactcccctgtggctatcaccatgcaagacccttgaagaatgacttgtcttgcatcaaggatacccctccaaataaaggaatctccactctttttctgaacagaccagaaggattcccttgggaaatatctcgcttgaagtgccacagcccacggtcttttgtcaccagaagccaacaaccaagccaattttgacagtaaggcattattaacgtcttccatccgtctgaaacccaaaccacccgaccatttgggccgacatagagaatcccaagaaatggttgcaaggaagcgttgtttttcaaggctcccattccaccaaaatttccgaattaaggcatctaactccctgcaggaagagagaggtaattgaaaggtggacatcgaatacgagggaatggccgaggctatggaagaaaccgccaccat

SEQ ID NO: 51163 - DNA, 782 bp, Cannabis sativa
aggggacatttaggaaccgccaaagccatatacaacacaaacacaatgacaaatctacaccacaaaagggatcctatcttaggctaattaatatgccaacccatatacaaaccacaaatgatcaacatcgtatatactatatatgtccctttatacatacatacatatatctagtataataattacaatttcatttaaatataataatgtacagtacagcatcctaaaagcaaattgttttaataatttatatgtttatcaagtagattaattatatataattattttgttttattaaatcttcttactactatttatagattcaaagaagccgcctataatgcaacaaaaaaatcccagctataaagctttttgatatatgcaaaatattagtggagcagccacactatagaaagaaattgaaattatttcataaataaattaataaaaagtattagtacaacaactgtacttaacaacttcacaatctatgctcccagtgttagtaagtagaattatctatattaattgaacatataactgcaattttaatttttttttttatatatatatatatttatatatataactcttcccatgaaaaaataaaaatttgcagagaagcatattaaacccttcagcaataaaataatagcattaatacaatgagggtggcactacaacaattacaagaaataagggcggaagggtctatcggtattaatgattaaattggccggtatatggtattattggcgggttccaccagtattggtccgcca

SEQ ID NO: 51164 - DNA, 7282 bp, Cannabis sativa
acatattaactttaagaaagagaagaagatagagaataaaataatgttgaaaaccctctgtagaatgcctccagattgacttcggtcactaaaatttgtattcttgtttccttctgaatatcttccctgaaatcaattccagttcaccctttatataggctttcagggattaaagagatataaaaacgcacatgttaaatgcctattcgaattgggaaactaccgaaacccacgtgagagaaaaggacgatttttgtgcagtctagggggccggcccacggccccacaagggctgggccgcggcccgagttggagtttcactacgtggcttcgcttcgacgatgatttttctactgcgttgactgatagtattttggccacaactctctcaatattattcagaattagacgattcaagatattccggaaagataaaagagagatctagaacttttatgttttgactttttccaaaatataatcaaaagatagttgaatttaggcttgaagttccagctttattttcttgcacaatgttctttattatatatatcatccttttgtgagatttttttttaatattttttttcatcttattcctttgatattttctaatcttcttctatttgaaatctacaaaaataaaagataaaaagcgtaaaattactccaaataagagtagaactaaattaaaaatatactaaaattaatctaaatttaatactaaaaataaccacagatcacaaaaataaaacggaaaaagggctcaaggactaaaccacaaagcaccataaggatccctaacaaaagaaacccgtcacaaaaatgcattcataaatcttgttggaccttataaatttaaccgtatttccaaaccgggaaggacgatatttactgagtactaattttcctagtgtgaagaaaaattcctagttccttcactctaatacttcctaaatttttcgacgaatcaatattctaaacaccgctctacatgacgaagcatgtaaaaaaatagtgaaaatgcccaaaatgtatggcgacgccacctacaattgctacccaaaacctaactgccctaaaaactagttaagctatgagtttgagacctaagtacttacttggtaatgtcgagaccaagggtgttgagattttgggtgtcaaatgtaacctctcatgaaaactccagaagcgcctttccaactcgttgacgttctcctaaaagtttgaaaaaaaaatggtaccgagggtgtacgagtctttgagaatgggggtgcacctggagataaccttgatcgcaataggagaaaatagtttaagagctttgttgcagggtcttcagacattcacctaagtttcttggttttctggttcaattttctctctcgggaaatttgggctcaaaaggttaaaatggaaaaagtggtaaccagttgacttttaccccatttatatacgacgtgctcataatcctacagtttagattttcactcagaaaacacaaatatcaaaatttaacggtctgaggataccaaagtttgccattaaatggagtgtaaatgatcgaggcttattaatgatgatattctccttagaagtctcgctgacacgggtccaatagattagcaacatgtgtacttgttatacccattttttggactatttaatgaaaaggttgaattgaatgtcatgtgacatacataataaattctcacaataaatacattgtgggacaagtcgaaaaaatgcaagactcaacctgtgaggtaatctcatctaaataagaatcataaagttcatgaagtgaggtatttcagcattgtcaggatgttatttctataaatattcaacatctcgcaacaaagatcttgtagctgctcgtaatactaggatcttatagctactcatattacaaagaacttgattcacctcgtaatctacagtagtgatgattcacctcgtaatacatagtactgattatttacctcgtaatacatagtagtaatgattcacctcgtaatacacagcaataatgatttacctcgtaatacacagcagtgatgactcacctcgtaatacataataatggtgattcacctcgtaatacacagtagtgatgattcacctcgtaatacacagtagtgatgattcacctcgtaatacacaaagtgatgattcgcctcgtaatacatagcagtgatgatttgcctcgtattatacagcagcagtgcacctgctctcaaataacatgatctggccaagtcaaataccacttcaaagaccactttttttgtattttaatataaagcagttatttgtatttatccaagtattcagttttatgtgaaacgtggacagcaaccacccatcaattgtaacttttcactaagatatgattgagtaaccaccatcctattcctataaacaagggttcactcaaagggaaaagagggaggaaattttaatttacaaaaactttgccaaattgtaaacacaaccaaaactcaaaaataatatggactcgtggagtatgtaaattttaactacaaaatcacgtaaaaatatctagtgttcatttattattttgtctcttattttcttgaattaataatcttcttagattaagttgaaaaaaatcgcgtcaacaatactcaactcatgaaaactgaaaggtctgcaaacattcatgacctattttcatagaactttgaagggcctaagttgtttatggttcagcgcatcacaatgaacctggagggaagctgcaagcctccgtgactctcaagtcctaaaggattggaggataaatattatttatgtttccagataggtgacacatgtacttttaggattttaaaatcaactaaggtgaacccatttataggcccaattaagattgtggcttagcccacgacagagtctaatcacggctctggatcaaacgacaggctagatctaatctctataaagtcatgaatgctttggtctcgaaagggaaactcgcccagagaaggaaagactcagtggaacgtatccagataccctcacagggtaatccagaacattcaattgaagaggtgtccaggtattgtcttacatgtcttacatgtcttacatgctcacctgtcaccatcaactggtactatcccatacggatgacagttacctaacaaactgggcttcacctaactgacccaatatcaatataaaaggggaacttacgaaaatactgtaatataggggaaagcatacaaaaaataatgggacatggagatttttatatttttattgtactaagtttacaaaaatactgtgttaaaattttaaaattacaaaaatactgtgtgtcaataaaataaaaaaagacaactcaaaaataactaagacaactaaaaaattagccctataacaacttaacaaacaacatgaaaacaactatagaataacaaaaagatatctacaaagcaacagaaaaataacaaagcattgaccgaattgcaataagcgaaataatatcaactcctcaatatgtttttgtattgcgatttcttttgtttagttttgacaacttgatttatctttttgtactattacaatttataaaaaaaaaaaaagtaaattttagatgttttgtctaaattgtagatgttttgtgtaaattttcctttatttacaccctataaaagtacataattttattattttactttgtataaaatataaatattatttttttaaagaaaaaaaaaatcttccttcacatgttatcatataaaataaaatttaaaaaaaaaataaaaaaataaaaaagtatataaaatttattaatgtaaaaattaaaataaatatgcattatttgaaaaaaaagatgaaaaataagataaaaatttactaaaatgggacaggtttatgaagaacataatatccatctaagtatgtatatatataataatcaaattaaatggatgaacaaaaaattaatagggaaaaaaagatgaagatatagtaatagtgcaatatgtggttccttttatgtgacaaaaatggttgggggacatgctaatgctatttaaattttaggtagaaaagttttctaccaaaatgatgaaaattgaaccatgagacagcagaggtgagattattgacctataccatatataaatatatacatatttatcattttttttccttttcatgtctatttggaaatgattgcatttagggaagagatggggtacactaaaagagctgtccaatgcctaataaaaatggcaagtcatatatattaatatatgtatatgttttttagtatttgataagtgagttgctcttttttatggttaaaaactaataaacaacacacttatatataatttgaagagaaaattcacttggatcaatctacaatgtgctcaactgtttcatcatgttcttcaatacaaaagtgttgaatatatataaatatatatatatatatgtgatgaacaaagaaattgactcttttatctgagatactttctccctttttcaatcatgatagagatatgcacgtgttatgtgccatgcattatataataaatgcagaaatttgcagaagcatatcatatggtatagggattatttatatacacatttatatatatatatatatatatcagacactagttgagaggatgagcagtaaagagatgagaaagtagtgatcacaatcatgttctcttctggttagaaaagtgaatctcatagcaatcttcttgaaggagaaaacaagatagagaaagatatagaaagaaaataagtttcaaaagatacaattatgttggtgttttgtagagaatggggagattttcttttcccatttaccataattgaagggagtttcccatatgaggacccccatatcataatttcattcttttttagcttattaaaagagagaaagaaaacaacaacaagaagaagaagattaaagaagacatgtatgaagaaagaaaaagattataaaataaatttgggcctaccaccttataaaatgagaggcatcactagtggttgagaaggaagtaaacacacatgatggtgcctaactttatatgatacccctcctactactattgctagtactcaatcacccactcatgcaatcaatctagagtagagtacccatcatcatttgaatttgatataaggcaataaagccattactactcaacaacaaatcataatattacttaaaggaccttcataattctgtgtaggatataatgataaagaggatcttcacaaaattctcatttcaagatttttttttcatttcttttcttttttaaggtctacaatatttatccaaatattatttttaagaattaagagtatccaatgtctgcaaagtctaatcaaggaccactttgtttgtaaccacaaaccccacaataacccaattataaaaaataaaaaataaaaattaagtgagatgatcaaaagagagaaaagataaaaactttgaaagcataaatatattagctgctctgttttcactaaatagtttctgaaaacaccctttttctttcttaattctagttcatctatgcttataaatatgtatatgtattttttctatcaagttgacatggttggtaacaccctcagccaaaaagagctcacttgggacaaagtggtgggtctattgagttttgtttgcaaaagatatgggagctgtctcaagttgggcctaaatgagtaattaagattagcctggcacataatgtaatgcagtaagtagagttttcattttttatcatattttattttctttttgttctttgtgtgagtgtaagtgtaagtgtgagtgagtgagtgagtgttagaagtaatagtcttagctagctagcagagtggagtgtgagcaaactacaagttgtcttctttcgagttggtaatggtcggccatgttggtcatcacataattcattatattatttagagccctttttcagtcttggataaatgttggagcccactttgagccacacagctctttatcaatatttgaaaagaaaaagggaaaaaaaaaaatgtcactatagctatagtatagctgcaacttttcgcttgtaagaaacttatatttagaaaagtaaattagttgtagtaagcaataaagataagagtaatgaagaatgtaatgtatgctttgtttatgaattatttgtcaaccttattaatgtaacttttgtttcattttaagtgtgataaagagagtgatcttgtcttggcatattcttctttcatgcaattttgtttcattttgagtcgaatttcccatgaataccatgcagctaaggttggttctttctacttctcaactacaaatttcattagcataacactgaacaaaacaatcttctgcttcacttataagaataagggctaaagttgttttgttttaagaggaaagcactggacttatcacaaaatcaaagccttgttggcgctgttagtagcgcaaatttgtagctaaccaaatagttcaattctaaaactaagttaagagctttgattggaatgtgtaacaagagtgtatacaagtgatccagaagataacttatttaattttgtatacatagaagcaaaaagaaaaaggcaaatataccgaatggcgattcttcatctgttgttagttaggcagaggaggaggcaaccataaggaaatgttggtcccccatttgttgtttaaaatttcagtttattgttgagcttgaatcatcaaattgggtgcttgaaatgtgattcttgagtggttgtgatcaccttcatatgtcacaactaacatggtaggatcctccaaacacctctccacatgctttcttgcagggcaccccttcaagctgctgcacttgtaatagctcctttggaaaaataatgcataaaattggagagtaagtaaatgccaaagtaacttttaaggcaagaaaactaatacttaaaagacaatcagtgaaactataacagttctaagagatctaaacattagattctttgtacttataatttgttccaatattagacttacaaataagtggacaaaaagggtcttcttttgttatttaaatagcaaagatgaagaaagaaagaaggttttttgtaccttggatatggagatcctttaatgggcttttgaccatatttcctccaagagtagtcatcaggaggtatgtctgctaatttattgctaacagagggaactcgaattctcctccttttcttgagtttcctgtaaagg

SEQ ID NO: 51165 - DNA, 1608 bp, Cannabis sativa
tttggtataatacaagtgtgtaaatatataacttaatttatttatggagttaacaactctacatgggtacatatatacatgatattattattaataaaaactttgtctcttattatatagcacgtacgtactcaattattgtactacctatcttttaataattatgagaaataactttctctctctactcaatgagtcttcttctactaactaaattatagataagggtatatataaaatataatttgggatttggggtaattaattattggttaatcaccacatcatatgtatatatagtgaataattccaccgtcattgacttattgtttggccaaattaatttatttggttctattttttttttttaaatttaagttgctttaaatctaatctcgataatagaaaaatattaaaaagtattagtggtgtgtactgtgtaatattttttttggtattatattattattaatgcaattaagtatcagatcccatcaaatttagataaatactaaggtatttaagatcctcttacgtttcaatatcgttatagacgtaattcgatatcgagtacatataatttaatgtaatcttttagggagtataactaacaattgtaatgtgacatatctagaaggtattagacacaacatgcctgaccctggtcataagcggattaggcctgtgtttaaggcccactagctcagagactcaaaaaaaaaagttttcccccttttaaaattaccattttttttttactaattttgtaaaaaaactatatttttctttaaataaggatttaaaaatattttttttacggcccattaaagttaacgccagtcctactaactaatcatcggacgtcacttttaaatagtgctaaataataaacaccattaatacacaataatatgtcaaaaaagaaaaaaaatatatcataaaaacatgtttaacctaatttatatggtgttttatgtaaataagtaattaataattaaaatgtctttttcaaagaaaattgtatggctctactcaagcttccgcgtttcttgaattccgaggcctatttggatggatatgagtgctcctaattaattattacacacaaaattagttcatcatattgaatttatatacgagaaaagaaatatatgttacttctccaaaataatggtttttagtataattttatttgttttaattagtctttaataatattttttaatttatttttttattttaatcatatgttgtacttatttaagattattatttgtgatttttttaaaaaaatttatataatctataatacaaaaaataaaatttaaataaatttttaccacccgtataaaaaataaaataacatacgtaagaaattattttaattttatttttaatattataaataatttaatttttataatttacaaataattttgaataacttttatcatctttaattataactcaaaaatattacttaaaaataataccattatattcctcaaaacttgttacaagctatacaatataaatttagggtaaatctatagtaggtacatgtgttcttaccctatgctataaggaagtaaattgaaccaataaaaa

SEQ ID NO: 51166 - DNA, 1049 bp, Cannabis sativa
  modified_base (978)..(978): a, c, t, g, unknown or other
tcgttgttgttccatttttaaccaaaaaaaaaaattgtgttggacaaagggatgcacatttggatgggccctgcgggacccgctttcaatgggacccgtctaaatggggaatgagatgcgaataacaatcttattatgttggtttttcagggaattttacagttattcaagcttgagactatagttattatggttaagttggattggtcgcttggaattgatctctttctctattctattgagtctgattatttagctgtaatctctgctttttttaaaagattttgtctttgtaatgattttgattttcttttagatgatatttttaatctactatctaatttttttttaggcattctgattcatgttgttgatcggttaatataattgctcacgaattagctatgcacgcacttaggatggatagtgagctaatttagatagaagatttttcttcttttcttttcaatgtacttaacgctgatttttttcaatgaaattttgttcattgttaaaaaaaaagagaaacacaatcttttcttgatggaatgattttaggtgacatttggtttggtagaaagtaataataatggtaatagtaatagaataagaatagtaatgaaaattaattaaaatatttagtttgttattagaaagaatattagaataaatgataaattgacaaaaaaatattaaagtcattttaattttattttatttagtcttttgtaatgtaatcatcattacatagcttttctaataggaattcccttatatattgtaggaatggtgtcaaaaccgccaaaacttttattttagtttcacttaaaataaaacccaaatttgggcagtacaacccccaaaactaagaacccattagcaatttaatatttctgtccattttaagtattaagtgtctcccttttaagtgttaagtgtcatgttggactagactcagtgtacacgtggcacaatttnattggtccacgtaaaaaattatttaaattctattttagtgtgattaaattaaaaaagaacttcacaataaa

SEQ ID NO: 51167 - DNA, 947 bp, Cannabis sativa
tttgaatattattattttaacattcaaaataataaatatcttatttaataaaatttttattattattttattagtttaaattaatatattggtatatcttaaatctatatacacatataattaaagaaacctaaaaaagagttaatcacatcataattcacttagtgaaggaaaagttcttgctcatgtgttgaggtaaactcaagaacacaaatatagttatatcctgttagcccacactaatctatgtgcgtggtggttgatctaaaagatcaatgtgtgagtttgacatcagcaactcatggatacaacttacgaaaagaatcaaagattccctgattcgctataagagataaataaatcctttcatcttttattttaggtttaatatatgtacatataaagattcttggagtgtggtacaatgatagtctaaataaatgcttccgttgcgtacttaatttaataccacaatacccataaatggtactagagctgattctattatgtatatattttaaatattgtgtgagttttatgcatttatatatatgtgagatatgtatgtgaatgaatacttataatattgtgaatgtctatgagacgatgaattgttaattatatggtaatattgggagtgagttttgcttttaattttctaaaaaattatgtacgccataaaggggcatagcatttttttaatttattttacgaaaataattttacgtaaaagttttacgttgtaatgctcatgatacagagctcgaattcacttggaatcctagttgtacatcaccacgcatgcgagctcgagcccgtgggccatgaccatgcacgaagtcaaccagccactaccttgggtttcgtgccctctccaatgatcttgatcgcatacggaaattgacgggtcagtctcggaattcaaattcattacctgtcatctccat

SEQ ID NO: 51168 - DNA, 1405 bp, Cannabis sativa
gtctcagttcgagtcctggtctaggtcccagttcttgggtccgggtcccatatctcttgtctaagtatggttccctatccaagtccaggtctcggactgagtccaggacccggtcctagtaagagttcatgtcacgggtcttaggtccatgtccgggtccaggtcccggttcgggttctagtccgggttcgggattaggtttgggtttggttttggtccgaggtccgagttctagtcctggtcctagtttgattctaggttcagttctgattccgggttcggatctgtgttcgaataaaaccaagacctaggatccaaaccaggatgggggacctgaacctgggagtgggacttgggccctagaactcagactaggacccgggacctaggacccaaccccagacctagacctagatttcgatatcaatgcgggacctatgacccgaactaagattaagatctagatcaaggatctgggacacgaggcttgggctagatctatagtcggtgtttggatcttggactcggaccaggacctgaacgcgggacctgaaactggaacctgaaccggactggtgccctggaatgggactgggacgaggacccatacccgaatacggacctggacccagaatcgaaacccagacccaaacagggaccgaacctttaacttgaccagaacacggaaggggacttgaactcggaccaagaaccagactctaacgcaggatgggatctatactcagaaccggactagaacccagacctagaccagcacccagtttcagatcaggattgaaacccaagactcgaacttggagctggacctagacccacactgagattagaacccgggactcagacctgggcctagacctggaaccgagacccagacccaaatttggaccaggacttgaacaccaacccggacccaaagtcgtacttggacccagaattagaattgaaactggaaccagaccagggtcagaaccaggatccacacatgggactggaaccggacccaaacccaattccaaaatagactacaaccaagactaggacttgcacctggaacccgggacttaaacccaaactgggagatggacccagactgggacctagactcggacccagactaagactagaccaagacagatataaagaccaggacctgtgacccaggactaaaacccaaactgggaaatggacccggactaggacccagactcggacctagaccaagacacagataaggaccaggacttggaccaggacccagacacagacccagacctaggactcgaacctagatgggtgacctaaacttgggaacagagccccaaaactcatactcggatcggaacacaggactcgggatccaaactttgacctgtactcaaacaca

SEQ ID NO: 51169 - DNA, 1055 bp, Cannabis sativa
actaatctataattttactatattatataagtcaaggaatctacaattaatatatttggttgtctaactgctttctctaacctttatatgcaacatatggatgcaaccgtccatctactgaggaggcgacgccacttctttccattgacatttcctcataagggtatcattctctcaacatatgtctcctctgttatcagcagtgcatggacaaaccacaagggtcccagaaaaaatttcgtttgagaggattatatcttggagtactgcataggtgttcatcaggtatttctttattttagcaagtttttaaagttttaactataattacaagtttattatgtgtaatatttttaatattgcaagtttttcgatagtttatcgatagattgtcgataacgtttcgacagtttgtcataaatccttacacttcctattatctttatgtttgttttatatttatcgacatgatatcgataggatgtcgatatgttatcgataattctagtgcgtctatttctgttcttgttatgataatatatcgataggttatcgatattttatcggtggtttgtcgactttttaattactattaatacttattttacatttgttaaatgttcatctgttctccataattacaaaacaaccaactctatccgagctgggcgggtaatgacttcatttacttcattatgcatctacccacacagaggcactgggtggttgttgaagttgacattgagttgtggaaaatgaatgtgtacgactgtgattccagtatttgtaattggaagaacatggaagtcatcctcaagacctggcaagatctgttaccatcattgatctatgcaaccggagatttcccaaataataatcagatcatggcgttcactatgggcaatatcaaggagctttcgaggttgcatgcagctcgaaccaaccacgacttagctctaaaggcaacattaaggtacatagcgataaaaaagtactgtagtaataaaatttgccttacattgtactaacatcatattttatgttgcgtgtagtgg

SEQ ID NO: 51170 - DNA, 2932 bp, Cannabis sativa
ctcttgtataagatttttcgtcccctctcttgatcttgcctgccactatgtataattacatagtaggcagtaatttacaaaagttgataataatcgttacaacaattttttccttaaatcatgggatttgattacaaatcaagctaagtaaatgaggcttttataattcacacagctgtgagtatcccgcttttatttggccaagatgaacgggtaattaaagatatacgttaaaccttaccccataaggatgcctcgctgagaatagagccaagttaactttgatggcgagcagttgcttgtcatctgacttcccaagattaatattgtttgaactcggataactatattttttagggtcgagatgatcttcctcgcatgcataccatcttctagcgagataaacgcctcgtcgtctgttatcttgactcgccaaactatctacactaagtttgtatatcgtgtaatatacgctaagtatttttagtgttatcgtttctcctccacgtagcgaggttgaggcctcgtcatgcatactttcactcacatggtttctcgtcaatacataaggtagcagtttgtacatttctgtctggcagaaggctattcagccagccgagttataaacatacactgcaaattatgtttccaacgagttgttgcatgccaagtttacttttgtttgcgtgtttgagttcttcgttcttcccagcgcgacacgtgtcttcttttgatgtgcttaccaaatttcgggtataacaattgccccttaaacagttcttttttaattaaaaacagctttttaatgattacaaagggtatttacgtcatgttccacttttttgaaaagacacatatcctcttattatgcggttgtgcggttttgaggtacatcaaaattaatgtccatctttttcacttcaactttgaatcatgtccataggatcaaatctttctctgatctaacgaagcaactatcatgagtataacgtaaaaaaaaaggaaccaccttgacctttgcatcattttctccatttcaaaaagtttgagaaaaacccttaaacttcttcgtcaaggatcaccattaaattcgtccgaagacttgcatgacatccttgtccttgacctttttcctgcgagtttcttctgacttcatcctctcaaagcgatccttgcttcttttgaagatttacagatggcattactaggaattgccccaagccctaacttcaaacagtaagttgctttcttctttctcatgtttgttacattgtggggatcaattacttgatttgtttgtatcgttatcatctcatctggttttggtagttttttaggatttaaaccgttcatactagggttcaggcaatatgtaggttgttttaagatctccaactcattactttttggtttgataaatttctctccaaggattgggactgcttttttgctggtagcaatgtcccactctggttcaggaatttagcctccagaagttttagagtttgagttccctacagaatcagccatcccatataaacccaacccatcaaaacccacctccaaatttgagctaaaccatgctagggttagggaacacatagtgagaacccaacaggaaggcatttctagtcgctacaagcacttcttgcaagaaatatccaaaggcagacgccgattcgtgcgagaagcagcctggccggatgctcccagcgtgtcctttagtcttgtggcaaaacctttttttttatccaacgtcacaattgcttttgaacgaggttacttggattttaaaattatgtctcccaagccacgtacgtctaaaactccctaggatcccagcatcactttcgaggctgagttatagaatcagtgcgatctatctcaggctacacgcgcaagatgctgaaaaacctgtggaattgaacttgggcaatcatgccaagttagatcagtacgaaagggtgagttcagttgtcaccccctgcacactttgctagcagtaaccctgggagcagtggcagtggtgagactgagaccagtaccagtggagtggttcaactagcatgagcatgggtatgggtgcgtgcctggagccttgagcatatcagtgcaggagccacccttcctcttcaagacttctttaaaggctatataaaccatgttggagttgccccagtccagctcactcgcaattcctacaggattcttgcttgttggaaagtcttgtacaaaattatgaactgtgggtgtcccactccagtagagattgagtatctttactcagttaaggtcgttccatcgagaggaagaacattgtagtggctttttctatctcggtactcaccccagtgagcctaaaattattatagacctgccaaataaagtgtcctttaataacaacttcctctggacgtctggtctttcccccatcggcacaaccacgttttgcaagcctcgtaagtgatcgtttgcttattacttatttacatcagtcttcctttttcaagtttatgactaatgttctaacgagacctactcctacccccgagatggttagtaggcataggcgcctaataacccttccatacggttttcggtcatgcaacttccttttgagcgaggttaacttgcgatcggtgggccttcttgctgataaagaatatacttgtgatttcaagattcccaagtattcttcttggcaaaaaattattgttctgcaagaggatcaggtttgggatcgcttggctcaagcacaataccttcaaagtactgcccctcgggaatccagtgaatgaccatcccgaggtaaccaatattgttggtctcctactttacttagagctgagcgtagtaccttagtcacctttgaagactcccgccttatttttatatttggaattctcttcttgtggatcgcattgctcataag

SEQ ID NO: 51171 - DNA, 3876 bp, Cannabis sativa
aacttctcttgcgatttctatttttaacttatttcaaagaaaatttactcttaccttgctttatagagatcatcccttcacgtatagagagtgcgttgactaaataggaggaggggggacaaataggagagagaagataaaaccatccaaaagcaagacaaagacaaattaatttcttttaaagagtcattaggagacaacataaaattaaaatattgatctccgtcttcttatcagtaagcaaacaaaaattctaccacaattatcagggacaaatctttgtttgtatcaatgacaatgagagcacttattgagtacatgtcactctttaagtgacaattaagcatcgtgttaggaaataattaccataatatcatcctcttacatacattgaacccgcctagaaatcatttgctaaagcttggaccaaattacttttgactaaaacatccatgaagcaagctcaattcaggaaacaggtgccccatggcaggatacataatcagacaaagaacaaagtgatgtgaaactgtactgttttatggttatttcgatggaacataaagtcatatcttaggccaagaaacaggaagagttatccaaatgagaaagtgaagaactttaactaattgtgaatttccactttcttttgttttttctttctgtgaggatatttcatcttctattattcttttaaattattccattacagaatcttacccatttatatcattgtaagagtcatcagataaaaagtgaattttacaaagggtacccatttatatcgttgaaggagtcatcagataaaaagtgaattttataaagggttgatatgtattgaaaataaagcttttgggaaaatgaaacctataataacactagaaacaaaagacatcaacaacagattgtggaaacaaaacatacaaagcaaaaagcataaaactataatccaaagaagaaacaagaaccataccatgcgaaacactatccagacagctgtccatgggggaagcaaatcagtgaaacagaacagttagctgcttcctgcactgtatttctcgtcttttaggctacaggatgttacaatcttttgaaaggaatttggacctaagaaaaccaaaattaatattcatctaggtagaaaaaacgaaagagctcagcaatattcctctggtatctaatacaaaaattgcatatagaagcatacagttttagtaaatgctatgagcaaaaacaaaattgtgaataatcttaaatgctaccggtatataataaaactagtaagtatttttcatgtttctactctcattctttgacaaatgaaaacaatcaaattttcaacttctgatttaaggctatgttcctgccaaatgttaaaccacacaatttgtatccattcgactctaattgtgtcttcaaaaccctggacacatgatatagtaatgcaaccaccaattacaccattgctttaacaaatctatttcaatgaaaaagcaacagatatcacaggggctgctgaaaaaacaaaagaagaaactgaagttctcttcttttaataatcaaacaataatagctgaaggaaataaaatgtaagaaagggaaacagagacctccctacaaattttgttatgagctttaggctgcacatattgtctcaaaaatacaaaacttttctgatttagatatctctagttaattatcagcctaaacttattaacaaaccaagtactatagacactgaaggaagaagaatttgcttcaaaagagcgaaaatggacctatgctagactatggtagtggacagtattatcactgtttattccattgtaaataatatgcttcttatcattggcacaattagtataaaagactcatcaaattcttgatcttgggtacaaaaatcatggaattttttcaatgaaaccccattcaatagcttaaatcacaacatactgcacctgactaatctactcagtgaaaattcatgacaactgtgcttgagggtcaccaacaagaattaggaaatacacttgaggcaaatttcaatagaagacgtaccagaattcaacaaaaattccattcatgtaaattgtcatgaaagcaatttcacttgttccaatattataaaagtattcaaatgagcatgcaagaaatatcacaaatgaggtaacatctaaaacaaaacacatatagcacctcgtaattcataatcactacaggagagagaaaccaaacatgagtggcatgaacacaaaaaagtacaaactatgaaatgaatctgtggtctatcaataacattccagtaatttggtaacacaaaataacaatcaacaacattccagtaattaatgaaaattttcttataagaaaattcctcttctgttctgttaatttatgggtagtaaaaatttcaggatttctcgattttatataaatatatatatgctacaaatagatatgtgagtatatgtcagaacacgccctctctttcataatacttaggtcatcttttcatcaccaacaaggcactgcgacagtgttacagtaagccaatattaaataaagaatataaagaattaaaatgagaatgttccgcatagctctcacagctcttttagtgcctaaaagccacttttgctttggtgtgtgaatatttttaatgtgttttctctgtttggaagtatttcatactattcaaaaaaaaacaatagaagttattttaagtcctataaaactttaatatttcaaattctctctgtttcataattaaacaaatcaaactaatcatcttactaattaaagaaacatatcataaatttatataagtcttcatgcattgtctacatccaatataaatttttgctgtttgatatattctattataatatacaaattgtacatttaatttctttcttctatttatttataatagattgtgtggattaaatttgaatattattgtaacaaggattttaaaaattgtacaaaccaattaaacacatcaaaaagccctgtctaaatagtaactaagaatccatttcaaaaagtatcacattcacaagccggcccaatgcaaagcaagttaaaatttaaaacatattgtacgaataaaagcctatcaaaatcaattatcgaaaagaaaaatcagcacaaacaagctactaaatcacaaataaaactggtaaccaaaattagtttagacatgaagaaatgcattcattcaactcaaatcaaatccccaaaatacatccactctatcaacatctacacacgtatacatatatatacacacattgatcaatgctaacattctgaatcgcatcgtcactaaaaacatttcctcaaaccattcattctcaaagcttaatccaaaaaaaataaaaaaaaactagaaacaaaagcaacagaaaatagatagagagagagttaaggtagggtttagtaccaggcagtgacgaccatgtatggctctgtaatttttggagctctgtttctgtgccaccttgcgttttggagaaaaaaatggaaaaatggaagtgaaaaaggcttttgtactctttttgattcttttgcctttttaggtcgaattggcgggattttatgagctattttaggttcaatacgtggacggttgggaggggaacacgtgtccatgatggtgactcattggttttgctacagtgctacgctggtgcatattcattggtggacaagactcgaataaccaacatccaccaatactttcacgacaaaatttaacattttatataaaagggatattggcggctaaaccccccaaacttttgggtttgtgacagttaaccaccaaaactcaaattttggcggctaaactacctgaactccacttccgttttg

SEQ ID NO: 51172 - DNA, 956 bp, Cannabis sativa
  modified_base (845)..(856): a, c, t, g, unknown or other
tttacagtgaatgtataaatatattaatgtacaaaatattgaacatatgttaaacatgatcaaaagtactcaaatacaacaatacaaaataaatatcatatcatgtttatctttaataacataaaaaggtttttgtagtaatgaaactcttacttgataatttttggacatcaaatctcattgtaataattttattgatgataattttatgagcattactattaggcattactacaaggttattttaaaaatagttagtaacattttataaaagttagtatattaaattattcatgacttgatatacttaattatattaatagagatctcacaccttaaatggtattaggtaccattatgcctatagtatttctctaaactcattaattgatctagaacaattaatatagtagcttatacattagccaaatatgttttgactaaaataattgtttgttggtcgagttgcccacttgtatattctgcattttttatgttggaagctatttgatcattgaatctctagtttgtcctccaccccgtttgagcttgttgctcctcatggcatttctgagacatttttctaaaaaaaaaaaataataataataaaatatatgttagagcatcctatatatatgctaatgctagtatatgctttatgatagctaattagaggtaaataaaatagttaaactcttgattttatttttcatcaaatgagctaaacctttctctatttagccataaaattttttaagtattttataatatttgtttataccatttatttttgtctttacattacagaatcattattttattaggataatttcacaaatacacannnnnnnnnnnnaaattacaaaaatacggttttacggaattttaaacatttttatgaattttttgattttatttacagaaaatacggactttttatgttatattcatgttaa

SEQ ID NO: 51173 - DNA, 1549 bp, Cannabis sativa
  modified_base (941)..(951): a, c, t, g, unknown or other
tttggtcagacaatttgtactccgctaagaccctgctgcggagtgtgcactataagtgaattctgcccatctgcattcaaggaggcacctagtccctccaaattttctaagttgaagaaatctgcttcaagaaggaagccctaactaagggagcattcctttgtaatttttgccttgtgtagatgcttctatcattgcagccattttatcatgccttataggaatgttggtatgggagtaatgtaatgtaatttacctgctcttttgttcctcattgcaaagttagaggttgcacgcttggggagatttaacttatttgaacgaacttgcaaattaagtatatattcataggagaaacccttaaagtgcattctagggtgtccatgtccaacaccttaagacataacacatacagttggttggtgcaagtaaattaagtaaatggcatatttcagaaccgatgctaaagtagtctaattggtccaacgacgatattctatcttgtagggtgttcatatgttgtagcaatgctttattcgttataagcatcctgttttctgtttagaatgagtgatgtgaatttatctttaccttgcatggtttgtttttataatttattgaagaatagtataatacttgataaagtataattttagtaaaactaacaaatgaatcattgtataaatttattccattgtatttgttgaataaaccactggtatattgtcgcatttattttagggactatttcacatatacacaaaaacaataaaaaaatcacaaaaataagatttcacgaaattttaaatatttttacgatttttttaattttattttcagaaaatatggtcattttatcttgtactcttgttcatttgttgatttttttgttatttgtatgttatcttttgttattgttttgatattatttaaatgttatnnnnnnnnnnnttttatgtagtttttttttttgttgttttcgtgttatttcaatagaaaattgtaaaaatataaaaaaaaaaaattatttaaacgtaaaaatgtaataattttacaaaaaatagtgtcttatataattattctttttttttttttattgtattcattgatgacattaatttgtggaaattacacaaattacggaaagaaaaaagtgttaagaaaattacgcaaattttcttatgaatcagattactgaaaataaaataacaatagaaataacacacacataaacacaaatttgataacaaattttgatatgtctctaaatctgctgcaaatcttttactaaaatcgagaaaccaaaatacacagtattttacaacacctcacaacccacacaccaattatactcaagaatttttctcacaaaaattctctcaaaaaacttttctctctctaaacttttaactaaagctattattctttttgttttgggcatatacaaatgaaacctatgtgggtttatataggttttggacaaataaaatgactggtagaaattagcctatagttatgcatcttccattactaatttgataacttaggc

SEQ ID NO: 51174 - DNA, 1343 bp, Cannabis sativa
gtttgatgtacacccctaatattttccctttattccattcccaatatcctagttccaattcggtgtgccagattttcttgtttccaaagaaaaatgagatagtcaattttggtagactaaacaaatagtacttttccatttcaataagacagaaaataatagtacttttttattatcattatttaattatttgaattttatgacatataaatgcatgtgtaactgcacctggctactaagacaagaacaagcaacccacacggcattacttggcttggctgtatacataaagagagagcagagttattgaggtgcaaagagaagtaaagggagaaaaaattaatggcggggacttcagagattgataacaaacaaaaatacagtagtagatggtctcttgatggtatgactgctctagtgaccggtggcaccaagggaattgggtataattaagatcttttctccatttttgttatatttcagcttcaaattattattaaatgaattgtgggtttaattgttaggcatgctatagttgaagaattgtgtggattaggggcaaaagtacatacatgttccagaaaccaaagtgagctgagtgaatgcttgagtcagtgggagactaagggatttcaagtcactggttcagtctgtgatgtcatgaccccatcacagcgtcaacacctaataagtaaggtcttctctttgtttgatggaaagctcaacatccttgtaagtcacatatatctaactatttttttttttgtatttattttgtttattgtacatcttaaaattccacaaatcaaattcaattcaatttaatgtgcaatccaatattataattagattgattatctaatatttattaaggttaattagtaatttttttccctgaacttcgacatgtactaaattatgtcctttgaatttttttgagtgttaaaaatttttcccgaactattgagattgttaaatttaaggacttttatctaatttcattcaattttactgtttcgtgattgtttatatactaaaccatgtttcctagactttgatatctactatcatgccctaaaaccatgtcctaaaactttgatatgtattaaatcatgtcccttgaactttcatccatgttagaatctttttactaaaattagacaaacgtccttaaatttaacaatctcaatagttggggggaatttttaactatcaaaaaagtttagggaatacgattgaaatttttacatgaaaaatccattttgcacaatttattacctaaatacctctacacgcctatgtctacatttttacttacaaagttggttttattacacaaatac

SEQ ID NO: 51175 - DNA, 629 bp, Cannabis sativa
atatatattcattatctctaatctcaaatccctatcttattatgactatcattattcatcaagtagtgtgtgctatatatctccatataatattatgtggaaggaacaaccataaaaacaaaccccaatacactaacatctccctctctttctctttctctcaactcacaaaaacagagaaagagatatatttatgtatctagctagagatgtataataaagcaaggcctaatagtaatacttctacactaatatacttagtgttgcccataatacctttgcttggtatttttgttctgtttttcaccacaaccaacaccaacaattcattattattaacatcatcttctccttcttcttcttcttcatcttcatcttcatatattcttattgataataatgattctattatatatgatgagaatgatcatcataatccatggcaacctcaactactcatatcatcatcatcatcatcagcagcagcacaagctccactacaacaagtagtactcaccaccaccatatctcttcctcctgcttctgcttctgcaccagctccacaattaatggtacttacttctctctattacttattaactctttaccactttcttaacctctaaaac

SEQ ID NO: 51176 - DNA, 1067 bp, Cannabis sativa
gacctttcggatgtggtttttgggtctactctcatgctctctcttatcatttctcaaccaattctttgcttatcgtacagagccacttatcataacccaaataacagttcaagtggctgctcttcccattggcaaatttcttgccaaggcacttcccaacactcgttttcgagtgttgggattgggggagagacggttctccctcaacccgggcccgtttaacatgaaagagcacgtgctcatttccatatttgctaatgctgggagtgcttttgggtctggttctacttatgcagttgggattgttaatattattaaggctttttatggaaggaatatctcttttcttgctagttggattctcattatcaccactcaggtaataataataatattaacattctttctttttatttatttattcatttcttttggcaaaaattaattgatgggtctaatttcattaacacttaagtgggttattagatacaattaatatatgtgtttgattcttcatgtttcatgctttagattctttctttttattattattattgttagttttaatagttatacatgtttaatgcttcatgcttcaatagattttttgttaggaaaatctgaagtttttttttttaatatctgaattaaacaatttttttattattattttaatttaaaaataaattattaatttattcttattcaaagtaaatataatatatataaaaaaagaagaataatgatgtgatgaagggaaaagagatatttgccaaccatgaattattgaagagttgaaattatgtaatcatgccaaagccttctcataattggtgatcagaaattttatgtttatcaatatctaaatatgtatacgtgtaaagggttgaaattgaattgagatcaaataagaactaaaagaaaaaggtgagtacactaactatcaatttttctctatttatatatttattaatttatagttatagtatctaaagtttattaatttaacaacaaaatcattgagtttctaacattctaatatgaaagtccttagttaaaaattcctt

SEQ ID NO: 51177 - DNA, 966 bp, Cannabis sativa
aattttatatattatttacaatatttcttaatttttattttaaaagaaacatatattattttataattctcattatcattatttaaagtggtacaacttgttataagaataaatatgtatcttatcccttaaattgtaatccaaaaaacggtgtttctgaactattaataataataaatatttccccaaaattattctcattttttgtcctacatgattaagaaaaagtttttttttaaaaaaaaaaaaaagaaagactttttattaattcaaatatgagtacatgagagttttaagttctaccagagtattagactcagaaaaattacaattagagaagtatcgagagctacccaatgagctacttgatttgctgatcgtttgagaaaaaataacttaacattaatcagagaggaaagcaaagtttgacaatcctgtatgagaagtccaaagacagaagacatggaagtattactttgaattgcctaaacagtaaacatactgtctgtttcaagtgttgctccttgccaatcattgttttttatccaactaagggcttctttcaccctggcttcagccacctccaccaacggggcacctagaaagcaagaactcttgctccttattaatttgcctgtatcatctctagccacaattctaaagccatacataccatcatcctcaaacattgcagcgttaacattcattttgattgtattggtttcaggtttagtccaatgctcaccgacgtcacaagaagaagcaaagttaagtgacaacaaagaagaaaaacattgagctttcttccattgatcaaaacaggtagatgccaaagttacaacatgggaggcaaatgatgttttgttgttccaaactttattgttccttgactttcatagtgcccagtatcacaggctcaccttttcaggtagtagaacacctgtgcgacaccttgacttctctaag

SEQ ID NO: 51178 - DNA, 903 bp, Cannabis sativa
atgtatacgtatggacacaattttgccttacttttacagaatgtatttcgtgatttacaacagtctttaatttgagagttaggattaatctaaaagtaattagaattaaaaaataacaacgtatcatgagacccatctaatataccacagaatacattccgtaaaagtacatcaaacaaaattcaataatatatatttgatgaaacacgtatttttatgcatatagagatatagatatatgaagtatttttcaatgatgggcatcaaacgtattcacacgccgaaagtcaaaaagcaggacacgcgttggaatatttccacattccaaaaatgaatcaaaacaaaaataatacaaaagcctaactaactactcttcatcaactttttatgtaattttaacaaatttaaacatgtctttaattcacacaatatatatctctctatatagttttaatgttaccataatttctaaatacttatcttccaaaaataacccatatgcttatttctaccctaactatctctaattaagaaaatcacattattaatgtaactaattacgagattattaaaatagaatcagaaaatgattgactagctagctattacacaataatagctagtaattctttcctatcattatttatttatatatttcatataatctatgtatggatatatgttttttttatttttcataacaatctctattatagttaccactacaagaaatattacttttaccaatacagttcgctattgcgctggtaaaagtaacttttaccagcatatttcacaaactgtgctgtcaaagaggccaaagttttaccagtatacatttgcagtggctaaatctaacttttaccacgcatttacgcattaggaaaagtcatttttgccagc

SEQ ID NO: 51179 - DNA, 996 bp, Cannabis sativa
atggaagttgaagttgccgcctaaagttaagcattttgcttggaagttggccaattcatggttgccaacacattctaatcttgtcactaggaaggttatgacgaatcctacatgccatcgttgttcgaatggggtaagggagaatatttttcatgcgttgtgggattgctcggctaataaagggatatggaagttaagtagttttaaagctgaaattcagcggaagggaggcgaggatgtacttgcttttcttatgcgattggcgagaggtatgaatcaagattcctatgaattttttctggttttgtgttggcaagtttggtatcttaggaatagcacaaaacatggtggaaggcttccccaaccggctgaggttgtggaatggtgtggccagtatcttttagaatataagcagccggtgttggagcagggaaggcagggtcagcggcagcgagttcagcagagtaggtggactcctcctcgacaaggtgatgtgaagatcaatgttgacggaggtgtgaggaagggcgggggctgttcgagtgttggctgtgttgttcgagaggcaagtggtagctgcgtttttgcttcggctactgttctaccgtgtgaagcttctcctctccgtgttgaacttcaagctattcagcttgggttgcaaactggtatacagaggcggtttaatcgatttagtgttgagtccgattgtcgggaggctatccatttaatccatagtaaggaggaggcctgtagggacatcgatggaatgctaaataacattagggacttgatgttagatgcttcggttgttgggatttcctttgtatatcgagaggcaaatgaggttgcaaatgtattagccaattacgctttgattaacaaagtgagagctatgtgggttggggttgatcccccttgtgcaaggcttgctctgatgcaagacttgccaaatcctttgtaatgttgctgttatgaatgaagtttattttcaaaaaa

SEQ ID NO: 51180 - DNA, 943 bp, Cannabis sativa
gaaaaggttttgcaaatagttgtttgtgaaatctcccattgaaattactaaaccatatagtgattggatgcgtgctaatttgttcaaacataatcggtatactattggtgctaagtggcttagtcccaatagagcattccctttgtcagaaagcagtggtagttcggttgctgccactaggaatacaatcatgatagaatttaatggaatgttgactgggggaagaaaggtgggattctaattgatttgggggtagtaattcggggaggtaatttgggtgaaggtgaagatactcgctactctaatatatctaatccatagaagaatattaatgaaaggggaaaaggtcatgctgttatggaatatggagagaatatgagacgaaatgagaatgttaaaaaaattggcattgtaattgtggagtccaaaaggaggagaactgacggagatacattagatgagaatgaggctaaggaaattgatttgggccagattaagcaagggttgtcaaaaagcttgcagtccatgggccttagtgtaatggtgcacctacaaccatgagtgttttaagttggaactgctttggaaacccttgggcttttcaatttttattggaccttattgtccaaaagaaatcaaactttatttttcttttttgtgtgaagcttggtgtaagcgtgatagagtggatagtcttaaacgacagatacattttgaagggtgttttgtagttgaatctcaaaataagaggggtggtttagcaatggtctagaaagaaaatgatgaggtttcatttttgggtttctattcttctcatatcgatatctatctctaattaaattagaaggggtcgcatttggagattgattagtttatcgttttaaaacctggaaactaattcgtgagttagctgttaatggtgtcagtccttggtgtgttatcg

SEQ ID NO: 51181 - DNA, 1510 bp, Cannabis sativa
  modified_base (1407)..(1407): a, c, t, g, unknown or other
catttcaacctaaatacaacttaaatcaactacacttaataaataaattacatacccattattttttttcaaggatgatgttggtagggatgttaggttgctcctatacacttggttgtcaagctaggacttggcaaaagggtgctccaacaagggtgtgtgtgtgggtgactttgtagagagagagagagagagagagaggagacgagacgagatggagagggagaagataggggaggaagggtttagttttattattagaggggtaaatttgatactaaaaaattagggtagtatattttgtctcatgctttgtacggtggtatgttatgagaccatgcacaatgtttaagcatggtatatcgaatttcccttacagaattataaataaatagaaaaccgaaatctaaaagtgctaagaagccaaaaattttgaaacaaccaccagagaatacttttgaaattgattggtggttctagtcggtactgaggccaaaaatccaaattcctggaggtattttcaaattgattcttctccattcaaatctctattgtattcttgtcttgtgtttttaagaataggaagatttttgcttggatctgcaactagatttggtctgtgctcggcgactcgtcgacacaaggtttgtctttttctagtctcacattcttctttttctatcgttactttttttatttaagttatatgtgtaacaattataaatattaaaagagttttaccgcaaatatctctaaattataccgttatatatgtagaaaaaaaaaataatttacgatttctctacatactaataagaaatgcttcaataataatgacaaaataatgctctcacttaaagtttttccctgattggtaacaaaatatgtatacgtattaaattctttagaatatagagaagataattggaattttacaaattttaaatttcttgagaaagagacattacaaatgcatgtgaacctccaaacgaaaccgttaaatcagttacccagatatcatgccattgctttagggattggacttcttttctttctttcttaatttttttggaaatgttagggattggaattctcttcagtcaaatcaactaaaataatggtttaataatataaattaccatactttcttgccgattaagtggtttaaaatgatgtaagcatgtaaatgtgtctgaacaaaaaaaaaagtaaagtaaatgtgaaactatatattactttccaattttcctatttcaaatgttatacaaacaagaaaggatacattattagaaaattctataatgcattttttagaagaatacatcgatacatttttatttgttttaatatacgaaataatttttagtcaaatttttttcatagtcatgtaaattatagttatttaanacattctgtaaaattttaagaaattcgaaaatttttaacataccgaaaattacgttcaaacagtgtgttgtacgtgtgactattttattttatacgtgtgtaa

SEQ ID NO: 51182 - DNA, 1222 bp, Cannabis sativa
ctagagtggcaaaggtcaaaaattctgatttggaagtgaccccattatggctactgtgttggtttaattttctttcaataaaataccttacttatatataaaaaaaaaaaaaaaaagtatttacaacaaatatctttaaaatatacaaaaatatgattactcatgaattataaacaaaatatttcacataaataatgttaaacatacaattattaactctatgatatactcactctttgctcggaactattagtatttggtaacgagggggtggtcggtcccactttgatgattttatttttgtgttttatttttgttttactttttgatactgtaaatttgtaattacaacccaaagtatcttcttgttcttcattttattatattccatttctatttttttttttcaatgaagaagaaaaataaagattaaaagaaaaaggtgatatggttgaaatataataacatattttgataaattgatcatgatgaaaaaggtcacaatctcttgttgtggggtgaattttgaaatgtactttcaataataattaaattgaaaagcttaagaaaatagtgtgttttgaagtaaagaaatgttggcctttatttcacttcaccccaattcccaagttaatagaaaaggtcaacatttcttcgaatcaagctcactcacacactacaaattaataaattaataaaaattaacaacaaaatcaaatccttggtttggccgtaccaaaattacaaacttcatttttcaattatttccgcttttgggccacattttacacctaaagcccaaaacatgttcaaattatttggtaggcaaatattttaattatgatattttattggctaaatataatgtgtttcgtaaaagtatcaattagatattttattttgctaaatataaaatggagcttataatttctaaaatggtaaaaatagaatcttgagctcacttttaataatttcattttttaatataatcaactttaagacaatttctaacaggaacggatacaaaaaatgtaactagttttgtcataacatttctagattagagtattattgagatttattttgacaaaaaatcagttcaggatcatatttgtacaattttaaaaaatataagatctatttttccatttaacaaaatatactgtcaaattaataaattttgcaaaacacaacatccaaataacatttaacctattttatt

SEQ ID NO: 51183 - DNA, 1892 bp, Cannabis sativa
ctaaacaaaagaagctgccatttaactcaaatcgtaattttgctaatgcaccttttgatttaattcatatggcatttggggaccatttcacatcacaaatattgaaggatatcaaaatattttctcaccattgtggatgatcatagtaaattttcttaggtttacatgttgaaatccaaatttgatgttcaataattcattccccaattttacagtttagtgcatacctaatattctatcaacattaaagcaattaggtttgacaatgctaaagagttaaacatgtaccccttctatgcttaaaagggtattcaaacttacaactcatgtgtcgaatcacctcaacaaaattttgtagttgagagaaaactccaacacaaattaaatgtaggttgggcattggcttttcaatctacccttgcattagtctactgtcttttttttttaatacaaactgctgtatcttttatcaacaagactcccacacctagctaaaacacaaaacatcttttgaacttcaacataacaaacaatttgcatatgaccatttaaggactgttggttgccttgcctatgtatcatctttagtcagtaaaagacataaattttctcctagagcacatggtttcatgttcattgattactctaatggtatgaaagcttacacgctaatagacattgctagtgataccattttccattctagaaatgttattatttaagaaaacattttcctcctataaggctctgctaacttacctatcctaaaaaaagttttctttcctctcatgcctacaacaacttcaaataaaaatgcagatcctcctcatacaccagttgtcatccccaaggatccaccatcaccttcaacatcagtgtctattgctaaaaaaaatccatttctcaaactaccaaggcaggtagacacatctctaaaccaagtcactaaaagactttgtgtgccacactttcactgcacatccccgagacaaatatcttaaacatgacagattacattctagttttcgaaatgtaattttacaagcatatattgaactagagacaacttcatataaccaagcctcaaaactgtctcaatggctaaaagctacagacaatgagttttttgcccttaaacaaaacaacacttgtactgttgtgtcattaccttctggttgccatgctattggcaacaaatgagtttataaaattaaatataacttcaaaggtaaagttgacagatacaagacacacttatttgtaaaagggtacactcaacaacatgacattgattgtcttgagacctttcacatgttgcaaagtttaatactctcaaaattttcattgcactagctgctataaataactggtcactacaccatatggatatcaacaatatttttttttcatggtaacttagatgaacaagtcctcatgtcaatccctaaaggctatgtacacgagggggagcttcccccaaatgttgtttataaattaaacaaaatcctctatggtttaaaacaatcttttaggtaatggtttgccaaactaagcaataccctacttaactatgactttactcaatctcctaatgaccattcactttttatcaggtcctctcctaaggcttttcttgcactcctagtctatgtcaatgacatagttattgcaagcaacaataatttggatgcttctgtattcaaaatattcttaaactctaaatttcagcttaaggatcttggacctctgcgattttttcttggattagaaattgctcggtctaaactagatatatctattttctaaaaataattcatccttcaagtactcactgaaactggctcacttgaagtcaaagttgtctccactccaatggaagccaatatattact

SEQ ID NO: 51184 - DNA, 1113 bp, Cannabis sativa
tattttgttaaatgacaaatcagagccggtaaaagatggtataaaataatacccgaactcaatttttttttcttttttaatataacttaatcgaagcgaatataaccagtcttatcataacacatcctctcaagttattaagttttactttggcaaaaatcgagctcggtgtaccattttgtactattttgaaaattataagacctgaattgtcgtttaacaaaatagaagatcaaatcaacaattttagaaaataatatttcccttttttccttcctcttttcatagattaaaacaaaaagggggctaaaacctctagcattgggatgcctcattacaagtaatcaatccataattcaaccaaatccaaactcaaaactcagaagaactcaaaaaccaaaatcaaaatcacaacaaactaaagccagaaagatatattctttttaccaaatagggctcgatggaatcgaatccaagaacaacatcacccaattttccttcaaaattcaaagataaacaaatcaacaagaaattaaatatataacaatcaaaaatgtgaaattaacgtattgggtatgagaaagtaaccatctttatcaggaacagagagggaggtgattgtgcagccatagttggtgaccaaaacacacatatttccattgttgagttcaaagatttgagctttattgttgggatcagccattggaattgaatttttgggagaaaatgataaatgtgttaagggaaaccaaaagaaaaaggtggtaagcgatatgagtgtgagagagcttagtaagaccacaatggatgcgaggtttctgggttttgtgacaagtggcatctaagctagtaaactacactaaaacacttttattattataaagggttcttataagacaaataaaattatagtctaattggttttttattttttgaaataaaatataattttgagggatacttttgtaatctaattttattggtgagatgtatttacaatgaaagaacttgtatttgagatattatagagtgtattaaaaagagagatattagaaagtgtattaatcttttgggaagaatgttagaattattattgtggactaaagatcggaa

SEQ ID NO: 51185 - DNA, 929 bp, Cannabis sativa
ttgttgtttttatgtttttgtgaaataatccctaatttaaaggggtattatattaacaccccaaaatttttattaagacaattcatatattgtttgaataaataatgtatttttttccactaaattttagctgaaaaaggaaatcatgtctttaaactaaattttgaatattccatacgtttatccatattgaaaaaaaataataaataaatgaaaaataattcttataggtgctacaaaccaaatctagtagagtatttatatgtacttctttttgaatttttttaagaataattttgttggaaaatagggtggaaatttggagtttttttttttgaaaataggcaagtctcgctgaatagcaagccttgcactagggggagtaatcccaatccacatagctctcactttgttaatcaaagcgtaattggctaatacatgtgctacctcacttgcctctctatacacaaaagaaatgcctactactgagtcatgtaacatcaattccctaatgcaatttagtatcccatcaacatccctgcagccatcctccttagtatggattaaatggatggcttcttggcaatcagattcaatactaaatcgttgtagacgcctttgtaaaccaatttgcaagccattttgaatggccagtagctccacatggagcggtgagtactcctttggcaaaattgtagcagaagcaaaagtacactgccccctccatcccttattacacagctaagactcgatctctcccctccttgcttcactcccgcatcaacattcagtttcattttagattgtggagattgcacccaccgagccttctgcctcctatcgcagttgttcccttcacttctcggcccccaaaactccatcaaatactggacactccagtccacaactttagcagcttgtggcactct

SEQ ID NO: 51186 - DNA, 1767 bp, Cannabis sativa
  modified_base (1132)..(1156): a, c, t, g, unknown or other
tttttataatttatcatctttgttatattttagatgaattctggtgaaaagtaagaggctctttggttccataattttaaattattttctgtttttaaaattgaaaataatttttaaaaactaatagaggtagtttggaattttttttaaaaaacatttttttaaaattgagttttaaaaaactagaaaacagaaaacatcaaaatgttatttttcaatttttaaaaatatattttttttttgtctaacatattatattttatagttttgcttgcatactcagatcctagacccgaaaccatacccgaactcgaacccgaatgggttcatgtcatgatatggtcttaaaatattaattttttttagtaaaaaaaaatctaaaatagttttaaaaaatttgtgacaaacaccattaaatttttaaaatgacaaaatattgttttctattctcacttttaaaaatacaattttaaaaactaaaaactgaaaacacagccaaacaagctctaagtgtgcaaacgaaatttttttgaccggtgtctaaagcagaataaggggagaatggggcctgcgggaagattaaaataatgggaaatttacagcataaatactttatgtttttgattttatacacttaaatacaagactttttttagcggattaaatactaaatgttagttttcatctatttatattactacaattatgtaaaatgctaactgtgattattaaaatgacacatgttaatatataattagtccaacctcatgtataattaaaatttatataatctaatttaaaataataaaaagataattcaaaaatatttaatctgtttctaaaaaataaacattaaataaataagtaatcacccttacaaaaaatcttatttttagtcacaacaaaatttgtgactaaaagtgaaaaattgtgactaattataagtcatgattcctatgttgtgactaaaaggtccgtgggtaaaagtattagtcacaaaaattacaatttattgtaactaaatgtatttttagtcacaatactagttgtgactaaaattaattaaattattgacaacttgtaattaaatactatgttttagtcacatgtaacattttgttgtgactaaaannnnnnnnnnnnnnnnnnnnnnnnntgttgtgactaaaaagttatcactaaaagtagcagattttggtattgtaaatcttccatcacattctctctcttccactctactcttaatgaaaatccactccaccaaatctgggagtggtgccatcttcggcttaaccaggttcgtctccttcctccctctttctctctctccttcatctgccaaacctggtgccatctccgacgatcctcgcaatttggcggatccctagaaaagttctcgcaattgtcgcgggatagagactctgaaccaacgaccaaacacccttcttctctctcgtcccagccccaatcgtctcctcccttcctctttctctctctcctccatctgccaaaccaggtgccatctccgacgatcgtcgcaattcgacagatccctaaattcgttctcgcaattgtcacgacatagagactctgaaccaatgacccaacaccctccttctctctcgtcccagccccaattgcccaaacccagccctagcccaccgcagttccgacggggacaaccccagcgacacccccgagtactcccctctctctctctctctcatttacaccctccttctttgttcatctcatcctctatatgct

SEQ ID NO: 51187 - DNA, 1091 bp, Cannabis sativa
aaaattctctaggatagtatatatatctaagttgggatacaaagtgattcttgtaataataattaagataagagttggtgccatggaaaaaacgagggctaagaacgtggggaaatcgaaagcttcaactaagaaaatcaagaaaaagggtccaacgtcaactacggatgctaagaaaatgaagtccatagatgaggtgcttggagtcaaacccatggaattcacggatgaggaagatggtgagggcgattcggacccattgcgtgatctgtttcaaccaccactatcaccaaaatcttctttgcaatcgatcatacaacgagaagaggtagctattgattttggtcactttctttctgcaaacaagaagtgccaagattctatcttaaaaggacaaaagactactccaccaatactcagatcagggactgtgatgaggaacctggaatcctcctttgctgatcagagtatggagaagaaggtcagaataaccttggaggatatagaagcagaagttgcttattggaaatcagccattgtttgctatgtcttaggtgctaatccacctctctcgatccttgaaggctttgctcgaagaatttagaaggacaaagtggataaaataggtatgatatcttatggtattttcattatcagatttactagtagtgagatcagggacgaagtgttagccggggggtacatacgtccagttattatgaaagcatgggatccaaattttaacctaaaaaaggaggatatttgaatagttccaatcttgatttagcttgaagatttggaattgaagtattggggtcaaaggtctcttttcaagataataggtcagctagggaagcctcttatgatggatgaggttacaaagggcagagataagcttgcttgcccgagggtgttaatcgaggtttccatgaatcaggatttttttaatatgattcattttgagaatgaacatgggaatgatatttcggtcgggtagaattatgggtggaaaccataatttgtaagcattacaaaggagtgggtcacaaagtggaagattgcaggaaaaaagtgttggaaatttattttac

SEQ ID NO: 51188 - DNA, 2416 bp, Cannabis sativa
atgcttgttaattaacacgaaaataaaaaaaaataccagatcggggactgaaagaaaaagtactttagagattcctaaagaaacacaatccactagagtccctgcaaaacataaaaagatttttagaacaataactacttcgcaagattccaactttttacttagcactggaaaattatcacatacaaaaaacaactaaactcattgttctaattatagaatattaaatactcaaattaattatgatggtgatggcatttagtttggtactttttgccacaaatatattattgggcacttagacttatttgtcacaaacagatctaatggtaccaaattgtactaaaacagaaacgaaaggtaacttttataaaagtaataagcattttcatcacaaacatcttctttaaagatccatgaaacagagcatcacttaatgaaaacaaaccatccttttcaaaaaaaaaaaaaatgaaaacaaaccagaaactgaaatagttgttgctccttcaatatttactctcttcacaactagaggatgaccatatgtgcaatgtcttacagctgatctttctctgtatattatacaatatacacacacacgcaagtaaatagtggtcatgagctagaagaatgagttcggtttaccaacatggtcctgtgctatatatgaaaattaatataacttacgagtcaggtgcacaaacttgaacaacatagcgactagtggagactagaacatgaaccagagctagcaatccccgggcgccaatgccgtcgtcattcgtaaccatgatcaccggcctattaccggagatcaaaccgccattttccatatttttccagctgaagaagaagaagaatttaacaaaagtagtaaaataaagatgctttataaatatatgtacacgacctcagcccattggctttttatgttctttgatgcaaccataaatctgattcattacatatatagaacacgtatgagtctatgaccattaatttcgacgttggttggaagatgcttcgaatttcatagtaagatgacattaattgtggataagtttgctatccgaagaaaacacataaaaatttcttatctatgttttgtttatgggaaagacaagggtcatcttccaattactttttcatgtattttttaaatgaatttattattgttagtttttctataagtacccaatgataatgtctaagggaggattagaccatctctaatggaagatctaaaatttgtgctaaatttgtcacaaaaaataagtttgtactatattttgcctattatttataattgtgctccaatacacaaaatgtaaaataaagaaaaattaattgattatattaatggttatttcatattttaatatgcaaaacttattattttttattcttttattatttaaataatagtaatatagtaaataaagtttagtaaaagtcgatatcataataattagtgacattatagtaaataaaaaagtagcatttattgtgggctaaatttggcacaatgctatattttatgccaaatttggcacaacttttagcatgtgtcaaatttagcacacgttttagaacaccattggagtattatttttcttaaatgtgctaaaatataacaatacaccacctttttgacactattgaaaatgatcttataaaaacactactgtgtgattagcacagcaatcatggttcaataaaatgtcaaacaactttaaggcaacctccgagtaacttttcaatatttcacctatctattaagttcccaatagtagaaggcattggttgtatcctcgattaaacaaagaatgacccgctcgtcagcaagttttaaattttcaacatgatggtggcaaaggtgatgattaacgatggaacgtcatcaaatatcctgattgaacaaaccttggaaagaattggtttgtctttcaaggatctggagccatgcaagcagctcatgtatggttttggcgaagttgacgtcgctgtctgtgataaaatcagattaccactaatagtcaaaacttccctgaggctaagcatcactacaactaccttcatagtggtcaacatcaagtctccatacaatgtaatgatcagaaggtcaacactctatgacttccaatccatctaatctatccaccacatgtttatcatgttcctgacagcaactggtatcgactgtctccttggcaactaaagagtagcacgcgaatattacaacatatcgttgacattcgccaagaagacctcctttactattgagacacttgaggagacgaagaaggcctctttcgttgtgaatacagacaaagggatgatgaagacctctatggttatgaccagagaaaaaatagagaccgcacctacgatcgcttcaaggtgtgcccaaggc

SEQ ID NO: 51189 - DNA, 1213 bp, Cannabis sativa
  modified_base (851)..(851): a, c, t, g, unknown or other
acattataaaacacataattaataattatggttataaaattatacaagtacacaataataattctaacccctataaaaaatggtgaaattgaaattgaagttaggaagaattatatcacttcaattctttggtgaaaatatcagaaattgcaatgataatgacatatgtaataatacattaaacccaactccctttgtttattaaaagggcttatatattatgtgtaggcttaggagaaattagtataccattatttaaatattgttttcttgattatgatttgcttgacttggatgttcattctagaaaattagactgaattattaaaatagaagtggaaagcagtcgaaaataatatatatgctggtaggaatatgtcagtgtaattaaacaaaagatatctagtcctagatctttattcgaattcttcctcatatataatgcttaattaagaagaagaacaacaatatcgatctcaatatctatccaattaaatctcatagattatatatggcactgttgtttggctgtggggctacgtggttaggttcttatttgacttattattcctatgaactttaaccaattatttataataatatatgggtaaatatcattttaaatattatatttttgtaaaagttatcaattaaaatttttgtcttattaaataataaaataaactttatattttttaaaatagtaaaaataggacactgttcaattttcaacgattttactttttaatataaatcaactttcagacaatttataacacgaacaaatacagaaaatataatcagttttgtcacgttatctctagattgaattattattaagttttattttnataaaaaatcagttcagggtcctatttgtacagttttagaaaatacagagtatattttatcatttaacaaaacagaaggtccaattaataacttttgtaaaacataaggtccaaaataatatttacccataatataataattgttgaactgattagatgcattgcatgtgtattttgtaatagaccttctacgtcaagcatgcacttaatcagggacttatcatgtatgcaattcagtgtatttcagtgtcttttcaaatctttctaaaaattgaaatctttactataaaatttaggctaattagcaattttccccccttcccccgaactttgacatatactaaattatgccccctgaactt

SEQ ID NO: 51190 - DNA, 731 bp, Cannabis sativa
aataattttcttaaaggtatttttataaataaaatcaattttaagtatattattgaaaaaccccctttatttttctacaagtattttttttgtatatatatttgtatttcttcccatgtatatttacaaataaaatttgagaggcgtttaacaatttccttacaaaaaattaataaaattattcacgattcaacaataaagattctttaaattaaaaaatttataggaaaacgaaacaaaaaaaacgaaaaaagaagtctcactaaataggaattttaatgacctattaagtgttaagccatttttagaggctattaagccatattttgtgttttttttttttttgtgaaaaatataatttttatcaaacctgttgttaatacgttgaagattaatgtcgattctgtcattttttaagagaatggaacttatagcttcgcggggataattagagacgaaattggtgcgttggtggaggcgtttagctgttgtcgttcaggggtgttgcagcccgaaatggtagaagccttgggtgttaaggaggcgcggagttggattacggcaaatgagtggaaggaggttgtcattgaaacttatagtcttacagtggtgcaagcgttacgcagttctcttcctatggttttatactttgaaagtgttatttttgattgtaagatgatgttaaatgatttgagagatgtttatgtcaattttattagacgttctgcaaa

SEQ ID NO: 51191 - DNA, 865 bp, Cannabis sativa
gcctagtgttctcattagtttcataaaaaaaaaaaaaaaaacaattgtttttatagttagggcttatgaatttatggttgtattaacatttttgttcagtgaatttgttgaaaattgttaatacatttattaaaatagttgcaaattgacattaaattcttacagcagtaaaagaaatgtgtcaagtgaacaaatttattgttcaagatgactatgtagattagtctataattttgcttattcagcacatattttagtgtatttgacacaattgttttagttcacttggtagtactaaaataaaacatgtgtagttgactacaccatattcaaaacctaaattcttattgtgctatgtaaaatatcaaaactaaataacattgatttaagaaagaactggtcgggttcattcctttatgtatttataataataataaaatgtcaaaattattggcactcgtacaagtcctagatgatataatcacacttatttgtttgttaattagtctccttagaatcgaatgtgtcccccgttcatacaactagacaacttactccaaaactaatttcagggaaatgttaagggcttgttcgtgtaaataaatgggctttcgcctcacttatcttgcaaataaaatggcccaaagattgtggtatatttgtagaaggggattttttatggggttatggatttttttttttatatatttatatgggcttttttatgccaattacactacatacacagaaatttttaacttttttacgtggaattttattcaaaaatactgtattttttttatagaaatactgtgtaagttttatactgtgtactgtgttaagttttcattattgttctacggtt

SEQ ID NO: 51192 - DNA, 636 bp, Cannabis sativa
attttttattatttttctgtttctatagaaaaagcttaaaataatgtaataagctgtctggcataatgcatatattaattactaactaatttatgttacgtaccctaaatatatatttttataggcttttagataaaatagaaataataatttgcatggcctcatttagtggctttcgtgcctagatattagcctcttaacaatattatcattgtttttccaataaataaaaaccacatgaatgcatgcattatcatgagtgagggagacactcgtggttttacacaatatctcaaatctcaattattcaatggaacacaacacaacacaatcctttgattattataatcataattatttagctaaataataataataataataataataataataacacggaaaaaagaaaaacaaacgaaattattaggtggcgctatccgagtaatgcagatgctccaaaaagtattgtgcatctcgacaagtttcatgcttatttggattgaaaaacttcaattattaatttttttttttttgaaaggggtaaaaaaggttggaaaggaagttttttttttcttaaataaaaaaaaaagtacttaatttattttttttaaatatctgggttggaaaaatata

SEQ ID NO: 51193 - DNA, 631 bp, Cannabis sativa
tagtcttattagaaagtaaaaatcaagtatgaaattgggataatgggaatgtaggatatgtaatgaaaagtgttaggaaactctcaattgcactttattttacactctctttctttgttgacaagtgaaatttagcattcattcatttaagagtgccaaaaagagtacaatataatagtatttatagcatttttcgtatttgataagataatgtataagagattggaaatcgaagcaaaccatcgttgtcccaaaaaaatacaagtaattgtgtaatattaagaaaaaaaaaaggccgtaggaggtagtatggctgaaaaaatgacgcgtaggcgtaaccaaggtatagtatatacatacaaaatgaaagtgaagattcaaaaggtaaaatgagtatgacaacacaataagaagattcataagcaagacttgttaagaagaacaaccaatatataggaggagattattttaattgattgatccacttttgtaactttgcttacgtttaccaattgtatttcgctctataatagatacaagatatatatagctatttgtgattttagaacaataagctgttgggttgggcctcacacgtgcaattaggggccattggagttttgttgcttct

SEQ ID NO: 51194 - DNA, 760 bp, Cannabis sativa
aatttcttgaaattgtgcaagaaggtatgatccaactccaagtttgattttgtggagaaggaaaattagcagagaaagccaaaatattagttttaaataaaacaaaaatgaaaatagcatgtctttcattgtatcgtagaaaaaagaggcttttgcaagatgctaaaagacatcaaatgcaggcctcaaaatttaggaaacattttggattgaatttgcatgtggtgagtttggtagggtctcaattgtccttttatcatatacaattcttgcacacatcgattgtgattgtatctttgtctcaccaccacaagcaccacgttatccgtgcaatacaaccctccacctttggtcaatgataaaatgatatgccttatttatctatgtattaatagtattttcatttttatattcttttccatgtcaacaaacatttgttttcttatatcattttatttataatgagatagtaattacattataaaatctaactaaacgtaagaatatactaattaccttaagttttttctttttttttttccccttccttcaaacttagtttttgaacttggtttccgcttttataatttctatttcatactttacaagtttaattagttatttacttatttttttaagaaataagatgtataaattgttaggtcaatcaaatatataggcataacaagcttaatatgaatataaaccatatcaaattgtgtaccttcaactataagtggacccaattcacacttagggt

SEQ ID NO: 51195 - DNA, 1452 bp, Cannabis sativa
aagggtaaaataatggaattaatttactaacgtgcttatgggactatattattatatactatgcctatgttgtctttttcaagtgtgttctaacagattagcgtggtatagtcacaaccggttgttttaggccgaaccggattcgggcccggaatgcaatttggattgaaattattgacattatatttatgtgtgaataatctgaaattaattgggtttgaattgtgcatgaaatgtaattttttcccttgtatgctatagtgaatgttatatggccctaagggcatcttagtaatttggcttatgtgagttaagtgttgtaaaatgaaatttttggcaaaatgaaatagaattttctgacctttatttcctccttacccgacccctctctctctcaaaccctctttgattttcaaagttgaaattgataaagaattaacttgatttggagcttggaatttgtggatttttgagcttgaaattgaaggaagttctagctatatttgaggtagcttttacagattttaactttgtccttcttgctgaatttttttgatgatagagcatgaaattggttgttgatgatgttgtgttgcatgtggatgctctctagttggtatgagcatatttatactttgatcttgtggtttttgtgtgagctatgtattgtttgagccttcaatgaattctagggtttttcttatgtcttgaattcagtttattggtagagtttgcagctggaaattatatggttgattaggttgaggttcatgtttatgagcttgagctatgttaagttaaagcatgatttttgtgttgtttgggcaatctaaaattgagggtttattgctggaaattgatgcatgaatgatgtgtttttgaccctttaataattgtttgcaacttgatttagtgttttgagagtttggatgttaattggggtgatttgattgagttttgttgctgaaattcgtgattttagctgctcgtttcagggtttgacacccaggttccgcggcatggtctgagcatgccgcggcccgcccccttgaatggaacctaggagttggtcccaggtgccgcggcccgccctcgagattttgggtagattcatgtgtgaaatttgaaaatgcataactttttatttcgaactctgatttgggagttctatataccgttggaaagctcgttccgagctctatgtgattatctcaattctaaatgccatgtgagtattttatatatgtgaaattaggggttaaccctatttgtgaaaaatctcgaattgtgtgactaggattaccaacaccttatcaggagcacccagggatttggaatctctgctattgcggacaacaggtaagacagtagttagcacgtagtgtatgtgcgttgacgcttatgttgaaaatgatatatgtgagtaagagtaaccaggattagggttattac

SEQ ID NO: 51196 - DNA, 1218 bp, Cannabis sativa
aaaattattaattttttatcattattacagactaaaaaacaaagaaaacgatttcaatttcaggccaaattgtatcaatcaagtttctgatgatattatccttaattcgcatcaaggcctccttctttattttcaattaaactttactaatatggttctcttatcgattgcacaaatactcaatgatatcattagtttgaaaattatttgtcgattactcaataagtatgattatatatataatttagaatttttaaaataaaaatatatggtaaacacgatttatttatttacatatataaaaaaaaatgtgtgttatatatacaggggtggtggggccgtttggttggaaggaaagaaatagaatgtaaatgaaataactttattctattattttgtttggctgcactttaaggtattcaaatattatttaaatataatgactttttcattattttagtagtatgactattccaatttaagatggaaggaatgacaaaaaaaaatttaataattctttttatgaattttttttattattttaattttattttattattattcctatttttattttcattcttattcttatacttttattttttcaaagtaaaaaaatacaaaatatattttataattatctaaaaaaaatatttttctaactaattatgtaaaactattagaaaaaatacaaagaaaaaaattatatgataaagtttaaaaataacctcagcaaagcgcgaattgtttactagttcaataataataaaaaaaaaatgccgtactaacatattttgctcatatgtatacactaaaatacaaatatttagaatcacaatatttgagcatttcttcttctagctattatatgtttatatatagttgaggtttggtaaatgactaacccaatttctacaaatcttcttaattattactgtacgtacgttcataatattgctcattgttatttctaagaacagtaatgatgtgtacacatatcattactcttgtatgaattcttacattttaggggccaaacttaatggcgatcacatggcgcctaaccagaaccagagcacagactagtactgcaaccatcacaacccaatatagaattaaagacaatattaaatgtgaaatcgaatgattgatcatgtcagtacaacacactgattttaataatgtcaaataattcatcccataactttattttctcac

SEQ ID NO: 51197 - DNA, 901 bp, Cannabis sativa
gatactatttccagccccatcctacctccaaaaacaccactagtcattctaatatcatttctacataagaatttgagcaatgtaggagtgttttacaataagactttacaatgtcatctggctcccctatcaaacttcttagagtcccaaatacaagcctataaactccaggaagctaaacagaccaagcatcattttacctctaaacccccattaaaatgaaacacgcttagactgtctaagaaaacattaagagtaaccaatgtagaagtgtacaatacaaagctagaatatctcaagctaaaaaagaaaagaatcaacaaatcaattgagacagacacaataatcataaaagatcaaaatgaatttggttcttaccttcggaaatcacgaccatcaacccgaacaacgatcaagttgggaaacattacttcatcttcgacttcgaatgacttcacgtactcgtatttgctgtttgccattactaaatatacaatagattgaaacaacccacttttactctatgtatcatatttgatttatttaagtatttaaatatgtttgtatctattagatttttaaattactaattttctatattaaaatattaattgtatatataatttttaaaatatacatataaatatgtgtggattgaattcgatcagttacttttgcatgtcaattaacatccaatccgtataaatacagattttaaattttttaatccaattcaatatgcacaattagggattttaaatttttcaattcaatctgcacaagtgtggttatctgcactgtgcagattgaatcgaattgagtattttatgaagactcctagctccaaaggcagaatgtaaaactgtttcagcaatatttcaaacaaaacaactaactaata

SEQ ID NO: 51198 - DNA, 670 bp, Cannabis sativa
ggagatccaagaacctgtttttttaaaaaatagatcgagtcttttgtacgttggattggctggagaaatttcatgtgactaagtctactcttttagactggtggaatttgaaccattggccgttaatgcttaatgcttagagtggtagtgatagcagggccatgaaaaataagtggggctctcgtttccattttgaacaagcttgggctgataacaaagagttccacaaaataattgaagaagtttgggggagtaaggatatgagcagacccttgcataatcttactcgtctcatacagtgttgtggaaaaaatcttcacatttggaatgttcaacaaaagcaagatcttcatgctaggactaaggagctcaaagaaaagatcgtttgttagccaattcgacgtgtcaagaggattggctaacattacaaaagttgatcttaattgtgtagaagagaaaatggagatatattggaggcaacagagccatccactttggttaaaacatggagatcaaaatataaaatatttccattttaaagcttcccacaagcggaaaaaaaaacacgatattggggttgtctgatgataagctatagtggcatactaacgaggaggacatctcataaattgctattcaatatttttgacaactcttttcgaaatccaac

SEQ ID NO: 51199 - DNA, 1446 bp, Cannabis sativa
atatatatatattatacattttttatcttacttaaattcaataattaataattgaataagttttgaatatgtttggtggagatgtgacccataataataataatactatgcatgtatatagtacatataactgtataaactacaaagctattaaaataaatatgtattaggattattaatttaattatttgcatagcttaagaaaatatatgtataatttgaaaatgtcatcatctttccaaattggctaaatacatagaaggtttattaattaaattaaccttgcctaatcaactgctgctttctctatcaatatatataatattacatcgattaattaattatatatatttatagttctttaaattaattattttcatatagttatttttcttattagctacttgttatcacagtgaagaaaaaaatgaagttatgatgaataatgtggttgatttatattattaaacaacataattaagatatatatatatatataaatatatttcattttcctctatacctttttaattattttattttccaaaaattaaaaaagagtaaaactattttgttatgtctttagtattggcatatttctccacaaaataaagatcgaatatgcaaaattaattgttgtgaaattgattttctataatgattttaaagaatatacatacatgaacattaattaacatgattagtaaatttttgcaagtatactaaacatgatatactttaatttaatttatattacaaaagaattcacattaagtctttgaattataataattttttgttttctcttttttgtattcttaaatgtcatgatgttattgttaattatatatatatgtatatatatatatttataaatatgtatatatatatataccaactccataccagaatttaggcaaattaaaagccattaatgcaaatataatttcaagatataatattgtaatacatatatagcatctgtattgtatatacattataatattagaagaaattctgtattagactttaaacattattttggaagatttttttatttattttagtatttaggagagttttttaattttttttttttaattgtatacgttgtagttgtagctatatatttaagattacttgtaaatttttaaaaaaatttaaataattcacagtgctgagaaataaaatttaaacagtaacttaccacacgttcaataaaatataaattttattttttatatttttaactactcaaaatttataaaaatttacaaatagttttaaacaactacaacacatacaatcatgaggctgttgattgttattttgttaagcggtctgttaataggtttgcgcatgctttagcgcgagcttctctttatgaggctgatcgtgttcttagaggagattatttacctacttgttattcttccatagttttgg

SEQ ID NO: 51200 - DNA, 1451 bp, Cannabis sativa
tagtaacaacaaataagagaatgttgtggttacctttgtcctaccatgagagagcggaggtgagggacatagcgagagagagcggaggaaaatgacggcgtagctcgtggtcgcggaggagagtcgggaaataaaatcaaatttacaaatgactttgaaaaaatacgatatggttttttttggggagtttatatcttaagaggagggaaatgaaatttaagatgggaaaaataaaaatttaaaatttaagatgtgggaaataaaatttcagatctgaaacgcgtaaaacggaagcatgggaagtgccaacggtttaaaaccgtcggcaattcccttttacaaacacacagaattttttaaggtacatttaaaaattgtcgcttatatatacctcccgatagtttaaaaccgtcaggaataccctatttttcccaacggtacgttttaaatactcctttaatttttttagtgacagttctcccaaaaagcgtttttagaaccgtcgtgaatatccctttttatagtagtggattcatctcattagaaaaaataactaaaaaatttccatttaaattctctttctctcttcatcttctttttcttttgtttttatatattttatattattttataagatcatactaataataaaataaataaaatacttatattcaagataatcttttttcattcttctcatatgtaacttaaattaatacccaacaatttatatatataagtatatataaaaattaatttatatatatatcttggtgatcctcttgtacaaaagggatactgctctaacttaaaagtactgtgttaagctgtaaagtattgagttcttattacaggtgtgagtagagagatttaagaagaagacaagacaagaggagtagtgctatattattgttacttaagtgacacattaatgttggaacatggccaagggtatcttgtgaggaaagatgtcattatttggtatatatattatagtgtatatttccaagtgtggttgctatcatccagttgaaaagtgatcaatttgtataaatacatacatatttatatactagtaaatctataaagaagtagggagagaaaaagagtgaccaaaatatggattattcatagaaattaaggtgaaggatgtatgatatgtaatgtcttaacatataataattcattttatggagaagaaaaaaaaatgataaatattttatttaccaaaaaaaatattataattaattgactagatacaaaggatgatatatagagagagaaatattaaatgatactcatggtgtttggtattttgtgaaatgaaatatttttattagtacaatttaatattaaattttatttgttttactttaataaatattgtaaaaattactaactagttaaaaagggatacttcatagtaatactaagcaccatgtgtgtctcat

SEQ ID NO: 51201 - DNA, 798 bp, Cannabis sativa
atcaggtatccgaaggcaatccagatatatgaagaggtagctaaaacatcacttaacaataacttgctgaagtatggtgttagaggacatcttcttaatgcaggactttgccagctatgtaaaggggacattgttgccataacgaatgcattggagcgatatcaggcacttactaattagtcctttcttgtaagtatgtttgaacattcaagtcagtgttatatcgtaacaggtccttaattggccgtgcaggatttggatctcactttctctagaactcgggagtgcaaactcttagctgtaagtatttacgagtaacatttactctaaatgtggactataaagttttctgtagaagatatatgaaactctctctctgagtggatacattatactatgcaaaggtttcactccaacttatgatcattgccttgtgtataataatagctatacattttttttgttctacatctcaggatttagcttctgcaattgatgaggaaaatgttgaaaatttcactgcagctgtcaaggaatttgatagcattaccccactggtacatatctttctgttctgaactcttacctttgcaaccttattttagtgaaatcacatcattatttttctaattaaagtcaaactcaaatgatgtttttatgtataagaaacacaaggaagttgatttccttctctcgttggctaaggatatcttacatttgtcttagggagctatttattttttgtttttacttactaaaacttaaaatcaattcttacttttatgctagttctcggtg

SEQ ID NO: 51202 - DNA, 713 bp, Cannabis sativa
  modified_base (521)..(523): a, c, t, g, unknown or other
ttcagcttgccaatgcgtgctatgtggctagaatagacctatctgctcatggattttacattacaccagacatcgactttgactgggtgactggtaaagggaacccattccggtacttcacatatggggcagcattctcagaggttgaaattgacacattgactggggattttcacactagagtgacaaacattattttggaccttggatattctctcaacccagccattgatgttgggcaggtatgtatctgcctttcccttagcaactagagatggaaattggacagttaatgtacggagaatacaatccccaaccccattcccgctacttatttatgcccctatccccgcctcatccccatctaataactaacagattcagagtaaggaaataactaccagttatgggaaatctatcgggtatccattaaaataacatggaaaaaatatataataatttaaaataattgaaaaaacttttaaatttaaaaattaaaggaaattatatatatatatatnnnggatatggtacggatagtattatctccaatcccgccctatcctcgcttcggtattgaaatcacccccaccaccgacccattaaccgccaagccgctcctttaggggcggggctctgcagttatccatccccgcagtataaatttccatctctattaacaacatattatatcatcattttcatatcctact

SEQ ID NO: 51203 - DNA, 1237 bp, Cannabis sativa
  modified_base (1170)..(1210): a, c, t, g, unknown or other
cttttattattctttcttgaatttctatgatttctgtgctaaacctatcgctaaaataggctcattatcgttaacgaaaatctgcgttaacagctaaaaactttggaatttatggatttgacctaagcaacatgtcacacaaactgaagtatcatttttgctgctaagtgaaagatttcaatgattaaggaaaattttaacaaccctctgagaaaggtgtccttatctactatgacaaagttggaaatcaaacatggtagagttacaaccaaaactagaagcatatgcttctttatgtgaggcattattagtaaaaatattggaaacacatgaggtatgagtagacaaaatcgagttggaagttgaggtatgtcgttggacactagaagctagtgaggaagcatgctgtgttgatgataaggttcagagctaggaaggataaaaaatatataggccattgtgatgctttccctttattagaatattctaactaccatagtccttaacacaataaaagttagcatgaaattcaaagtaaacatgattttctctaacaaattttagttagattgagcaagtttatagtaactttaggaacatacaagagattaagagggagaaaaggacgagtgcaagaagaatttgagataaattaagattgacctatacattgaataaacaaacttgtgccattactagcaactcttttctcaagccatcgtagtctaaaccaatggcaatgttgttaggatctaattgcagtgattggtggcaccaaaatctagataccaaattaaatcatagccatctgagttggtaacaacatgagcttgagagctagtgctctaagtagttaaactgctagctaattgagttgagaagctatgaagcttttgtcaaatcgatagaaataatcaaagcagtatgaccaaccttaagacataactgggatttttgttaactttgagtcatataaattctagcaaaacctttaccataactaaaatactctttattagtggcatgtgagaaacctagtagtgcaaagctaggaccactgtagattggactcatagactaagaagacacccttcttaaacctccactattaggctaaaaaagtgacatagattgaggaaatggtcaatatgtgttggaattattttaccnnnnnnnnnnnnnnnnnnnnnnnnnnnnnnnnnnnnnnnnnaaatatgaacttctaaaatgatatgaa

SEQ ID NO: 51204 - DNA, 1026 bp, Cannabis sativa
attggtatctgaatttggaaatgagacacatctaattgtcttaccagacacgaccccagttgtcctgaaattcaacgtcactgatgtcatgaaatgatgagggcataactttgaaacccttctctgcatcataaagaggatcatactctacggatgaattggccaactgcccatcgatacatattagtaaggctttcagctgaatatatgaaaagaccaaacttcaacatatcctaaaactatgtatcaaagttatacacaaagaggatcatgccctaagagaaaaaccctactttctagcaaaaactttatgaagtaaaattttaaattctgttacgttagtattttatcatacaatatagttactttgtcagttattagagttaatcccacattgctaatgtgtaaaaataaatgtcatatataagataaatgggctcatcccctccttgctaattggttttgagatggattatcctaaattctaacattagtacacaagcttttcaaacagcaataagtttgagagactggattcatgtcatgatgacaggaagctagacacatttattcttttgacatatatctaaactaataccaactgacctcagtgaaatttgttgccaacatcagctgtcttataagttttcatgacaagtaattgcagaatttatacaaatccattcactgattggctaagcattcatgaagctcatgatgcatatatcaaaaaaaaaaaaaaaagtgcaacttgtaattctattttcattgtaaacaaaatatgaaaatttgtacctaagaaagcaagctttctgaatacaatacataaacataattgaaacataggccaacttgggattgaagcaaatgttgctacaaaaataacactaagaaacacataagacagacaagttattaggactaaactcacaggaccctacaccaccaatacagacaactatgtagaatttgaagcaaaagagcatagcagaataatttatggccaacctgaagattagaagagtt

SEQ ID NO: 51205 - DNA, 1214 bp, Cannabis sativa
ttaattaataattgaatttttctctttttactctgcagaccaaatcgtcttctacatagaagaggcgcattttagcatgttttactgaacagaacaaagcgcacgttagcaccaaacactatacgattcaaaaatccactctcgtcacaatcattcatctctgttcagaatcagaatccagaaccattctcctcttcgctacacgatatggtaacaccatcggatctcattttcttttctcctttttattttcccctgtttggttgccgagaaagtctaggaaaataatcaatggctctgtggaacacttgaaacttcagttaaagtttaatttttctgattagtctcgctaaagttacctctttttcaagatttatgaaactttaacactcacccagattttattttctttgttttttaaactccattttaggttttttttttcctaattgtattacactaacgaataattacaggccaatactttacgtttgtacttaacttgtataaggaatactcttgaagctgcaatgtgtcttcaggtacttttttaatcacaattttggtctaagcctcactatgcattttcaccatttttagtatgagaaacctattagttcttctacttaatttcccatatgaaattcatgttgaagacaacaaatttttagttgaaattcatagttattatgctaagcctcattatgcataaaactttgctaagccttactatgcattttcaccatttttagtatcagaaacccattagcctttctacttaattgcccatattaaattcatgttcaagacaaaactttaatgtgaaattcatagttggtagccctgtgaaattcgtagttaattgcccatatcagaaaccatgctaaacctcactatgcattttcaccatttctttctttttcttcatgatcacaattttggtcgaatggttaccaattatgctaagcctcactgtgcatttcaccatttttagtatcagaaagctattagcctcattatgcaaaaaaacttttatgtgaatttcatagttatatgctaaacctcactatgcattttcaccctttttagtatcagaaacccttaggccctcctacttaatttcccttatgaaactcgtgatcgagacaaaaacttttatgcgaaattcatagttatgctaaacctcactgtgcattttcaccatttttagtatc

SEQ ID NO: 51206 - DNA, 3336 bp, Cannabis sativa
  modified_base (2203)..(2204): a, c, t, g, unknown or other
gaagacagtatgcaaacgaaagctaatgctgagctagaagataacgaaaaccaaatagaggtttcgaaagggcttggatagataggtctggaaggttatcaattgacacaagataaaactagatgagatattcaccctccgacaaggttcacggaagcatacttaatagcatttgcattggcagcaatacaacaaactaaaattaaagagccctaaagctacgaagaggcattttaggttaaatggctttaggccatggatgaggagatggattaactcttggagaacaagacttgggtagttgtaccaaagtcagagaacaaaagattgtggagtgaaaatggattcttaaggtgaaagagtgaatcaatgaaaatgaactagtgtagtttaaagccaggttggtggttaaaggcttttactcaggtggaagaaaatactacactaaaatcttctcacctgtggtaaagtacaatatgataagattgatgttgtctttggcatctcaaatggagtttgaagttgaacaacttgatgtcaaaactacctttctaaatggattcatgagtgaagagatctacttgaaacaaccacttgggtttcaggttgaagggaaaggagttgagttaatttgcaagcttaacaagtccctatatgatttgaaatagtctccaagataatggaataaatgatttgacacttgtatacaacaaattgggttcaaacgatcagcatatggtcattgcttatattttaagaacatggagcaatctacaactgtgtttctattgctctatgtggatgttatactcatcatgggcaaggaaatcaatgatcaaaaatatcaaagtcaagcttaaaagaaaatttgagatgaaggagcttaaactagttcaaaagatacttggtattgatgtttcaaggaactggaaggaggggactttcggcttgaagcagtttgggtacatcaataaagttattcaaaagttaaacatggaagatacaaagagtacatctgttttgttagggggacagttcattttgtcgaaggaacaatttttgaacaatttgaaggagaagatgaaatgaaggatgtaccctatgctatggtcttaggatgtttaatgtatgcgatggtgaccactagactggacatagctcacgctctaagaatcctaagccgattcatgtccaatatgggcattgaacactaaaaggccctcaaatggttattaggaaacataaatggcacttagaattatggtctgacctattagaatgcaaaaggagaattggagttaaaagggtttgtggatgctaactatgacttgacaaaaactgtatatgctggaaggcccagccacaacctgacccttttgatcccgaataatcccatcaaaaccatggcttccctcatcgtcaaacaatgcggcatcaatattcactttttaagtttttcataacctggtttagaccacaactcagccccatctgaaagatactaagtatcagatgcaggaaacaaacttcgttcttgagcttttctccactgatcaagagtgatacgagccaaattgacaacgaactccacccaactttgcatacccttccacaagagttaatttcatgagaaccaaatcgccctaaccaacatcaccgcctaattacacattgttcctcacctgatcgtgagaacaaatgaagaagtcagtccccaaatgaccttgcatcaattggaatcatagccaaacctgccacctgccaacacttttgcgcaaaatcacaagcaactaaatagtgcaaaattgattcacctgcctcatgacaaattggacaaaataaagatacatcaacatgtttagttttcaacttaactctcgtaggaagacacccattaactagccacgctctctcgttatttatcaagaaagcttcttttttttcctagtggtcctggtccttttgtcacactaatgcctcataaataactcatagatttaaatattttcatctcatcaactacatattactatactaatcaaatgagaagatatatcgttttatttagttacgataaatactattttggctctgtgttttgtaaaagttacagatcagacgctctattttgttaaatgacaaaatgaattctgtattttccaaaatagtaaaaatagtaccatgaactgattttttgtcaaannaaaatttaataataatctgatctaaatgtattataacaaaactgtttacattttacaaaagtgactaattagatcatctgttttgttaaatgacacaatggagaatgtatttttcaaaattatacaaataggaccttgaattgatttttaatcaaaataaaacttaataataatctaatctaaagatgttatgataaaactggttacattttttgtatctgtaatatacttgttgaaaattgagctcggtatcctatttttactattttgaaaaatataaggtctattttatcatttaataaaatacagagtctaattagtaacttttgtaaaatacagagttcaaaataatatttaccctattttgtaagtacttagagttttttttttctatatatataataattattaaattaaaatatgttaaatttaatatttaccctatgatatatttcagtgatatgtttgacaccactaatattctctaagatttcttttaagttcattattgtgaccatgggcaaactcacatagagataagtccaactatccccttaaagaagaaaaattgaaaaaagcaaaacatattttttaattaaaattggcaattaatgataaaaaaatttgtaatacccaactgacaactaattggagttagactttaaaatttataaaaccagataacaataaaaaaaaaaaatatacgtatagagtttacaagtcgggatcccggattaaacccgtttgaaaaaatacaaaatacatatacttctttttttacccaagtcacaaagtattaacaaaaagctaaattccaaaatgcagtatgatcgaactctccaggttgcactgttgtagtatgtacaatcatcgccaagctaaaagcttattgttcttctacttttgcttttcccttacctatatatagtatcacactgatgagtcaacagactcagtaagatatacatatattatatatatcaagaaacgatgatttagacttaggccctcctgtgcctaagtacaaggatcgccaaatgattaagaacgttcttaatggaagtacgacctctgtaccacatgcactgaagtaccaactctgtactagtgttggtagggccatattgtactt

SEQ ID NO: 51207 - DNA, 1026 bp, Cannabis sativa
tttcctcactatataaaacactagatctgtcttcacgtttaggccatgtgcaatgatattgtaacattgatacatgagattcttctgttcgtttagatctcttgatatgaataataatatagctatagctataggcaagttataaaacataataattattaaagtgtttacttgtaataataagatgcatgtactttatctctccagatgtgatcatggggcaaaacacaaccacaagatgatgatcatgatctcattatcataagccatatatatatcatatataacccaacaaatttaataaatgtattttattttatagtctatcaaatgcatttgaaccatcaatatgaaggaacaaatatcaaccatagaatttgactgcaattaattaattttgttactatatacatgaaagtaaaatttgtaaggactgtagaggacacacaacaaagacaacaactcatcaatgcactctctgtacgtgtggaacgtgtgcatggtttttttttggcaccgtactatgatgagacacgtatattatactttctgtacattgtaaataattaaaataagtaacaactatataactttaatatgtagtcattattgattaataatgctgtactaatcagaaaatatatattatctataaatgtatatataaaaataataaacgatttgtttttgtggtttttttttctttttataaatcacaattatatatatttaaagacaaaagaaaatcttactttttttttttactctatttttttataaaataaatatatttctttttaagtcttttatgcaatttttttatatacctattcttttttcttatatgtttctttttttttttctttttaattttgtttgactattttttacgagcttaggtgatattatttagtttggtggaatctaatgatattagtaatggtagtaatccagtggaataagaatggtaatgagaattgattaaaatatttagtttcttgctaaaataaatattagaataagtga

SEQ ID NO: 51208 - DNA, 1247 bp, Cannabis sativa
tcacattgccaacaatcccaccttccatgaacgcaccaaacatatcgaattggattgtcatttcatccgtgataagatcaacaactccaccattcgtttaatccctgtctccagcaacctacagctagctgatgcattcacaaagccactgccatcaacaacactcactactcatatcaacaagatgtctgtatacaacctatacagtccaccttgagggggggatattaagactttcagtctttactgttttcattgttcggttgttctgtttattactgtttgtttgttgttaattgcttaggtccttctagctgatccaactaactctagagtctgttttagtgttagttaagtcggttagtgttagttaagttagttaggacatggttcttgctactgtatataatgccagttcacttctgtaattttttttcattcattcaataagatttttcctcattcattctctcaattccgcaataaaattaattatatatataactgtataacaaaaaagattgaaatacctcaaatattgatctttaagcttctatcttaaacgagctgcagatctacacaagaaaaccaattatatgagttactgttggaacttattttatcaggatgtagatttactaatatgtatgttgattaacacccgaaatatgaattctctaaactaatagaataaatacatataaaattaagaaaaccttacattgactgcagaggaataatatgtctcattcagctcagatttctatcatttgttcctttatgttgttgagtaataacaagatctaagcctagatctccttctccttcattttgattacccaccgtcttccaaactatgattgagtacttgacttgttatgtgtgggcatggtactctatctaaaggtttgaattaatagaagaacatcaagaaggattcgaaatcactatagaaggaaactctcacttagtagttgtttaagagagttagaataccaggtttagattggttgatgtaggtttgatgagaataagagcatcatattccttttatagtatttcaactaggatttaggatataattatattgagtaaaaagataaaataacgggaaaaaatacactaagtggtcgacctcactagttacaattttactgctttatttcaaccatttatcttttttttttcaataatgacatattttctaatttcaatcctataaatgtcaaaaatatttatttaataat

SEQ ID NO: 51209 - DNA, 904 bp, Cannabis sativa
  modified_base (854)..(858): a, c, t, g, unknown or other
gctttaaattcccaatcctgagtaagcaaacatgtataccaaacagcccatgccatgttcttacctccaagtgtgaaactgaatgctaagctaaaatgaaataatgaaattgcaaaataaaaaagcaaaattgaaacaggatagaccatgggtttgtgttaatcaactcaaactgaacctaaaataaaatgtagtggaattaagaagacgggtcatgaattcctaatcgataaatagtaaatacaattaagtaaaacacagagcagaactgtgttagtacattacaccatctgtgttacataaaaccatagtatatgtaatctcttggctaagaaattaggaagcaaacggagaaaagcagggtcacatctccatagatccattactatttttttaacctcttttccccaacctttcccacacaaataaaaaactccccaaaactgaacaacctgtgataacttcttagaacttgagagaaattccaattcacaattgagatgaatcacaaatttaaagtaaagttacacaggcacctcctaaattatgtcaatatacacttcctagaccaatctatttacaattacatccctagaatccaaaacaactacagaaactctcctcatcagttacctttactgtcaatcaaactccgcagaaatgttgatgttgtccactaccactacattttcatttcaagatttcaactacccttatcatcagtcaaaagaatctgctagacaatattacaatttttatcctgtgctgtcaaacgccactttcaaggttcactcatctcctcatattttggccactaagggctcgtttggaatgccgtattaggtcgtattgtnnnnnattatattgaattgtattttatgcaatatttatatataaaactata

SEQ ID NO: 51210 - DNA, 1719 bp, Cannabis sativa
tgtctttacgacatttgtagttaactttttctttttttccttccataatgctattatttgtcatgttgtttagagagagctaaaatatttagatcactctctcggccatatgtagctgtacgactagatagtgaagttgtatatatggaattgtattattccacactttcttgtttccacattcctatcttcgtgtatctttttggttatactcaatggaagatcttcttttagaaattaattaattaaataaaaaatattctccaagtatatagcagatgaaaaatcttcttataacgcaattctctcatttttacgccggcctgagttgagatgagacaatacatacataaattaattatcctaattgagcaagtcaaattagtagtatatacttttgggattattatatataaaagtacggaagtaatgacaagttgggttagaagataagcgcaagagattacatgcaatcagtgccaacattgacctgttgtctcttggagttgggatcattatcacatgatcaaatgacctaccccacttaaatttgttcatctactttttgagctgtactgttacaaccctttgattctttttccgggcaatggtcccctctttacctttatcaaattgttatggtcacatggccaatcatcaatagaaagtactatatatctttaacatatacatatattaatctgaattagatagctctggttaagggataaagagctaattaaatatagttgatcgaggaacattcaattttttaatcccaaaaagtggagtagcttttccaattatcatgctctgaacccgagagaattatctaaaatctaaaatcttaattaagcaaaaagagaaactttgctagttaatacaaactcatcatatgtcactcatttgctggttatggtaataatggttgatggggatagtaataataaagcagacttcttaacttttttgtctattcaagaatctggtaaaacataaagcagacacgaaagtagtaaatatattaaacccaaacacaagtcatataacactcccttacatactcttcttttatacagagtatgtggaaaaaaataaaatcatcccaaatcaaaatatgtacataacttcagaaccttaagcctgaacaaatatgaaaataaagcaacttgaaaaaagaagtgtggaccaaaaaaacaaaaaaaaaaaaaaagcaaaaacaaacatgtggacagccatgaaagcaatgtgttacctgtcattatgtgcccgaaaccatgtgaggttgaattataccattccatttcttgtctctcccctttcattaacctaaaatttatctcatttttctcctattgaagcaaaatctaacaacttagtaatcaaaggacacagaaatcaacgattattatatcacatataacaacaacagtaaagacagaatccatacaaatacccttttcttttttctttttacgagtgaaaaaagtacagcttccattgaaaagggatcactttttcttgttcttgcttttcccattggcgaacattgaacctattgcgaaaatgtttgccggaggaacattcaaaaccggattgattgaaactccatgtccactgccgtaagctccatgtcccttcttcaatggaggtttctgataactacagcttgaagcagtgttatgaggatgtaatgactgcaccttgttagaagcgtta

SEQ ID NO: 51211 - DNA, 668 bp, Cannabis sativa
catttgaacagtgcaaccacctcttccgccacctcgtcctctctcctctcatagatttatcattcaaacggtgagaaacccacaaccatcgccaactcctctcccaacaagacccaaaggccgaccacgaaccacttcctctttcagtgaaagctaatgataagaataatttgctcacttttttttattgttgttcttagattttgacgagatctcattctattcattctctgatatgatcaacatctttttcttcttttttttctcatgacgatggctattgaaagtaatcggaggcttgagttggagttggagccatctggttcgacgacagaagaatgcagagctatcgcggaagccttatgttgttgttgttgttcttcttcttcttcttcttcatctttgattgggaagaacgccgatgtttctactaaaaaagatgatttagaggctcaaagtttgtataaattaaaatcactggaagtgatggattcgatagaggattcattaccttcaaggtattattgcttgattattttgacaagtatagccaacggttttttaccgttgcctatagtataggtgatggtggaaaatcatccacaatgctacgtactttatattgctgacgattttacacagtcgcaaaaagttctaccttgcgacag

SEQ ID NO: 51212 - DNA, 1419 bp, Cannabis sativa
tttttaagcaatgaatgaatgcaacttgggtgatcaactactttatatctttcattagctcaaagaaaatgtgttatttccattatttgcatccacttctggaaatgtgcataaactgatacctgaaatctgtgttagattcatttggcatgggaccatcaacgtcgaatctttctggtacaaactcttctgctctctcccataccttgcacgacacaagttttttttttatatataatgtatagatatatgtatataaataaaaatttgaaaccaatttgaggccctatgtgtacgtgcgtgttttgacaattgaacagacaaaatagctgagctgcattcttgtcaaaatttgcaaagactaggaatgcagattaaataaaattagaggcactgaaatttgatattccaatacatagaattgaaatgtaaaaatagttacatctcacaaaggcaattatcatgagcttagatagcctcttcaattggtcaagttgaataaagcaacaaactgtcatacatatatactattaggtaatacctttgaagaatgatgaatattgtatactgatatcattatatcttgaccagcattgaccttgtaatttccaggaagtagatcagggacttgggctcttctgatcaacacctacatagattgaaaaattgaaatcatacattataaaaatatttcaaacaagaataaagagattacatctaattttttgtcaaatataaaggtgtaaaactgaacaatacaggaggatgtggatagagacgcatagactcaagtatgcaacgcgtcaagaactttaggtccttcacatcttcataggaaggaggtcttccttgtaaaatttgatcaacttcttctcgtgctttcatcaatgaactggagtcctatatcagcacacaaacaatttttttattattattataaacagaataattcaactcaatgaaaaacaaaggattcaagcacatgtacaatgataaacatcacgaccatgatccatgttcactgccagctaaagcagaaggaatcatgagcttctttaatattcatggattattgactcataagagaccatagtccacatataaaaggcataaatgggagtagtgcttatgaattatgtaaatttttcagccgtgaattctgctgcataataggatcaatgcattactcgcaacctaaccggaaaaaaagtacattaaaatggtaaaggtaccttacttagaagatacattgtccaagtcaagacggaggcagttgtttcatggccagcaactaacatagataaaaggtcatcgcgcaactgtacacttgaaacctaatagacatgaaaacttcagtttagaacttcacatacaagatggatatagagaatcgttaagattagaaattagtcaaaacta

SEQ ID NO: 51213 - DNA, 1727 bp, Cannabis sativa
gctcttccgatcttattgaaatgagttttatttagggcataaaacccaacattaacatcctatgaaattctatataataaacctcctcaatataatcatttgaggacattcggttgcttggcctatggatccacacttgtttcaaaacgacacaaatttactcctcgtagtcgtgcatcccttttcattggttacccatatggtatgaaagcctatactcttttagatatagaaaccaatattatttaccactctagggatgttatctttcatgaaaatatatatatttccttttttttccaaaacaccaaatactgatgttgatttttgctttcctcacactgtgataccttctcacaacacaatatctccacagcaaaataaccacatacctgccacggctataccagcaacaaacatagttgctaaaccatctgctcctattgagcaccatacaaaaatgccttccacgacaaccatcgatatcaacacagttgatacacaacctgctcctactgagcaaaataaaatcatgccttccacggctatatcacttataccagcagtccattcacctgctatatcaactactcataatgagcaaaatcccttactgccttcaatgactaccccagaaatcaccacagttggtacaccaactaagtcacatatacaaataccttccacggctacaccaatactcaacagagttgacaaagttcctatgacttttgcaccaacccttcaaaagtctgttcaatagaccaaaacaggtcgaataacaaaaaaacatcccacttggatgcatatgtgtgccacaaagcctccacggcacaccctattgaaccttttctttcctacatcaaactcaatcctcaatttcgtgccgctgttctagcagcctactctgaaattgaacctcaaaactatgctgaagcctctcaatttatccattggctcaaggccatggacaccgagactgaagctttggaaaaaaataaaacttggattgtaaccaagttaccacccggccaaaaggccattggatgcaaatgggtatacaaagttaagtataccaaggaaggagctgttgatagattcaaagcacggcttgtcgccaaaggctacaaccaaagacaaggaattgactactcacaaacctttgcaccagttccaaagttcaatactttaaaaatattacttgctcttgccgccatgaataattggaacattcaccaattagacatcaacaacgcttttcttcatggtgatcttcatgaagaagtttacatgaaattaccaccaggttacaaagctcccccaaattctgtttgccttttaaaaaggagcatttatggcttaaaacaagcctctcgacaatggtattctaaacttagtaccactcttctagaagatggctttcaccaatccttatatgacaactctctttttattaagagaaccaataccatgcttctcattgttctcatctatgttgatgacattattatggctagcaacaatgacaatgccatagctcatttcaaagtttttttggacaacaaattcaaacttaaagacataggttcccttcgttttttccttggtctcgaaattgctcggaccaaacaaggcatatcagtttctcaacgccctttcacccttcaactattgaaggatacgaggtacttaggagccaaactagcttcctctcccatggagtacaa

SEQ ID NO: 51214 - DNA, 813 bp, Cannabis sativa
aaattaatttttcttattacattctcatttattgatactctctattcgttttatttgacatcattatttttttctggatagataagacaaggaaatgatgctctaaaattgctccaaatatcactatatattctcttcttaattctcacattcttttaattttatataaggttcataattatcaattttctcatatttattttctaatttttaaataatattaatctataataattaaaaaacaaaactctttttctggcttatatatcacgtttaaaaatattttttttaaataacttttccatttttgtaggatggctcatacatcattttatctttttgataattttattttccaatcaattcctatcctaaactatttctcctaaaacttcataattcaatttactacttaactttttttaattttgtttctctcttttttctcatgatagggtattttttttcttacaaacttaaatactaaaaaatttagaacataaaaattaaagtttgtagaatgtaaaagtctcataatattaagaagcaagaagattggataattgataagtctcgatataatttttatttatgagaaggtcattattatatttattcatatttttttgttcaatataactatcatttattctgtagaaaaatctaatgcattcaacaataaaaaagaaaaaattatttttaagtttaaaaaccttgagtgaaagtttgttatattaactacaaaatttaaaaattgtggcagctacaagtgagtataaactgttggaatatgtatgttgtttaacatcctaa

SEQ ID NO: 51215 - DNA, 742 bp, Cannabis sativa
atacacattatagtattaaggttatagtatatctagtaatatatatgcacaccaaaatattaagtattggtgtggcatactcataattgaggtatacattattagtgatatggtatttattataattatcataataaatttgtgttgtacatgtatttatttttttataagttcaataaattatttaaataaaataaaaattcattctttaaatgcctcaattgacttttatcaatttcaaaagacatggctacatgcatgcattatgcatatacaaataacatataataggatattaattatattatacttaagaaattctatttttctaattaattgtattgaaattaattaattgattgatatgtgtatatgtatattgtatagtagtgatgtgatcacgtggtcacatacccaatcgaatttggtctctgactgatcagactctctcctcattataatgaattattaattccttattattccatttttgcttggaatgttgtactacatacctatttatggtctatgggcatcttcaatcatatttgagcttatggggtttctagctaataggtgatgttttgtgattggttaataatatatatttttttaatattatataaaagaggattgctaaagggcactactggtgcttagtaccctcttacgtgtcaatatcgctattggtacaattaagtatcgggtcccatatagattaatataataatttttatggagt

SEQ ID NO: 51216 - DNA, 2166 bp, Cannabis sativa
  modified_base (2016)..(2024): a, c, t, g, unknown or other
acacgtctttaattattgtatctggagttgtctcgacaaaagcttggttctagttacctcaatagcgagcgggcgccattttttcttttcgaggtcgacgaggcatgtcttgtgtcgaccggggttcttatttacaaagagttcttcaaagctcatttgaatgttaacttctaacttgccaaggttgtgagcctcactgacattaactagatgaagttacaggaactcttcccatagcaagacaggcacctcgcttacttggtctcgagccgatctgactgttacacttagtttgtacactaagggctttcgcaattgatatatgtcgcttttgtcttcctatgtgtactgtacttgatgcctcgctattcgcgttcagcaacatatagtttctggcaaatatactaagcaccagtttgtatattgattcctcgcctaagaccttacagtctgcaggctacaaatatactctgatactcacgtaattaatgagttatttcatattaagcgattgcatcgatctatattcctcttatcgtgacacgtgtcctccactaagacagcagccgaatcttaggtataacactattaataaaaatttagaacacaaaataagtatttgtctaaaagctagttagtacaaatattgtgtgaatttcactaacttctaatgttgcgaaagtagcaaatccctatcctcatcgtaagttgctttttttacaaactgtaatattaaaatgtgaattattacttattatagttcgtataatttagttatgtatataaataaattaattatacattaattaaataacttaccttttttatttataataggtgtgaccaagttgcatactagaatttcaatcttattttcttcacttgttccatagacaaaatcataaatgctaatttcatatagaaaacataaagctagtttagataaatatggtaatgaaacttaataggaaagaatatagtatttaaaataaaaacttaacatatatatgattgaattattaaaaaagatattaaaatttctttcattttttttaaaaaattaaacaaatgaaactacattgatcgctggagttgtcactgctatcggaaaaggcaccgaagtgtgttgtcgacgtcgaaaaaattactggatttgttgccggtgccacgatattcgctggagttgctgtcggcgccgaaaaagttatcggaattggcattatcacgagaaaaattacctagaaaattaccaagaaactggtttcttaatgaagaaatcaatttcttggtaattttttcggtgacaatgccaattctgacgaattttcttgagtttgctgttggtaacagaaaattcgtcaaagtagcggttagtgtcggaaaagttgtcggagttgataccgacgctgtaaaagtcgtaaaaattggcattgtcgttggaaaaatcaccggaaaaattaccaagaaactagtttcttcatcaagaaagatgaagaaaccaatttcttggtaatttttccagcgactatgccaatttcgattactttttcaaagtttattgtcgatgccggaaacgttactggagtagctgccagtgtcagaaaattcattagaattggcattattaccggaaaaatcactaagaaagtggtttcttcatcaagaaatttatttgctgccgacgccacgatattcgttggagttgctgtcggcgccgaaaaagttatcggtattggcattttcaccggaaaaattaccaagaaacttgtttcttaatgaagaaatcagtttcttggtattttttccctgacaatgccaattgtgacgaattttcttgagtttgctgttggtaccagaaaattcgtcatagtagcggctagtgtcggaaaagttgtcggagttactaccgacgctgtaaaagtcgtaagcattggcattgtcgtcgaaaaaatcaccagaaaaattaccaagaaactcgtttcttcatcaagaaagatgaagaaaccaatttcttgnnnnnnnnnccagtttcttggtaatttttccaacgactatgctaattccgattactttttcgaagtttgttgtcgatgccggaaaagttactggaataactggcagtgtcagaaaattcattagaattggcattattacctgaaaaatcac

SEQ ID NO: 51217 - DNA, 1456 bp, Cannabis sativa
ttctttattggcaaagttgttgtgattaggaatttgttaagttctttgcgtaatgtttcttttcattttgtaaaacgatcagcaagtgtagcagctcattcctttacgagggcctctatatctcaccctgatcgcctgttcaacttcaacactgttccagttgagttgttgtctagtttgataacggagattttcgtttaataaaataactttcaattaaaaaaaaaacaaaataaaatttccaattaataatttagaaaagatataagtctctctcataaaactcttttagtttttcagctatgaagtagctagtgtgtttagtattaagatattttataatttgttaataattttttataatatttattaaaaaaaaaaagctttcttttacataaataataaattgcgactacaaacacagtgataatataaattgtgtgataaagtatttatttttgtttaacagcaaaaattgaatgaaagtgatcagattcagggcttttgaacttgtctctctctaagccatgtcaaccagttcccgatcgccagatgatatttcccgcaaaattccagatgtggtctccggtgagccttgcaattctccatatccttcttcttcgtcaatctctgacgtcactcaaacttttcatttctcctctggaaaccctagaatcgaagagaccaggggagtcatgcttctctatcggaacgatattggccttcccgtaagcttttgctttatattgtttaccctaaaattgaagcctggaatttgggttgatgataatttagttaatattcatgtaggttgaaagaaagcccctgctttgtgttcttggagtaccgaatcacatgacatatgcggatttttgccagttctgcggttcttttgtgcatcatattttggaaatgcggattgtaaggtttgtgtttggacttttgtttttcaaattgcattcttgaaaatttttttgtttttaactttccttagcttgtggtttatagaaatgatggtatggaggatcgttatagcattttgattaggtttgatagtcaagattctgctgataaattttacaagcacttcaatggaagacgattttcatctctagaggtatgaattattctgttcagttaaccccaaatccacttgaacttgggaaagttaaccccaaatatttgaatataggaggaggcttgtcgtgtgcttttcacggtggatgtgcattacactggttccattgaacataagcaatcgtcttcggcaggcccggctgatcagcagcccgcttgtccagtttgtcttggtatgtttttctatatcgggtagtgtttttcaagtgcttgtttagttggaaattataacagaaattaacttcggaagaaataaagaaacagataatgtttcaattcatatcctcatgctatttttggctttcattacagagagact

SEQ ID NO: 51218 - DNA, 1594 bp, Cannabis sativa
agagttgtcttgctgataaagggccgcatctacatttatcttgagattatttgttgcaggtggtgtccaaagctcagccccttcatcactattattaaacgatagtgttaaaagagcgcttttgtcttgagctttcctccaatgttcaagagtaattgaagagttgaccataacttctttgacagtaggcttgtgttttttccagacaacttggttgcaacctttccacaaggcccaacaaagggtggctgcacgacatatgaagtcgctgtccgtggtacgtaacagctgctcaaaccagttgccaaccgagaaagattggtcagtaagcacaggccgtccaaagttattccagcaggcagtagagaaatcacatgaaagcagtgcatgggagattgtttctggtgcagaatgacaaacggggcaggttgaagatattggaacatgtttagtgacaaggttcacacaggttggaagagtacctgtgatagctcgccacaaaaaattcagaactttaggaggtatcttcaagtgccagaatttatgccaaaaaccagaattatttggccttggagtgactggtttttggctctgcagcaggttgtatgcactttttacagaaaaaactccattaggttcagctgtccaagaccagcaatcgggtctagaagaggagcttagtggaatattgagaattagatcagcttcttggggagaaaacagatcatagatgacttcagcatcccaactttgcgaatttgtggcaaaaagagagctaacagtatgtattcttagcccgggatgagtagaagttacatatctgttgctatttgatggcagccaaggagtacccaaaattctagtacttgtaccatcaccaataacacgagccaccccatgccgaaccaagtccttagcaccccaaatgctacgccacacaaagcttgggttatttccaagatcaaatgagatgaaatcagtatttggaaaataccttgctttgtagactctaccagcaagagagtcaggcttgcacagtaatcgccacccttgtttggcaagcattgcaagattaaaattatggaggtgcctgaaccccattccgccttcttctttaggagttgataatcgatcccacgacatccagatgatgcctcggcctttactagaatttgtcctccaccagaaattcgccattagtttttctatctcattgcaagtaccaattggaataaggaaaacactcatagcatatgttggcaaagattgaacaacagttttgagtagaatttcttttccagcacgagagagaaactttccatcccaactattgattcgagcaatgactttatttttgatgaaaccaagcaccgcattcttgtttcggcctataatgtttgggaggcctagataaagactgccttcaagagcttcggacgtatggagtgtatcacagaccatattacgaatggtagtgtcagtattaggactgaagaagatcgaagactttgtgtaattgattttctgcccagatgcattttcaaagatgtgtagaggattggatatgctatccgcggcttctctagtggcttga

SEQ ID NO: 51219 - DNA, 1852 bp, Cannabis sativa
tccaatcaattacagttagccaccattataaagttaattaatgtaacttatatagtagaggcaacattgcttataatgggcacccataactaaattagaaatactcatttcctgaattctcaactgatagcaattaatcagagatcattccttgatctcgaagtttcatttttatatttagtagaagtcttaaaaatatttttaaacacatccaaagacatacattcctcaagtatattctctattttattaataattccttggcatgaactaccatgccaacttatagtgagtcccccgttgatgatgctaattcatcaaacatatactttttctgtcattaccactaaggttttactccctagttcatacgccagcataccatttctcactttcaatcatcacatctttctacttggttaacccctctataacttattttacactcaactatatagctcgttatttaataaacagcctactttgcagtccaacattcaccaaccacttgaatacatgcccattaaattgcatcccagtttatatgcttttccattctgggtgagcatacctttttatcattgcttaataagacaatcttttcttgaaatttcaatagtcacctcgtataccaaattgaacatctggtcaaatataaaagcattctccatcattaccatatcaccatgagcaattcaaggaatcttctttacctcagtgataccactactctccctaatgttcggttatttgataccatttgtaacgttcctgcttcaagcctccattggcccttactcccatagaatggtggctcttatacacgagtatgtcactttggatgtttcatggaatgatgattgaccctttaggtcaacttgagtgtgcccaatgtgctttgttttgactcacatgtttcttgggaaaacttccaaggaagtcacccttcctgaatgaaatcactctaggtcaaggacactcaactatggagttctttcgtgatggctaccaaaagaaatatacgcctttttaatataggtagccccaatcaatccattcaactcccttacatctatgtaatcccattcctacatagtctcaaaatccaattcctaactgtagctgtttgattcataccccttttgatctcatttttaaatagattaacccacataattgtctcctttaattgacctagaattccaagcaatactcataaattgtccaacatttgctaacactagatcacttttggacaaaaagattcttttctctaaatcaattaaatggatgcctccattggctactcatgtcctatattccacttaggaataccatcaaattttactcatattgtgaattctctaactctctaccctgttaaatgagttaccactaaataacatacatgcaaagacaattcagattccttgatgtctctaactgaatgtacaatgcttaatatggatatcaatttaaatagcaagtgtaatattgcccataaaattctaacttgagtcgactgaaggatagatacctgggtcaccttgagtcataatcagcacttgggcaggacccgtacaaatttattctttagcatcagtatttttaaaccatgggcatgttcttttcatatgacccactaccccataataataagatttggctctacattagcctaaatagcacatttttgcatcttgaacactcaggataaagttgccatttcttattctcacttaactactatcttggtcaccctagaaactttttgttctatcccataattggtggttcatttagttttcattttgtgatctgctcttaagttgacttcatatatttcaccaca

SEQ ID NO: 51220 - DNA, 1595 bp, Cannabis sativa
gtaccttgaaagtcaactgaaactaagcgaggagtataagaaacagtgccctgcacatttgaacagaaaaaaataagcaagacaatacaataatcatagtgaattctgaaaagtaaatcaataatcatgccattatctcaatgaaacacaacccccttacagaaaatgacatgaaaatgttgatcttaaagaagagaaggaagaaagtatctcacctcatgtgtctcaccagtacggtacaacacatccatgtttaaattttgattactgaagacttgatcagcatgaggatccaaagccaacccaagcaattcatccttcatcattgaacacatattagtttagacatataagctttaatcaaatactaatctatgatcttaacgaaaacaattatagcttcaaatttcttaaaaaataagaaaagtaatatcttaattcctcaatttattttgggataactaagctagttccaaaatctgacccagcaaaaaagtataagcaaaaccagctcaatggcaaataaatcactttgatatataccaatcccaactgagcccaacagttaagaaagttcaaacaacaatcatttcttctctaattctttaattgggaagaatgtaaaaaagactcacaaatgaaaattagtttacctgaaagttccagaaatgggagccaacatagtttgcgaaacctccaacttgaagagtgacgatttctctcattcttgaaaacccaaaatggagctctagagtagggtttaagtaccgaccttcaacttcaagggtttaagcttcggaagagcagagaagccataaaaatgtaggcaaatgaaaccatctacagagcgaatcgaaccgagcaagacgagtgagtagaagccgttttgttagctctgttcccaaaatccaaaactaagtaaatccacaaaagccaatattaaatttatcattcgtctgatcgatatattacaagagattcaacaagtaatgttattacaggagattcatcatcatcatcatcattattttataacactaatatatgatctgatccatacatttctatagttcagaattaaaaccaaaatcactaaatcagtacctgaacaaaagaggggaactataccccagagttaaaaattgaacagagtgttttcaatcatattttacatgtgaaatttgtcaaactaacaagataaaatactaaaatttgtaatcacacagtgtaaaccttagtcattttgcgactataatgatcatttatgatcacacagtttaattcatggtcgtttctgcgaccatgcaaagttattttgctgataaaattttttgtaaagttattttgcatttttgctaataaaaaatatcataatttttacaaaacactctattttgcactatggtaaaattgttacacattctcaatcaaaagaaaaacaaaaaccagaccacttctccaagtattacatttctatcagattttcatgctaaaaaaagtcagctttacatgaatttactcaaaatctacattcaatgatgtggtagttgaaaatttagctaaactaattggcctaagcaaaaaaaaaaaaaaaa

SEQ ID NO: 51221 - DNA, 2359 bp, Cannabis sativa
gagccagactcaccttatgtctggggccatgctaccgctttaggattactttataaacttcttagtttttgtcagccttgcgccttatcaacttattcctcaagtgtaccgcctgctttcaggcttgtttattttctatgtagccagaggctaggcttcacctagcccgactgaagttttatatttttatgatctcttgtttgtccccaagaagggggatagacttaaagacggttttttcacactccgggcctatccttctaatgagggtccggttccttataatttcctaaagaatgtcaaggaatatcgccatcagtttttattttcttctgatttctaagacgtagaacgcccaaaactgctcacggagtgtgtcggggtacctccgatgcattgcaccgcccctacccagctcttcctccagcatgtcaaggtcttctccacgtacgacaaggatgggttgaatgtgggggacttagtcacgactacaaactgcaggagggcttagctaatcactgagagccaatcggtggatgattttaacttatccaaggttctttgtcccaatattcgcagtccggactccgagaaggcactccgggtggacattatcgcctccgtggaagaccggtacaagaagtacctctttaggagggagcaagagttatcttatatcaagggtcaagctgctatcgggagggctcttcgggtcgaagttggcaaagagtaggtgccttcccggcctaagctaccgttctcggttttcaacactggggctcccgacgccagtacttctgggtccagtaagtttccattagttgttcatcatgtcccttctgctcaacattattctcgatgtaggcctgtagagtttgatgaaagtctccttagatttagaatgccccctacccaatggggcgatcatgccatgagtttttatttttccaacttaggtcattttttaggccggtcccggatggggtccgggcctcccgcacctatccctctagatcattcagcctacttgtcttccagctggttcctcccctcgaacagttttcttagggatgacgacacctgccttttaatgcatgactttgctagggctgaattagattgtctgggtaggattagttttactgttttgttcttgcgtgcataatttcttggtaatgttctaacacctttatctgcatgtttcttaaagtagctaggccaatggatgagctcttggatgcccttgctcagacctacagtcccgacccggccctgcctcaggcacaagaccggacggttactcctgggaggtcttcttcaaggttccccttaggccaaattgttttgattgatgagaacaaggaggtagaagaggaagaggagggcgagattctcacccctctggaccggaagcgtaagggaaaaatggtggagaccaaagctgccaagaagcccaggagagtcgatactccggctcccaatcctgattcaggaatcccacccgagtcggaggagtacaccgttcctccatgtatcattctaactcccgttcctattgacgaagaaagaaactaactctaaatttccaagcataactatgccatggcagaatacatgaaggggaatgccgcggtggaggccttgaaaaagatcttacgggaagccgaggacaatatcacttgcagcgagtacgctgggaatgtctgggatctaaatttggatcctttgaccaactggttcaatcgcttcattgggccaactcttgctcccttcacctcagaactaatgagccaccttgcctccggccttgtccaactccccatgaagaggtacgcagcctgtgcttccactaacccagtctacgagattcaggacataagtgcggccatgaccgcggtaagtttctatcagtgtttttaggccttttgtcttttggggcttggcatcatgtacttacacatttttcttgttttaccagattactaccgagactggtcatctttctaagactctgattgaccatgggtacaccatgtctgagtttgggggcatggaagaggccatgaaaagtcttcgggacttagaggcgcagaggaagtctatctggaaggaagcccaacagagggaggcccttttggagcggagccatcaagaggcgctaaaggcaaaggccgaggaacagaaggctaaggatgatgcgctgaaggccaaggatgaggctgtgacaaaggcgaggcgggagctccgacacgctaaggagtccgtgtaagaattgaccgccaagctaaagtctctagaagagttgcaccaagctgatttgcaaatgacagccaacctaactgttgaagtgaaggggctt

SEQ ID NO: 51222 - DNA, 2330 bp, Cannabis sativa
ctctctctctctctcttaaactttgcatttagaaacctatcacttagcaaaaaaaaaaaaaaacccaattgttcttcttcttctccctgtctttgtttctaaaattaccacacgcgatccacctccaagacgacaaagcaacgagcctccaaaaccccgaggaggacgaaccacctccaagacatcaacgaaccacctctaaaggcctattgacaaagtggacaatggatggactgaaaccttctctgccatcatcgaccgaagggcctccctcttcgacgcccttattactggtttaaggggtattttcttatttgtctattttattctctctctcttctctctgatctgtgtaggtcgacgacattttgaaagtcgtcatggagatctcatcgttttgccattgctcgtggtttcgggtgggcagtcgacgatggttcttggttcgtcaagaatcatggttttgagtgggcgatcgaagaccgctttagggttgtggtcgatggcgcatcaaggttcattgtcgaagtggaaagaaaattgtgatctgatttgtatttttatttttttgtttgggtttctaatatttagatgtgttcatgcccatttttgggtttttattttcattttagtgttcatacccattgttttaggtatttatgttcaattttttgtatggtatttattgttcatacccaatgttgatgaatattatgggttaaaattttaatttggtgtttgtattttagatttttatttgttgaattcctctttcagtaaattatttttttgttgttgaatgtaaatatatataatgcaatttttggccaatatatatataatacctatttttttgtagttttaagttttatttttttaattaaaaataaaaataaattaaatttgatatatatttttttgagaataggaaatttgatatataatgtatattaatttatttttttaatttaaaaaatatgatatagtgatactctttgagcgtggttgttatcagaaatataattaaaaaatatataaaaaaaaacacgaacagtgactcgctgaaagtctatagtggtgtgcaatgaggaagtctaaatgttttagtgacatgtgccaaatgatcactaattattatttttcctggcacccacattagtgacacgcattgaagagtcactaatatttttagagactctcaaaatgggtcactaaaccccatatttgtagttattgtaaaaatgatgcaatatacagttacaattttctttttcgaaaaaaattttccattataagttcaatcatttgaacaataaatgaaagtcaagagagaaaatgtataatataattaataattaattcaaaggaatagatgatactaattcaaatcctactttatttatttttaaaataataatatggtaattttattgcctatacatactaattttaatgtacaggaaaaaaattaaagtattttttaggtttttttttgaaagcatgtatttttttattttaagtatttaaaaaaatatgggaagatgttggggtgcaaatcagatgcatttgaggccaattatgcaatcgaaatagagatttgtgcaaggatcattgtcattcagtttgctatgggtgttcataaaaattgataaactgaaactgaccatcaaaccgaccagaccgtaaccgaatttttggttccacgtcatcaccaaatttggcagtcggtttcgatttcggtttttttgacatggcggtcggcttcggtttttgaaataaaaaaatggttaaaccaaaaaaatcgccaaaaacagcaataaaccgcccaaaactgtccaaaaccgccaataacagtccaaaactgccaaaaaccgtacgatcggttttatacggttataatttttaaacggtcagttacgactttcgtaaaattaaaatcgtaaccgacctgtcagttataaaattgtaaaaaccgaccgattttcacccctactcagtttgttggcaagaatcaattctcaaaccatgtgttttttccagatcgtaaagtgttaagtgatgccacagttagcagaatttggccaaatcgagaggctgcttgctagtgtgatgttctatttatattacttttttcacaaactattttttttttcaattggtaccctagacatctcaatggtgatgctaatgatttagcaatttgggctagactttctggttcttcaatttttccagttagcaccttttgttgctaacaacttctaaatttatttctgtgttgaataaaactttactataagcaaaagaaagtatatagaaaaatatttttt

SEQ ID NO: 51223 - DNA, 2219 bp, Cannabis sativa
gaattggtaggtggcatttttcccgtatggtaattaagggtgtcaaattgtacaggctgggcctcatacgcgtgtcatcccatggcttctcctttttgaatttcccttatccctagtcgttggatcatttggtcaggtacacaatgacatgcatgctctgtacgacagcatgttgtggggaaacaacctctgacgccgtacatgaaaaagcctagttactgggttcgtagtctgataggaataggcgaggcttctgtgggctaaaggcatagcccagtgtagcaagtctcaaattgccttgacccttctgggaaaattcatactcttctcgggagcagataactttggttcctggaacggagggaaacctaggctcacggataccctccatgacgctagcagtcagggaactccttatcatagaaactcttcctgcgaagttggtgcctttatctttctagagcatcaattgaggaaactagtcagctaatgactcctcagctttccttaatcaaaatccacatgtcatacttgcaaaaatgcagataacacttagtgctcgcaagaggctctcttggtcaatacctcatggtaagatgggattggtctgtgttgccgctggtatagcagcaattacagctatgttgacagggatcattacttcaatggttgcagctggtacgatcagtgaatcctgcatgccttgatcacccatttggggatcacgaggctcgtcatcatcgcgattccttagtgtccgggatcgcgctctaaaaatctcattgagatgatcgcgaagatcgcctctatacacatgctacctacctcctcctcgagtctctacagaccacgacctggtataaatgctaagagagcgactattagtagaaaaaatatgagattcgaattcatttacctctactcgcgtcttggcccgactttgtgggttttgtcgttcagggtcttccttctgcagtctgtcttctattccagcatttccacgactagcctcaagtgcaactggctccttatttcgagtggagttatgtgtgggctgattcagattgagaccttgttcgatcacacgttccttacaaatatgattattgttaggacgctcattttggtgtctaattatggtggttacctgacgattgcctcaacgcatattcgagacccagggtggacgttaggtcctgactcttccatcaacttcggcctgtgatgcccacattttcttctgcatggctgtgtattaagctgtcgtaagctggataatgcatttagaggctacggctggcgtgataggcgggaagtggcccacgatggctgctggtgtcaatgtttccccaatgtgaccaataatttttggggacagattgagagcggtgatagtggtccgtcccacacctccgttgattgtgttagttggattagttccatcacctgggagtgggacattcatcattttaacattgaaagatccagtgttgttgtttccgtttgtctggtttgcagccatccaaaatcaaaagagactttccacagacggtgtcaaatgttgtcggaggaatttatacaacactaaatagaaaataaacaatatatatttaataaaatagtagtgagtactcaacttaaaatagaaagtatttgaacgagactgcccagataatagaaaagcagtaaaagtaatgaagacaaagatgtatagtggtttagtccattgttgcaagggatttctgtcttaatttattcatgttggatcatccctttatatacaaaacaagtgtccttttagttacacagaactcaatcagttatgaaatagttatacattaaatattatcattaaattataataaatgtaaaataataaatgaagaacagttaaaatctatttcactaaatacaacaacgtatgtgacttctatggtgcgagttgcctgtttatattcttgcacaagctcgtaggcttgagatgcgttttatcattctaaagtgggctaatgggcctcgtattaaggtatctgcgttctggttgagtcagatatatggacaccttatcagcgttaataacatagaacatgtgattccttatcgaattatcgagtcatcgagtacgctgggtcatttggaccaatttgttatgtaaagaaacgatctttactaggtcacaagtgatgactacttaatcatcgcatatacctagggatatg

SEQ ID NO: 51224 - DNA, 597 bp, Cannabis sativa
catactagtacaaatactaattaagtttatttatttttctttctctcgatgttgcatttgcaggagaagctgacctaaatccatcagtatcaccttctggaaagatggtagcagtggcatcattccaggaaaaaggtggatgggatggtgagattgaagatctaaagacagatatttttgtgatgaatgtagataatccttctgatcgcaagttagttataaccaatggaggttggccgagttggggaagtgacaatgtcatatttttccatcgtaaaaaaaatggagtctggggtgtattcagagctgacattagcaagggtttacaatcagaatgaattcgtgtcacccctcttaacataaaagcaatgactccagcggccattgatgctaacactgtggttgttgcaactgttcgtggaaattatcgacacattgaaatttttgattctactaaaaaaaatatacaaattactgtgaacatagcaccaaacactgaccactttaacccttttgtgattgatggtggaaagagcattggttaccatcgttctaaaactaactttctaaaggtacactttaattttttgttttttt

SEQ ID NO: 51225 - DNA, 1578 bp, Cannabis sativa
gcaagtacccttgggtacaattgggcagaactttgtttgcacctcatcactttttctagttgctcacttccccttatctcttttgtttaggtgatcttgagtgacagttgggggaggtgacaaccgcgttgacaaagattatgttcgtcttccctttgtggactagtctccagtgaattcctctagtagcttctcgagtgatctagaggtttgtagtagcccattattgcaaggatcaaacaaacatgttgcagggcaccaccttttgaccctcacattgtcaagatatcaactaggggtatagttagtgtagttgaggaggctgcacagcctctaaattgcaaagagccagaggttggcccaacagaggtgcttgtggccgactaggatgtggagagcttgaatagtgagtttgaggctgaggaggatgtacctgtgaggaggagacatgatagaacatgttctattttccacaacaggcttctgggctcatatgattaggtcaggtgacccttgaataggcttagtcagcctttaatggctagagtggaccatgtgctaggggaggctattgagtctcaagttcttgatcaaggggaatagaagaacttataggtctctcctccatccatatcaccattaagagacttgataagatcaaggagagtggactagtaggagggtgttcagtatgagcaaccgtcgaggaaccaacgagagcattggttggcccttaactagatggcctggtcagagcaccacattgagcaggggtagtatttcccttacacccctaattaagagacattgtcgcatacttcgtagtgtgcccaacccaaatcaccccaaaaagtataaagtacctttgggcaatgttcattctctatgctgagttaggctggcctcaaccttccccttataagatagggtacttctttaattgaaatttttccaaaaacagaactgaacaagatacttttactatagtcagattggctatcagtggttgagtgataccaacagaacgcccttatcgagggtgggagatatgtcaagaactattttattgcttggggcatccaacaagtttttcatcgttgttatcagagagtgccaacctataaacactccattcccacccttccgatgtaggatagatcaaatcatattctaaccctctcacttgataagaggaatatattgaggctagcctatatagccaacttctagagatatggtttgtatcccccagtgtttggcattgtaggggctgagggcctttcaagaggtccagatggagccctaatgattgaggaggcttgcccaggagatggacatagtcctgatatggtaaaatatattcccctctccaaaattgcaaggaacttagagagaaaagaaaaaaccgtaggccaatgcttggcttgtggaggtactgttggggatgcaactttgctcattaagcctggaggccagggttcttccagacccacttgtctcttgcctacgtctaaaggcaagggcaaggcagctactaactgtttagatgactcttctgttgggatttgatgccctaaa

SEQ ID NO: 51226 - DNA, 726 bp, Cannabis sativa
aatatcaaaggtcaagctggaagcttagcaacattggtgaattggtttggtgcctggttgtgttcctacagttttaactttctaatgtcctggagctcttatggtgagtataagtgacaattccttttatttgtttcaataaacaatgtgtattaagtattaattttgttctttttactatagatatttacttaattggctttgaatgtggtctcaggtaccttcattctctatggagcaattaatgttctgagtatattgttcatcatcatagtggtgccagaaacaaaagggaaaacattggaacaaatccaagcatccattaacgtgtagagatttgagaaatcatttttattaatttttttgtaataaaaaggtattgtttttgtgaggaattttctttggaaaatttgactatttaatgttttagtactgtaattcttggcagtttgtaagctcaaataccaaaatgaaaattgcgcaatgtattacacaaatcatttatggtatatttgagatatattctttttttgcttatcaactatatgagatatattctttttttttgctgaaatatttgagatatattcttagtcgtgcaaaaccatgcctgagtttttttttttttttaattttttttttattattaaccataactaatagttaaatgttaaaacaagataaaatcatttattaaagcaaaaggttggcttgctaaggtcagac

SEQ ID NO: 51227 - DNA, 612 bp, Cannabis sativa
atccataatgttcgttggtgattatatgaaatgttttttccctgtgatcttttcatgtgtatggggcacatgtgcattaccggcatttaaatataaaactctcctttgtgcaagcattacacatgcattcttaaacaagtgatcaactattgtaatttgcaaaacctgaaatcgttcaaggcgcattggtcaagctaaatattatgtttgtgtatagattcctttttggcacgtatttttctggaagctggacttatagcgagcaataaggaagatccctacatagcacaagctttattagtaatcaaagctgaattcgctgaaccattagataatattagccagccctaaacatgaacttcattgctttgaaactacagaaaagttaatattgccaacaatacaatttagatcactattcattacttatctgccctccttataatcagcatgacatcattggagcactccgattggtcatgtaacaacccaccccgttgtttagtgacgcagttaatctcattctcatcaacccttttgtagaagaataaaagcattggtatctaatctcacagcctgaaatccttctcttattgcatagagttctacctc

SEQ ID NO: 51228 - DNA, 675 bp, Cannabis sativa
tatataaatatataataattaaataattataaataaataaggttaattttcttttttctctcaaaaaaaaaaaagattaattttctttttaagcattgttataggatattttataatgttcaacattatatataaattattattagtaatttttgatattatttattaatttgccacctcttattacttcgcacggtaaagtgcacttaccatttgtcaaactctcctaacttccaatatatatagcacaataatgtgggttaccatttaagtaattaattattaattattggagtgttgaacttagggattcgtggggacctgcccttaatgaggcaaattcttttttgtctaaatgggaaacgggataagaacagagattatattttttatccgcgaatgttaaatggaataggaacaggcaggggcggagacagaacttaattactaggaggccaactattaatttttttttttcatcccttcactaaaaaatctttttaatatatttcctatcaattttgacaactaggaaagtttttcagtccaatattttttattatagtgtacatgacaattttcacagaacacttgtaactttcagacccggttcaagcttgaagatgaagtctgccagcaaagcccactctcggcagcggcgcgtgggggcgcgtg

SEQ ID NO: 51229 - DNA, 844 bp, Cannabis sativa
ctcatatccaaacacgccttgcattttaaaatatagtgtaattactacccttgtaattaccctacctagtaattacacaattacttccaaacacaccctaaagtgtttaaccttatgttctaatgcacaattgctattagacttatttttttgtttttgttccaattatatttatttttgacacaagaaggagaattgaatttaaatacttggtaaaaagagtatttatttttttactttttattttagggataaaggtaaaaaaaaagtatgttattcaagtttattgacagtttaatttgttttaaaaaaaatgattattttttggtaactcacctttaccaaaagagtgtttcgataggttttatatctgtttcgacatttataagagctttttagttctttttttgttcataataatgtagattataattatttagaattatcagtaaatttttataaaattggaaataaagtttaaatattttattatacgtgcaactgttttttcttatatacatgctaagtagttgtttgaactttattttggacactataaattattgagaattttctaaaaatttataagtaatctaaaataaatatctataacttatagtgacgaaaaataaattagacgatttttttttctttctaaatagcaaaataaaagtctacgagaattttttttttttttactatttcgtagtataagatttgttaataatattttttaaaatataatttttatagtaatatagctattttattatattttattaaatttaatcgtgagagtgaagtaaatatttcactatttttacattaattaataatagtataa

SEQ ID NO: 51230 - DNA, 3715 bp, Cannabis sativa
cacctccggtcttaaccatttcactatttcctctaacgttttgctgggcgtccattatctaggacttagcctacgaacccatgaggcatgtatgttcgacagtggtcaagtattttcaagactacattagaatttgtgtaacatttcacgcatatatgcaatacatcttaaatagtttgctaaaaagtaaagcttacgaagccgcgagttgagctcgacactggctttaattgtacatatcttgacggtctttagggaacaacctggtggctctaataccaaaatcgtaatgcccttatttaaaaacttgctaaactaaaactgatcttatcatattatatttatatagtttataagtctggatcttgaatataaaacacatttgaaaaatacatttaaatatataaagttacgtaataattgttttttacaaaatacagagcatctcaaaatgccataagaccgaaaccatcgaggttacgctgccgcgatatgtacaatccttgccaagctctaacacacggctcctccagcttagcttttcccttacctacacagggtagcaaactgatgagtcgacagactcaataagacatgcataacatatatataagcaatgctatattggctttatgcttaagccgtcctaagcccgacaactgagcttagcaaatggttaagaacattcttaatggaagtacgaccgatgtaccatatacactagagcaccgactttgtactcgtgttggtaaagccgaccactgtaccatatgcactagagtaccgacttcgtactcgtgttggtagggccaatttgaactcccagaagttaccaagtgttttaccacatgcactagagtactaattctgtactcgtgttggtaacaccgtaactactctaaaactctacactgtaccaacacccttaaaactatattttcattagtgttagtagtgtaatcaattaataacaagcatacattcacatatacatactttatgctatcgtacctcatttccgtgctcaggtgtgccggtcagcctgagtggaattgcagctcgacgtttcacaggacccttaatcacatctttgtaattttggtgagagacactctaaaacactttttggggactttacaatcaaacaaggaataacccagtttcttaggtcccactaaaactggttaaccagtttagtgcaaggaaacccaaaaatcgatcccttaatcacaaatcaaccccaaactctccaatcatctccagaatacctgtatacaatatagtgaaccagattcaagcataaaaacacaataaacaaacccagaaaataaaaataccattagagcccaaagcttgagctcacaaactccaacctcacccaaacctcacaactaccaactgaaacagctataaccaaccttaataatctcaacctaaccttagaattcaatctcaaacctttgcaatacatataacaacttagaatcataattcaacaccaaaacttaactttcatgcaagaaacacaaagaggaagagactagggaaaattaccttgagccaaagcactcaattacaactaaaaatccttaattcagaccaaactactccaaccctagctgctgccacaaaatattaagagagaaagaaagtgttgtagagagagagagagaggtgtttttttttctagattctcttgtttttcttctaacttaagtgtaaaacccttctttttttttatttaattaaaccaataatcagaactaaattcccaaataagacaaaataaaccgttgtcaaaagacctttttcccctattaacttaattcaaaagttaattattctcaaaggtaaattggtcatttcaaaccccaaaaattcctaaaacctccaatacctaacaatgacactccaccaataaaaacattctaaaccaaaaaaaacgtgactctctaatggcccaacgtcgctttccactgctaccgaggacaatcacagaaaatgagaaattcacatacatagcataattaatacatgttaatattaaataattctcaacaaacatgcaaatcataattaataattaaatctcataaattaaccctaattatctaattatccaacatattaaacttaggcggtctttgcaaaaggtccaataacaatggtaggcaaggcaacgggaaaaaggaaaagttcacaggcaaagccgaacacacctctaaagaaaatacctccaagttcactacattctctgtcctaactgacgttctagagatgatctacgcgacaactcatctatggtcccatacaaaaaacctactcccatgaaggacgtaagtaagagagacacatccaagttcaatcattttcatgtagactatggccacgacacgaatgagtgcaacaacctgaagtgggatattgaattcttaattagaaagaataaccagcatttgcaaaaatacgtcaaggccaatcagaattaaagggccacccaaacagacaataatcaagatctactaatgcctccactagtggacgggcatttgcaagttattattggaggcccatggagactcgggcaaagctcgagaaaggtatgcccgagccttacagcatgagcaaaaagaaacagttttggctgtagaggagagaaagccaaacataccacggctaggggaacccactataactttcactgaagtagatgttgtctgcgtccacttcccgcacaaagatcccttggtcgtggaggtacatatatcaaataaaacagtggccagaaccatgatagataatggagcctctttaaacatgttatttaagacaacatacgagaatatggctccaacttaaagatttaatccccagtactcaattggtgtatggcttttccggccaaagtgttacacctttagggcaactccgtttacccctcactattgggcaagctccaaaaagcataaatgtgatggtacaattcctgataattgatgttccatcagctttcaacgtcatgttaggccggccagctctatatgacttaaaagctgtcacttcagtttttcatttgtgtgtcaagttcccaacaaagaatggggtagggtgcctcaaaagaaatcaaaaaattgcacgagaatgctataatcttgccctgaccaaggtaagaaaggataattcctctggccagagtttggacaaaaggaaaagtattgccctataggaagtcgcccaaggtagggatgaggatgtggatccccgacttggggaaccaaacacaaatgtagggctattggaaaaatgggaagagatagaaatcgacccaaatgtccccaccaggaaactcaaagttggcaaaggtttgttgctcgaagtaaaattaactttaataaaatttctaagaccaaacctagacatttttgcctggttgcatgaggatatcgtcggtatcgatccttttgtgatatctcacgccctaaacattgatccaaacttctgtcccattcaacaaaaaagaagattattagacaaagaacgagcacaagcattaaaagaaaatgtagaaaagctgcgtaacaacaagttcatcattgaagctttctacgaggcttgggtagctgaccccgtactggtacccaagcccaacataacatggcgagtatgtattgattttaccgatctcaacaaggcatgccccaaagattgttttcca

SEQ ID NO: 51231 - DNA, 1503 bp, Cannabis sativa
ttttttattcatttttaacttaatagaaaaaagtttcaccatcaaatataataaatagagattcttcaatctccagaacttgctagacttataggtgatgatgttggttatttaattcaaattcatacccccctaccttgtatgaagttgttggaccttttcttagtattgagttctccttgatgttactaagcctatcccgtagaggaatccaaatccattttaggaaattttttaaattaaaatggcttaactttataaagagcttttgagagcccctcccaaatcggtttataaaagaattctgattgacctttctaactccttgccttatcatgaaaatgcctttaaaggctaacaactgttatatggatcttaatgagactgtcaatcaatttcttaacattaataatgctagtgtggtgtcttttggttataatgttaatcttgaggggggttataattatgagattgttggggtttctgtttgccatgttaataccgctcctttactgaattctcctattcagaatgctgcttgtgttatttccacttatcctgtgcaagctcctgctattattgctcattccgagaagggcaaggaatttgaagtttccaccttagagatggtagttttgtttctcgagtcaaggttgttagctccatttatggtgtcaagagacccttcgttaggtagaagttcctgttggtaactctgtttgtagacttttgaagagaaatggagatggttatggggttttttcttccctttcttttactgaattggatcaagttgtaccagcgagtgttgctatgcgaccccagcgagtgttgctatgcaaccctgcaaggaaaagtgactcttttgaactagaatacttgaggtttgaggagtactcaggcatttcgaaatctctcccttgtggttaaacaacatcaacctcaatttctctttgtcatggagataaaacttttggctggttctggttctaagcttaggattaagttatcttttgataatattttgaggatcttaggaaatatttggggaggtgtggggtttgttatttttttgcaatactgctgttttgattaatattaatacttactcttcaaatcatataaattgttatgtaacttctgatgataatattaaatggcgtgttacatctttttatggttcttcttatttttcagacaaaattaacatttggactttgcttaatcgtttatatgatattgcttgtcgtggttgattatgtgtgattttaataattatattactttacctaatagaaatagtgctaattctcctccctcttaagttttgagtgaatataatattttccttatcttatattagtaactagggaactaagccgcgcttcgcgcggtgttgtccagcttttgtaatattttatatatatatattgtacttatactgagtgatataatttaaaatataacattttgatgtgtgttattataaataaagtaatagta

SEQ ID NO: 51232 - DNA, 965 bp, Cannabis sativa
taaggtggtttgctctgtagtgtttgctagctaaatttcatgttgcttttcttcatgtccacagtgtcgtttgacatattttatgtcgtttattgtttctgttatgtagatttgaaacgcgtgcggcgcgtgatcgtcacgccggtgccgtaagggctggagaggaatttgtggttgccgtggaggatactcgccctggatacgtggccgctacatttaaaactgctgaccagttaacgggccaggcttttaacgatgtcggttctatggatgatgaaggcccattaaaactggaccgtacggacaaagaccgccaaggcaagatgtgatcaatttcagtattttgggccggaactataatgattgggctttttttgttttgggttctcttatcgtttggttgcaaggctaataacttgggttttagattgacaccattcaatctctccctatctccatgtaatattcactcgggtctttatggcttttgcttaactttgtaacttcttttttatatataattaattaattacaaatatcatgttttgtactcttttttaagtcgtcgttttgaagattggcaaggcacaaccaaatacatcaagaccatagcctttttttttaagggaatatataataattgaagaaaatacaatgcacatgttatgttgcgagattaaaatttatacaactaaagtaaattaaggataaatattattttggatttggtgtttggtaaaacttattaattagatttttttgtttgtttgtttttttttttttaaataataaaattgattttgtatatttttaaaatagtacaaaataaatagaattataaattgattttttttgttaaaaatttgatttaaagattttatgataaaattgttcatatttttttgtatttatttgtgttaaaaattataaatagttttttcagaaccgtggtaatttaaacaaac

SEQ ID NO: 51233 - DNA, 868 bp, Cannabis sativa
aaaaaaaaaaaaaaaaagtctttgttgtgtagaggttagtgagttcaactttacctctattattagtgtctttgtaattgttttgagtcatcaaataagtctacaaaaaagaagaatgaagtgggaaactttcgggagaaaattgtaagtcttgcatcaggaggaagcaagtgcacttcaagcagatcgaagggagttcgagttcttaaaggtttagaaaggttcatacgtcaaggagaatacatcaagcttgcatcatacaattagagagaatctatttatgcataagtcaaaaactttatatttttgaaatttttactaatgaatctttatttttgggtgtaaccctgtgcaatagtataatctgtaaggattgctaataccacttataaaatttttgtgtgtttttatttttctgcactttagttctttacaagttggctagtctgtagttacaaaattttgatctgtagctacaaataatctattttagtatcaattttattatttcacatttaattaattaattaattaaataataagttggtgattataaaatacaaaatttcatttgtaggggctttttaaagtattatcaaattaaaaaaaatagttatttttaagtggaactctttttagtggaggcactataatatttataagctatcaactaagtttgttccccgtccttacaaaataaaataaaaaattctaggtttgttcatcgttataataaatatcttacgaaaaatttacataataaatcaaaaaattttaaaaattacagaaatacatcaatacagaaaaaaaatcatttttattcttttaacttttttatttatacaaatacctcatcactaaaaataat

SEQ ID NO: 51234 - DNA, 717 bp, Cannabis sativa
tttgagaatggatgatatcccgggaaattccttgtctgaggttatcttcaatctcattgctcatttggactctgagggtagaaatcggctgctgtgctgcactggaattgtgatggactgtatttggaaactcagaaattcgctgctgcattcccctgttgttggtccgaatttggacaaaattcgaagggatatttgctgtagattcaatgaaatgtcgaatcaggatctgggggactacacaccagctccttctcgtttgcctattccctcttttcctgatgtgcgttcagacaaatgtctactggtggatcgtttgttcattggaggcaagtttggttgtgcaatgttggctctcgaactacaatctacgaattggtggtttgggcactcgtcaggtacctgcgaattgagcttggaagctgagatgaaagctgttcttttcgggttgcagtgggcggcttcgatcggatgggataatttctctattttatctgatgcaaaaatcctggtggaggcaatcaattcaaagaaatcacctcactggaagctctctgctctattttcctcacttatgaatctgttgtcttctttttcttgttgtttggttattttcagtagtagaaactctcttacttatgttgatggtttggccaaggctgcttgtttgaattcatattctgcgcagacctttgttggggagggatttccccctct

SEQ ID NO: 51235 - DNA, 796 bp, Cannabis sativa
  modified_base (754)..(759): a, c, t, g, unknown or other
tcattgacatctcagctttccttagagaaattgagtacacgtgtcctttaaacaggagtctggtctcgagtttctaggtgagaaaaatctcactataacaattagaattgtaaaaaaaaatgactttacattagttaataaaataattttctaactttcgtaatttattatttaaataaattagaatatatagtaacctcaattagaaatattaatttttgaaaatttaacatcttaatcattttacaatttttaatttaaatgaagagcaaatattttatttttatttttaaaatattttagtagattaaaaattattagaacaatcacaataatcaattttcatccttttttttaaattatatatatataaaataaatgaataaattaaaaataatcaattttcacaatagttttgatgcttgtaaaagtaaaattattctatgaaaatatatcttaataataataaatgaattagtatatgaatagatatattatttgtttttaaattgtgcaaaaaaaaaaattatatattattttaattaaaatatttaaatatgatgcttaggtcaatttattaaacttataaatttagttattatttaatgaaataaaagagcaataaaaagaaaactaatggtatcaattataataaaaaacagttttattaagttatgtgttataaatattaataattatgtggaataccaaatcttttatttattaccattaattgtaatcaacattcctcttnnnnnnagtttccctttttcttagtttccttttttcttagttt

SEQ ID NO: 51236 - DNA, 869 bp, Cannabis sativa
tagcatatatttaatcaatctcttattttagtccttgtattattttacaatagagttgtaataaatcttgattttcttccattgttataaaatctctaacacatctcacgttacaaaactacttctcttaataaataaataaattaggctttggattttgttttcatagacaaattaagctttgaattttgtttcttcattataataaataacataattatacgtactcttatataatatatattttctgaaaatcttatataataaatttatcatgatcagcttttattttgatgtactctacattgagtttaatatagatagatttcaattaatatattttataaccatttaaatttaattattatgattaaatggatgagtataattaatatatttttttagttattacgaataaattgatataggaatgctcttaatcattacaaataaatataaatgaaatttattgtaaggaaaaaaaagatattttttttaataagttgattacatcgaactataaaacgtattatgtatattcatttataatttagaaggcttaaactaattacgaaaatacggttttatagaattttaaatatttttattaattttataattttatttatagaaaatacaatttttcttgctaatttattgttatttttataatacaattatataattttttttgttatttttataaaataccgtaaaaatatataaatatataaaaaaatatttaaacaaaatatttaaacataaaaatgtaaaaattaaaaacaatagtattttatgtaattatcttttaaaaaattaagcccactattttgctagaggagctatgtgaactatcttttttgtttttt

SEQ ID NO: 51237 - DNA, 2858 bp, Cannabis sativa
  modified_base (1327)..(1346): a, c, t, g, unknown or other
agacgaaaaagatctgaatctaacctttgttgtgattcttggctctttgagtcacaaagaacacgaagaacatgtttgagttcttaaaaaaacacgagttttgatctatgcagatcctggccagccaaggaggccttgtttgaggcttggccagccaaaggaggctatcaaggggtctggccagtcaaggggttgtactccctaagctggccgacctatacctggagttagggttcttggccaaccactagactaggtcttggggtctagctggccactaaggtggaaccctggtcggccaaggccaaggctccaagttggcagccattttttctccctcttttgacctcaactagggtcttgtgacagctttggaggcatatacaactgtggccttatgcgtggtttctcttggaaactctatataaggctaggtagtgagtccattatagtaaattatacaacttaggacttactatatgtcttagtaagtgtacttaagacggtacttgggcaatgattgaccttgtacattgtgttttacctagaaggtacccttgagtactgttgacttggatgtgtttgtagctttgtcaggttgctcacctccccttatttcttccatgcaggtagcacaaggtgttgaataggggaggtgacagccgcataggtccctcatttacttcttatttatggctagaatgaaacagacacttcctagagcgcctccatatgaccctcacgtggctagggtggccataaggggtcaagttaggatggtggatgaggctgcttagccccgtgctgatgttgagccagagattgaccaaggggttgagagttctgatgctgaatctgatctagaggaggctgcaccagtgaggaggaggtactacatgatttgttctgtcctcctagattgtcccttgggtcgctatgacgccaatggtaacccgctgagcaggctcggtgagccttcagagcttgggctgtatcatgtcctagtaggggtgtacgtcggttagtttggtcagtttataatacattttattcaacccaatgtaaatatcaagttacaaaaatctaagtgcaatccgcccaattaagaaaaaagaaaacagtaacccacctaatgaaattggtcagtttggtcgagttaacccgtccaaaccgaccactaatattttttttgaatttttacatttaattgttatattttagttgattgtaataatgagacatatatataaatttaatttaaaattcaaatcaaccacaataaaaaaatttattaattttaattttatattttttaaatagtcatatnnnnnnnnnnnnnnnnnnnnatatatataataaaaacttataaatatatataaaaaaaccctcttaatcgggttggtcgagttagttctggttgattgggcggattggtattattttcaacctgcccaatataaagattgggcgggttatattctcgtcaagttttttagtttgtattttttgttgggttatcttggttttgtttgggagggttatttgctttggacagtttataaaagtttatgtacacccctatgtcctagagcagtcttctgagctggagatactagatgcgagatcacagggagacaaatgggtctctcctgcttctactcttttcgatgaggcctttagcaatattcttgctagtggcttagtgaagggtgtccactgtgagactccccgtagaaattatcgggcgcaccggctccctctaggttggttgacgtggtctgaatgccatattgaacatggggcagtgctaccgctacatcagtattttttggacatcactgcttactttggaatgtgttcgacacagttcacgccaaaaagcgtcaagtatctttcggtgatgtttatcttatatagggagctaggttggcctcagcctactccctacaagatcgaatactactttgatctgaagtctgagctgaagcagaacaggactgggtattttgatctcaatcaaatcggtcaccaatggttgggtgacactaattgcacagccatgtcgaaggtcgttgggtatgccaagaagtattgtatcgcctatggcctccgtaggatcgggcactatgaatttcggtcgatgccattcttcagacgctctatccctactttgcgaataagggatagggcaaaccacatcctgtctctctcggcagagtagagaaatataatccagttgaccagtgtggtcaattctggaagtatggcgtatatcctcttgctcccggagttgtaggagcaccagctgtagatggggcttgccttagagatgggcatgctcgtgacttggatgatgaggtaccttttatctcgcattgaacatgatctggagaggaaggagagggccctctgccggcgcctggccagcgggggtccagttaatgatgcttctctccatatcaggcccaaagaccaagcttttgagagacctacttgccccgtgcctgcatctagaggcaagggcaaggtagttgatagttgataacaccatgcttttgtcttatattgaatgtttatgattggtttctgactttgctatttttttctttttgcatatatgtcttccgggatgatgagaggtcttactgggggaccttcagatgagcccacaggatgagtgaaggccaaggtggccaggacttctcatggaggagatgttgtcgggttgccacttcctccccttctgccgcaccagctgggcagcatgtgatacaacttgcaggccagggtactaggaagcctggcagaggagcggggtcagttgctgggcaaagggctgttggaatatgttttaccag

SEQ ID NO: 51238 - DNA, 641 bp, Cannabis sativa
cgtatcagtgcaacaccaagaaacaagttggaccactaccagatccttaagtatccattgaccaccgagtctgcaatgaagaagattgaggataacaacacccttgttttcattgttgacattcgtgctgacaagaagaagatcaaggatgcagtgaagaagatgtacgacattcagaccaagaaagtcaacactttgatcaggtaattgctgattccatgaaaattgtttttgagagttagcttcaattttacctgtctctgattgttaacttctattgaatgttattttgtaggcccgatggaacgaagaaggcatacgttaggttgacacctgattatgatgctttagatgttgccaacaagattggaatcatctaatctaaatagtgtagcctctgtttgttttgagcgagttattcttttcttactgtcacagttttgttaggaggaatgcaccatgttagaactcctattttgttttggtttccattaatatgtatctggaaattattctgttttcaactttgccagttcaatatggattaggatttatatatcatgcttatcgtttttacttttacctcagttttcagtttaagttcttggaattttcctaaaattagatgatttctttagtat

SEQ ID NO: 51239 - DNA, 1003 bp, Cannabis sativa
  modified_base (906)..(917): a, c, t, g, unknown or other
aaaattgtataagaatgaaactaacttgccaaaaagcaagggaataagttgataacatttcataaactccttcagggaaaaagatacagcaagaaaattactgtaaaatgttaaccaatcatattcaattacgagccgttattgtccaaaaagaaaaatcctaaataatatgttaatctgaactgaggaagagtgaaagattaaacaaagataaagagtgatgcatatgggaaattctcaaacgatccaccaagagacaatgcactaaaaaaacgtatacaatgttgagaaatctaccagccacacaaaattgtcaactttcaactgatacatgggaaaaagaaaacaaaagaactaaaaaccccatagaaaaccaaagctggagcgaaagtatggcctcatttcgcaaatttcaaaaaccctagggaacaatatcgtttataatgagaaggaacatagcataagcttacctgaaatgagagagtgattcggtggtgaaccctagagggaagattcggacagtgggttgggttgggttgttctacgcccacagagttgcacagcctaaccaagctcaatggcgcagagtgttattacttattggtttcatctcatcttaacccccaatttttgctttttccagtttcaccccttttttctgctaattaagattttatttttgcaaaagtaagaaccatattcaagatttgttttggtatattatgtaatttaaataaaaatatgatggtgatatggataataaatttgagtacaattgagctcaaggaatatttttgtagaagcactattgtggtatgaaataaattagcggaatagtttcatccagttcttattctaaggaaaattattaagattgttaaaaaaatttcccctgaactattaagnnnnnnnnnnnnaaagacttttgtctaattttaataaaaaaattcccccaaattttgatatctactaaatcatgtctctcaaactttgatatgtacta

SEQ ID NO: 51240 - DNA, 913 bp, Cannabis sativa
taacaaccttaatagttcagggggatttttttaactgccaaaaaagttcaggggacatgatttagtacatgtcaaagttcaggagggaaaattgctgattagcctaagtttttttttatttagactcctgataggagtgggccctagatgctggcctagcccgccttagtctaagaccgaccctgttgggataccaaagcgtatagtattatttgtaatggagaatatttaagctatacttaaatgccaaatgagtaaaaaaaaaattctactaaaaaaatttcttatgatatttaatttagctataaatcttgcagctaaaatactactacaaaattactaaatttatcctattaaatatcagttaacctctatacattacaaaacaaaattttaattttttaaacctatagcttgaagcttgaaactttaagaatgctaaatttagtgggccatagggaaaaaaatatttttgggccctcatttagaaaaaaaatgtggtatttttcaaaattaataaaaaaaatgtgtaattttaaaacgggataaattttttttgagcccctgagctaggtgggccctaggcacaagcctagctcgcctatactcagggccgaccctgaccttacatcaagttcttctttctttgagttttcctacacctacaactgctactaagacttttttagattgaaatttgaagaaaaataagtggtggtggtggtgtttccactaagactgtttttagattgaaatttgaagaaaaagaagtggtggtggtggtgtttcttgtcgcacgaagaggaaggaagagagagcttagtttaagtttttacttttcaaagtattaacacacatatatctttatatattaaaagtgcctatctaacgacatttcttggtttaacagaat

SEQ ID NO: 51241 - DNA, 1733 bp, Cannabis sativa
ttaatggtgctggcacttcctccttcgatcctcaagcagctcaaacaattcacaatccttcagcgactagatcacaaaaaatctattaagtgtcttcaaattcgctcttgacaataatgtcttctttgaatttcatgctaatatttgttatgtcaaggactaggttaccagggacactcttctgactgggactctccacaatggcatgtatacttttgatctaggtcagttcaagatgtttcccctttctcaatcttctctcagaaaagaagttcaatcctcaagcttaaagtctgtctttactgtcaccaattattcagatgctttaaagtccaactcaatttcatgtcctcactgttctaagtctcttattttagactttgaattgtggcataacagacttgttcactctctcttcctaaatcttttattcccaactgaactacctgctcttgttgtttcttgtatgagcgttcctggtttgcctattggtgagtgttccgctaatactaaaaatgctcccatcccgtcattgtcttttatgattccccttgacaatctgtcacaaactggtatatatgccttaacctgatcaatccattcatgtcaatcttcataatcttgatcaacttcacattcccatgtcatccccacccacatattctgcaaaccagttaggtccaattcaacaaattctcagactgttgttctatccctgccatttaacactactgcactctaatatcttatatttgcttatgagagagatcatgttcctaatcaataactatatcgatctattgttggaacacactaatatctcaatattacacgccatgaaatttcttacagcgtgaataaagtgtgccagtgaccctgatgataaacagtctacataaactttagtgatgctcattgggccagtatcacatggatttttaaaccactcttagaattcaaagtcactacctttagtgatgctcattgggccagtgaccctgataataaacagtctacatctaactttttcttattttttggctccaatttgattgcctgacagtgtaagaaacaacacaaagtctcacgatcgagtattgaagctaaatatcacagtgttgctcaagcagtgtcagaacttacatggctccatcctctgcttttagaattgcaaatttgactggctagacctctagttctatggtgtgacaaccttagtactattttattaacagctaacccagtactacatgttagaacaaagcatatcgagttgaatatgtactttgtttgagaaaagatctctcaactgttggttcttgttcatcatgtccctgcttctgaccaggttgtctatggcttgacgaagactataactagttctcgtttttgatgtgttttgtcaaaaacttggagttgatgtatgcaccaattccatacattaactccaagtttgggggaagtgagaatgaaactagtctgttaagacagttagagtttgttacaatgttagttactgttggttagttgttagttgagttgtacagctatccattctttgtaacaacttgtatatatacattgtctttctctcataataaacatgaggtttttctttctggtttgatctttctctctctttcttcctctttttctttctttctctttgtctttcaccatggttagataccacacaaggtcaaacacacatatacaaattaatacatggatta

SEQ ID NO: 51242 - DNA, 1182 bp, Cannabis sativa
tacaaccaaaaatattgggactgaaataattgtgtaaatacaagacaatatttctcctaaattaatataataataacattataataaaaggaactctaatatttttaaaaagctcttgatggtagttcatagtttacctctataggcatagctgctgactatcgaaaaaaaaaacctcagcacagctgcttcattaaatttcaaagttattatttttttttttaaaaaaagaagaattaatattcattcaaagttttaaagggcatcacccaacacgtcaagtgaataaatgcatagtaaatcattaaataataattatttagtacatatatattttttaatacctgatgttatgttgggattaatccatttctcaaaattcaatcttggtattagggggagtacaaacttattagtatggaaccaaaatatattttttttaagtgcaaagcttataaagaattgtcttatattaatgttgttcgactgagtatttgagtcttaacttgcatatatgtaacataagtcataaaaaaaatacacattggagagacaagtaatatttatgggtcgttttcgtgtgaatagttgtgactcacatattacaagattgtactaaacacgatctatttatttattaatcatatcaaaaactaaaatctaaatcttaatccaactatatgtctttaatgagttgacttgacataaaaaatcaagttaattgtaggtcaacttatcaacctataaacataattgtgtatatgcttcaaaacataagtataatcgggtatagtataatttgtggcataagtatttaaatttaattttcggttataaataaatatttaaatttaatttttagtgacaataatatttaagttatagttttaaaatttctgtaggtgcatgactgttaagtgttaagtaaattattacgtgataatttttgattgaccaaaattattaaatttttatttttcctggaatataccaataataacttgatatttaacggtcaaatacctatgaagttccaaaaatataatttaagtattattattatcaaaaattaaaattaagtaattatttacaattagtaatttactcttgtgtatacttataagtaagtatttgtcgtgttattttcaagttagcaaattgattaactcaaatatagtttgc

SEQ ID NO: 51243 - DNA, 1409 bp, Cannabis sativa
catacgaaaagacttgaggataccttaataggcttcaaggggtaaacgatatttttgtttatttactttcaaatataatgtataaacatatggtgatcctaatgatatggtacaatgataatcaaatacttttattttgatttgtatatactttaataccataaaaccaacaaggtatatgtttatgcttggatctagaacgatttcttggtgtagtaaaagacaaccgacagtgtctttgtcaacaaccgaagcagaatattgatcaacatcaatgacaactcaagagagtactcggttgttacaactaatgaaagatttccaccgactaatagattatgcaatatcgttgtattgtgacaaccaataaccatttcgtttggcaaaacatccactctttcatgcaaggattaaacacgtggaactgcagtgtaattttctttgagagaaagttctacaagacgagattgtaatgaaacaactaaagacaaatgagcaagctgcaaacttgttcactaaaagcttcagtatcggaaagtttgaaaactttcaccgtcaacttgaaatagttcaaagaatgggatatatatcattttattttatattatgtttagtttttattttattatatataaagatggtatataattttgtaagtatggtataattattttatggttgtatataaatttgttaatatggtatgtacaattttttttaataatattatataatattattttatttttttattgtaggtatatatattttgttgtacggtatatgttttgttgtttatagtatatcatttatttaagataatgtttagtttctattttattatatataaatttattggtatggtatatatattttaatagtggtacatataattttgttaggatgatatatatattttgagtattaatatactataggtttaatattgttataatttctttgtggtatataattttattactactgtatattaatttttagtgatacgatatatcaaatattgctgtatatatttatgatctaatagatttattcatttttgttacaatatatcaatatgcaatactaaaaaatttatataacttaatttattattatataatttttgtaaaaaaattaatatgtagtaaatgtatttttataatttttattagctaattcaatatatttgaccattttgttaatttttttttaaaaaattgacatttactaaaataatttgtaaacttaaggtaattttgtatctcagcccaattataaatttttttacaataaactctgttacgaattttatgtttactacacaagtatacgcaatcaagtagtatctcacgcaagtgtggtcgaaccacaggaaattggattaagtactactaaactatacttat

SEQ ID NO: 51244 - DNA, 673 bp, Cannabis sativa
gtagcgacggtggttgagagaagctaaggagaaggaagagagaaagatttgggtaggtgagatttgaggattgttgggttgagttttgggtagatgtggagattcagtgatagtggtcggtggtctcaatgcttaggtggtctcaatggtgcgacgaagatgaagaggaagagacaaagagaagagggaatataaagaagagagtactttgggtagaaattaaaaagtatttaattacataaattaattagaagttttaattttattaaaatgtattttttaagcatatataatgaaattttgcttgcataggatatctacctaaatttcttgtgtccaattcctaggttcgtgaagctcatagatcgattacaaatctcactaaaaattactcaaataataattcaaatcattattagtgaaacaatgaatataaacattagcatctctatacaaccaaaaataaattcttcttgtggtacaacaaatatcagatatttaatattttttttgataaaatattttaaaaaatagaatagaaaaactgtaagtcaatataaataaaatgatataaattgtaacccaaatatggcaattgattattatttttgcttatttgtataaatctcctcaagcacctttgtaagggtgttgtcaacaacggtaaaaaaaa

SEQ ID NO: 51245 - DNA, 972 bp, Cannabis sativa
tagctcgtgggtgcaatcatagtgtgtatgtttttaattaattataatgaaaatgttaatgcatttggatctaaattaacttgacctagctagtctacaatcagaattatattatattcagaggaaaatctttaaagttaacatgaatgcattgtttatcaagacttaataatttagatgtatatatttaacatctcaaatgcccggcgacatacgctaaagtgtcactaaaattcttaacaattcaaaaccaaaagttaacgcaacatgccgggcaacttagatgttgcgaaaaataagtaaaatgtcgtgttaacttttggttttgaccccatgaaaatactttatacaaattctcaaccctatattttgacatgatgattaaatacctcatattttcactcaaattaaataactataaaaaatgtcaaacactattgctttctatacgttaacttgtgtaagataattttcacattaattacatttatcaaaaaaaaaaaaagataagataatttccacattaattacattttactaaaattatatagcataaaaacattgtgtttaggaattttaataataatgtagacatttataccatttttttcaatcacaattttacaaatcattgcatgcaatcaaaataattattgaacttttttattgcagttattttgatttaaaaaaataaaaaaataattgagcttaataaggatattgtaaagaatagttatcttctctttttcctttttaatcgtataaattaataatataggtgcgtagttatataacatgatgttggaagttggtaatctcttccaaaatcaaattaaaaaaataccctatatattattttttaatatttttttcaaatttacaatttacgttgtttcggtaatttctatatgagttgttatatatgtaaattttagttgcaatttaagatatttcgttaattgccatgtgggt

SEQ ID NO: 51246 - DNA, 910 bp, Cannabis sativa
atttagtaatatatagatattgacaacttattatgtatctttgaggaccaaactgccagagttgagagaaaatatcgtcaaaggaggaggacgctagagctgagagagaaggaagaaaactggtctgatatgagattgggggatttcagttatgtgggtttagggaagacaaaagagcagctgaacagtaaaaagaaataaaatgtcctgggtaaaactaataccgagaatatatcctcagtagaggaacataacaaaaaaaaaaaactgctcattctcctgctggtgcgaaaatacattaacgatgacttaactcggtattatattctcgttataggactaatattttttgtagtgcatgtcattttcaggtcaacacgtttaacccgaaaataatatgattgtagcatgtaaaagtattttacaaatttcatattatgtaagataaaataaaaactctaaaatacctcataaaatacttttctttttatttttttataaaaaaatagtaataaattcaaactatgaattttatgtgaaatatttgtcttttatcagggccggccagagggtgaggcagccggggcataggccccataattttcgaggccctaaaaaaattaaatatagtatatatacatatataaaagtttgcaatatatatatatattttaatggattactggaagctcttgtggcacaagcggtaaatagaatgttatgtgatttgtgagatcaagagttgtgtctaaaaggaaaaaaagatgataataaataaattaaatattttaaagtaaactgttttaaaaaaataaaaaattattctgtagttcgtttatttttaagatatttatgtacttttttaatggtactattaataataaataatgtatatttattatgtattttt

SEQ ID NO: 51247 - DNA, 1038 bp, Cannabis sativa
ctagttatagtgatattgccaccatccgaggaagcacctgtagctgctttcaaaagagctgccaatgctgcagaatcaaacatctctttcccacctccctcatcatcatcagtgtctacttcttcatccgagtctgtcacaatttgaccgtcaattctctgcgaatgatcatgagaactatcagccccaaaatgagaacctgctcctgatgctcgttccaactcttctaagaactgcttggctgagcttccaaagacaatatcttcattttcatcatctgtaccagaactatcaatctcaccatactcctcaggaggatgtttgtcctcattttcaccttctaccatcatctcacggtttataattgaggttggctcttcaatactacttccagtattattagttaacttttcatcctgttgcaaaggttcatcttttggtaaatcagagacaacaccgttttcaatcacgaggttgttctgctgaacttcagaatcagcttcttctcttcctgatacgttcttggtgtcaacttcatcaacaacaacaggttccactgaaacatttcgattgaattcagaatctgtaagcatcgacttggggccaactgtgtcagttgactgaacttcttcatcattatcacctttctcaaccacaaggcttttgttctgaacatcagaatcagcttctaacaccccttcttttttccctgatgtgttcttggtatcttcatcaacaccaccaacaacaggttccatcaattcagaatctttaggcatcgacttcggagcaacagtgtcagctgactggacttcttcatcatcatcaccaccacctttctcaaccacaaggctgtttttctgaacaccagaaccagcttctaacgccccttcttcttctattcctgatatgttcttggtatcaacttcctcaacactaccaacaatatcaggctccaccacaacatttacattggaatcagaatctaacggcataccagagaaaacttcttcgtcatttgcacctttatctacttca

SEQ ID NO: 51248 - DNA, 784 bp, Cannabis sativa
cacttttaatatataaagatatccatattaataattgaaaaataaccaacactaaccttaaaatgcaagttcttctcaaagatagagaccccttaaaagagagactaacttctacaaaaaaaaaaaaattatttaaaaattagttagtaatatagatatgtggcaacatacatatacacaaaatataaccaaactaacataaatttttttgtacctttaaataaacatcaaacacttacattcacattcacataaatttgtatattgtttgtatatatttatacatttacactcataagctcgtcatcataaacacatatattcacatataaaattcagaaaaaaatttcaaccaattatctaaaatgtaagaaaataaaaacactttaaatcattttaccatttagacacataatgattattgaaagtaattttaaaagaataaaaaaacaaatagattttccaatatatattgacacacatgacatacaatatttttctttacatatttaaggaaaaaatacgcatatatatatatagacacacaagtttaaatggattttctattcaaaagaaaaagtttaaatggattttttatatatgtacatacgttgtaaaaattcaagaaataaaatcatattaattattttgtggaaaacaaattaacatgtgagaatttaagaaagaacataatatcatatatatatataaatattaatattttggactaagaataaatattaaaataaattagacaaaatctctaattcaaacaataataaca

SEQ ID NO: 51249 - DNA, 1008 bp, Cannabis sativa
agtatcactagccaatcgcaaggcaacacttcttaagggtgttaggcaccactgatgaccaataacaatactcttttataaaagtctcatctttacttaatttacaggaaggacatgctatagtatccttccaatttaagcaagtgtatcaagcacgtttcacatcgacgtgttgagtaaacatccggagccaacctcccttaggcttcccctaagccagtctccccatgtgacatttggtcttggaggctccttcacttgccttttgagactttaatctgaaaatgttgggggcatctttccatgagcaacttctcgggagctattgtcttctcgttggaactaatttccgatcaagctatatcctgatatggacgcctcgtggcttatgtcggaagcagatcctctgtctagagagtgtgtccaattccctgtctaacatatagtattgggacatgtgtcaatataattattgtttggtagaattatttaatgaaagaaaaaaacaactcggaaaggaaaaaaaaaaagaacattaatactctaaaaaaaataatgtaaataaaacaaaatcaacatatacttattcataatttcaaaaaaaaatatatatatatatatacatataattattcatatttccaaataaattaacaataaagttacaacttttatattattttttcttatttgctaattataatagtattctttttaggaaaactaatatttattatcatatatcaactattatttaaaaaaaaaaaattagatgaataatgctgccttttattttgattttttttttaaaaaaaaaaaactcttattttaacctagacttttgtgagggaaaaaaaaaagaagaatactgcaaaattattttctttaatggaaaaataatgtgcgtcactagtaatctaaatggttttatttttatttttttcttttaaaaaatattgaaatgaacaaaatgaatctaaaatggtgatggattattttaaatcatat

SEQ ID NO: 51250 - DNA, 1052 bp, Cannabis sativa
tttttctttatcaatattatacgtatagtacaataaaaatatatacggagatatcattaatgatttgtggaccaaagtatataaaagataatgaaaaagcaaaattttctaccattttaatcatgccatatatttcatcacaacctttttttttttttttttgtgtgtgtgtccaagaagacaaagtgcttgattatgatgagaatgcatatttaacattagacaaaattaacaaggttaataattagtgaaaacatcgatgagtatttgaaacagattaacacttagtacgaaatacactaataataataataaaaaattaagaaagaaacaataagtaattaatgctagaaaagaagagtagcactcatgggagttgggccagttgaggcatggctatgctcctgtttatgggacatggcctaacttggagtgggctagggtttcccatatgttccttccacatctcaacttgatttagtttctagaacaaactataatatatatttgacttttaaaatatgtgggtactaaggtgcttagcactaatataaaataatgtcttataattagttaccgatttttaataatttttattaaaataaaataaattatgacctgtaatttcattaagttggtaactaattaattcgtcatcggttaaactcaatggtaattacgttaggtccatccaatgtgttccaggcttttaattatttgttaagttgatgtttttgaaatcaattaaacaataatataatattagaaaaaccaagactaattaaataattacttccttaaaaaattaataataattacttccttacccaaaaaaaaataataattaagtttttttttttgttttggtaagtgaagtaataatttactacaaaaaataattacttttacggtggtgcctttacaaaactgttattggaatcagaataatcaagggtagaaatgaatcggtttaaaatagaaaataatcgaaaacaatattttatgatgctgtttactaaattatttggaaaaaaaccagaatcatattattt

SEQ ID NO: 51251 - DNA, 1673 bp, Cannabis sativa
atgggtaattgatcaagatttcagaatcctcttccttgcttcatcaatcttcttccttcaaaatttctaatataaaaaaacagattacataaatttgtatatataacttaaacatactaacttaattaactaatagtaaaaataacttacaaccaatgtaagcaacaatctggtgaaaaacacactacatcttccttctatgggtattgatcaaagtttcaaaatcctcttccttcaatctcaaccttaatattaaaccatacaaaactaacgttataagtcaataggtgatttctttaaatatataaaattaagtttagtgcaagattacagtagtcacactcagcacatttgaataattatccttgtgatgaaaaacttatcttaattatatctagaatttatggggggaattgaaaataccttaaaatgagacgatgattgagccatacttcatcaatggaagagggaattataaagaaaagactagcctcaaatacttgagattattggttcaagagtgtaggtttcctatccaacctttaatttatggcaaaaaacccctcatcctctccaaactttgatttatggcaacaaacccctcatcctctccaacctttgattacggcataatatccctcatcctctccaactttgattatggcaaaaaatccttcagcctctccaacctatggttatggcgacaaactctttatactctccaacatttaattatggcaagaaaaaaaccctcatttttggcaacctttgattatggcagcatatccctcatcctctccaacttttgactgtcgcaacaaactcctcatcctctcaaaccttttattatgccaagatatgagatcgttattagatataacatcatatttaacacaagtgcttggcatgaaacttaactaaccttaaattggactaaaacaaataaagtatcatataagatttttgtgagtatgaaacctcttccaagtgaccaactagaggttttgaaaaacggaattgggtactaaggcgttttcccttagtaccacaaggcgtatgcctcgacaataagaagaaaaacttcataaaattcataacaaacaacacaataccataacaaagtcataaaatttatgaaaattactaattaagtcttgaaatcataaactaaattcataaaaggtgcaaaattcaattgaaaaatgatgaaagttctaaacatataaagaaaacatatatctacgaggttgatgaggactgaggaaggagggacttggcttagaaggagagagatgagagattccatatgagaggtttgggggttttagggctatactttcctatctcttgtaaaaaaatctgttaaaaatgatccaaactaacgttgattagagtaatttaaaagtatgaaaatagctattagaaaagctttaaaaaatagcccataacagccaaaaaaaaaaagaaaagaaagaaagaaaatgccgctcaaaggcatgcgcctcaagtccacctcatcagtgtgaggtgtacgccccaatgatagcagctgaggtgtagcccaaatacgttttttcaccgcctcaccttgaggcgcgcctcatggcgtacacctctctgattattaaaactaactacaattaatcaattgtaccaattatacaatttgcttc

SEQ ID NO: 51252 - DNA, 1010 bp, Cannabis sativa
aatacatatacatttttttctcgattttttttttcagggggcgattgccccccctcgctacaatgtgggtccgcccctgatcggaattataaaacaccaaaccttattacataatttgcttttacgaagaatataaatgatgattgaagtgtcattagttaccgtccgattaagaacaacgatacaggtatacaagtaccaacgataaacgtattgccacgtcagcaaaggcaaacctgttgaaattgaccaatgactatctgggtcttatttgactttgaccaccttccactattctccgttctattatttgacacaaacgacattgtgctttacagtcaccacgtgccaaaaatagcacgtgcagatcatacctccactcttccactccacggcttcatttttttttttttttatttactttgaaaaaacaaggcactctttataaaacgacaaaacccttaataaaatttaataaacaatattaattagggatattattattattattattatagtattatctaaattaaattttattcatcacgtgttaaaataggagagtgcattgtaccttcgtttaggctacttttcaatccacttggagtgttattatgatattaatatattatcttcccaaaagtgtagcttagcttatataaaactagtaattttctttcttcaggaccaaaatattattattttaattatcctgtttgacattatattattcttaataatgaagtagttgttgaatgaaattctaaaaattggaaaacgcaagttgatgttttcttttaaattttcccaacgaaatctaacataaataaataatacaataattcatgatccaatagtataaaaaatttataatcaaaatgctgctttattatatgtgcctagatccaatggaccttccttttaaaaatcaagatagaatatttcataattattgaaatcaaacaacatatactaattggaaagttaattactgaatattattattatta

SEQ ID NO: 51253 - DNA, 2083 bp, Cannabis sativa
aatttaattgaagctaggggcttttggcagtgtttggagaagttttgcgactggtctggacaacggattaataaactaaaaacctccatcttcttcagcagtaacactagtgagggtatgagaagagccatcatgctggaacttgggctcaataatgcgattggtgacattaactacttggggctcccattatttaggtctcgttagaaggatgcagatttcaactttattttggacaaccttgtttcaaaactccatgggtggaacttgattaaatcggttgggcttgccttaccaatttacactatgcaaacaacgaagctttctaagaaacttgcttctaagattgatggtatggccaaagacttttggtggggctgtgggcaaaggaatcatggtctttacttaaagtcttgggatcacctatgtctacccaaatcccggggtggcctcagctttcgaaagtctttggaaatgaatcaagctttgttggctaagtggggttggtcccttctcatcgaggaacaatcattgtgctgtaaagtgttaagagccaaatacctgaagggtaggccgttcttggagggttcatttaagaactcagactcttggttatggaagaatgttgtgagaactaaagatattctaaaaaaaggtgcttgcaagtttatatcagatggcaaagaaacgaatatttgggatgatccgtgggttattcatagcgagaacttctatccaaagcctatcaatcatccccctgagggtttgaaaaaagttgcggatttactccttgacaacggggagtaggacatctctaaactacacactctcttcgatcaagaaacggtctttaatatcatcaagggtggtaagccttgtggtcaaggaagggatagatgggtatggactaaagaaccgggtagtttgttttctactaagtctacctatcttattcaagcctttgaccgcgcccttgtgtgtgatgttgccccagagttgtggaacaagttatggagctctaaagtcttggaacgtcacaaggttctttggtgaaacattctttctactgctcttcctattcttgccctccttgctaggagaatgcatattgaggaggttacttgtcctctttgtggggagggtgaggaaacgatggaacatcttttcctctactgcaactttgcttttcacctttggcgatcttctccttgggaagtgatgccagtttttgattctggtgctcgggtttgagattggattaaatttttatggaatttaaaatcaaaaggggttgatgttgacaaattgtttctcttgtggtagatacgattttgagggctcgattgaggaaacattgtattgactctatctctatctgttacgtaaaatatgagtcctgtttatttgcttcgtcagaagcagttgagtctcctgtttggtcccctccacctgatgattgggtcaaaatcaattgtgatgtgagagttaggtgcggttccatgtgtattgtggctttggctagggaccacacggagtcaattttatggatggctacaaacatgcttaacttctctgatccccttattggagaagctgcagcctgtcttttagccatggagactgtcgtttcatttcgacacccttttgtgatggttgagagtgactctgagacagttatcaagactctaaaagggaacttgtcccagttggggaatcgataactacgtgcactattgtaaacatctctctacttttatgttaggttgtaatttttcttttattccaagagtttgtaattttgtggcccataatgtagctaagtgggcgtctgctaacaatgttaccagtatggttgatccctcttctataccagactttatcctttgtaatgaccacgaggtctaacttttagtgcttctatctataaaaacgctgatttccaaaaaaaaaagattattttattaaataagataaatcaaaataaaagataattatcttttaattatatgaattaaatatattataggataatgtatttaaactaaaagatgatataaaataaagagttatagtcgaattctgt

SEQ ID NO: 51254 - DNA, 2271 bp, Cannabis sativa
aaataacatatgcaagtagcaaaactataataaaactacaaaacaactgtatacaaactaaaataaattcttgcaacacagcagcatctcagagcctgagctgacctgacctgacctgctgcaccacccaccaccacaccccccttccttccttgcaataactctcatttattttccctctctttcttttctcccaaacaacaaaccaaacccaaaccaacatatcacgtgacattcacgtgactttcatctcctatttctcttctcctccgctatcggctattctattctaatatatatatataaatatctctctctctctctctctctctcactaactctcttttttttttccttttattctctgaaccataaatatggcttttcaattttctccaccatcaccgccattgacgaccttcttcccctccacagccgtgcctcctcctccttccccgattcctcaccatcactctccttctctcagtccgagcattctcatcattattctaattctagtcgtcactttggttgcctcggtctccctatgctatctactccgtcacctcaaccgtcgatgcctccgccatctccaaccttcttcttcgacgtcctcctctgctgctccagttacaaacttagactctcttcgctccagccgccgtgtctcgccggagaatcctaccactgcgcttattgagtcgctgcctctgttctcattttcttctctcactcgacggaatacttcggccgccgattgtgcagtttgtttgtctaagtttgaagcagacgaccaactccggcttctcccgctgtgttgccatgccttccactctctctgcgtcgacacatggcttcagtcgaaccaatcatgtcctctgtgtcgatcgccaatcttcgcatcggaagctgaaattctgaagaggcttctgccgccggagggagagaatctcagcggtgacagtttccgaatagaaattggcaacgtcagtcgccgccaagctacttcggattcgggcgcatcagcacgacggtcatattccatcggatcgttcgaatatcttgtggacgacgattcggagatcttcctcggcaatgctcaccatagaacaacatccgatttcaaggaagatcaattcagaccgccacctgcatctcacttgccggcgccggagccgagtcttgtggcggaaaatgcctcagggagaagctggcttaaggagtatgtagatagactatcaatgtcgctatcttcacgtgctcaatcgtttcggagttctggtagatttttcagcggaagcagtcggcggagcgagatcacaggcgtcggagactgggacctcgaagcttgccgtgttggggaagagattagcgaactgttccggtgggcctcaggggtatgatccgtaaataagatgcttttttaggactaaatagtaaaaagaaaagttattaaaagaaattctttgatttggtttggttaattgttacgtatatacaatttttattactatatttttgttttactgcttgaacttgatgaagaccgaagacccaagaagaccatgagaaattgagaatgagatttggcattttttcgtgatctggtgtgtgaagacacacagtaataaatggtgtgctcttcatttatgatagatcaccgagttagtgaccaacctttttaatgaaaaagaaaaagaagaagaagccaatatatttgaccccactatttcttttcttctttttattatgtataataataataataataactattaaatatttattttgttaattttaaattttggtaaatgtcaccagttgatctttgcttagatagattaaagttgacattgtaaatagactttataatctattcccactatagtttattaatgtatgtaatgaaagaaaatattttgggggagaaatgttaatagataagtattatatatatatatgtattatttatacgagggaatttaattcttttagaatcatgactttgcttgcttacattgtcaatggaaaagaaaaactatgaaaaagaaagaaaagttactactattaataaatgaaaaaagtaaaacaaaaattgagtgcccaaaatactattgagtgtgagtgagtgagagtgagctaacttagctttgatagttattaagagctttcaaagattctcagagttggaccggttttggtaagaggtcactttagcatatatgttttctctaattggtttcttcgattctttcttcttttttttttttt

SEQ ID NO: 51255 - DNA, 783 bp, Cannabis sativa
aaagtgtttcaagtcatgaagtaattcttcttgggctttaaaaaactgagacaaagccttcttttcttcaaaattcttttctgccccgtttccactagaagtagtaataatatccttatcacacttaactaaaggtgccttattgatctccagcccattagagatttgtggctcatgagcattaaccggcccagaggagattatgtaatccggcccaagagacaataacttaccattaccattagtatcactcggcccaccaataagtaacccacccgattctctcaccacgttctcaacaaggtcagaacaataaatggccttttcatttaatttagaaggcccatacccactaggcctcatggcgtctggcccactagaagagaccggcccaccttcttggagagatgcatgaagtgaacgacccaaagaatcaatatttccacctttattagctttattcaaatgaggctcatcattcaaggaacggtcattggtaggaatagtaataggtggtactataccaggcaaaccaacaggtgcctttccatttgtttcagcttgaaccccaccctcaatacccgaaatggcaaccggcgtaccatcaccagctggctttggtttggagatccacacagcacgctgggcaataccaccgttcgaagaacaacgtctagtcaccatccttccacatctcgcgaaccacgggaaacattgggaaccgacttcccagcaccaccgtcgacgccatggatgttcccagctgctctgagaggacgacga

SEQ ID NO: 51256 - DNA, 1265 bp, Cannabis sativa
aatcataaattaacctaaaaaaatgtatatcaattagtataataattaccgcacaaagcgcagttatgttgcttaatttaattatttataaatattataaataccttgcgagaaccaatatcatccatgaacctagcaagtagagtcgaagccgaaacaattttagggtctttggagagccaatttagagtttcatgtgttacaatatcatgcattcctacataacttgtggcgattaacgttgtgtaagcacaagaaacataagaaactttcaaatgctcatcgaagcttggcaagtatccatcgttcaaccatcgagcttcttctaaataagctcgaatcaattttttcatctgtttttatttgattttgaataaaagaaaacaaatagaatttaatattatattattgttaatcagtttaaaaaattaaatatgcattaattacaaattaaattctatatatgaagaatgtcacattaattaataattggctgaattaatatagagaattaattgacatgtatatatacctcttcttttgcatattgatgtttgtataattcttcctttgtaaactctttttcaaattcttcataagaagtcaacattgctttataatatgtcttcaaatattctggttcaagtttatctataaaatctatgtcccacctgacaattgtactcttaaggtgtcagtatcataacatactgtattattataagtgcaattcatattatcacttataacatatatggtgcctagctaataatcaacaccatctaaatgcatcatattaccattgataacctagaaattttaaatatggggatgaatattaaaaagtaaatatatatttagaattcacataataaatatctttgcacaaaaataacatataaaatggtacaaatgtcaaaatatagcacataaggtcatctctaatgtaaaatgtaaaatttatgttaagcttaacacaaaaattgagtttgtgttatatttagctctctatttacaattatgttccaatatagatataaaaaaatataataatattgatcatcacttaacattgtattaaaattatatacaaatatcattattttttattttttttattgcttaaataatggtaatataataaataaagaagataaagttatgtaaaaattaataaattatagtaattagtgctatcatagtaaataaaaaatatagaatttaatataggctaaatttgacacaacgttatatcttatgtcaaa

SEQ ID NO: 51257 - DNA, 758 bp, Cannabis sativa
tactcgactccaaactcacctttccctgaccccagacaccgactctagacaccaaccctactcgacccttgaccctggccctaaatgtgaacccctacctcggcctcacactgcgatcccaatccctgattctagccttcaacctccgacctcaaacctaggtccgaaccctgaccctagcctcgactcctaagccccggacccagaaccccaacctagactcgaacttcgaccctagccctaaccctgaccttgtaccagactccgaccccagaacttggtcattgaccttgaccccgacctcaaacctcggaccccgactccgaacctgaatcgagaccccagccccgacccctggtcttggactccagcactaaccccgatcccgacaccactctggaccgctaaccttaaccttagacattttttaatatataaaagctaacacagatcattttttatatatgaaataatataattcattgaatcaaaacttgtgattgtaataattagtaaatacaagattttattaaacagagtttctttttattgtattatactacttatctagcgagtcctaatgtattttggtaaaatatgacatgggctcaataatcctgaccgtaattactcatgatctccaaaatcctattctacaataacaattataataaaaaagcagccctaaacaaattgagtcaataggatatacatgttgagtttcaatctccctcacaaaatactatatatccatttgt

SEQ ID NO: 51258 - DNA, 825 bp, Cannabis sativa
ttatagttggatatattaacggtgtccagcatcttttaaaagtaacaccctaataattagatggaatttaatacttaattataccaaacagcagtataacacgaaaaagatgctaaacaccggtatcttttcacgattctcttattatatattatatatatatatatttatgatgaggatcgggcttcactttttgatgatcgtaattaaagaaaattaattaactaaaagtgttaattatattttaagtatgtttataagttataattataatttgggttgattacatgcagcataaaactttgattgaaatctcattacatatttgacccacccccactcttctactttggatggcctctctagctattattgtgtataatttgttcatatatttaagaattgaatcaaataatgtgacactatcccgaagacctaggtaccactttttttttttttgggaaatgtcctacggtaccacttgttagatgacaaagaattgagaattgctaaaggacattaatagtacctagcaccctcctatgtgtcaatatcgctattggtccaattaagtattgagtcccatataatttaatataataaattttaaggagtattgctagccaatcgcaacgcgacatgtcgtaaaggtgctagacaccactggtgcctaatagcaatgctccaaagaattatggatttatctcaaaattaaataggaatactccagagtaatttatcactataaaaaataattacttttagtgataaatttttagtcataacataatttttttgtggctaaatatgacttttagtcacaac

SEQ ID NO: 51259 - DNA, 685 bp, Cannabis sativa
attttaattttaatttaatattatgtatttttattttaatttaagttttttttttttctaaaaggaaaaaaataaaatagtccagtctatttttaaaccaaacacataattatttttagcataatctaatgttgtccagtccagtccaatccaatccttttgagtctaatcctgcgtaccaaacggacccttagtacttgtagggaaactttcatgggtatgttactttgtctaaaatttattgatggatgttgatttttacatatttaatggtctttttgaatggatttatgagtgtttgtgtgttttgttgaatttgtttaaaaaaaaaatggatctaagcgttcttgtagtaaaaattcgacaagttcaatagtcacctgataaatacttgatatgagcatgttttagagattaagaatgaatattcgatgatgctagatagcactagataggtgcacgatggtttagttaattttttgttgggattatttcacaaatacatgcaaattaaaaaaaaaatacaaaactacggttttacgaaattttaaatatttttacgatttttttattttatttacagaaaatacgatctttttatgttgtattcttgttaatttgttgttaattttttgttatttgaatgttatttagaagctattttcatgtaattttattgttgttt

SEQ ID NO: 51260 - DNA, 1154 bp, Cannabis sativa
aataaatttatcggtaaagtctctttaacaacagaccctccacaaaattgacctatagaataataataaataaaactctattagcacaccattttaatgataaaataggctacgtgaataagatagtaaaataatttatattataatattatcaagacttgaaaccataaaacacttcttttatttatttactataccacaaatatattataaacaatgaaggacaaaccataaaataatgaaataaaagccataaaaaaatgttataaaagccataaaatgcatcaaaactatataaaaaaaaaataatgaaaaaaccaggggatcatatatacttaaaaactataattataatataagaggtgaacaaattaattatacttttgtaaaatataaaattgatggcataagaaaaataaaacttaagaaaaaaatttcccattaaaattaaattgtgagataacacaaaaagaaatagaagtaagaaaggctagccttataaaaatttaaaaattctatataaatgtaaaatgtataatatgagttgaatatataattttactaatagtactattatataaaatataggcaacacaaatttgaccacgtgtccatgtgcacgtacaaattggacccaaatgactaacatgtgagaaactaaaattttacagattggaccatatgcaaaattttgaaatctatgaagtaattatctatggattaataaaaaaattaaattgcaacggaaaataatattagtaaaattattagtttttcttttcaacaaaaaaaacaaaactattagtcttttttttctaagatagtaatatattattagtcaattatcaaattataaaatgagaatacatgtttattaaaataaacgagaatatatatctaatgtaatttgattgggtcgcgatggccgtcatatttaaggcagtctctttttgttcaaataatatttgatctctaccttctagaaatataacattatctatcaattttttatttaaaaatattttatttaagaataatttttaaattataattattatatatttttttagtctcatactaaaaataatatttttatatctttatatattaaaagtgccgttattctgttaaatttaacgattacgtttgatctc

SEQ ID NO: 51261 - DNA, 1291 bp, Cannabis sativa
tgttggctagttttttacgtcaatacagttcaagttgttaattattaatggagacaaatagataatagcttaaatttaccaatatttcaatcgtttaaagaattttattatcaaaatttgagtttgaatgattaagtaagtaaaatgataattattaggaggatttaacttcaaaatttcaacaataaattatgttggttgaagagatcccttccctttcttgatgccttctagtgattaaaattactttttcataaaaaaaaagttcattatcaacaagatttttgtgcctcacatactatttaatcaaaagttatttactaaaaaattagaatttttaccctttgaacttttgcatttatcaaattatattttttgaacttttccattatgttaaaaattcctcctgtacactattgaaattgttcgatttaagaactcttgtctaatttcattcattttttttaatgtggtgattgttcatagactaacttgtgtccctataaactttaatatattctaaattatgttttctaaacgttaacatatatcaaatagtgcccccgaaattttcattcactgtagactttttttagtaaaaatgaataatataaaagttcttagatcaaacaattttaatagtttgaagggaattcttaacgacctgaaaatattcagagacacgatttggtatatgtcaaagttcacgggacgaaaacctaaattagcctttaacttataatgaagttagaaaaaaaaaacaaaaaaaagttagtgtaacacgttcaatcctatggatttaaaataattatacatctcccaatgaaactagcctacaaatttatgaggaccaatatataaaatagataaggatttttttcaataatatacttaaaatataaattatttacaaaaataccttaataaatctcaattacaataataccttgctacatcattaaaaaatgccttaattttaaaataatatgcctggaacgaaattaatcccaaattccgtttttttattatttttctcggttttcaaaaataaccttttggttacttatgatgttgataagaaattaattaattacttttacgtataaaaatttatttttaaattatatattttgagatacaatttggttacctctaaaatcttatttgtaaaaatcttaataatcaacaactattttcaagttattgtgttgtcttattatttaaaatacatttgggtaaccttaaagtttattttcgaaactaatgggtttgtcatataatataataaact

SEQ ID NO: 51262 - DNA, 1000 bp, Cannabis sativa
aaaaaaaaaaaaaattctaagcttaaacataaagagaaaattgttatcattatgataaataatttctaagtttgtagggtagttggtagctattattgcagtatgtattgtttagtgatagttggcattaaattttttcttttctccacaaaaaaaaaaaaaaaaataaaataaattataacaatgtgtcaaagaaaaaaaacacaaatgatgcacttgtctatcatatataaatttataatggtcaattattatgatgataagtagctatagaacgtctaactgccaacgttacactactaaattattgtgtggaatttatatactaaacaacaaaacaataattaattagacttagttggtttttcctagctagggattttgctttagatagagatttgactataattatatatgactttatatcttcatatagaggaatgtgatgcatgtgttttattttatatatacccatcatcacaacaaaggctaaactttgtgatcactttgaaaatgtttcagaaattgatagttttctctgtatttacattatacaattaatcttcatattaaattacaaactttttttatgaacaacaaaatttattaacattttattatgttttcaaaaattaaaaaattatttttaataatcaatttcacatttaattaggaaatgatttatttattattttattaaataaaaataaataaaaaaaataaaaatttgcttatataaatatatatccatatcaaaagtgaaaatatttttaaacattcactaattgaattacataactaccttttaatacatattatattataaaaaagttaaactaattaattgataaaataagtaccacataacactacactacttattaaggttaatgctaaataagcttaccctctaattgatatttcgtcttatgtaaaatatttgcagaagtgattattttatcaaagtatctcaatgacaaatataattttaaattaataa

SEQ ID NO: 51263 - DNA, 1955 bp, Cannabis sativa
aacaagataatcaagaaaaacctcgaaactaaattggaaaaacttaaagtttgatgggtagatgaatttttgaacgtactctgggcatataggaccacgccccgctccaccacaagtgagacgcccttctccttgacatacaaatgtgaggttgtgcgtcccatcgagatgaagctcaattcgtttcgcgtgaagaatttcaataaggagtccaacaaaaaagccaaggtggaaaatctagacctcttggaagaatggagggacatagcccaaatgaggttggcagtgtatcaacaaagggtggcccggtactataatttgagagtctgtatgcatgccttcaggactggagacttggtattaagaaaggccttcccataccaaggatccaagagcaagagttttgggagccaattagaaaggcccctatcggatcgctaaagtcatcccacccgggaccaacaagttagctcgcatggatgacacggtggtaccgagggcgtggaatacgggacacttgaggaaataccattgttaggcagtgtctgatcaaaaaagaaaaaggaaagatgccaacggcaaatgtggaagtgaggtacaaaaatttcttggctagcaaggattagctaccattgctcagcaaaagaaagatgcctcacctcgcaaaaatcatcaagccataagaggttctcacggacactcatggcataacatcgaaactagagggatgcctctcaggagtaagcaaacatttttcaatcaagagggtagcgcggtcaagtgctataaagctccctcccatccaagcaaaaggatggatttacaataagagggagactgctcaaatagcccaaactcccccatagtatatggctgcctaccacagcaaaaaatggcttggctaaagagtgacccctagagttgctcggccaacgccaattacgaagatggcttagccagagagtgacctaggagttgctcggccaatgccagttacaaagatggcttggatagagagtgaccctagtgtcactcagccaacgccagttacgaagatggcttggccaaagagtgaccctacagtcgctcagccaacgctgattacaaagatggcttggcgagagagtaaccccagtgtcactcggccaacgccagttacaaatattattgggccaacgagcctccctcaaagtcattcagccaaggccaagtaaaattgttgcttgacatattggcgcaaagtaaacttcaaccaagggaagccccccgtataaagggagcactgtcttagagataactgagaggatctcatgcctcagcaaggtagatccccccaacttatacagtcttcaagaacacttaaaataattcttgtagactgaggggcaagtgttaaccccaaaaattagaagagttgattttccagattagtcaacaatcggccccagcagtcgagagacatcaactgtaagattcggtcaaagaatgactgagtcaacgcatacggcctaaggatcattaatcttggaaatccatgcttacaagtctcggggtatatccatgcaacttggagttcaaccccgtaacaactcatgagtagagttagtaagattaactcactaggttacaattgttagaggattttcgtagtgatatgttcagaattggatcttgccacagacataagattcaaagatctctttcttatctttccaatgcactttgattcatctaattctgatgtatattgagaaagttatggccaaattactatgactaccaaattgtgacagcttggtatgcgagttgacggctcccatgcgagttggcaggttgttgagcgagtccctagctattgtgcaaccccatggggggttctgcgagcctatgggccattgggtgagccgggggcatttcagtgagtcgtggaaccttcatgcaagtggtggagcatc

SEQ ID NO: 51264 - DNA, 925 bp, Cannabis sativa
catcttccaaatcagatacaactccatttttcttacggacaagtcgcttcgcaagcttggttaattcaacaacttactcttctagacatttggttgttgtgtcttgagattcgcatctgtgaacatgatcattgatgtgatttttgagatcggttctgcgaggtctagctctttcgcttctagctttttacctccttgcatttaatcgtgcacaaaggtcttgcatagtctcactttcatcagaaccttgtggaatttcttatgcatcattatcgatctggtccataggattattgaggttacccccacctcttcactctgtaggactttgtacctaagcactaggcctttctgtctgcgtagttcttcctcgcagatctgtaggattgcctcgccctggaacattggctaccctccttctcctttgaggttggtcggcgacatttatgtattacacagagcatcgggagtagttctccttggaggatcccccatgactcattttcctctgtccttgtttggatcacaagttccaaggtcttgaggattcactcttctggtgggattgtcctctggtggaataggatcgtcagtattttcttcattaggatttaagtttttttacgtcagtgttgcttccaatcacgccatagtttctggcattctacgagggaactcttcttgggccaccaatttcaatttagttgctgccaattattttgccatttcaacaacccgagaatctcactcatcatgttcaccttctttaccaatttcatcatcttctggattagtaggttcaccatccgcagtttcctctcctatcgataggatcatcataaacacgtcgatcatcatgttgatcaatgactagttgcctcagtaggatctccattgattgttgttcctctttgagtgttgggat

SEQ ID NO: 51265 - DNA, 2467 bp, Cannabis sativa
  modified_base (27)..(36): a, c, t, g, unknown or other
  modified_base (2438)..(2440): a, c, t, g, unknown or other
aaaatagattacattgaaatggagttnnnnnnnnnncataaaacccaacaataacatacttgttagtaattctagatcctgttaaaataattccaacatattctcagtggtaaagatccgtggatatctggccatagttctttctatctgatcacttactcgaggccatctaatgggcttgttgctcatgtcattatagatgaatgtaaattgaatatagatctgttaaatcaatactttttacctctggatgtagctcaaattttaactttaccgctgagtttctatcccaacaatgactctcttatttggcatcatcatcacacagggctccataccgttaaatctggataccatttggtagcagaactcgataactttgaccgcttatcatcttcgacttcttctacatcatggtggaaattattttggtccctcaaactgccaaaaaaaaatcaaaaattttgcttgaaaaattgtccatgaggctctcccagtcactgctaacttagtcaaatgcaaggttatcacaaattctagttgttctttttgtaaacaagcatgggaatctataggtcatgcattgtttggttgcaaatatgtaagatctgtgtggcgctactcgggaataactttagattggcatcaatcctcctcaatgtttaaaggggattgccttctgcacttatcaagaatatatgacaaatctgagctaaaacacatcatttgcatcatgtgatcgatacggaatgaacgtaatagtgttatccatggtggtaataccaaaccagcttgtacgattgccttttctgcagcaacataccttcaaaattttcaagatgtccaagggaaatatcgtccatcttcatggtctacaactcaatctttgctcccattttctacccatcctcacgtaccgtggctgccccttccacttggtgaactaaaattaaacatagatgcagctctagatgtgacaaagaatatcattggagttgaagccatagttcgtgactcacatggcactgtgattgctgctttctctaagctaattatgggtaactttgcctctcatgaaatagaagcgaaagctcttttccatagtctgaattgggttcttcagatggacttgcgaatcacacacatagagacgaatgctttattggtttctactaaatggccattttaatacaatttctacttttaaagatttaattgttgatgtttctagtcttttatccttctccctaaagctattattatacatgttaaacgtactgccaatatggcagcacatgggttggctaagtatgctttagagttggatgaggcttattttttattgaagaattttcctcctccagtgcactctgttattgtaaatgactttccttaatttatgatgactgagtatttttatcaaaaaaaaaaaaaacttgttaagacaatagtaacacaaactatcatagtttaagtttctataggccttttaaaaatttaaaggtgtttaactaatattttttaaagactatttttatatttttttctaaaaaaaaaataattcaatattctacaccataccataacatgaatccaaccccactctggacccggccacaatctcgaaccttgaccctaactcggccttaggacccagacccggatccaaacccggaacccgccctcagacctggaccacgacccgaacccctgtcccgaactcagacttcaaatcctaaatccagacccaaaccttgaaccctaattcgggactcagccacggacccaaacctggcctcgaacccaaacccagaccatgaactcaaactcgaacactgaccttgtcccctaactcaaacatagatattgacccccaatcgaccctggacttggcctcctaccctgaactcaaacctcctatcctgacctagatcctcgaccccaaccctaaacctaaacccagaccatagccctgataggtaaaatttataacgcaagtatacgtcttatttcaagtaataatagtgcgtaagtacgagtatcgtctcacaaagactattaccaagtaccaataattatttttttactttctatttaacaaacaaaaattgaggaaatattattaaaactaggaaaataatttaactataaaattaaagtaggcaaacaatgattatgaatatcaatcaatagaacctaggatattaatttcatcaacttgtcaatcttgttactaatccattctacgatttcttcttctaattttaatagtgggttaactaaaataaatcatattctttttcaagatatagtacctcaatctatatgtaaattttctatgtatctgtaataaattttaacatataaaggcattaagaatgaaatatctatttgttacacaagtcatacgagtactcttgtgttgggttttatgcccnnnataaaactcatttcaatacaatcagat

SEQ ID NO: 51266 - DNA, 2580 bp, Cannabis sativa
ggggtatgggtctgggtttcggtctatgttgggtccgagtttgggtttgggtttgagtcccggtattggtcctagatccaaacattgactataggttaggtccaagccccaagtcccgatcaagatcctggtatccgttcctagtctagttgcactttcggtcccaagtccttgtcgcggtcctagtttagggtctgggtctgggctcaggtcctgggtctcagtgccaattctgaagcccgcgtcctgagtgcaggtctgggtcctaggtttcggtccgagtctaaggccatgtcagggttcacgtcctaccccgagttttgtttcgggtttccaatccaggtctgggtccagatctgggtttgagtccagatcctggtccgagtgtgagtcttgggttccgatccgggtttgggtttcgaggcgcaagtccaggtctcccatcaaggttcgggtccatttttgggttcgggtgctagtcccagtttcgattttgactccgtgtccgagttcgggtacgggtcggggtcggggtcggggtctgtgtcctggtttgagttcacggttgggtctgggtctgggttttggtccaggtccgagtccaagtcttgggtacgggtccaggtttgggtctggctctcaatccagatctaggttccaagttttgatcctggtgtggatatgggtctgcgtctcggttcacgtccaggtttgtatctagatccatgtctaggtccgagtttgggtttgggatatgtcccaggttcaaattcgaccggataccggacccggaaccagaattagagtaggactggtactgtaacaggacccaaactcagaccagaacccataccaagacttagaactagaccaggacttatgacctgggacctaaactaagaccgggacctggacccagaccgagaccaagacctagacacagaccaaaaaattggggccaaacccaggacccaagaaccagactcgcacctaggacccgaaactaagacccacactgggactgggagcaaatctttgactcgaacccaaactgggacctagactcggaccgaacccgaacctgaacccgaatcggaacacgaacattgacccagaccggcacctaggacccgaacatagatgcaggaccaagacctgggaattgggcccccgaacttggaccagaacttggggctcagaacttggatcaggatcggggaccggaccccaaacccaaaccttgtcataggacccacctcgtgacctgggctctgggactcgatgcttggacccgacccatagtcggtgtctagatctaggacttagaccagaacgcgaaccaaaactcaaactcaaaccaggacttggacatatactaagacccactcccaaactcaggaactaacactgaaacttgaactgaaaccggaccgagatctttgaacgggactgggaccttgacccggacccgaactcggaacaagacccagcctcgaaccctacttgagatcgaaaccctaacctgaacatctccctggacccaaatcaggacttgaacccgtagttcgtgacttgaaactggaagcgaaactagaagcgaatcaggacccaagatcaggaccaggacagggacatggatccagacccaaaactgtaaccggaccaggacccggactcggacaaaaacccacactgcgattgggtccaaaacctgaatcgaaacccgaacccagacctaaactcaaacctgaacattaaacattacacgggacctagaactaggatcgagacctagaactagaccgcagtctcgaacctagacctagacccagacccagacttggactttggacatgaactgaaactagactaggacgcatgattgggatccagatgttgtcctcgggtcagagaaccggggcttggacaagacccatagtcgatgtcttgatgtggaactcggacaaggacctaaagccggaccaggaccaagaccgagacctaaactttggactcgacactgaaacttgaacaagaacatgaccaggaccctggaacagaaccggggccgtgaccaggacctggactgggacccaaaactagacagaacccagcctaggaactcgagctcggacctagtcccgaacctggtcctagacccagactaggactgagactcaaacccgagctcaggactcgatcccagacccagaccaagcccctgacctaaattggaattcaaacctaaacatggacacgaacccagacccagactcgaataccgaccctgacccagaccgggatccaaacacgggacctggaccaagacccagatgcagacacagacctgaacctgagacccagacccaggacccgaactggagcttaacaaagaactagacccagatcgagatctgaaaaacccatacccgggctcgaaatcagactcggaccccgaccctaatctagacccagaccgagacccggtgatgagaacactaaagctaaagatacaagtaaagttccagttggcacggtgaccagggcgcaagccaagagattcaaagaagaactcaacaa

SEQ ID NO: 51267 - DNA, 796 bp, Cannabis sativa
aacatcatcttccaagaatggtgacaatcctcaagctcacctttctaaaatcaactccactccagatatcttaacaacctggtatttggacagtgtagccactcacaacatgacaaataatgcagacaatcttgctactgctgctgactacaaagggaaagcaaaggttgttgtaggtaatggttcctccttatcaactcatgattaaggcacaagttctgtttccaccacatttccaaaccaatctctcatattacaagacatccttcatgtgcctaatgttaccgaaaattcacttagcatttctaaattcactaaagataacaatgtcataatttgatgacctttgctgtcttatcaaggacaagaaaacaagccatgttcttctatagggtcatctcagtgaagatctctagacacttcaagtctctcccacctattctcaagattctatcaataatgctcctgtctctttcagttcccagcctaaagcttagaatcataccgctactagcaaccatgttcatgacaagtcacaaattggtaacatctgatattgtcaacttggtcatccatctcaatctattttgaataaagttttacctcaagttgttcctaatgtcaaatgtaaacaacttgatttttgtagtgcttgccaaattggcaaattacatcagtttagtttcaaatctactacaaataaaattgttcatccttttcaacttgtgttaaccgatgtatggagcccctctttttacccctctaatgatgcctttaagtactatgttagttttat

SEQ ID NO: 51268 - DNA, 1262 bp, Cannabis sativa
atcctataaggatatgatatatatatttcccctaaaaaagatatatattgttaaaaaaaaaaaaaaaatcgtatagctaattttatttctcgaacagaaaattttgtataattttagaatttaaatttttaaatattgtttgtttagttgcacgtgatagatttaaaatttactttcgttaaaagaataatttattaaatgaatataaaaacatttaatataatttatttattaatatttgaaaaattattaatcttttttttttcttttcgttttttaacaagaagtaataattactctaaaaataaaaaaaaaaacaaatagattcatacgtattaagttattattagatttttatttttaaaaaaaagttattattagatttttatttaaaaaaaagttattattcaaaaaagaaaaatttgcagcaaattttttttttgtttctattaaatgctcaaaatttaaaatttgtgataaaaatactcaaactctcatattttattagggtaatttgcttgcggctaaactcgctaaactttaaagtttggcacggtcaaatttctaaattggaaaagttatgtctaaattcttcaatctctacaatccttttaattttattatgtaattttttggcctctacaatcgttttattatatagtgttttcgcctctacaatcgtttttattatatagtcttttggcttattgtatacacacatagtgaaattttattggtctagctaatttttttttttggtacattttaaattatttttttttctaaataaaagatatttattgaatgaaaaactatagaactgtaaagtaaatacagaagtgaatttctctatggaattgcagaagggacaagaattagaaatacaaatatattggaaataagacaatcttttgctagtatcacttcttatacatataacattagaagtagcacttcttaaactttaatgaagctcaaatctaacacaaagacacatcaccaaccatggatctttgttgattaacaactggttcaaaaattattttcctcaaataataaacaaaattaaatctttgattttttttttcttaaaaaaattctctcattgtcataagcgtctgatctctctattctttatttgacaacaaaaatcatgagtcttcatcattaaaaccggtaacggccgcatcgcccggaacaactacaaagccaaagacacctgaaaacaacagtggagcaagtcacgaagatcattatagttg

SEQ ID NO: 51269 - DNA, 1150 bp, Cannabis sativa
gaacgtcaactagaggttatgcagtccttctgagattgtggccacatgtccctctactggtggcggagctagacccggagggtacgggttccctggccctagagctaatacagctactgcagcctgagctggtggagtaggtaggaccgaaagttgtgatccaggagcttgagggtgacatactccttgcagagagtttatggcaccctactatcccagaatgatcaacggtctgtgaacaaccccctatctgggctagatgatgggaatacagacccattgacccaagtgtccagctcttgccaacatcttgatttcatccttcaagtagccacattctttagtggtgtgtcctatgtctccgtgatactcacaccttttgctctgatctcttttaaacttctccccttgagatatttttgggggtttcctgtagtgaaccatattgtaggttgccttgtacatattttctcgagtatgcactaggctggtatactcagtgtactttggttcatgatccttccttggctttttcgaagtttcacttcgaatttggttattttcgcttcttttgctctgggaatgactcacattctatttcaaaatttttgcttgaggctttgactgtccgagagcaatactatatccagtttatgttgctccatactcaaaaaaattggtttttgtaggttcttgcacgaacgaagaaggtacgtagatagtaggagtatactgagtttcgagaacaatgacctagggagcggcccctggagtaaatgtggagggcacaggtgctggagggactctgaaagcctattaataagcatcctccaaattgttaaagacctgtggtctcgccttgaactttgacaatgtctcaaaccttcttccttgcatttattcccataatagggaccaactgcaagtttggattgtaaggccacaagcttcatgttgctagtcacctttgctttagttgccgcctccatcattcgctgaatgaagttcttcaagctttttcctgtctgctgtttgctattggtgatggatcccatttccatgttatagtcgcgggcggctatgaactgcttttgaaaggtagattacaatttcttccaggaatggattgatccggaagccagtctttacc

SEQ ID NO: 51270 - DNA, 1028 bp, Cannabis sativa
tagccgtcactaggcttattaatcatagtgtaatagttgtagaaggggggttacgccgtaagacttaatacttatggcagttccaatacgctttctcccatgtgacattaaatgcgaggtgactgttcagatgaagtttgatacctcccagaagtgctttgctatagctttgccgtccgggagtacgtggacctctcatcccttctttgggaggtctgtttcttgctaatcctcttaactcaaagacttagctaaattatctcaagaccatattccttaaatccacgtgtcgcagtcgcgttggtccacatattttggatgaacttcagggcaacacttatgaataaagattggtcagctttggcagaggtgaaagtgaatactttgagagctgatttgagcttgtcaaactaagccctaggagtttgtcttaaaccatagattgccttgtttagtttgcagacaagtttaggagactttttgtcaataaaacctggtggttgggtcatataaccatagatagcccttctgcgcataaggtaaataagtaagaccaaagtggatcgtcttgctgaatgcctcacactggaataataggacccatctccctactactatgaacaatggtataagagactgaactcacacattgcatcaacaaattaatccaacaaccatcaaaatccattcattcaagaaccgctcaaaggtaaccccactctatcttgtcaaaaccatatagtttttccttcctttccttttcctcttcaaataattcataacctcaaacatgaccattatattatctgagatgagtccacccttttataaatatactttgattgtccaacatgataccaagaagaataatcttaattaaggtggttggctaacaccttagagaccaccttatataaaacattacaaagggaacttggtcttaggtcacccataataaccaactgcttcttcttaagaattcactactacaaatatcaaaattagcgacggtcctaaaaataattttt

SEQ ID NO: 51271 - DNA, 1084 bp, Cannabis sativa
tagcactaattgtgttaaatgaatcaaataatcttgaattttaaaaagaagagagaatagtatgggatggatcaaaagtaaaaggtgttttccttttaagatattagacatacatatatatcttagctatgaaaaatccaaagctaaaaaggttaagctatgtatgtatatacattgacaatttcacaatatatgatcagattcagtactatactgaccagtgaccacctctttttgcccatatttcactcacacacaaaaaaaaaatacaataattattattccaataataataaaaaaaaaatagtattaataattgtgaagtgattagagtagaatttgttggcctggcagaatccaatccatccaaccatggttttttagtcaacaatatatataatatatacatatatatatatatatatgccttatctttcttttcccatggccatgtgcactctaaaaagaaaattcttgtcctaccaatattaataataataataattattattatttaagtatttatttaaatatataagtttatatatatatagcagtgtcaagtagtactactgtctcaattaattagcaaatggccagattataattagatactaattataattaataaactcacagttttctttaactttggcggctaaaaatacaaattattgttgcaatttcgaagaaggtgttatatatattaaaaatatttagaggagaaaaataaaattatcaataaaattaaatatgatattttttttcacaaagtgaaattaattgaccatattattattcgcatttaagaaaattttgtagtgtaattttttgtatcatctttataattatttaaaatattttagaaaatttaaaaaaatttaatacgttaaaataaaattcaaataatctgtatataattattgtaagcaagttaaataataaagctttaatttttccgtattaaattttttaaatttttataaattttatcttaaataattagatcaaaataacaaattagataggaacatcattaaacttcaaagatgtttcattcataaaaaatttcaataataatata

SEQ ID NO: 51272 - DNA, 1283 bp, Cannabis sativa
ataaaaaaatatattgattggttagttttttatgtgggtattgcttgcgttgataatagccttatcttacatggttaacaggaagttgacttgacacatggtgatttggccttagctagtaatgtctaattcttaataaaaataatttagtgatatatgtatatatttaagaaagctaattacttaataaaaattaaattcaactttctaattttctttttcagaaaagtaacatcattaagtatagtataatttagctgaagactttaatatattaacaaccaataataaatcaatctcaattagattcacagttagacgatgagacaccagcaatttaagactccaagccacagccaacacttccatttctttatgtttgatacaccctttaattggtttagccattgcggtaatgacatcaccattagagttacgaagtagagtaccaagtccatacacaccaaaagaaatattgacaacaacatctgtatttagtttaagcctaccagatggtggagcaagccatttaggcttagttggaggcaccaaagtatgctctgaagttgcagcagtaggaacatgagatcttgaacaaatagggtcttactgatgggtagataaactcttagtctaagcatgcttgaagtcagataggtaattgccaacaaaattcaaaattcgagaggcagacttgggagttttagcatgagtttctgcattcttttccgtccaaatgcaccaaagaagtgtaataaaatgttcaaccttatcagttggaagttgagacgaaacatagattaaaaattcagagaaagaacagctcttcaacagatgccaattaattactgaatcccattttttttccagacttgtttaatttaaaaacttatactaaataataatgaaattaaattcagttcaaaattaaaaataggacaatttaaatttagttaatttaaataggacaaaatttaatagaaggaccaaaatttagtaaggataatagttaaatgagaatttttaataacgaaaacaattcaaaagtacaatacaatagtggtaatagtcaggggaaaaatcatatttattctaaataatataggcaaccaatttggtgccatttttgggaactaggaattggtcttgaattattgtagcgcaataatcctagtatacttcattaatattctattggaaacggtaggtaatttataaaacattgttacgagacatccatagtatttagtagtatgatgaagtatcactttatacttgattag

SEQ ID NO: 51273 - DNA, 1733 bp, Cannabis sativa
  modified_base (39)..(53): a, c, t, g, unknown or other
tttctgatcttttattaattagtaaacctgattatattnnnnnnnnnnnnnnntagggcataaaattccaacaaattcttcatactccacaagtccatcttatttaggaactttataaagcgtatataaagtacaagaaaaaatatgtatgattcttgatttttctcaaattggtcgtcccttatttcctaggttttgtccgtatttataggagttttaggatggcagttattctcttaggagcttatccttgtaaccgttcatgccaagtggataaatctcacctttgatatttacatcacatgggatagtaatagaataaatgcataactgctccttgtctttatctgtaaacgattattctgactatgctttattcatctcacaatataaataatcttcttaagttgctatattctgaaggtggcttttagcgcttaaatatactctgggtgatatctctcgagtccttctgtaatgttgagagaagtaaacgcgagatactatcatagtgtgacaattctgagatgaatcatgctgggagtgtttcccttagtcttttcacatattcacgagtatgtgggtcaatgagttgcaagctctttaaagaattcattatctaacctttctagacatactttctgttgagtattttgtgtatcctgagatggaccttctacattgattgtttgtctttctggtctcataaattagtagctattattcacgactcgtccttatctttaaaaggatgagttaaaatatttctactaattgtattttctgaggcgagtttattgatctcatttattactctataacacgagctggtttatattttagctttttaatacttgtcattaccatattaattgctcaaaatatgagtataacaaaaggtacagagaaaaaagagagattgagtttgggcttttgtatgaagaattttctgtagatgaagaaaatgtttaggtaagagtgtgagagttgaaacattttgaaagaactcatcagttaatcaatctcaattgtattgtatatgttcttgcttgatcaatatagtggatttggtggtgttccaaaactggagtaaagctatagatcacatcgatctattggacatgaaccagtatatatcttggtgttgattttatcattttactgttttatcttttcttgaattttatgctctgttcatccttaattttcttcaattattgtttgtgatttattaatcttgtcattgctaattgtttaattatttaaaatttagttgatttgattttgtaccattaattgtaatttttccacaatatatttagttttatatagtcgtttctttgaaaaaaaaaaatagttttttctacatttgccaaattggtttatgcccattagtgcaaaactcagtctttaaggggattatcttaattaatcttttgaatatattaaaagatgcattgcccactatttttgtgggattctttgatcctttttctctcaatggcgtatttacattcagttgtttcaattgtttcaagtattttttttcttaggtaaaaaaactcagataaatttaatggatgaataaactagaaatacaaacagtagaattagagttgtaaattgtgacactttgagtcctgtgattcgaaggggaaatatagggagttgtacaatgcaacattgcttggagaaggtcatgtatgatgatactgatactgtgtaagtatcag

SEQ ID NO: 51274 - DNA, 2575 bp, Cannabis sativa
ctttatatgtgtttaaattacatttttttagaaatttatatttaggatgttaaataacatacatggtaataaatctacatcctggtaaaacatattccaacaggaggaggctccgttatccacgatgcacatggaaaccgtcatgttccttatttgtgttgttatgaggagagggtcattgtgaggaaacctgaccttggcagcatttccctctataaaggagatggcaggctctccaagcctaagttgcttggagtctctttctttgacagctaggatgtcacttttttgctcataacaaagagtccgagcatagcgctccctagccttgtttgtcttgcctgctatgtggggtccattgattatgacccataaatgacccaccactggtgtgacatagggtctccgttctgggcagcttgtgcctgagcttggtcgttttacacataacgacgcaagtggggattgtttttacttatgaggaattcaatctccctcttcaagtgttgacactcgttggtgtcatggccgaaatcattatgaaatcagcagaacttgaacatgtccctcttttgatgtccttaacaggaggagacttcttatatgggacagtagcctgagtggccatgtaaatagtctcattaatgtgccttgtgatctcgtccatccattttttatacttattttgcactcaaaatattcattttcctttaatataggctccaatcaagaaatattttccacttgcaataaattaaacataatctttcttcaatattaaactatttgaataacataaaaaaaataataacaaaataaagtgaacaaattcaaaaaatactgaatgtgttttgtctagtgacactgatgaaggctctaattgttcttctccatcagattattcttgctcttctccatcggattcttcttgttcatctccattagattcagcttgttcttctccatcagattctgcatgttcttctccatctgattctgcttattcttctccatctgattttgtttcttcttgtccacttgattctgattcttcttcaaaactttccattgactcatcttcactatgtaactgagatttaaataaaatgaggtaaatattatatcaatcaagtacaaaacataatagtcaagctttactaaaagtagtcgatatttatactaacattttaattataatcttgattatttatgttcgagctctactaacaccaatcaagctatataatatatcatatagactactttaaaaatctcgaacataattgttggtgaagttctacccatttacctcatcatttggttgagttgttttcgtgcatgcgagaggagttggttcgttcaaaatcaactactgttggataggttgttttggatctataatacttggtattttgcttcatgatattgaattaccaaaacataatatgttagagttgagcttgggtgattgagcaattgcacaacctaaaaatgataatcataagtaactatgcataagagccaactggtgcaaaaatgagaaaacattactcttgcctaagaaaacacaatataatttttaattttacccgttaattcataaaataatatgatattaatatagtagtgcatttatttaaatttagataacaaaacaaataaaatgagatctcttcataaaataagaaaaaaaaatacatgaattagagaaacaaattcaaccaagtcaaaacctaactttaaatttaacacaaaaaagaatgaataaaatttcaatgggtgactactcaatggttacattaatattgtaatcatgatggttacattttttttgacctgtaatagcaggttaccaataagtaaaaatttcttttttagaattaaattaattataattaacaatttttctaaaataattaatcttaatttgaatatttaataagactctttctagcaattaatatttataaataattttatttttatatttaagtccctattataatatttttaacatttaaaccatttaactataatatttataataaaattctattttttttttacaaaatttagacttccaccccttctaaaataaatttttcaatacttaattaatttttaaaaattacatctaattatgattttgcaacaactgcatcatcttcctcctttataaaaaaaatttaaaaattagagtttcaatttgtcccaacctaacattatgtgaattttccacttcaatacaatctcctacatctatgtcacaaatttatttctctattcaaccagcttagatttctccttggttttaataatttgcttgttattttttatactgttatgcttatttgtaaaaaagaagcaacaatttcaaatacttggtaatctactttgataaaaaaaaaaattacaatatttagattgatgaagatgatttcaacgaggaacgaaaatagttaacaatcattaattttatagttattaatacatttttttacttaattttttattttttaaaagaaaaaaaaaaactaaataacttgaaccaatcttggactgacacactaatttg

SEQ ID NO: 51275 - DNA, 1222 bp, Cannabis sativa
tatatatatatattggaaaattaacaattaatgtcaactgtcgtattttgttgtgttatatattgtctcaattttttatcttaatatatatatacatatttttcatgctatacaatatacattacactaaaatatatggaatggcataataaaaccaatgtgaataattaatgacattagttgattataaagcaatagacatattctaatttttctaatacattatgtacgtttgaacaattattctaaaggatgtgagatgaggaaatataattatatttaacacattaaatcgatttttcattttagatagtgtatatttttatcagatatataattaacagccaattcaggattactacttagttcataataaattttaattaataataaacatgtaaagaaaacatttaataaaagtgtaacatcattgagcatcatttgactttgtagttttgaagaaaaatgagtgtttttattctgaataatttttattttgtcagagaaaaggccttagtttgggcccacaaaaacatcattattgggcccatgagataggaccatgggcagtactgctgtacccgacccattgacacccattaattgggtctaagttgtcttatttacccaaaagggacccaattttgttgcccaatcttgatgcatgtgtcatggtatctttatcagtattaatacaaataaattaataatcaaaaaaaaatatatatatatatatatattatttacaaatatataacttataagcataacatgttcaccacatgtgccttgggacacatcaaatactatatgtatatacatatatatatatatatattagtacaaaatctatagtaccttatatgaatccaatccaatctaatcttcccccactttcaaaatcacttttacttttcttttcattttaaaaataccctttttcctattaatacctctctccctcataaatatatttataataaattatacataggtggcatatatatatacgtgtaaaaatcatttgtcttcatgtgttgagatacggatatatatactagcttagtgggacgatgatgatgaagagaatgtgagaagtgttataatcaattcaacatttttttgtatagttggaaaattaggtcatataaccctcttagtagatatatataacacatatatatatatatgcacatgccatgccacaatggtatatgtatac

SEQ ID NO: 51276 - DNA, 1387 bp, Cannabis sativa
attttgatgtttcaagagtcaaactactcacgagtaagtgtagaatttttcggtgaattttgtgcgaatttttatattattttattgtgatttaatttgatctctccttctttataaaaggaaagttctcctagctcattattgacactttccattctctctacaaggtcagagcttctctctcctcacttcttatctctagaaatagtgagtgcagctagaattagtcattttttctctagttctctttgtaaggaaattctcttttccaataacaaaagctctaagtagatgtagctctattaccatcgcaatatagtgaactactatagattgtggtgttctctctttagttattattttttctatttgccgctatcgcttatcaaacaatacggagtaggctattttttaacgtcaacatagacaatggcgatgtctttgtcctaataacatctttgtctccccatttaatttaaataataaattttaaaaatatgtttattacaaaataaaaaattactattttactaattcaaaataaatatttttgaacattaatattattgttatctataaccctgatagtgttacaaggtagcgatctggggaccacaggtctataataccaagctacaatgaattagattatttattgaatcttatcaataaaataatcctacttattaattccatgattactccactataaatattgaaatgacctcttagtaattatataattatgtatattgagttcaattgtagtgtccattgatataatcagtattagtgattagccctccttgtgtcgattcataatttgttttggtcaaattactattttaccattctatttattttttatcacattacaatttattcactagtgaaaatataatttagattcaatttaaatttatgcacaacttttcagtgctagagtaaacacttatgggaaaaaattttgatatgttaggaaagttaggattccatgattgtaaatcaagtttctagttgtttaccgagtttttttagaaatctaattattaaatataaaagccaaagcaaatattatttagagaaaaatatatgaagaaggtactcaaaatttttacgtggttggggcaataacgagccttaatccacgagttagtactattattagattggctagaaaagcctaagggattacagtaagtatgagcactcttttcttgtctaagccagtatgccaagatttttcaacctttgcatataggattcaatgagtatttatagtgttataaaggtcatactaattactctttttcttctaatggagagtttacaagtaatacattgactttgcgcttatctgttagacccaacccgtgagacctcttat

SEQ ID NO: 51277 - DNA, 804 bp, Cannabis sativa
aatacaatacgacctaatacagcgttccaaacgagcccttaatgtaataattaatacattataaattaacgtgaaggcttacgtttttgttccattacaacatacatcataattttgggtaaataagtaatggctaaaaattattttggaccttgtgttaggtaaaagttaccaattggaccatctgtttttactacaagaaaaaatacttttcctggcgcatttggtcaaacgcgccggtataaaagctgacagcataaataaaatgctgaatttctactttgactcagtcataacttttgcctcagcgcattattgcgccgccaaaagttgttaataccagcgtattattaaatattcgccggtgaaagatctaaattaatgaactgccaaaaggcacgagaatgttcccacgtccctttggctttttctggcgcacaaatgtgccggtaaaagtctatccgaaaattgggggcaatcttgaccgcttggaaaaaaaatttggagggaaaattccacattgaatttgttggtaggtggaggtactttttgccggcgcattattgggctggcaaaagtaataatcaaaacggtttgttttgatttagggtaaatgaaccactaggcgcattatattgtgccagcaaaagtaataatcaaaacggttcgttttgatttagggtaaatgaaccacttttatcggtgcatttcactgcgccggtaaaagtatatattacattggccacgaagcagctcctttcttctatttttttctaaaaatttctttctccctctctctcgttc

SEQ ID NO: 51278 - DNA, 957 bp, Cannabis sativa
ggaccaagaatcgtcttcggatgactacaaaacctggtggaaattcttttaggcattgcaaatcccaccaaaagtgaaaatatttgcttagaaagtcatacaaaatgccataccagttgccacgactttacacaaaagaaaagtcattgattcagctttatgttctcggtgtaaatacgcatgggaatcaattggacatgccttgttctcatgtaaatctgccaaggctgtttggaaaaatactaagtttctaattgattatcaccatgctcaatgtatgtttaatggaaattatctgatacatttggcatcaaaagcagatgttgaagcactaatatgtgtaacgtggagcattttgaatgatataaacaaagtacttcatggtggctcacaaagagatcccattttaattgcatcttttgcattgacttacatagaacactatagaagtgctaaaggcatttcctgcaaaaaattgcagcaccctaaatctcaccaagcagatcccacgcaccagattccacaccaacagggatttcatgaccaaaaccaaactgctgataactcacatgtcacatgggttacaaactccaaattcagtgattcctcttggccgaattaactgtcagcaagttggagagttccagaatagataggctcgactcaatgctaaccaacaccagcagacagcaactggaatgaggcaccagccgaacatctcagctgcagatgacattgtccaacttcaacagcccctggatgatatcatttggaagcctcctgatatgaacatgcttaaatgaatgtagatgctgcaacaaactttaagaatcagacattaggaattggagcagtggtgtgcaattacaaaggagacgtcattgctacactctccaaacaagttcagggatgctttcgaagtgatgaaatggaagcaaaggcgctctttcatagtct

SEQ ID NO: 51279 - DNA, 3124 bp, Cannabis sativa
cagtggaagcttttacctgctgtcgatcaagagtgttgcaacccgaaatggtaattgaattaaaatttcattttcaaacattaatagttttaaaatggacatttaattatagttattttttaaaagttaaaaaataatttatatataataattagtggagataatgcatatggattgatcaatttaaaattcatacttaattaattagctatatttcatgccatgaaactgggattcaaacacaaataattgtctaaagaaagatatatataagagttaaagagagtactaccaattagccattagaacaattgacaaaaaataattatatatatattggtctagttgatctttccttttctaatttttaatataattagaacgtgaaataatttttttcattgtttatattttaaaaaatgaaattatatataaataaataaataaataacttttagtgacaaccattctaggaccaccatatctcttgcttttttttatttttattttttttatgtataagaaaaattagtatttaattaatttatccatgaacaggaccacaatataactttctgattaattattaattgttcttatcatatataattatatataacaagttgtatttatttaatcactaaacttaaaccaatagattttgttcaatttgactatgcattatcatcatcatcattattattatattattatttattattattaaaataaatattatttaaaactttgtattttgtaaaacttattgattggtttatttgttttgttaaataattaaataaatcttgtatttttcaaaatagtacaaataaggtcataactaatttttttatcaaaataaaacttaataataatttgatctagaagtgttatgataaaactggttacattaatttctgtatatattcgtggtagaaattattttccagttagttatatcaaaaaaattatcaaaaatataagctcaaaattctatttttactattttaaataatataaagtctattttaccattcaataaaataaaaaatttaattaataatttttataagacataaaatttaaaatagtatttacccttattattataaaaacttaaaacaaaggatcttgtgtctcagcccccaacaaattttgattggtttacattgcttcataattcattgattaattattaaaatatatattggaataaacttttcatatattatattattaataggataagatatttatatatagtaaaaaaatatgtatttggtacaaaagttttaaaccaatgatcatttacaatttcaaaagagacattattttaggggataattttatgtgggtctaaaacacttttatagtttaacaaaaaaggaaagaaaaagaaaaaagaaattgaaaaagataaaaaagaccaataatgtgattataattctaaaatagaaatatcaatagctctccttttcatcttatttggttacttttaaatattaaaatctatacaatcacttatatcatatattataacacaatatttgaaaagtgttactagacactaatcgaatgttactataagataacattttacaagtaattaataatttttcacatattaaactaaaaatataagacttgatattatattatactaatataataaaaaaatactaaatgtactaacgtggccaagcgataccacaaggtatcgtgtataattaagtataacttccacatattttaatttaataataattataaaaaattattaatcattcataaaatcttacatcacttataattgtgctgggacattatcggtgtctaataataatattcaatataatacattgtattataaaatatttaacagtgacaacaactgatgttgctaaaacgactctacgtataattggttttgagccacttatattttttcttttaaaagaaaaattggcactgttatttagaattagcaatagtatcataattatctcataaaaattgactctctctcctctacctcacaatcatttgatctcacagctaacaaattatatttaaaagaataaataagaattttgctctctaaacttttatgtgttacaaaaaattttactcaactataaaaaaatcattgtatgtatcagcatccagttactttttgctcatttctctaagtaatttgttaaaataacactaatataacgttaatctcaccaaattcaagaattcaaacaataaaatgaatacataaatagaaatttaatgatggattgtccatattaatgaagatagtgttcatcctttatatacacatgtgggactttagttacacacctaacaagtctccccttaaacgattttccatccgtttactctctatccactagtgtactttcttccaatgcatggctaactttggaacctaactctaataccacttgttataggtcgttagacaccatccatctctacttttgatttgatattgtccgttttggacttaagtcattcttggataccttcctaaaaaacctcatatcaatggagatagtgtctatccttatatacctatgatctttctcatttttagtcaatgcgagactttagttgcacactctacacatgtatacattattgtactgtatctatacttataactcatgccacataagtaatattattttgagaaaataagtagaatgtaactgaatttagaaaagaattttcacaataaaataaagtttaggggacaaaactcaacaaaggtcatacttcatgggaaaaaaatcaattttaaaactatccccaatgctcctatagtagtgtttaggactattgctaccttttaactattctctttgaaaaaaaaaatcttaaaaataaataattattgactttttaagaaaaagtacttaaccaaggccaatagacaaaagacttggtcatgagtcaagtttggagacccatcaaataaagacccaaaagactaaacaatttggatcaaattctaaggcttgaccatctctatggcccaacccaaccacacaaaacacctcaaaagtccaatcaaaatagttcaattgttaattaattacttgctcatatggaa

SEQ ID NO: 51280 - DNA, 636 bp, Cannabis sativa
ggtggaattgtagtttgaaaaaaccttacgttgagtcttaggcggatagagtattgacttggaacttctttactattgaggttgcaaattagtagtttataaatattccatttggctggatatgtttcatttgctcttgatcattgtcgattgaacatttgcaaagctgaattttatgttgtctggctaaagtctctagcctttaccttaatggttatgttcgtgatactatcgcattcgcagagtattgacagctttgaaatggtatagcttgtatgcttgccttttgtttctagtcaagggtggctaaagttgcccactttatttgtgaaacaagaaatagggatgtattcaattatattcatcacaagctaacattaattaagctacggtcgttctcaagctcgttttccttgtctgactggtgttttacaccttcattttattgtcagtttgtggaggcaatgatgaaaaaaaatcttgcagagaagtttagagaatttttctctactgccattcttttcaatcattttcatttccactagaatttttagataggtctttagaacaaatctatggttttcttttccaattagtttggtgccattttgttgttattcatcatggacactcatg

SEQ ID NO: 51281 - DNA, 641 bp, Cannabis sativa
aaaaaatggatttcaaatgataacacccttgtggccttggtggttgctctaagcaaagaaaatggagataaaaaaaacacagagataaattgaaagaaagatgaagagagagaaggtgtagagagatatatatgtaagggtcaaaacccatacacaagtttatagtttgttttcatttcttatttttctacaagaaaaaaacactacgaaagaaaagtagacaaagattcaaacaaaaaaaaaaatggtgggtcacattgcttcacaaccccaccaaatgcaattaagtaaaagagattttctagtatgtgttgacccaccaccatcacccacatcattctttttttcttcctactccaccaagggtattttagttattttaatatgacggccctttactaatcctgatgatgattatatttgtgtttttaatgtagcgtaatagtattttacaattatatattagcttaatagtttaaagattttgggttcgaagcaatctttttttctatctctcccttatcactaagttagcgttaggagtgttttgtccctccctgtagagtgattttgtttttgtgtgtcgaagcgttgattactggttccaaagttttgctatggcctcctctagcaaagaagat

SEQ ID NO: 51282 - DNA, 2492 bp, Cannabis sativa
aaaattagaatcctaaaatattaaactgccacatcattgtgcttaacaacagaattatatagatatatagatgggcttctccatcaattacaaattactaagaagcccttataatattttatagtctaacatgtattgatggtaaaggaggtcgtgtgttaaggaagttgtcccgagcaattacttttaacactaaaatgtgaaaataatattctgtgactgttgtagctttgaatgatggtgccaacaaccataactgttttgagttaggatttttaagcactgaaaaatcgctcttgggctcttgaacatggtccttggtgtgtacgtggatacacttttatcttgaaagcatgggcaccaaagaaggagcattttgacatgtttgaacatgttagaatctggttacacatttttaatctcccgagagactatttctccattgttaatggcaaaatcttgggggctaaagctggcacagtgattacggttgatttagacgaaggcaatccggccctatggcctaataaaaaagatatagcaacaaatgaattatttaaaaatgtgtctttcttattttttgagaggcaaatttgctaatcaaatcgtcgtaatgaagtttatataacaatttttttttcgatagacaacatagctaattcactcaatcgttcacgcaacatgagtgatcttaaatatgattttatcaattttaattttaaaaaattcgataagcaatgaatgcatttgaaaaggaaccaatattttttatgtaatcaagtatttcaattaagttactatttttatttggaaaaattttcctcgatacttttaattctgaaaacaaatctaaatcatcaatatcagacaatccattatatttcaaaacatcctcaagatttaaaaagtgatctttcaaaccatctccatccaatactattagtttcttcatgttgaacaaaaaactaaaaatattttcatacacttaaaattgttcaaacctatttttaagtgaacaaataatttggtcaatcaagttaaaaaataatcaattcgaaatgattcttcagtggatttaattatatcaacatcaacatttttatcaaattgatttttcctacgaattaatcattttcacaaaatttaagctctattcccatctcaattgcaattttttagttgaattcatagcaactgcaaatctatttttcctataatcttcaaaataagaaaggaggtattcaaatctcttatagccttgtcaatgtccatgttcttattactttgtaaatgtttactaattgagtttataggaaataaaatatcataccaaatggtcatgcccaacaaaaatttaaattctctaattcataatttactaaacttgaagcttcactctttattttaggatgctcacttatttttgcaagttcaagtaaagcatctcttatatttggagcttgagatataattaccttaacactatatgtgactttcccaacgagtttgagataataatttcacagtaaaagtattatttttaatattgcccgtcgtttggttgaaaaagagaataatgaatatatataaatatatatatgcgttgtaaaataccaaaaatagatctagctttaacacaagaattaacaacatcacaaatcactaaattaaggttatgacaaccgcaaggtgtatataatgctctagaatttatatgtaataatctttttttgtacacctttgtactttcctttcatgctagactcattatcatacccttgccctcttatatcattgacctcaagtttcaatttttcaatttcttttgcaagttcatcaaaaaatcattttcctaaagtatcctccacattcaaaaatcccaacaaaaaaaaatctcccactattattgcactagatgaaatatctatacacctcaatatgagagacatttgttcttgatggcttacatcaggagtaaaatcaagtaaaattgaaaaaatatttagctactttaatctattttgaaattatatttttcactccaacaattgtatcaactcattttgaatattatgtcccaaataatgattatgaattttactattttaaatacgtcgaacatattcttgtattattggatcaaattcaacaatcatttccattaagctcaaaaagttactattattttcttgatagatcttttttattacatcctcgaaaggccaaattgtttttagctagatttttgacaattgtacttattgttactaaaacatttctccaatgttctttctatttattaagtctttcttgagcatctttatcaatcattttattctttgataatctcaattctaaatcaatccaaacactcatgttaactatgtgatcattacttgtttcgtgattcttcaacttatcacctaaatgtctccaatctttagttcctttgctacccaattaatttatacttaattaccatattagatctc

SEQ ID NO: 51283 - DNA, 1302 bp, Cannabis sativa
ttgtttttttaaagtatgtatatatattgataaacataagaaaaagaaaatcaaccctcattatccttctctatacatctctctttctctcgagtcactcatacagccatggagacaaagaaaatttagagctaagtttctcatctttctcctcaattatttactagaacctgaagtgagatgaaggagcaagaggtaaggttgttgttcatcttctcctctttaaaaactatgaagaaagtgtaagttgtgatttgaattgttatgtatggtcgttgtgagtgtaaagaatgattagaaagtatttctaggattgagtgggatttgttttgatgtttagaatgattgtttgcaattggcataagtgtagaaccaagcttgagttcttgaaactcaagcttggtcattaatggcggttttctttttttgatttgattttggtttctctcacttggattatgttatattgatgccatagtattgttctgtgaagtttggaatgaatcggttaggtttggagaaagttttaggactttaaaaacttgaaatttttgagtccctactgtgatgaactgtaattccggatggtacagggctgtagcaaccagaattccgtttggcagtaaccgagaaaagttaaatttcatattttggccataacttttaacttgggtgtctattttggatgttctatatactgttttgaagcttgtgacgagctctaccatatggtgtatttgccaaaatataagttttattttagggtattaatactatggggtttggtaagaaaccctaggttgttcttttgtaactattaagcagtgttttgggataaacacttattagtttactgttgttctgacataaggccaagatcatcggggataattctcaacttatgttggctgacatgtatgaacttggattaaaggtaagaaaagtaaattgtactgcatagtacgttgtattgtaatacaattagtattgttgtgaaaatattaatgttgagatatggttaatattgttatataatgaaaagattgattggttatgtattgataatgttatgatattatggatgtgatatagggcttacctgattaattgatgtgatactctgtgcgacgtatcgagcgtaggtacgggtgttagtgatatgaaaaaaattgccagattatgccatagagtaaaactattgcagggtttcctactaggttatggcatggagtgaaagcgttgcagggtttcctacaagtttatggcatcgaatgacgcccgtactgttgggttttatgccct

SEQ ID NO: 51284 - DNA, 1347 bp, Cannabis sativa
aaaaaaaaaaaaaaagctatttatagtgttttttttttaaaaaaaaaaaacaaacctacgacttaaatttacagtatcaacaacaaagtaatttgtgatattccaattcgatatacttttacaaaaaacttcaaacatatatttgaatactataaattatttgaaaatatttaaggatacaaaaattatattataactatctataataatgaatatcatcataaaaaaataaaaaaaaatattttgccacgtggtataaaaagtttaaattagcactcatctaattaaatatatcaaatttaatatacttaattacaattatgtttacctttccaaaaaaacctttccaaaaaaaaaattacaaatatgtttgacacctataatatacaaatatgttttttttttttcagaaaaaatacaaatatgtttgacagctataatatatgtgccctttcacattaatccgttattaatacaaacatctgtatgatctaattaactaaagcgccacaagtgcatgacacgtaagcaattgtgtctagtttttcttatgtagcttagttaatttattttagaggcctagagaatgttaattaaattttttaaatattagtaagaaatgataaagaaaaaaattgagttgagtgtggttgctaatgtacgtaacagtaagtattatattatattgtatatacatgtcattctggcgcgtggtatatatattcttgtatattgtatatatcatcaatagtattttagttggtgtgcataatgcatgtaataagaatcaattaaaaaactactaagaatacatgtgcatgttggtagttacatgactataattgtgtatacatgacatttaattagatctatccatctccatgaattataattataagaaaaattagttatatatatatatttttgacaaaagttatatatatatatatatattaaattgacatcacatgagaaaaagccaaattagaaatattatatgtggcctttaatttaatgggaactatatatacatctgtcaaaataattaaaatataaactatatatacgtataataaaaacacgtataagtttgctttcggtggagagaagtgggtgcgaataagatgagagtactcacttgaaaagaaatgctaaaagatattattggtatatattaaattttttttggtgtcatatctctattagtataattaagtatcgtttctcatataagttaagataataattttaataagagaaatattaaaaaacactcattgtacttttttacgtattaatatcgttatttgatattgtcatatcgctaggtttttttttttttttttt

SEQ ID NO: 51285 - DNA, 4370 bp, Cannabis sativa
tgggattgggttttatctggagggacttgtgtggtaaacctatagcagcaaatattattttcatcccccaaatatgctctgtgatccttgttgaagccgaagcagttttagctgctatgaaggcctgcccgattgaaaccatcagctactttgagattagaacagactgcaaacagctggtggatggtttcaagaaagaagacaataatctaagtgatgtttgtatcatctacaacaagataaagcgtcacagcgttttcctttttgtacaaagctcaattttataaatagaaactataatgagattgctcataggttagcaaagaggagccttgagaacaagttatctcaatcctttctcaacttttttcccaattggttagctaatttttgtaaagctgacctctatcattctttgtagttttttgagctttgttaataaaggtgaattttcaaaaaaaaaaataaaaataaaataatatgtaagaaatgaattggataaagtaacagaaaaaaagagatagtggttataactatttatctttattaattttttaaagacataaaaaaatatcattttttaactttatttttaaaattattaaaaaaaaaaattttatttttaaaatcaattttaatttgtcttaattattcttaaagttcataaattagttaataatattatatatgggaattaatttatacactatttttaactttttttttttctaatttatggtttgaattgtttcgttaattggttgctccagtagttcttactttctatgtaggttgctatatgtaaattttagttgtgatttaagttgctttattagttgctatgttggtttctatgtaaatttttgtaaaaatacaaaaaaattatgtttaaagtgtaagaataaaaaacccatttataaatctttaattattttttaatatttaatgaagataatgccaattctttgaagaattgaacatgtgtataaataaaatgtgtaattatctctgttggcgctattaagtatcctaaaaggttttaggaggtggtggacattaatagtactcaataataatgctatacaatcttgtattcccccatgattttttttttttttttgagaaattaagtaagtttatctcaattaattttaagttgtacaaatttattaaccggatgaaaaattctataaatatctcacatataaaatcactaataatatacaaatatgatatgtatatgattactgaattacacatagctagattaattaatgcttaaaagaaattttttaaataatattaattataaaacttttataccaatatatacgacggagatttcaattaatataaatgtaaaatatatagttgaaattttaatttaataaataatataaaaattattaattaattataaagtgtatttaacactttaaaatatctaataacaatattataaagagaatttatcaatattgaaaaaaaagaaaatttgtatcaataagcaagtcatcacatgattatatatcagggcataatgatcactcaaataacgtgtacaaattttttcccttctatatgaattagctgcagcaatatcatatataaaaatcgatatttaatttttcttctttaggtataacaacagtcattatttatctagttttaccgtaagataacgtaaaagaatagtaagtaataaaacgacattttcctgcaacacgtgatacattccctggtaaatgtaaaacgtagtattgatgtaatattgacaaatgatcgatcatcaccagaacatatatatacatggcaattgtcaactagtaaaacatttctatctatgtaaaaaaaatcattttattaattattgtaccttaatttgttccaaataaaatgccgactctatataattgcattttgagatcattattaaattaaaatatgtagatattaaatgctttgggctcttaatttgggtgagtgggtggggttagaccatttccaatagaagatgtaaaaattatgctatatttaatataaaagtagttttgtggtaaatttacactaaattttagctttatgcacaattataaaattttgattcaaaatttaatatataattagtgttttattaaaaaaaataaaatttaataactttataattaattttattattattttaatatgttagataataaaaaattaatataaatgtttcataatttaatgtgatagttaaatatactaataaattaatagaaatgatataaatgtaaatgaaaaagtagtgcatttattgtggtgtaaattttatgtactaaatttacataattttttggcacaccattgaaacacactttttgttcaatgaactatattttagtttttcaccacttatttacatcttcattggagatgatcttagggtgctacttttgctattaggattcatcaatgagctatattcgagtcatttttggattgatatagttaacttattatttattttttatttttgaagaattaacttgtttattaaacgaatcaatattaaattaacatactaaactccaaaataacatgatctattagaaagtatacacacttatatcgatttaggataattgcgacataaatacttaatattttgagtttgtaaatgacataaatccaatatttttttaacagtgttgaccgatatttttgacaaccaattattagattttagagttgtatgaagtaattaatagacgttagaagagaagattttttacgtagatgagacattaataaaccttaattcacgagtcaatgtattaatgagagtatttaatatagagagttttccgaccgatcccctttctttacatcatttggatatttataggctaataatagtgataaaaggtcactattatcgtgtttgtatgcaccatgctttgcacaattttctaaatctgattttagggctgatggcctatttttatgatagattttggctgtctataggcgtttggtgggagttgattttgactcatctcttatttatgacttgatgactcatttatgcagcatcgatcgattgacgtatgaggtcttatgaaatcgtggaatgatgggtttaaaccctcaaacatgtctgtcagcataagttgtcatatactttttctcatatcgcattaaatgtgtatacattattttaatcctcaaacaatgtgttatactttgccaatctttcattaccctcctccgggtcaattccatccgcggagaggaaaaggacaaggatatcatcatccagccaaattatcctggagatgaataatctatcattagttctttggaacaacaaactccgggagtgatatagcaatggattccagtggcgtgggctccatgaccacgtatttttagagaaatcctaggaaacaagcagcataagtactacatgttcttaaaactataattttcattcaatttggtcaacacggactccattttgaatttattaaaagaagagttggaaagcaactcatactacatgtttttgtctagatcaaatgatttagagtctgtggcttactaagacactagtaataacagtctttagactctacttactaactaaattggacagaaattacacttttataaatattaagtacgtatttaagctgctaaaagtgtgtttttgccccttacaaactaaaaaaattaagtatttataatatatttatctaccctatttgttgtctatattggtttaattaaatagattataaatatattaattaattaacctataaatgtgtcaatgattataaataatattatcataggttgatggataggtgcggtcttgggcgtagacgagttaggcttgtctttagagttcttctagcttccttaagaatattaattttttaaaaaaatactatttttttattaattttaagtaataccttaattttattgaagtaagaatctaaaaatatttctttttcttatgacttactaaattttaaagtacgctttcttgatggattaataaaattaaatataataagtcaaccacttgagtttaacttttgaattttaatacaattgataaattggttagatttaagtttttcatcaataatagtgaaatattgctatgacacgctttattaaatatattatggtaaattataagtgtttaataatttttttttgcattatttattaatttaaaatgtggaagacccaatatttaacaccctaatagttgatcttgtaatacgtaactctacgtacgtaaatttagctcaaaaagtacatatgtataatgttgtgaagctgaaatgataaattacaataaaataata

SEQ ID NO: 51286 - DNA, 895 bp, Cannabis sativa
aaataattttattagggtttggaaattattattataagtatagaagacatattccaatctggccaaaattatttgcatataatataatccatccaatgattaaattagctgttcccttattaagaatattattgtaaatatcgatattgacaaatgaatttgaagaatctcagttagatgagtaattaatatttatactcattcaaaaaaactttaattaggatggaaaaacatgttatccactcatcatgttgtgttcatataaatgtgatctctttttatatttcgtattaggtgtgtcaattcgtttttgactcatatctaattttttcaaccctaactcgatctgtacgtaaaaaaccgtgtcgtgtttaacccactttgatccgttttgttgaagatagagttgcaaagaaaataatacatttagattccattagaaaatttatatacatttatgaattaattttttttatatatgtatataatatataataaaattaaaatttttaaaaatattttttaattttttaaaaaaatttaattttattttttttttaatttaatattgaatcactaaatatttttttttatatttttatattattattaaaaaaattattttattttatttaaaaaatcatattaaattcgtgttatatttaattcgcttttatttcataataaataatcgtaccgatctatttttgatccgcatctaatttttccgactataagtctataacctataaaatttaggtcacatgctgtgttgaaacttgttttagcactccttacttcaatatcaaattagtaaataaataaaacttttcctttttaatagttaagctataatataaatgaataaatgactatagagtctagtaatttcacg

SEQ ID NO: 51287 - DNA, 719 bp, Cannabis sativa
tgtaagctaggtatatattattatttaacccttatgcctctaaacttgaagctaatgagttggatatgattattttatcataatttttcctctttttacagaaactatatcgaaagctggtccgaagaaaaatagttcacccacccatatggtatggtggaaaaaaaacaaaattaagaattgcttctagaaaatataggtcacactagctacggtacacagtacacaatcataaatatagtgagttaaaattagtaattatcaataaatttacttgactaatcttatatagtaccaccacactactataaaaaataattaatatatgggtgtctaaaaaaactttgagattgtagccttaagtattacactaatatggaagttaaaataagataacggtccaataaaaatagaagaatagagcccagcaaataatatatgggtgattaatttataaggagcatttcacaaatgataatttttatttaacttgatgatttgtaaaatatcatgaaaagtttgataattttcttttctttttctttttcaaattattcccttatatatattagtttctctcgttcatatgtatatatttgaatactttatatataaatgttgcatgattgaaaaactcttgtaattgtgcaaccaaaattctcacattgccaaaaacaaatggtgagaatcatggtatataaggaattgacaagtatttt

SEQ ID NO: 51288 - DNA, 1618 bp, Cannabis sativa
  modified_base (1516)..(1516): a, c, t, g, unknown or other
ctattaatcaaaatattttgtctacaaatagaatattgattttcacaagacggaaaaatcaaaaattcaaatagtattttttttaattgaaaaatcaatctgatttattttgtacattttactcgtacgtgtgaacaaaatattctaataataataataataactgaaatcgattcaaatagagctcatcaaactttttttttattgtccaattagctagtaaaaattattttgccaatctcccaacttgacaataccctaattatactattacttaaaattaaattatcatgttaatttgatcattaccaactcaacaagatattaatgattccaccaaatattttgattaagaaatattactaacaccatccaaagtagtgaataagaaatacagattcgatcatacaagagaatcatcaaaagatattcaaagactaatcaaactaataaaataaaaacaacttacttacaaaatatctctagaacaaaaaagcctaaagagcactatatctatatatgatatattaatttttgtgtcaccccttttgcccacctaatcatgattaattaagtagtactactatacttaatactattagagtagtgttgtactagaaaatctaatcccaaatcactttttagttaatgaagccatacaagtccagattggcatgaaccaatgaaaagagtctaggcttattatgatgtggactcacttagtggatattttgtgctgccgttgcttcatttggcttcacctcacttttgaggtcatcaacttaattagataagtatgaagaaaataaaagagataatattttagtataaagatatgtacttacttgcaaaaaaggaaaaagaaaaagaaaaaaatatctgtataaagatacttacttgttcacacaatcaaactcataatatatatatatatattcctctctatttgatattaacccataaaaagcttaggatacttttaagatacacacttaaaaggagtactactgatatatttctatttattttgacatttaagagaatattttattttaattttttgttaatttatgttgtagttgtttaagacatatttctgtaaaattttaagagatttagaaaaatttaacatgccaaaaataggagtgcatcgatatgttccttttaaaaagtgtactgtagaatttttcaaaaaattatcttttgccctatattatttctttaaaaaacattatcagctaagactgttttttttatttatgacacataaattatctcaaacggttgtactattttgatgtattttctcttactaattttatagaaaatttaattacttttagtgcaataattttaataatttatactaaatatgtcacataataaatatattttgtttaaaatatctaataatttatactatttaatatacttatattatcaataaataatttatgattattttaaatgaataattacataagacaccagtttttgtaaaatatttacatttttncgttcaaagaatgttttttttacaatgttataattttccaaaaaataacacgaaaataacataaaatcaacaagaaaacaacataaaagtaacatcaaaata

SEQ ID NO: 51289 - DNA, 1147 bp, Cannabis sativa
attggctgagaagtgtgggattgatgaaaggatgatgtcccgcctcatggattagaggaacacaaacagtgaagtcttggttggcttgctcagttacataatcaaagtcaccaatagagaagccaccaatggtgatgggaggagcgccgattggaggttgggaaaatgagtctccaaccggatttgtatgaccagaagacaaaggattcatatcttgatttattagaggagatggatcttgaacaatcgggtgaaccgtaggatcgatggtgtcagtttgtcttggatggcagaaagaaccacaagaacaggtgttgtcgatttgagaggaagtggcaggagcaagagggtcaaggatggatcctaagccagctgccatggatggatcagagttcgatcttaagccaagagcaccatgagagcccacatctagaggtaatggtggtcaaacctgaggaggaaggcggctgtgttggtgcaccatggatttttgcgagaagacagaactagtttgaaatgtgcagaaggaaacatggtcagagaagacggagctggttcgtgaaatatggatctggtctagaaagaaacatctgataccatcctaggaaagggagagaagatatcttttatttctgagagaaaatgaatgtgaatgaatcaatgtatagctcttacaatataatattccttatatatagtacaagtagggtaaatgattccttatacccgaataacgatgcaaaccaagcaagtataatattaaacctataaccaatcaaaccaaataattctaatactataagactattgatacaattggtagtgacataattactaataacttttatggagtctctctttataaaaaaatatgtacaatatcgctaattaattgtaaagcaacatctctaggtagtgctagacactacaagtgtctaataacaatgctctttgctaatatttgttttattttattaaaatacatatgtgttgactcaaaaatctagattagatttctaaaccatactcgctcactagattgacgagaatgaataagtagttaagtaattataagagagacgcaataatatagtagtttactccttgtattgcaatactaatagagctgcgtctacttcaagttttt

SEQ ID NO: 51290 - DNA, 1078 bp, Cannabis sativa
aaaaattgcaccattcacgtttacattgattttattgatttctggtttagaccgctgctcctccttgttgtgttttgcaacaggtgacaacaagcgctcagatcgatgagattgagcataactccattgatcaggacagaacgagcactagtggcaactttagcagcagcagtacgcactctacctttccataacagctcatttcgggcttctcaaagagaccatgcaatcattaagctttcctcaaaaagacccaaccgccctttatgaagaagactctcaaactagagcttaaaatcactgccaacagcagctgcagaggtcacaccagaccgaacccaacagctttgagcaaaccagcaatcaaccagaacatggtaaattgattcttcgtgtgtttggcagaagacacacgacaccggaactaggacatgcttggactgaagttgcaaccttgtgggcaagcaacttgtaagggctttccacataaagtgtagtactttggcaagaactttgatttttcacaatcttttccacacttcatcttccatagcagcactccaacttcctttgagcagttgcaaatatttatatgtactctttataaaatcctgaatgttcatgcttccaaaaatatttgtctgctgcactagcatttattgtttttcttttaatttatttattttaatttgtatttagtcgaacccttttgtaagtgtgtagagatttcaccaaaacgacacgtagttactaacatacattactaaaaaagtaacctttatatctattgtgtcaaaaaattcctaaataaataaacctaattagcatttatattgaaataaacgacacattgtttaattaattattaaagatgaaatgaacgacacttcgtttactaaattactcaaaattagcaagatttttttgtttattttcgtttacttcgtttggtacatatttgtctgaactcgttagtgattttattttgataattgtgattttgggtgattggaaaagaataatgaagaatcttgaaaatttcaagactacggtaaaactactaagtttggatgatgat

SEQ ID NO: 51291 - DNA, 722 bp, Cannabis sativa
aaaaatacagactactactaatacataaaaataatatgaagcaagataatatatacaaaaattaataaacaaatatgaaatgagtataaataatacgtgcattaaaaaaatttataaagcaccgagaaaattacttgaaagaaaaaatattatatgccctacaatctgttcctcttctccacaagacaaaaattctatattatctaaaattctactttaagattgttagaaattacataaacaaaaaatgaataaaaaaatgcgaagaaaactcgaggcatgtgaaacacatttttcgtaaagcgtattttccccattactttaacggtgctagaagatcagcgagcaatcacttccgaagatacaactactatagagaaacaaaacgtacaacctccactacttcgatgaactcaaaactaaacattctatcagacaaaagattagagacagacagtgactaaaaaacctatagttttggactagaaacttctatttctaaacaatgtggggcctaaaataacacaaagttattttatatagcctttcgaatagagacattctatttttagtcaatgggggacaaaatgcaaaatttatattattcacattttctcaatattgttgagaaaaggtagtaattacataattttggtaatttcactctattttaaaatgaaaagtgtattttttttttggatacaggatagtaattatatatt

SEQ ID NO: 51292 - DNA, 2131 bp, Cannabis sativa
atatctcagaccagtccataccaagttctgttgacaattcttctgcagtacactctgaagcatcacctcagcaacatgagcctctttcaccaaacaacctcaggtctggttcaagttcagcaggggaggatatccatagtccgttttatactggttttaatgatgattttgctgaccgttttgatcagttttcagttggccctgaccttgaaccaacatctgacactgttgagactactgaacctgctgcaaacgactcacctcaaccaaccttagccactgcattacagccaacacaccagatgataactagagctaaagcagggattttcaagccaaaaacttacctcagctcatccaaatccatacacacattctctgaaccaacaagtgttgatgaagctcttcgacatccaggatggaaaggtgctatggacactgaagttatagccttaaaaagaaatggaacctgggtactggttccacctacagctggtcaaaatctggtgggcaacaagtgggttttcagaatcaagcttagagcagatggcacggttgaaagactaaaggcaagactcgttgcaaaagggttccatcaaagaccggggatagactatggtgagacttttagtcctgttataaaagcttcaactgtaagaattatcctcactatagcaatgtcaaatggatgggaaataaggcaattggacatcaataatgcctttctaaatggcattctagaagaggaggtgtttatggctcaacctcaaggttttgaagagaaaggaaaagaaaattgggtttgcaaactcaataaatctctctacggattgaaacaagctcctagagcttggttcgatagactcaagaacactctcatcacttggaaattcaaaaactcgagaactgacacttccttgttcttctacaaaacagaaaagattgttatcttggtgttaatctatgttgacgatatcatagtgactggaaataatccagagagtgtcaaaggattcatttctaaactcaacgggtcctttgccttgaaagacctcggtcccctgcatttcttcctgggaatcgaagttttcagggatcctactggtttgtatctcacacagacacgatatgttgaagacattttaaaaagagtcaacatggaaaatattaagccatgtcctaccccaatctcagcaggcaaacctctttccatccaagatggagaaccaatgaaaaacccatctgcctacaggagtgtcattggctcactgcagtacttatgccacaccagacccgacattgcctactccgtaaataaattgagtcaattcctccaaagacctacaaatgttcactggagtgttgtaaaacgagttcttagatacttaaaaggaaccaagactttgggccttcacatcagctgcagcaacaagttaagcatcactggcttctcggatgcagactgggcttgctgccctgatgacagacgttctgttgctggttattgcgtgtacttaggagaaacacttgtgtcttggtcatccaaaaagcaagctgttgtctctagatcaagcactgaatccgagtacagatcattagctcatgtctcgactgaaatttcctggattgaatccctccttaaagaactgaattttcctctgctcatgccttcaattacttggtgtgacaatatcagtgccagtgctttagcctccaatcctgtttttcacgctagaactaaacacatagaaattgatgttcattacgttcgtgacaaggttctgcagaagaaattggaagttaggtacattccatcacatgatcagattgctgatctttttacaaaaggattgtctaactcaaggttctcatttcttgtggacaaactcggggttagaacttccccctttcgtttgaggggaggtgttgagaaatgagtttttcctcatctgctactgctggtatacagagttctaccctgcatctgtctgcaccaaatcctctccttttctggtttgacatgtgtcactgtggtcctaatcattggattcgatccctaggcaattctgttagaatattctgtactgtgtaatctttctagggaatggtattgggtgccacctgtaattga

SEQ ID NO: 51293 - DNA, 2638 bp, Cannabis sativa
agaatagatcatagagctcataactaatatatttgtgtgatttgcagtatgtttgtttgttcatgcaaaaggatgagaatcatgaagggttcagaagctagaggactggcttcttctgcttaatcgatcattgatcaatattcatcatcaattcataatcaagatttgagtttttttttaatattatataaagaagaaaagaagaagagagatctgcaattgtacagagaggattataaaattactatagtaatatatagtaggttatattattgtataagattaatttcattacatacaacaacaacaacaagatatataaaatatgtttcccaattttgtgtttatcttctttggatgacaaaaatatatatatacactacatatcaataatgtttgatttgtataaatgtaatacagttcagtatggaacatatataacagatcaaccatgatttttgattccaatgtccaccatttttcacttgaataaacaaaaaaaaaaaaaaacatctctttctacgaatattaacctgtttatttaagttgatttcaaagaaaataattttgattttgaacaacagaaaattggaaaaaataagtgataatattaaataacaaacatgaaatcttcaaaatctcttcagctaattagttgttgttgttgtcgtccaaagaagataattatgtttaattaaaagacaacaaacacaaatctttgtattatactggctgatggaaaagtctagttagtgaattttgcaatacgtaacaagaacaaattacaactcactcactcagatataattcctatacaacaaaatgtcgattagaatataatataatagctgataatagtaataccataaattaaggagcaattagaaaagagagaagttttctccaaccactaagtttgagtccattctgctgctatcctggtcattaaaagaccccattcttgaatctagaatggcaagctggctcttcacccatggcgggttcgacctcccttctatccacaaggcttctccagtgtctttgtgtttaaagtctggatatttggggttcctctgcaaatcacaacaaaacgcaaaattaacataactcaaagttgaaacaaaaccaaagtaggcttgttgtcattgtcaacataccttatttctcctattatcccaccattccactggattagcaaagtaggcttgccataattgctctactgtttcgtcactatttgcattagcatttccaaactttctacctgcaagaatttcatataaataaaataaggtatgagaatccaacgaacttggctcaaacaatatgacttgcctggtattgttgtggagtcagaacccgatgagaaattcttttcaacaaaattcagttgctgaacaacaacctgtgcagaaaatgacagacaaactaccattgtttagttgatcaagctggtgaagatacttagatatgatgaagtgacagacacagtaggagatcaaatcacacaaaaccttgtagtatgtctgctgtttaccatcatcgctttcaactgtatctgaaatcaaacgtccggagacatatatctgttgccctttttcgacatgttgagaagcaatatttgctagttcatcccaaaatgtcagattgatcctggatattatcaagtagagaaagaatgcttcaaatccctgtcctcaaaggaacattaatgaggtaacctcttaacaaagccaatacttttcaaatggcatagctataaaatcatcatgagattgaaagacaagagtttgagctttctaataaataagcaccctataatgatgaagagtcatatttgatttcatgactacaccatatcatgatcatatattgagggattgttaaactgaatttagtgtcaaataaggtaaggaactcaattaagttgatggtgtactatcctcttctcaattttacttatccctttcttggtttaaatttaaaatcatccaatttccatcaaagattccttcttttttacaattttgtttcttgctactacccattattcaccaattttctgaaaacaatatctaaaaatcccatttcaatagtcaaaacagaatataattaagagaaagatggagaattgggaattgagttaccatgaagtatcagtggaagacttcttgacggcgaggcgggtccaagcgacgaccttgccagagggcaagtgcttgatttcaacaggaacaccaacgatgcctatcagctgcaccgtattgcacagctccttcttccactgaatctccggaggtcgagggaacgccgccgctgcagccgcttggttgaagtagtagttgttgttattgttattgtactcgacagagcatttgaaagagcggcgttgaaagcccaatcgggtacataaacgagtattgttgaaaggagtggagagaaagaggaagtcgttagtggaagaagatgatggtattattggttgttgtatgagcttcgccattttcgccattgattgctaagctaaggtttatgcactatgcatatgcagttgcaggcagggcttatcttcacaacgatgactcctttaatgggccttcttttattcttttgggcttcggcttaggcttaacttatt

SEQ ID NO: 51294 - DNA, 3231 bp, Cannabis sativa
  modified_base (3175)..(3191): a, c, t, g, unknown or other
gttttgcttgcttccctcatctaaggccctatagatcccagaaacttgattttagatctgagcaatgcatttttcttggctattctcctcatcataagggatacatgtgtgagaactctcaaggcagaatatacattgcaagaaatgttattttcaatgaacaacacttccctgcaatttctgctgcagcatcacctcatataactttctttcaacctcatactttacctactgctacattttctttccctgttgttcccactaatacttctctttctacttcttttggtgcttcttgatcaacatctcccacatgtgagaatgttcctgaatcaacctcacctcaaaatgtcaatatttccaaccctcctactgctccttaccgctcatctatttccacacatgtccctacaccaccaatcattccaaccatccctaaccaaaacactgatcccactcccataataccaaaccccacaccagaaactaccactacaaatactgttccaggaattatgcaacaacaacattgcacaggcaaccttgcaccagaaagtacccttccgatgtctgcaccagaaaccagttctgatgttataacaactactgctcctgaggtgatcacaaattcttgaactcacactatgaaaacaagatctcaaagtgggattcgtaagcctaaggcctatctttcaaataagcatcctctcaaagtgtctcttctgccaagtgaaccaaaatctatcaagcaagctctcaaagatcctaagtggtttaaatccatgcaaacagaaaacaaagccttagttaaggcaatgacatggaatttggttccccattagccttatatgactgtgattgataacaagtgggtctataggataaagcttatgctgatggctctctcaacacctataaatcaagacttgttgcaaaaggctatttacaaacacctggtatagattatcaagaaacctatagttttgtggtctagccaacaactgtgagagctgttctaactcttacagttacctcaaattgggatgtcaagcagcttgatgtaagcaatgcttttctcaatggtgaccttcaagaaactgtttacatgaggcaacctcatggctttgaagatcctaccaaacgtaatcatgtttaccgtctccacaatgcaatttatggtctaaaacaagatcctagggcttggaatgaaaagttgagaaacaccttattagaatggggatttgctgcctcaaaatctgacacctctctattcacctttggttctgccaacaacttcattattctactagtttatgtttatgatatactagtaacgggtccaaactcatctctcatttccaaaatcatacatgatctcaacaattcctttgctttaaaggacttaggttctgttcattgttttcttggaatagaagttcatcgaaattcaaagggcatgtacttaccttaaagtaaatacatcactgatcttttagttaaagtccatcttaatggtgcaaagagttgtcccaatctgaaaagtgcaaaccagaaactccccttaactgatggtgaaccttttgctgatatcaccgtcaatcgaagtactctaggagcactgcagtacctatctcttactagacttgatgtggccttcatcataaacaagcttagccaatctttacatgctcctatagttactcattgggaagctcgcaagaaacttcttcgatatctcaaaggcactctcagctatggtttgtcacttaaactagcaacaactatgaaactatatgcttactccgatgccgattgggccagctgtgttgacgattgtagatcaacagaggggtatgttggttttcttagaggaaacctcatctctttgtcttccaaaaagcaacaggttgtggcaagatcaagctctgaaagtgaattcaaagctttagccagcacagctgctgagattaaatggattgccaatcttttatccgagcttcaagtttctatctctcacccacctatcatttaggtagacaaccaaagtgcagctgccattgctgcttccacaccaggtcaaaacacattgaaatcgatttgcactttgtaagggatcaaattcttgctcattctctgtcagtcaggtatgttcctgctgtggctagggtggtcgatcttctcacaaagactctctcaatagacagatttcaataccttagaagcaaacttcaaatggatttcacccctttccgtttaaggagggatgttacacataaagaattagttagttagttttaattttcttgattagttgtaacagttgtaacagttagttttaactaactctttttcttttctgtaactaattcttgtatgaatgatccctataaataaacttctcagctcacttttgggattgagcttttctctgctattctttaatctgtttcttctctagttttctctctggtttttaccttcaggttttgcctcaattgaaacttggtcaagcttctacaattacgaataaataacaaaatcattcttacatgattagagagctaattagccttagtccacaagtcaatattattatgataagattggaaaagccttaggatttatacaagtgttttaaccctaaaatttgcctgggcaattgaggaatgaaatgtcaaccctgttgcatgggttggtgttcctatatttataatgtcaggtttcttatttgttttccttttcccactgatggggtaaataaatataatatactaaatttgggcccatagcactaattgtaggttgatatggacgtcacatcatcttgatagttattgttaactcaatttttatcctcttggcgtggatgcttacatgaaaaaaaatcagtgccacgaggtcatacagctcaccaacaagaaggccaagttagcacctaagcaaacagagaccccaacactcaaatgggcatcaagtgacaaatcagctccatcacaggagctggtgggcaacccctgccacccctatggccggccaagaggtgtcctacaaggtttcctatgcacttctacatgtggacaacatcctctggactacaaatttttccctaagggcccaactgctgggatttattttattaagatctagatatactaagaagtatgtttcattaacnnnnnnnnnnnnnnnnnataaaacccatttcaatataataggatttacttattaata

SEQ ID NO: 51295 - DNA, 1396 bp, Cannabis sativa
aaacttcaatcgcaactagatcgtcttctttataagcaagaaattttttggaagtaaagatccaaagtgcattggttgcatgctggggacaaaactactaagtactttcataataaagcttctgctaggaaacgtactaactatattagaagtcttaatcttgatgacggcaacaaagtttccaacttagtggacattgaaaaggttgtctaaaatttcttttccactctcttttgttctcaaggtcctaatactgaagccattgacatgatcctctctgttgtggataacagcttgagtgatcaacaataccttttggttgatgctcttttcaatggtgccgaggttaaagaggctttatttcaactctttggggacaagtctcttgggttagatggccttaatgcctatttttaccaaaaaaaattgggacattgttggggaagatctcactaataccattctcaacattttgaacaatgatgtagatatgtctgctattaacaatactttggttgtcctcattcctaaaaaaactaaagatgtctctcttaaagattttagacctattattttatgtacgactttgtacaagattgtggctaagactattgctaacaggttaaaggctgccttgagtgatattatttccccaacccaaagtgcgttcttatctgataggcttattttagacaacatattcattaccaatgagatgattcatgctatcacttgtaggaagcaagggaaacttggatggataggccttaaattggacatggaaaaagcttttgatcgtgtggaatggacttttgtcctggcgattcttaataaactcaacattcctagtccttttattagacttataaacaattgccttttccctatttccatatgttttaatataaatggccatgtgtctaaagaaattttcccttcaagaggcttaagacagggcgatcctctctcgccctatcttttccttctttgcgctgaaggcctgtcctcgacactaatgatccaagaaaggaatggccttttcagggtagctccattgctcgattagctcctcccatttcacatttgctctttgctgatgatacccttttattcactgatgcttcctttgattcttgtgatgctttaaaagaggctcttcatttataacatcttgccactggtcaaaaagttaactttggtaagtctttgattttattttctcctaataccccacctcagatttctgattattttcatactaatctaagattagataataagccttttgttagcaaatacttaggtgtgcctcaatgttttgatcgctctaaaatagccagtttcaacttcatccttgatagagtcacttctcatctgaatgtttggaacaataaaa

SEQ ID NO: 51296 - DNA, 2216 bp, Cannabis sativa
aactttttttccgtctctatctgatctagctagtttactagtttactcctaactcctaaggtcctaagggcatcaagtatctatctgccctgtccgtcctctacgccacccagaattgggctaggccttctctgcatgaggttagctggtcttttgacttgaagtctactcccaagcaatgcaggtcaggatacttctatttttctcagccagactttaagtggttgacgggcactagaaataagggcgtgagcgaaatttggaattttgtagacgagtattacatggtggaaggcatgggtgccacctatactcggttccagcagatccgtatatattaccgtccacccttcatgctagctcttagggatagagctcaaaggatcactcagctgcaagatgatgcttggaatattactttgttgacctcaaaggccaattttgtggagtacgggctttatccaaaggatttcattccccaacctatgaaggagaagaagaggaaatctagtgctggccgggctgagggagctcatgaggagaatgaacccattcaattgaaatgtgaagctaagttgaagggaggtgcgggagccaagcaatatgctcaggagcattttgagcaagaagatgatgttgaggaagagcaggagacacggctcaaaaggaagaaaaaacttatagccgagcatagggctatcgaacatacaattcaggtcaaggagcccagtgtacctgctcggacgtccactcctgtagtaggataggggaaagccttcttggaggagcaagaagactcatcggatgacgatgcttcatcaggtcttggtcgggcagatgcttctgccgatatgcaagatactccatcttgcttttaactttcgtgattattatgctttcatatttctcatgctttttcctaaccatgttgctttcatttcgtacagacatgttttagaaaatggtcgatgctttgaagaagagagtgggaggaagcttgggcttatcccctctggccaaaaagtccaggggcggtgagacaaccccatctagagagaaggcaccggtcgaagaaattattgatctctccgaggaaccaactattgtagacccttctgccccaagaatgactaaatccaaagactctcgaggagggagcacggacaacccagagtagtcgaagggaaaatctaagctactcaaaagcggatctaaccagatcagggccccggccccacctctggtgctgcatcgataaactaaaagaggcaaagatctgcttacccaatacatgactcaatcggtccctgaggtgaatgagcagctcgctagggctcaatgacctttctctagagcaggttatgggatgatcctgaaggaatttacgagggtaagtctttcctgacagtttcctcttttccttcttcaattagttaagattttaatgttatttctctgtgcagatcagtttgaaggtgacttatgcttattcccgagctaagtcgactgcctctaagaacgctgccatttccaacactatgcgggcagaagtggacttggctaggaaggatgccgatgaagccagacttcaatgtggggctgtccgaatggaactgggagaagtcaacaagaaacttcttgctgccgaggaagaaggtggctgagctaactaaagatctataggcttctgatcaacttgaaactgccattgcctccttgtcaaaagaagtgaccagcctccaggaagaaagggaggttcttcgagctgtcttccgcaggttggaagcagagaggaagtctaaggaggaggagcttaaagctgaggttgacaagtacaagtcagaggccgagcagcaaagaacataagtggggaggctcagagggaaggtaaatgcctttggaaggctaatcccaaggaaaactttgattacttggacgattccaaaggcatgtttctcgagtattgtgcttctcaggtggcttatggaggatccgaggctaccacttctacctctggccataacgttgacatgccccctgctcagacaacagatcctctagctcctactagcccagaacacccatataaagagcctgggactccaaccgtctaaatacttatcttttttatcttttttatttctgtccagccataaggcctttttaaagacaaagtgagcagccaagcggtctttaaacttggaattatttttcat

SEQ ID NO: 51297 - DNA, 981 bp, Cannabis sativa
gaaaacccatattaggaaataattctgtatatttaattatatatgcactatatgcactatatgaaaacaaaagaagtagtgtgacactatttttttttaaaacagtcattttttttataagtaaatcaaattagtataatggatttttttttgaaagagaattcattaattcaattaataatcgcacgacgtgcacaagagggtacaatcccaatttacatagctctaactttgaatttcaaaacataattggctaaacatgagccacctgatttacctctctatacacaaaagtaagcctagaaataaagtttgaatctatagttctaatctgttgcaatatctcatcttcatctctacagctgtcctcggtcctatggatcaattgtatagcttcttggcaatctaactttatgataaacctccctaactggcgttgtagcccgactttaattccatctcggatagcctgaagctcggctaaaagtggagaactggcctgatacttcactttggcaaagtccttcggcattgcttaccccgacatcgacatttatggtacaatggccttcaggaggcagctgccatctagctaattcccgctggtgtttaagcttcttgtgcggattagcctctcttagttcagcaacatacttcccacaccattccaaaatatcaactgccttaggcgcaactcccccatgtagaacattatttctaatagaccaaaaatcccaagaaagaagcacaaaaaactcaaacatttcagcagaccatacctttgccaaattatccaagtatgttattatatatcagatgttttgaacttttttatgtcctcccatggctcacatttttttccacacttctgcatttgcacgacagccccaaagagccactacaaaaaattactatttttagtgacaactttttagtcacaacataattttttttgtaattaaatgtgacttttagtcataa

SEQ ID NO: 51298 - DNA, 2116 bp, Cannabis sativa
  modified_base (2080)..(2086): a, c, t, g, unknown or other
aagtctatacaagttctccaagttccatttggctttgggacgagaacaggattggatatccacaagggataaaatgcctcacgtataaagtcgttggccaacaagttatccacttcctgcttgagtgccccttgtctctcgaaattcaagggccacctcttttgtcttttggctgggcaatttatatcgatatttaagtggtcgcagataatcttagggttgatccctatcatatctccattgcttcaggcgaattgatcctagttcacctcaaaaagttaattagctgctattttaattgttcatccaggctcttcccaatgtatacacactttgtgggatttcttggacctagaacgacctgttccagctcctcaattggtttcaataaatttctttcatcttgaatccgaggatcaagatcttcactcttcttctcgccttcttcagtcaagtctgccagtagctggtgaccagcctttctgtgttgcagctcgatgtgatagcacttgcgaatcagcatttgatcacctggcactactcccacaccctttggtgtttgaaacttaagggataagttcttaattgaactaacttcccctagtctaaatatgttgtaagctgatgacaaatcaacaacgaaaaattcttgcattattgtggtggataaaggtgattcgcccaatgttaacgggagctcaattatttcttgactggcgacactatcgcctataaatccacacagatttacgatgcaaggtcttaaattagctttttcaagtcccattgtcttcagtgtatacctataaagggtgttcactgaacttccgttgtccaccagcaccctctttatcctcttattgggaagctgaatggtgataatctatgggtcgacctgaggatacctcacgtcttttcatcttcctccgagaatatgatcggaggttcttcaatttttgctttcttggaaggttccaaaagcaaaggcagactacttgttttttacttccttcacatacctcttttgggcattgttgctctctcccgcaatatgtggccctcccaagataaccaggatatcctctcctttaagaggagggggttgtaatccctggttgccttggttattgggcggatttgactggttatgtctatttccctgtcttttcacatattggttgaagtggcctcgcgcgatgagaatctctatctcatccttcagctgatgacactcgcctgtcgtatgcccaatgtctttttggtacttccaaaatttggttgcatctctcttatgtctcacgtgcctcatgggctcacgtttacgaaatgccaccctgtgctcatgtgggagataaatgttttcccaagtttcattaagcccggtgtaaatggtatagattggcacgtacttgtcgtgcttcttttgatttttcttgtccttggctgactccttagagttatccttcctctttgaactagaggctcctagattattagtcgtggtcgagatagtgcttgttgagacattgttgggtttgcttcttgagccagtcttcaacaacttcatctccttactggcttcttctttccgaataaatacttgagccctttcattaaaatcaataatgtttcttactgggggaccgtgtagatcatcccattgctcacctccagtagtggagagatctgtagtgatccctgcctgaagagaaataagctgggtagtatcatctaggttcctcaccctcgcagcagctgtggtaaaacgacttaagtaggcgttaagcgtctcgcccggctgttgctttatgttggtaagtgaggacgcttcgggtcacctatcccttgcgacctggaattattttttgaagtccttagacaattgttcccaagaggtgattgaatgatgattaaatttattgaaccagctgctcgctgctccaactagtgatgtggggaacaaaatacaacgtaaattgttctaacattgcttgcttacatgatagtattgaaattattcaaatacgagactggatctgtggtcccatcatatgacgagaatgttgggttttatgccctnnnnnnnactcatttcaatataatcagattacttatt

SEQ ID NO: 51299 - DNA, 867 bp, Cannabis sativa
tacatacacagatcacagacaatagagtacaaacattttttcagataattgacaataacaacagaacagatatacatatatttaacattagtaaactcaaaatgtagcacagagattagattatgagaccaattaattgaaaagtcttataaaacagagattataagaatttattccataacataatattacttttttcttcaattaattcagcaataattcattaaaaaccatactttttattcaattaattcagaatgtgttgtcaatctaattgagaaagcatagtttcaatttcaaacaagctacagtgaagattataataccttcaatggcctctctgggagtcttgaaacccaaaccaacgctcttaaagaatctgttgcctccctttccaggtctctttcctttagatgacttcttcgagctacaaaaaagaaaagattatatttcacagtacactaagatcgaatcgaagaattaaatccagatcaagtaatattttgagtagattttcgaaattaaggaaagagacttaccaaagaaacaccttaggctgcttcaagaaggctttctcagtctgttccgccattgttattcggtctcaagcagaagaagttaacctaaacctaaacctaattcagcggacggagagagaatgaggggacggagagagaatgagaagtttatatagtaacggaggagccctaattgtcaaattactaaattacccctacccttacccttactttaattttattgttattctaatttttaaaaaaaaaaaatataggaaaattctaccatgcacctcttaaaatggatatattaatgaacccctatctgttttagcatccgaaataattt

SEQ ID NO: 51300 - DNA, 1084 bp, Cannabis sativa
tttaaaggggggataattgtaaagaccgcttaattttaatatgataaattagcagataattagggattaattatgaaattagattattaactatgatttatgaattttggtgatatatttgaattctaggtgtgctaattacgttatatatgaaattacatgtttttgatattttctaccggcaacattggaacgtgacatttggtcgatagaattacattttcttatggtttagtattttagctatagcaggataatattgttagacattgagaatgtcgaaatttttttgggtattgggtttgaccgaattgcccctatgtggcaagtatgctttatggtgtatgtgagggcgaaatagtcttttcccatgagatttcttttgtcttttagtgaacttttaatttgatggattacttgatttttaggttaatataaagattattgtgagttatatcatttatgcaagttagaataaacataaaaatattaagcctctctcttcaactcactctctcgaaccctcaagaaccaacaagagatttaggatttttcagcttcaattcagagtattttagcaagtacttggtgtatccaattcaaggtaaaccccttagcaccgttctctttgatttcttaagctcaaagttaagttcttgcatgtttttctaaggttaagattctgtggtgttatatagtgtttgaatttgtattatgtagttgagttaatgttatttgagttgatttggagttgtttggtggcttgaagatgtgtttggacaaagtttgagctttagagttcaaactttagtctttaatggtgatttgtgtttttgtggttgattcttgtttttattgcttggagtatgtttgttgtgatctaattaggaggtctggaaggtttggtggcatttggaatcgatttgaggtgtttgtggtctttccaacactgaaccggtcgactagttcagtgggacctgtaggaaccagaattccagttggtccccaagaaaccccacagaaccggtcttccggttgggggaccgatcttccagttggagcagtttagggaaccctagttttc

SEQ ID NO: 51301 - DNA, 1413 bp, Cannabis sativa
  modified_base (1371)..(1381): a, c, t, g, unknown or other
taaaataaacttaatcttacttaaagaaaataaaccttaatatatatgtagacaatctcaatgaagactaaaaagacagaagtcaagtcaattgtttatttctattttacaaatttgggttgttgtgtcttgagacgaaaagtagctttgtaaaatgcaagaccaaattcccaagtactacacactatttcttactattttacccctattggtggagtgatttagaaaccaaaaaatcatttaatattaagtaaaatatgcatcaaaatattagtgagtcctaattaagataaatatatagtttaaacaaaaactttcatgtatatctttactcttcaattataactaaaacattattattagatgttagtagtatttaatactaatactttttgaatggttaaattaaaatatataaagctcaatatattttgtaatagtattgtgttactactaatattatttaagatacatttagaattaactgtgtaattattatgtgtaattattaagttgtacaattacttgtaagtagtaatttacaatattctctaaaagttaatatattaataacatatttactaataattattgaaaatcaataataaaatagtcattctcttatattttatttacttactttattaaagttagaaaatagagaacttgattaaagaatgtcaagagtaataatttttattttattttttaatattaaatatataatgataattttatcctttaaaatatgttttacaaaataactattatatattatagtataactcaaaaggctatttagtcaatttaagcattccgattacgtttcttgataaattattcttattttatttctaaattagtaaataacatattacaaatatttatttcgattattttttatttattctgtcacatttctctattaatttattctgattccaaatactatatagtaaacatactataaattatatgagatataatatttaattacatcaatagtgatataatactaggagagtactaattgtgccttctagcatttttctttagaggaatttgcggcgaaacctccttatacttaacccacttatttttttatttggtggcaaaacccccttaagtttatttttctttgtaaatttaaggtgtcaattagatattaccgttaaatactaactggattactactctatcgactttgagattttactgttacatatacacaggtgtacacagtggtcattcagttgatatttaacggtaatatttaattagcatgtcaaaattgcaaagaaaaataaacttaagagaattttgctactaaaaaaaataagaaagttaaatatataggtggcgtttggtaannnnnnnnnnntcagttttctgtttttaaaagtagaaaagtga

SEQ ID NO: 51302 - DNA, 883 bp, Cannabis sativa
  modified_base (579)..(579): a, c, t, g, unknown or other
ctcatctctaagagtaaccgttccatagcttcaaactccccatgaaagccaagcttatcaaccatacatttgtaagtaagaaaagtatgcttaaatccatcttcccttttcactgagttgaacatttcaagtgctttcagtggatccctttggtactttaccacagaggcaacatgtttgggaagtaaagaagcagaacccatttcaaaatctgtactataatcactaataaactctaaagcccagaaaaatttaaccctttccctatcaaatcttcagcaacttcaaggttctagaggtacattaaaatagaaaatggtatgcttcatacttaaaaggcacataaatttttctctttgtaagctgcaacactaaaacaaagacaaaaatatgatcaccagctgagaattgtacatgtgtttggaaaacctaagcggaactggaactaaacatctcattgtcaccaatcctgatgataaaaatgaaaattttctcaaaagagtaaagcattacacctgagaacgcaatgtcgttaactcaatttggggatattaaaacttgtctagggtttgaagaganataaactgtaaggggcttctctgcagtgagttcatgaacaccacaatacactagctacttatataattccacgtcatcaactatgattatctttgttacgtggcaaatgaaaaatgcagctgcatggtgattatgtagtaccgcgacgtatgaaatcacgagtcccttctttttttttcttagctgaatattaccgatcgcttcgttgccaaaagcccatggaaacttaggccataatagcagaggaagtgtttttcgattcgcggaggagaaaacatgacagaatcgacgggacaatggttgc

SEQ ID NO: 51303 - DNA, 1033 bp, Cannabis sativa
ggaagccaccttggagatagagtccgctatgaggactcaatatccagagctattcttgttagattttgaggatgaaattattttaacggggggataattataatgaccacatgaatagattatggattagtaaagaaaattagcattaattattgatattttataattatatatgattttatatttattatgagccccattcttaaaaataggcgttagagttacaatttctcaattttggagattttattaaactctaagagtataatttatgctaaatatgaattatgcaatttttatgatttttgctcggcgatgatggaaaatacggtggatggtcattagagttacatgagtgaatttagaacttatttcttagggagacaaatatttgtgatatttggaatatcaagtttaggcgggattatggtatttgaccattttactcctaagccattttgttaattaagtattaagttaagggtaacttagaccttttagcttggtggttaggtagcagactcccttagatgccagttagccactagttaatttagggttattatcctttttctcaaataattagaaaaatcaagtaaaatcaaaatttagaagtagcacttcatctctttctctctctctttttcatctgaagctaaaccaagggaaatcaagggttttgatcacttaatttcagttatttaacaagattttgagggaattggaagctagaaatttgagttaacctcttactctttgtttgtttgaagttttagaggttttagttaggtttaatatttcatatttgaaaagtaagttatgttgatctaggttcttaatgatttttgaatagaatttggctagttaaggctagttttgctagtgtggggtgcgcttgagcaagtttgagtttaaaaactcaaatttggctcaacaatggtgttttgaatttttgtggttaattactgttgtttctggttggaatctattcttaggtgttattataggtgttctggaaagtttggtagagttt

SEQ ID NO: 51304 - DNA, 1191 bp, Cannabis sativa
ttaaatacatttatatcatatgtatttttttctttgaaaattttccatattattatttattaacagtcatttacaataataaggaaaataggataagaaatttacatattataattatgatatgaatttatatcatatgtattaaatttttaaattattattttttacattaaaatattaattatatataaatatgtgtattggattagataagttatttttatatgtcaattcatatctaatccgcataagtataaattttaaattttccaatttaatctgaaaagtgcagaatccaccacaaccacaaagccaacaagtcttctacttttacacataggagcatcaaataagtaatatatacttaactaagaaataaattgcacttcgcgtgcggtgatattttgtttaatgataattaattaattttagtaattgtgttagtcaaaatttaaatttgtaagatttaaaatcataaaattttatgaaacttataaagatcattgataataatatgaaacccaacatcattgatatacaaaaattaaaaatcctaaagttatattaacccgaaatatacaattagtttaattatttatcgataattttccttgtgatagaatatgctaagaaatgatagaagagagactcatatacgaagagacatgttgcaaatatgacctttaattatgagattcatcatttattgcaattcttatatttattgtgagtatataagaaaaaattattctatgctatatatgaagagaatgataatatactaattaacattgatttttttaatgatattgattattatttgcaaaaaattataaaatatatactaattaatattgaaattctctggcacaaaaataatatatatagattgattattttaaatgtaaattgtgaacgctttagattgataataatatagattgtgacattttatgtgattagtctcaataattaaatatgtatatttatatgtaaaagtaaaatctctaatcaaatggctacatttatatgcaaaagtaattagaaattgaaaaaaaaaacaaaaattagaaatcaatcacattattcaataaacaaaaacgtgatcatagttatcatttttttaaaagaatattatttttaaatatattaattctaaaaaaaaaaaagcaaatatcattttaatcttaa

SEQ ID NO: 51305 - DNA, 905 bp, Cannabis sativa
  modified_base (38)..(51): a, c, t, g, unknown or other
atgccagccgaaatatacaataaataataaaatatttnnnnnnnnnnnnnntgccaaaaatggaattaacattcacctcaggtcacgaagttggaatactgatatcatatgcggcatcttcaatggctgagatattgctctgatcttgggtactcctctcaattcaaacgccacaagagattcttgatcatggaaggacgagcgttctgggagtttctctatcaaaagtacttataatttgctcaagaatcagaaaaatcagtataatagtgccggtaattctaggttttggcatcgtctttggcacttgaaaatacctccaaaggtaaagaactttctttggcgctcagtcactggttgtcttcctacttgcctccaacttgttgtaaagcatgttaatatttcttctatttgcccagtctgttattcttcacctgaatccatcaaccatgctctactttcatcctcctttgcacaagcttgctagctacaacaaggtatggcttctatagttgatcctggtagctcctttggtagctggctagagctgatttttaaacgttttgatgagaaaaaagtgtgtcgtgcagccatgtgttgttgggctctttgaaaagatagaaataacattgtttggaaacaaaaaacttcttctgttgatgaaattattgcttctgcttctattactcttgatcattggagaaatttcaggataaaactttcttatcatctttatgttttggcaacaaagatgatggatctgagtgttggctaaaacatggtaaaaatacaatcaagatcaatgttgatgcgataatcttttagtaagtatgatttcgatttagtggcaagaaacaacacaggctcttgttgggctttgtgccttaaataaaatccatttcaat

SEQ ID NO: 51306 - DNA, 5394 bp, Cannabis sativa
gcatttgaaatttcattgtgtgtccactttgaaatgttactggtcaccataaatgccaattatagcaaaaagacattctaagactgactagaattacctcaacgtttcaggttcatcacatgacagagaaggaagtggatcatcagtgtatatggacggagaagccggcatagtgttgggctctagtgtaaaaccaagaccatcgagattgtctttgcatgatataccagtctggtgtagagttttgttgtcatctttaacctttttcccttgaagaagtaccccaacgtgtaacccacctccaagaatagcagtaactgtctccataactgtcctctgcaaaataaaaataaataaatgaacacaaattaagggaaggggaaagaaacaagatattagcagaaagcaagggctccgaaaacaatacccataaatctagactacttaaaaaacataactgccatccttatgtgaaaaatcctattctgaaactaaacagaaattgaaaaccaaaggaaaagaaattggaaacaagctgtggttaaataattacaaattattggattagttcaatcacagtgatggtgccacaccaaacaaaaataagtacaaataaatctaatgtttgcatctagaatagacaagacatacagacaaaataattacagatgaaagaatgtatgtaccctcaatgaacctatggttgcagtttctgggacctcaatgaaaagctctggtatcttgaaggatttaatacttagcttcactgcacaagtaaaaatagtgcccgataagaaactgcgaacccactgaatacctagacaaaaacaaattaaaattttacaatatagcaacaacattaaatttctaataccatgagaatccttagagtgaaaagatccttggcgactaatgactgaagaagataccccagctgctgcattcaaaacaatcagttagaaaactaccttcaacttacaccaggaacttttagtaagaaaaagttcaattaaccaaacaaaaattaagtgaggcagaaaaggacctccatgtaacattccgttaaagccattcttttccccactttttcccttctccggtgagttagaaacactttcactactgaaccctccatcggatagcaccactgagccacggtcaaataatttcctcctcttatagaaagtgttatgctgatatctgtcacggctgtaacagctttttctcttgttatacagaggtttcattccaccatctacggttgccaaattcattcactttcattaaaagacaattatatatatttgtcaattgtcatacatagaagaagagagacgaacaagcatgtgagaaaatattattcaaaatatagcatcaaacagaaaacatgaataagcaacataccagatctaaagctttcgcagtccctcaatttcggggccaccttccagtacttggatgtaagcaactttcttattttacggtctccgatacgcactgaaggcctaaatgccttcactttagtgctggatttattttgtcctgcacagttttcgtcatcatctctaccaactaatttaatgtcattcctatgcttggaaaaagaagcattagaaacatgttccctaagcgatggcaatttgacatcattttccaaattgaccattgtgggaaattctacttgcaactccattgggtctttggagttgcataggttagccttactcaaggtaccagtctctactttaggaggacaattgtggaatgtgggaataacattaaccaagtcagctcgagttgaagtgcgttctgaaacaacatctctctcagaatgtaagaatctctttgaaagtaacttctgaccaatgttttgtgaagagatctcagatgcaaaagcactctcttcagaactcccctggtcaaagcactcttctttcaataacgtatcttcagcatgtctctcatgcttaataacatcttcatcgaaacttcgatgatttccttccgaagcattactacaagctgaagaactttcactctcctgcaataacttgccagctaaagaagccaataattcaaatgcacaaatttggctatcctctgttttcttcttatttgggcccctcctctgaaaccataaccatgattcatcaattacatcagaagtcaactatgacaaatcagaattcatctctaaatctaaaataaagaaataacctttcaattcaagatgtagaaaacttcaacagatacttaccctagctgatctgggagctctaggtattgtggggacctggaagccatggaaaccgtattctaatcttttcttcaacaccatatccaataaggaccctcaaatcattaccactgcattatcttggctgttctcagacaagaaataagcagggaaaaacaggtgtcagaaatcaaagtactttatcaaattattgcatcacattcacaccacattcttatcaattccatatattaatataacgccgaattattacatattaattgcaacgctttaagaagggtgctttatttctttcttttccaatccaaacaaatcaagagctaaactaacaaagcaagaagtcatcttaaataaatataaattattcacatcaagacactgagatcaggaattcatctgaaataaatataaattattcttcgtaattacacgaaacaccaagagcaatctcaaagttaaaaggggaacaaccaaaattcatacccattattaaacatcattggaattgaatacattgtaagagagatgattaaaaaaaattcacatcgctcttactgaaatggtccacccaaattccaacttcatataccctgatcagtaattttataacggaaaaataactaataaataaaaagtttttgatgacgtagtaaaaaaaaagacagacttcgagaaagatcttgatcatttgatgatgattccaatccaatcataaatgattataagaagaattcatgattgaaggctcaatctaattgtgtcaagctagttgctttgagctcacttcgatgtatccacaagatcaaacaataaaaaactatacagagttagaaacccaattcagctaatttgaaagttcctcgatcggatcggaatgaattagccaaattctacgaaaagactcaacgatcaagccaaaaaacattcgaattctcaaaacccaatttacattaagaagaagaaaaacagaaaccacaattcaacgacaaaaaacaaaatcccataaatgactcaaacaacctcgatttactcacctgtaaaagaaaatgtctttctgggtttgacactatatcaccgaattctcctcctgatgtcaaattttaccaaaaacaaatcgtttaaacgaagaatgtatcaacagatagatctacggtgaaatggaaaagaattaagggaattgaattaagaatttagatgaagaatctctcttcacttttctctctctctctcctctctctctcctctctctctccctatacatatatttttttttattattattatgttgtgaaatgacaatgccaaacaaaaccccaccactatatatgtatatctatatgtatatacaaaaaccacaaaaaagaaaatgagagaacagtggttaaaccccttacaccttcatctctatatataccatattgcaaattttctgaccacacaaccggaccatcgagtaaaagggtataaatgtacgatttttttgcggttttaccaacactcataaaccccccaaactcccttcttggtcttgttggaccagttctcctcactttaactccctacctttaaaaaaaccaaaaaaaaaaaaatagatcagttttcgccacgtggagtcttctctttttctacgaaaccataacagattttttttttttttttgggagaagcaaaagattgcacgtattaaatattggaaatgagagatagcgttttcctagtcagttccatctttatttctattggtccacgtgtaactatgtctagtgatgtcattgccataccctaccaatttttggatttattggcatggctattatgaggccccatcacacataattaattaaaaaggaaaaagaaattagtaatttttttttttttgaaaagaagaaattagagttagaataatattgctaccattataaaataatatccttttatagattatttcaatttcaatgcttcttgccttcttggaaatagttgtaaggaatttaatgtactcatgattggttcatgtaaattaaatggtatccatttcgaaagaaaaaaaaaaaattgtatctaatagtatctattacgactttatctgaccgggaatttattcaaatcataatttttatagaaattttttttccttccgagtaaagtttttaccaaacttagctctaggtatctaagttttctaccttcccttacctttctttctctcgcatttgttgttgttaccctctccaccttacatttacttctggcgacgcatgttctatcacaattaatataggttcagagaactgatggtaattgcttcatccaccgattccaccctccaccattaaccaccatttttagtttcttgaggcttttgctagtaatcattgctaccccaatgatgcttaccttaactcaggagaaatctaaacagtcgaacctacggattttccactctttaaggaggcctttcatctccatgtatcttctcttccttctgtttttttgctatttaaaggtctgggttcttgtcttctccattaaaccatcccacccagtcaactaccccaactctcagactactatcatggcttcatcctcccaaaacccaccaaaccaccctcaatctcatagatgaagaaaacctcattcataattttgatcatttttctctcaactctgtcgatacgaacgactctttctacctcatcttcaaaattcttacctccaaatctctcaagcctcagtggattgaagaggcaatgcgtgaagcatggaccctctgttttccagttgagatatcgaactatcactctagcctgttcttagctacctttcaatgtgaaggcgatcgtcgatgtgttctcaaggattaaccatggcatttcgataagtgcctcatgatctttgccaaccctgagggtctcaacactcttacgccaaaccatttttagttttgttccattttggattaaagcccacaacaccccctttagccaaaaattaccccaacttgtttagtttgtggctgatgagttgggagacctcatagaagttgaaaaactgagtttttgcaaatgtcaacaatatatacgaaaatataaaactatatacgtctgtagaagcagaatgtaattttgctactgcag

SEQ ID NO: 51307 - DNA, 3928 bp, Cannabis sativa
  modified_base (26)..(33): a, c, t, g, unknown or other
ttcatattaggatgttaaacaacatnnnnnnnngtaaatctagatcctggtaaaagaattccaacatatacgtgggtcgagggctgtggatagggtcaattggggtctgccgtgggtcgattgggatgccccgtgggtatatcgtgggtctattgggggtgcaccgtgagtatgagcgagaggaaaagagagaaggtaaccctaatttgttttttgaaatgtgaggggtataatgggaaaaataggaatgctgacatacattgctaattttaatacatataagtttagggaaataattttacggtaatatatgcataaaaagtcaaatttcccttatttttattcattataacattgtcatagaaccggttctattttaattacaactagtttgagttattttgtgttatctatatttatttattatgttacaaaactagttatatattaattataatgggtttgatttattttgtgttatttgtttttattatagaaccggttctatttttgtttatatctgcgacatctacttctagtgacttttccagtgactttttttttggcaacgatgacttttctatggacttttccgacgacagtgacttttctagtggctttttcggcgacactaactttttcggcgacttttccagtgacttttccagcactaatgacttttctggtaaaacttattattgtcttacaaatataagatttccatcttttttttacaaaaatatggcataaaaaaggtcatataaatatatatataaaaaaaaaaacatataactctataatattatttatttatgccataaaaaaatacgaataattgcggcaaaagtccccaagaacttagagttgatgcagattaatccccagcctcaaaaattggcggtaaggtcaccattttcgttagtctgttggtccctctttctaatagaaccgtttactaattaaaaatacaggtgtcaataaattattgatccaaatcatatttttaatttaaaataaaaaactaaaataaattatttaaaaactaaaacaatttaaataatttaaaaaattaaaaaactttaataattccttttaattttctcttttcttttattaaaattaaaaactttatccaaaaaattaaaactaaaacatataattaatcccaaaccccacccacccgattttccttcttcttcttcttccaaccatagctttcttcttctcctccaatttctcttcaacaagaactacatctatggttggcattccaactagcataaatttctctgaatctgaaccttccaagccccgccaatcttcctcactcaaaacgactatgcatgcttcactctcgatctccaaggccacaacagattcgacattttgaaatcattcgtctcctccttgatctagtcgtcaaagattgcctctcattcttcaatttcattaaaaagtatcaaaatcaaaacccccaatttcaaaaattagggtttcaaaaaacccctaattttctctacggagaatccatgggaggactgattcgtctcttaattcacctccccgatccgaagggctttgacggcgctgctttggtcgaagaagctaagagtgaagataactggttttttttttttttttttggatagaaactaaagtttcaaagataagtatataaagatatatcatggtatcatgtagtgatgagaatgttgagatttgttaggattcatcttcatcatcaattattattgattgaattatttatttatttaaatgggaatcatataccgttgtagatggtggtcgtgggtggtgagtttttgataggggtggtttatggacagtgagggtgaacaaggagaaagaaaaagaaaaaaaaaaaagaaaaaataaataaataaataattttatgactatcattagtctcaagatgaaggtcatgaatggtctctccaggtctcaaaaatctcgtggtggtgctccgatcgaactctcgtggctgactgggttcatgaagaagatgaacaagaaaaagaaaagaaaaaataaaataaatttatgattttaaaatgtattttttagttttttattttattttgaatttttttaattaaaattattatttggaccaatataaaattgacatgtggcattttatttgggtttaatggatctgttagaaggaggaccaacggactaacgaaaatagtgaccttaaggactattaccgccaatttctaaagttggagattaatctgcattaactctatatttttagaaacttttgctgcaattaaatgttataatttttccatgtgtaatttttagttttttatcaggctttccgggcccaataaggaaaaacaagcaaatatggcctggggtgtggggccgtgttgaaaacgacatcataaaaaaaagcggtgctactattacttgccacataatctaaccacgaatcacacggttaaattcaaatcacacctcttttaccgaatttaccctcccacgtcagaaaagtcccttccaaaacccctacatttgtagactatgtatttctttacaatgaggctcactcacacacaattactactcgtcagcttcagaaccgtaatcaaaatccaaccactgaattaaaataatataatctatttgtacacatttttatctctatttaacagaaattattaatttaatatattttttccttaaagtttactgttaaaactaacaacgctattttttgaaaaataattaattgttaaatcaattatttagttattttttcttgaaaaaaattaattgttaaattaatccattaattatttttttaaaaaaattaattttaaatatttaatttaaatatcagatatttttttcttaaacaaatttattaatcacatacatatcaaaatttattttgttattgtttaattaatcatactttatagtttatttaaaagctttaagagtgaaaaacttgggcctgtgcactcaaaaaaacctccctgttcatcatcgtccatctccatcaccatcaccatcaacgtccctgaccaaagccacggcgtttgtttagtctctctctgccgtccgaaagagatgttcttttgaggtcttcgaataacttattcgaagaacgattaagtagtaaggaaattcggtgccaaaaaggaaataataataataataaaaaagttgagagaagaatcgatggtattctctgtttcgatcactacttatattgattaactctcctaggatgatctctttttcctcggtttgtaaggttttcgttgctattgtacatgcatttatgtgtaatatgtatattatagcgttttatctgtttatttgctatgtctgttgtatatttgtgttaccgttgttgtgaatctgtgatgagtttgtctgttgtaaggttatcgttgtttatttgttatgggaataagtgatactatggtttggttcttttttgtggttttagaatttgttttgttttccattcaattgtcagcatcaaacttactaaaatcaatatttctatgtttggatggaaatcattatatgtttaagaatcagggtttttgggctcaagaaaaattggtcattcaattcaaaggtttttgatttgttaattaatgattggatatctgggtttagtgacattttgatgatttattgctcgtaattattgttatctttgtaaatttatacatttgcttgatttcatttattgatcgttgagtttattcattggtcttatgattttgtttcaggttgagtactgaatgggaaatcgtgggcaaaagcgtacagaaacagtagaagaattgccggccgataaacgagcctgcaactctctggagttcagaccgagttcatcaaattcatctgttcaaactcatatgaattctactaattc

SEQ ID NO: 51308 - DNA, 831 bp, Cannabis sativa
taatgaaacatacttggtagtaaacctagatcctggtaaaatatttccaacaattactccatcaatgactctaattctaatctttctgcaaatctgagcatccacaactcccaatccaacaacacaaatggctttcgcccaaacttcaattagaatcgtggctatccttctatgaatcgttctcaggatcgtgcttatcccaaaaacaacccatctattccacgattactctatcaagtttgcgacaaagcaggacacacaacaactgtttgccactagagatttgacaaagcatttgtcaccccaaagatcaatgattcaaaagtctttctttctaaaatcgatgacgaagaagaataccaagcatacactccagttcaaccttgcctgaattcgtcgaggactttgactggtatgctgatacgggtgcaaccaaccacattgctaagcgcatggaccacttagaatcttaaattcctaactcgggttctgatactctagatgttggaaatggcaaaagacttgctataagtcatattggtaactcatctctcccttcatctcaatcctcattacatttaaaaaatgttcttaaagttccttccattaccaaaaatttcattagtgtctctaagttaactgttgacaataatattttcttagaatttcactctaaatgttgttttgttaaggacaaaatcacacggagagtgctaatcaaggggaggcttaaaaatggcctctacatgctatctcacagctccttcccatctaaagttcaacttcaatgtcaactcatcaccaagtagtccaaatctgattctacatgtc

SEQ ID NO: 51309 - DNA, 2427 bp, Cannabis sativa
aaacatcaaaatgttgttttcaatttttaaaaataattttttttgtctaacatattacattttatatttttgctcacataccctgatctacactcagaaccaaacccgaatcttgagtttatatcattgtatgttgtaaaattattaattttttagtaagaaaagaaatctaaaaatagttttaaaaaatttgtgtcaaacataattaaatttttaaaataacaaaaaactattttctgttttcaattttaaaaaaacaattctaaaaattgaaaactgaaaatacaacgatttcatacatttaaataacatatattattttttaacggattaaattcaaaaagttactcttttgttacttctgtccatggcaattgacatctacgccacatgctagtccatgttataatttttctaataaattattaattaatttcaaaacaaaaataattattataagtaatatataaataattattgaaacccatatctcaaccccgacacttcttcttcctcacccattctcttcttttcccctttctttctttttgcaaatccaaaaactttaaccattaactaatcacaatctatagttggccaaggaagaggagattatcttgacgtgggactcaacaacattgaacgaaactagggagaagataatttttgaagttcgaagggggttgagttaacatcgatcgttattttctaatcgctgatcaaatctaaggggatcgagaagataatcgtcattggtttctgataccggttatcttttaggtgttagtggttgaccaccatatgctagatgaacaacacaatttgttcttactctatgcgtctgcccacccacaccctagaagaggaatgggttttttttctagacttttaatttttttcttgattttgttttgaaaatagatatcaactgtgatataattttctttttttttttatggagatttatcatgttttgtgattgttttttatttgagctgtgttatttgtgtttatttttgtaagaacttttactgttaatgatgatggcattgaagactagttaggaaatgcaaacaaaggatttgattgtaatgtttagctccatgagctaggtcttgattcattctttaaatacagtacaaaggatgattctagaaaagttacacctcaccaagattgtaacaagaaataaaatattttatgaaagaaaataatagaaatatattaaaaatcagtgtgtaatcattggcaaatgatgagatgtcagaattcattggtgtaggcccacagtaacagatgacagggagctagtgcataaatctcttaacacctcctctcaaactaggtgggattgaaccacacctagtttgtccactaagaagttgaatcttgaaccaattaagctctttgtgagacagtcagctgtttggtcatgagaatgaacatatcaaccttctaactttttgtttagaacattgtctcaaacgaaatggatgtctaactctatgtgtttaatgtgagcatgataaaatagatttgatgctaaagcactagccctcatgttttcacgccaagtgattggagtattagacactgggaattttatttcttggagaagggattgaatccatgctatttttgctgtgaattgggccaaagccctatattctgactccaagataaacacaatatcctattatagaccttcgatcatcagggcaactttcccaatctgcatctaaaaaatctatcaagtttaatctgtcacaaactttgatgtgcaagccatgaaaaattgttcccttcaagtatctgagaattctttttgcagcacaccagtggctagttgtaggtgtcttgagaaattggttcagtttgttgacagaataactcagatcaattctagtgtttgtagatactgtagtgctcctataaggctcttgtgctcggttggatttttaagcaattcaccatctgagatagaaaaactttttcccatagtcatgggagttgagcaaagcttcaggtgcaacatgttgtttttctccaatagctcatgaatatatttcgattggctgagataaatgccagtctcgtcacggtatacttcaatcctaagaaaatagtttagttccccaagatctttcaaagcaaaacaatgattaagtttggtagcaaactgtttaagtttcattgagttatttcctgtaatgaggatattgtcgacataaatccatacaagcatgatatcagttgtagttgagtgccaaaataaggaggaatcatgtaatattccgatatatcaaatggtaaataattaatgtttataattatattatgggttaattagataataattgagattatgatcctactaatcttgttcaacataaattttaaatttacaagtggataaataagcgtaat

SEQ ID NO: 51310 - DNA, 875 bp, Cannabis sativa
gtattgtattttggattaagtgattgtaattaatattaaggtcatattttgtgaacaccttagatggcatattattagtagtgaatgttatgttttatgatctttttgatcacattgccttgtactttgtgctttgatcacagaattaaaatactaccctatgctttgttaatggcattagtagtgaatgttatgttgtatgatctttttgatcacattgccttgtgctttgtgctttgattacaaaattaaaatattaccttgtgatttgttaatggtattagtagttgaatattttgttgtatgatgattttgttcactggtttatatacttctaaaacactatagttatctttttgcattttttttatgatcttgtattggcaaaaacagaagtacatgtttatttcaaatggcacagttttaattgtacctaaaacacaatttcaagtgtatcaaaaactgtaagtaaatatacctaagttgacaatacaattgtatcaaaaacggtaagcaattatacctaagctggcagtaccatattgcattaacaatttcagttttgatcacacaaattgcattaacaacctctgctatacaaacactaaaacaagtatgtaatatttcaataagcctaatagtaaaataattagagtttatatatatatatacattatgggttaataaggtaataagtgagattatgatcctactaatctatttcagcataaaatttaaatttgatataagtaagtgaataagcgtaatttacaaattacggagatttatataacatgtgtgaatataatatgagctatatgtggaataaaaatattttcaagttcagcgatcctaaagactcgataagtggataa

SEQ ID NO: 51311 - DNA, 1273 bp, Cannabis sativa
ttgctatgctcaaattttagcaaagtaagaacaaaagagcgacggaacatattggttcatgccaaccactgtttcggtatgccacttagtgttctttaatgtataaatgacttttaagaagtgtagtataatttacttggttgaattttattttatgcagaaaaaacaaacttgaaaaatgtcagtaaagattatttctgacaaagagcaatggagacaatatcactaagaaggtgagctgaaacactgcctacatgtaaaaaccattcactaataatacttaagtgtcttataaattatcttatatatatatatgtttataaaaggtagatgcattaaatgatttttattggattcaatatggctgactacagatacttgttccaaaactagcaccggcgggacttttcggacactagttcctatccaatattgacattaagaagaaatgtgttgaaatttttgattccatgacttcagaattagcaagaagagaaaggaatgaaatcattagggatatggttagtgtgacatttccttattcattgtttggtgtagtgttgtaatatgttttcactgtgttttgtgatttctcaatgcctagcttaatacccttgatgagattctagaattggagttgaacatagcttttggtggtgaaatatcatttagtgagtttggaatttctgaagcaaagagagctcagtcccaagacaacaataaagattgtcgtatctttgtgatgcagcatatgcatcacctcagcacaaaatctgagactgaaatggataaggtaaatccttgaagtgttttcataatttttttgagtgactagtctcaatttatagtcatttttagttacattgacttttatttgctctgaatgttggtaggtagatagccacactgccagacttgacttggcattacaaattgttggcgatgaaactaactcaaaaaaggaggaagtgaccaagaaaatggaagcatttcgccgagaggtaacagaaaccattgacaatcctaaagccactcctgtcaaacttcaatatgtgaagaatcctagcaaatcaccgttggattgtaggtttaagaataaaaaagaaaaagctaagaacatgatccctagtggtccagcaggtcgcactaggcaatctgctttgtgctttctatgtttgagagatgatgattagtccacaaatgcccctacttagtttattctgctggaaaatattttctgtatgtttattatgtagtgtatgtttgttgcctt

SEQ ID NO: 51312 - DNA, 2132 bp, Cannabis sativa
tttttcaagtaattacaaagttttctttaaaattacttgaggggcatatatgtatatgttaactagaattcatctagaagtacatattatattgcaaactcatttttaattttttccacaaaaaaaaaggataattgattaaaattgtctatggacaatataaagtcaaaaaattgaaaaactttttcttcagaaaggaaaatcaaagtagcgttgtaaatgtgatcaactcataaaacaacacaaagctacatgtgaagctgaatatttaacggctcacattattcaagcatgtattataaacgaggcacaaaaatgctttgaaaaataatacttaactattcaaatgagtaatcgaaaaaatacaaaatagttcctggagtaaattattcgaagtattttttaagtttgctctaaatataaatgtgttttatacgacagattaaaactgcttatacaatgtttggtagattataaactactcgtgtataacaaggcagattataactgctctcataaaataaagcagatgaaaactgctcgcgaatcaaaactacatgcagattataactgctcgcacatacacataattgattaataactacttaaaagtatcaaaggaaaagtgagagcaatggaaatgctttctaaaagtatcttaagttggataaaaatataaatgtttagatagtgaattaaaacacaaataaaaaaaatatattaagttcaaacattagatacgagacatttaatgtaaagataaatgcataaaaagaaaagttggctgtccaacaatgcaaaagtgtctttacaaaaataatgcctttaggggcaaccattgtctcggccaaatggccattttcccaagataaataaaaaaaactaagcctacatattaggagattcggttggatcttcttagtcagcctcaacttcttcttcatctccggcctcttcctttctggtcttcttgcaataggcaagcatatcttcagccccttggcccagaaagctgaagtctatcttgggattggctaaccactcttgatagatagacctcttggcaattttgttgactctatttttggtgtcaaccttggcctcctcaagtttcctatcagcctcatcctggatggtcttgagggcatcctcgtgctctttgattttcttattgtcagctcgttgttgcttctcaacatcttcctttacccaagagagctcagactttgagtcgttccacttcttggccatgacatcacgatgctctctagtttggcgaagcttagtctcgagcatctcaacttgttgaagccttcggtgttgagcagaaaaagacaaaagagatgcctccaaggaatgaaagtaggtaataagaaagaaatacaaagatgaggagagaaaaaggaaaaagagcagggaaaaagtaacttgctgcatgagatcataacttctctgcaccaaagcctcaaaatttcccttgttgagcaattcccaatcgctagacaaaaagctctagtagcaccgccagttattggtagcgtgtagcgagcagagctgtgaaccttctgtgccagcttcaatgggcaaggggtataagggctcgaggaagaccatctccgggtaagaaccagagaatttcacctggtgaacagactaaaggggctgttcaccgaggcaggggcagccttttttggagattttgcagactcgatagtgagttggcttgaagatttcttcttgttcgcagttgtttttattctcttgggttctttgagagaactcgaggcttcatttgcatgggcagctcattttttggatcttttgtcaatgagaggggggctgttgagcatagtttctaagtcgagatcgatatttgtgaggcaaaagagatacatcaaacacttgctcagaaacaaataatagaaaaaatggggaataaactcctactaaaaaatggttaccataatcatcagatgatgaagatggaggactatagtaattactaaactccctagaccttatgatcatgaatatatcataagagtttattagatctagatcctgttgggttttatgccctaaataaaacttcatttcaatgcaatccagtttattcaacatcaataaagaaa

SEQ ID NO: 51313 - DNA, 1193 bp, Cannabis sativa
aaaaagaaatgaataggagaatgcaagaggccttggccaccatgaaataagatatggccttgacatgcctcgatgtagatcttgcagctactctaccaatattcaatgatgcaagtgaattcccctcacgaccccagtaaaactaaaaacaaaaaataaaagtacctagtccccatcaggtatccctccaaagatcctcctatcttgaaggataaccctacactagtacctagggggaacataacccatcgtgacccttgcaaggtctgggaaatgagtttccttgaaggaaagacatgccctaggatagtaaggggcgtcatagcatgtccgtacatcagggacgggaggggcagtatggtcaaagtaggagggattccccaatggacttaagggaaaaaaattaatgcaaaacatggagatctcaaaatttgcatcagctctctaaagaacggtccaacaccatcaaaggacgttttgaacaaaggtatattggcagaacttgccattcttcaaaaagatattgcaaaagtatctcaaaggcaaaaaggagatgactatgagtccgattatgaggaacgagagttgtgtgccaagaacgtcctagaagctaaactccccaggaattttaggatgccagaaatgatccaattgattggagatacagatctcagtgaccatttgtcacgatttaacaaagttatgacaattttaagagttagcaacgatgctaagtgcttgtacttctctgactttgagaggatccgtagaagattagtttaagaaattggaatcaggctctatatatatatacaagtatatatatgttatatttatatgatagatttgattttgatgcaactgaactacttacacattgacttttaagctttcttaattctacacaaacataccttagaacaagttaagcagatgtacatataatagatcactcaaaacataatagattactcaaaacattactagtcactctaaagtacaagcacaagttctgaatttttactattttaatttcctcattaaaatttgtgactgagcaatttcacactcttcttcataaccattttccatgttcctaaagagtcatatagaaaatgcaacgatttacacaaaaaactttctaaaagtaaactatctccatactagatgaaacaatgtaaagtaaaaaaaat

SEQ ID NO: 51314 - DNA, 1238 bp, Cannabis sativa
cctatgttaaatattcctgcaaggtccataacttctaccaccatggccttaaattcatctgccgttgcatcactcgccccacttccatctccaaacactcgataccctagcataacccgccctagagcgttcactatgcacaaatttagcaattgttctaaatttacttccctcgttttagaatttactagtgctcttactaacatttttgcctcctcctgcacattaaattaccattgctcaacagaataagatacgaaaattattagccttatcgatctctaatcctaaaataaccagaacttactctcatagttgattatttttttcatataccaatagcattgttattagtatgagtggtgtttaacatcaacgaaaaataacatgttataaatatttaacatatttcgtaatagttattataataaataaaagaagaaataagaaaaaactcaaattctaacagcaaaaatatttagattttttcaattttttttaatttccttaatacttattaaagatgttaaggtgttgtgtacttaagcttggtggttagttagttaggtgagctgtattgagctgtcatttttcggttatgagttacttatgtaactaactctctatctagtgtattctactggtttgagctgtataaataccctgttttcaatcaatgaaagatgatgaacattttgactcattcattccattttcatactctattttctgttatggtatcaaagccacatgatctgtgagctccttgttcatcgttcttctccttcttctttgttttgcttctctgttcttctatggcaagaggaggaagcactcaaactcgaagcagtgctccaggaaattctgacaattcaaatcaattttctgcactcgatcaagatcacagattatcccctaacacagatccacgcagtccatattttttatccaatgttgataatccgtcagctactctatttccaaagatccttacaggagctgagaattacagttcatggcaatgctcgatgatggtggctcttttagcatgaaataaagtgaagttcatcaatgttaaacttctagctcctgaggaagacaatgaagattatgatgcgtggagtcgttgcaatggattggttatatcctggattctgcatttagtgtctcccgcgatagcaaatagcatcatgtatatggaagatgcatcttgtatctggtctgaattgcaggaacgt

SEQ ID NO: 51315 - DNA, 2316 bp, Cannabis sativa
tcaagcatggtgattttgtgatttcattgtaattctgagttttggatatttggacatattgtttttatattgttaaactgttctggaaagtttgaacaggtttggaggagatttggttcagttttagagcaaaaacccgagttttgcatttttctacagtaggaaaccggttaactgaatggaccatgttacaggttgctttatacatattctcctgagtatcaatcaagcttgtgtactcaaagtatcttggctcttgagttcttcttttctttgtagattcactccgacttagagctttagaacttcttttgccttgagaatcgcttacgttcgattctggagcttccatttgttgatttgtctgtcagggagtggcactatatctggtttgtgccaccctaaagttagagaaacttgcctgtccagttggttgtacaagtaccaggtccgtaaacggtaggtgttgtgaatgtagagaaaaaggtttactggtgaatgatatgtttatttagagggcaagtttactttatcacctgcattgaagcaatcatttataatgttttgttttgggaattgtgttgaacgcttgggcaattccctgacgctatatgattcgagaggcttacgtcttcccaaaggatagagtttgactttgactttagtgttcttttgggattaattgtgcactctcggacgccccctcgtgccttgaagaaaatactaaaaacttattatgttaatattaatctccaaaatgcttgtgtgggtcctatagacatgtggtctattcttcacttgccacctatttggtgaaaagtacggataccaatagcacaaacttattttttgtacaaaatttaacacaaattttaaatcttatataagagatagtattattttcagtattgtaaatatttaattttttaaaaataatacccttaaaagggtgtattaacgactttccctatatttgtccactaacttcaattaaataattgtggtcacctattatggtttaaatgtctgataattagatggatgtgtcacctgacgcataattaaaattgaattttaataaaatttatttaatgcaatttaatttaaccagtttactatgtctgagataaattaatatttaaataaaattaaataaaaacgtggttatcattaattgacgagtggcaatataaaaaatcttcctttaaattgaaaataaatactttttatccctaaattataatcctggtagagtttgtcttttgaatttttctctattacaaaacttccttttgaactttaaaaattgttgtaaatatctcttacagttacattatgttttttatttaaacaatctgttaatataacactaacataacattaattttacataatttaagagtctagacaaaaaaaagaaaaaatatatataaatagtaatctattaatcaattataagagcatgcatatatgtttttagaattattatttgtaaatttaatatcaataaactcaattttaggtagcttaaaattatcaaaaaagcttttatataataattatacttgtaactcataaacaaattagtttaaaaaatgagcaaaatataactgcaaaggatatttacaataatttacatagttaagtgagaattttataaagaaaaattcaagaaacaaaactttacaaatgtcataatttaggggtaaaattcaatttattcttaaaaaattaccatatattattattttttttttttcttttttaaatttacggtttgagtttctaaattagtttctatgtgggttgatatacgattttaagttgcgatttaagttgttccgttaattgcaataagagtttttatgtaaaatttcgtaaaaatgtaaaaaaaaataattattttaaagtgtaaaaatagaaaacttcaaaattatttttttttttaaaaaaaaatacaaggtttaatcttaccaccacatgatccaatccaaaaatatttaagaaagaacattgccaaactattgatattttgaagggtgattattgcaatagaaccagctaaaaaggagtagccagtactactaggacacaccaacaacatattacatatagtaatatagttttgaagcccatgaacgcatggacaacatttgcaggctctctcacctgcaaaaagatttgaaattactacaatttaatcattttcttttcttttttgaaattacaaggatttggaatctctaataatagattcaccaacagcatagagcaatgagtgactaccataccattattattatatgaatttcttat

SEQ ID NO: 51316 - DNA, 1081 bp, Cannabis sativa
tcattatctaaaactatatttctttttttcagtagaaatctaaaactaattaaagtagatatttgttcttcattgggttttaaggtacaaagacgatgtttatgatcgtatatggcagcctttcaatttcccagaacgcaaattattaagcacatcatcaaaaatagacttaaatactagaaacatttacgagcctccatcaaatgttatgggcacagctatgtcaccagccaatgtgacaagtcctttattttcattttacttaagtccggatgatcccatggctgaatattatgtatatatgcactttgcggagttggaaaagctccaacccaatgagtcgagacagttcagaatctatgaaaatggtgagttttggaatggtgatgacaaaccttttactcctaagtatttgcaaaccactactttatccagccttgcatctgtgagggccgatagttcatccataaactatgacttcttccaatactccacatctacacaccaacccatcctcaatgctcttgaggtttatattattcagaatttctcagagccacaaacgcatgataatgatggtaagtacggatgtatgaatgcattaatgtatatacatatattatatctatttcgtgtcttaattaattatatagagtaaatctttgctaatagagttttattggtgtaagatttagagatagttatacaaaatgaaatatgctaattaatcgtttggcatgtataaaatagaatagtttattttataaaatttccataacactttctcttttaaaaaaaggtttagatatctcccccacatttctattttgcttttctttccttatttttcatcattgttaatatgataaaaatttacagtattatttttttaattatatttatattagttgtattattttattactatatttaactatatataatattaaattatgaattatttctattatttattattggtcttataaattaaaataataataaaactattagtttttaatttttttaataaaaaaataataaatattaaattttacatcaaaattttgtaattgtacat

SEQ ID NO: 51317 - DNA, 722 bp, Cannabis sativa
tagttctctacatatttcttcatcaagtttattgagtgagaatggacagttacatgtagtgtctgtatattacaaatcatagaagagtggatccaggctcggtcctgggcataggtgcactaggcatgtgcctagagcccacctagcccagggacccaaaaacaattcccttttaaaattacacattttgtttactaatttaaaaaatatcacattttattctaaataagggtctaaaaatatttttttttcttatgacccactaaattttaagagcggcactgattagatcgttgtagtctatcatggtgcgtcattttcaggttttggccagagtgcgtcaaaaatcaccatgttggtggcaaatagaagtttttctagttgtctaacttgagggttgcccattacgacaagtgggtgctcacttgatttatgtattttgacacttaatgtgaatgataggtgcagattgacgtgtagccttagtagtaagatcataaacatcacattgggtttgccatgttttcgctagctgggtgtaaccctaatttctaggaacaccacttgtgtgtttttgtaaaagtttataataataaactcaactttaaactctaaaaaaaatattttattaaaaacttggcatttaatattaataaattacacatttatttaaactttaattttacaatgcggatccctattttaaactaaacattttcatt

SEQ ID NO: 51318 - DNA, 1538 bp, Cannabis sativa
gctgttacagaacatgctataagtaccatgctaatcagggaagaaaacaatgtccagtatccggtctactacatcagcaaaagacttgttgaagctgaagaacgatatccgctgatagaaaagcttacttactgcctaatcttagaaccaaggaagttaaggccttacttttaagctcatcctgttcgggtatacattgatcaaccattacgctaaatattacaaaaacctgctggatggttactcaaatgggcagtggaattaagtgagtacaaaataatctttcaaccccgaacaacaatcaaaggacaggcattagtggacttcgtagttgagtatatgggcaaaaaagaaagcatttcaaaaggaaacccgagccagtacaagaacctcctcagccgagcaacaatgaagacaaacctacttggaaattacacgtagataggtcagttacagatcaactgtccagtgcagggattgccctctacacgcctaggggcaacacctgcacggggcagtcatatttgggttcagagcctacaataatgaagcaaagtacgaagcactcatcgacggtctaaaacttgcacgggagctacatgctaaacacatcaagatctatagtgactcacagttagtagtaaatcatgtgtctggagagtacgaggcccggggcaaaaatgatagcttatctaagcaaaatatatgatctacttgcacaatttaagagctacgttctcaagcaaattctaggagaagaaaatacaactgctgatgcgttagcccgacttacaagcagtaatataactgataaggctaatctaatcccaattcaattccttgaagaacccaacattacccgtatggaagaaattgaaatgattgacacatctccgaggaatgcttcgacgaggaatgcttctctttaggcaggtacaaaaaaatagtttaatcccctttcttttatctaaatctattcaaaatttccatgtactacgatttataaatcacactacactattttttttttttatcttgaaaggtgatgttctggggtatttagcaaaacactcgtcactgccgtagccaatggttccatcaagctctacgaccttttttccatgcataaatctattttttttggttcaagttccgattgagattcttaatttataaaattttatcaatgtatatgaaacgctaaggaacaaagtacttttgagagatgtgaggtcgaatccgtttgcaacctccacctgcttttttacttttttttttaattttgcaatggtttacttccattgttcaatatcatagggaatttttgggtttaagaatggaattaaaaaattccaatggttcttattatcaatcgtaggagaaaaaaaagttctaaatcgtaggaaaagaaagatttatttaatttttatttatttttagtatattttgaatttacaaataagattgaaaattttaaatcgttgactctatgttagtttttattaaaaaaaacgttaaaaaatcattaaactaaaaat

SEQ ID NO: 51319 - DNA, 773 bp, Cannabis sativa
ttttagttcttaatgttatatttttgggagctatttatgatttttttggtaagatattaatgaatttttaaagcttattcctatctgtataataaacgtatgttaagtttgttttctattgctacccattttatctcattcatgaaatctttattaacacccaaattccaaaatatatttatatatatatatatagtaatttgaacaatttggataacatatactatatagtcccacatcaggaaagaacaaaagaaggggtcaggagtgactaataaaacaagaataagtagaaatgaaaaacttacatacctggacggggtctatgggtgatcaagaaggcccatggcctaggtaggtggcttccattgcactttggaggtgcacttgcctaacatctcccattcgaggagattgtacgtcgtaatttgtggtagtgggggctgtgtacgcgcggcccctctctaaattaatttccaatttttctacatttatgtgttttttattgtggcaatttgcttattatgtatattgaaagtaccccatttttctactgtttattatattttatatatattttttcaattgtggtaattagattatgtatattgaaagaaagtacatgtttgcacaaaagtgaaaatgtataattcaacactaaaattaagccctctccgaaaaaaaaacactaaaatttaagttatcatatatattatattaatgtaatcaatgtagataagagaagaattaagatctatggtgtctcataatgc

SEQ ID NO: 51320 - DNA, 1117 bp, Cannabis sativa
acttaaaaatacctcagaatgatggtgtttcaaaaatacatctttgaacatcagaaactttacatagcttaccttgtggtataaccaacttataactttggaatcatctagcctaaaaaattttgatgatccaatttctgcaaacagatacgaaaggaaacagaaccattattagaagctctacatacaattggtgaaaaacgaacccacagaaagtacatttttatactgtggaaatctaaccatatcaataaataaccagttaaaagtcaaagggaagggtgtaaaattctaactagcagatgggaaagttgtgtcttcgttgcaagcacaaacaacataaaagaatatgctgtaaaaatcaaaagaatgtgtgcctaaattcaggttgtatattagtagcatagatcaactttgatgtcaaattcaggatctttgtactgctatataatgctatttaagtcaaaactttgcagcactatatatgcatctccttttcaagaaaaataatgtctacttcattatttaattttcattaattagttcaacaaattagagaaatgaataattttaatttagaagcttatatgtcacctttcacttcacagaccagttgcatggatttctccgcaatagataacaaatgttgatatccaggaaagccatcaattaacattatctcatctaattgcctgaactttccgagatcatctcccttctgcgtcatttcaaagaaagatagatacaactaaggtttaaaaggaagaaactgatggcaaacaaatgcaagaatatgttgttagaccccgggctagggagaaattagtaaatcaaagggtgcatggatctttgtattgagggtagtttttgggaagggaataccaatagaatagagggtcatgcaagaattgagtgttcactctttgcatcataggtccgaaggatcactttctgttattgctttccttttccagaaatataatgaaaagccatgactaaaatggttagcttctcctactgttttgatcgattactgtttcattgcttttctattattttggttgctgaattcactactcaagagaagagaaagaaaaaaaaatcacagccagtaagt

SEQ ID NO: 51321 - DNA, 1031 bp, Cannabis sativa
cacacacacacacacattcaaattcactttgctataatccaaaaaccccaaagatcttatttcacattaaaaaccccaaataaaaaaatctctaattttctttctaaggttatatttctagttctagatagattattaaccccataaattcttaacgtactgaagaattcactaaattgatgtgatttcaacaatatttagtaaatattaaaaataagaatcaatacaaatatacttagagagagagagagagagagagagagagagtaagcatactcgataatggggaaaattgcaactgagcccaactcggtttaccctctctcgagtgtaaatctgagttgaaaaatgtttgaaattgcagagcaaacccctcccaaaaaatattagaaccctagaaaaatgaaaaatttaagagatgattggtttcaaaaatggtactgacaacgacaaaagattaagctgcccaaatcttaaaaattaagcaccaaaatgaatataaagaatcgttgctcacctggttcagccgtcgatggttgttgtgagaggaaggggacggtggagagacgtcagttgtggaaaaaaactgagagagggttcgacggtagtggaggccgtgtttggtgtttggggttttttggtaaggaatggcagtttctaaagtgcttggtgcaaaaggggttttgatggaaatacccgaagttacagctcgcgaaaagcaccggccgtctcctgcgcctaaggagaagcaccggcctccgcctgagagggaggacctcgcggcgccctcagatggggaaaaatttttaggtctggttggggtaatcgcacgagagagtgtgggcactggagaagaggatgaatgttaactatagggctgatatattttatttttttaaaaaaataaaatggctttagtgacgcgcagaaagcgtgggcaaacctatttgatcacacgctttgcacgtcaccataggccatgttttttttttaatttttataaaattatatattttgggttttatttttag

SEQ ID NO: 51322 - DNA, 1432 bp, Cannabis sativa
ttcactctccatctgataaaaaaacaaaacacaaaataaacattagacacaaacaacaaatcaatcatgataattaacatgaaaaccagtttcacaccaaatcaaaacaaaaataaaaaaaaccaaaacaaaaaaacataacaacaatttctgcatcagtaaataactaaacaataaaactaatagtaacatacctcaacctcaaccttaaaaccacccacacaccaaaaatcacagaacacacaaataacacaaatcaatctccaaaaactggtttttgacatgtttcaaaattaggtatggtcaaaaaggttttcaaacaggtatgataaagttgaaaaaacagattctcaatatctgcattattttgcaacctgaacattaaaacccctcacacaccaaaaatccaaggatcccaaatatccactgcatcaattctaaccaatttataaaactgttaccaaaatctagaaactggttttccatatgagatttattttgcaacctcaaacctcaaatccactcccacacccaaaaaagcccgtaatgcccaaacaaccaagtcatcatcattgataacaccaccgtaaacaacaaaaactcaaccatgacaaccattaaaaccaatataaaaaacaacaaaaaaaataaaaaacacgaactgtgtgctaaaaaggaaaactcaaaataaacagtacatatgaaactttaataacaaagttcttgtaaaaaaaaaacacaaaatgaaatgtccaacaataaacaacaatgaacacacgaaaaccctaaaaaacaacaaataaacacacagcaaaaaccagtttttataaattaaacaaaatttataactactcaaacacaacaacaatttcttcatgcaaaataaaagccctacatagcttttcatcagtaaatacatagcttttcagattacacaagaaagccaaaaattattacagcacattgactctaaaacccaaaattactaaaatcatcaaataaaacatacccaaaaaccagattctaaaaatgaaagaagatttataactaaaaccaacataaatcatacccaaaaacaaacaaaatttaaaaaaaaaaatacacaacagcaacactgattgacaacagaaattaaaaaaataaaacaaaacaaccaaatactaaagcataaaacaaaaccaaaaaaaaaatactcaaataatccaatatgaacacactattcactttggtttatgcattttaaaaaaagaagaacaactaaaaactaaaaacattaaaatggtaatcagtaaagagaaaaaaaaaaggaataaatgaagctcaattaacaacaaaatatacttcaacaaacccataaatcaaaatgaaaaaaaaccctaaaatctgaataatgatgaaatggaaagaaagcatgaataccttgaagattagc

SEQ ID NO: 51323 - DNA, 2239 bp, Cannabis sativa
taaataacaaatatataacacttatgccgctatttactcatataaatatgcaataaaaaccacacacaatcagaacaaaaaataattagatagttatttgttcaatatatgagatattatatttgttatggaagtttgagtttttgagataaaaatgttaaactaaatctatatttagtataattttagtggatgtcttatatatttatgcgagttttattactatgtatattttgagagtaatttcaacttctcttaaacacttgagtttaatattttcttctcagactctctcaattaaattttaccaactaaaatttaattacaccaatttagtttttaaaaaacaaaataatagtgtaagaatagtttgagttacaaaaatatatatatatatatatatatatatgattatatgtacaacaaagaaaaacaaaagactattattacctgtaataatattttctattccaccaacttgtaaaacacgtaccacacatttttattctatttactaatatttctttcacttttactaatctaaacatacttgcaaaaaaaaaaaaaagttttaatttgtttttaatttttattattttgaaataaccacattttttcatgtgtatataggtatactagtagaatgttacgtgctgagccacgtaaatgttagtcttatttttgttagattatggttactaaattagtataattatttgaatttattttataaaagtaaattgtgtgtcagtgcatttggtaagtaaaacatagttgttctataaatttatgatatatatatgtacattgttattaataataaaaagtacgttaatctcaatatatatactcatataatagttattcttgtgaaaaaataatttatgataagtcataagaacatatgattttaacatttattatttatttttaaaaaattcaaataaacaatatatatgttttacaaaattgaaaggaaacattatgtaacgagaaataagtgtcatgtcatcttaaaatagagaaaaagaattattaaataaaataatatagaatacccaataaaaaataaaacaaagcatagtagaactttattttaatcttccatcgatttagcagtttgaatggtgaattgattgtgaatgtatacctctcatcgtatgactttaattgaagtgtgcagtacataataatatatatatagcaacatctctggagatcacaacatctaatatttcagtactattacactgtataattacaacatacaatatatcattacactgtatagttagaaaaagaagaccataacaatatgtcttgtgtatactgtatagttagcttggtatccttactgaagaagaaaaaaaggtccacaataagttaatatattttactttgaaaaagactgcgtagctatatattaactttattcatttagcttatgaggtagaagaggacaattttgatagtgggtgataatgaattattttgtactctagttggtacttagattcttgaaagagtgagaacaagagttaattctaagccaatgataaatttagcacaaggtttaattatacatggtcacgaaatactcaaaacagaacatgattaagtgaacatatcaaattcacattggtgtatttacatctatgattgtagaacaaataccatgaccatgtattgtgtgtggagagaaaagcataagcaaatttacaaatttacaagtcagcaaattttcatggtaatatgaaacattaaaatttttttctctgttcagtataatagaaaaagaaagcaaagaatatatatggtaaagaaaactcaatgaatattattcaattactacctaaaattaaacctgaacagacaattttgatttcttgaaaagaagagaggattgatcgattgggatttcttctttctcaagagtttcacgatgaagagaagaagaattggaacagaggtaggcttcacgcggccgtctccataacctttcaattgtttggtgcaagatatagggtttgagatttaaaaaaaaaaagaaaattatagatgaagataaattaaggatttgaaagttaagggagaagttaatctcccgttagtttttatgttaaaaaaaacgttaaaaaaaataaaaagccacccaatataacaaaaaaaatattaaaatttgggatatacggtttgttagagagatatgtggctaatatgattttttttaatttaaaaa

SEQ ID NO: 51324 - DNA, 947 bp, Cannabis sativa
  modified_base (401)..(408): a, c, t, g, unknown or other
ttaattaaaataatgtatacaaaattgtaaaatgcccattatcaaatgacatcattgaaaatataatttcaatattagacccaaaatctacggtatagcatgtatagcatgttcaacacaaaaatgacatggaagacttagtaccatgtctaactttgatagcaatgaaaggagtttttttatagtagtggtggtttcctctcatttggcacaattgtagaattctgtccaatgattaaatgtaatagtattgagtcatatataacatgggctattatactcatcactaattgattttaagataaatttttatcatggtatcagagccatatccctaacaaactttcgatctacaactatatgattaatgagctctttaaacattattattattattattnnnnnnnntattattattattattatgtctttgtaatttgttggtgcacaatattatttttgataataaagatgaaacatttgtaatgaggtgtcaaattttgatacacatgaccaaaataaataaattaatttacaaataaagaaaaactgatttcactaccacaagggatgatacactacacaaagccagtaactttttgagtcttggtggagaaagtgacatagtgactatgagagaaccaatttaatgtcaaaaaatttaattagaatataaaaaacattaaaggcagcaaatcatctcaaagttgaatgcccaccatttacagtgttatgattttagtagagaaaacctttaataatgtgtccttttggatagatatgtttatgaaagttaattatatcattagaggatgtgatttaacttttctgtgttaagccatttctacatattaattactctttttaataattagtttcttgcccaagttttagttacttcaatttctgacagggcacgagttcataattattatcttaatacaact

SEQ ID NO: 51325 - DNA, 1355 bp, Cannabis sativa
ctaatttttgattgggcgggttatggttaaatatttgcaacccgatatttatattgggttgataaaaatatgctataacccgactaaaccgaccgacgtacacccctaggaaaaagtgtcagaattctatttgtttattacacaaatgccctcaccatgttaatgttaagtcttggagaggcttattcattggcccaaacagaaagagtagaatccctattctctctcttaactttcttaagttactttctccctactcaaaagctacttattttacccttttattattattatttgctttatgaactcaacccatgcatacatatataaaaatatacatatacttctcctcattttatccatactgcaatttgaattattagttttaattattttgtatcagtttgttgatttggtttttctccatgctgtgctgtgctgcgtgtgttaaacctgtaagccattaaagaacacaaagaacaaacgaaaggaaagaagagtaaagagagaagaaaggaaagatagactgttggagaagaaaagagaatctcatctcattacagaacccaaaggggaatttatatacagggattacaaccaactaacaagaagaaaagactaacaactataacagaatgaaaacagaattaactgaattctgttacacagaaaagctaactaacattctgttctaacaccccccttcaaactcataattgaatagtcttcaattttgagtttgttcctgaaatccagaaatctctgacttgatatggctttagtaagaccatcagcaagttggtcgtgtgcagaaacatgcttgatctcaatagttttgtccatcactttctctctgacaaaatatagatcaagctcaatatgtttagttctagcgtgtagaaccgggttctgtgtgagcatcacagtactcaaattgtcacaccacacagttggaggctgtggcattcgaatatgcagctcagaaaacaagtaatgcatccaggtaagttcagctgttacatttgcaacactacggtactcagcttctgtgctagaccgagaaatagtctgctgcttcttgctcttccaagcaactaaatttgacccaaggaagatagcaaaaccagaggttgatttcctatcatcgggatctgatgcccaatcggcatcacagtaggctgttaactcaaaagatcgaggcttggtgagatgaaggccaaagtctgtagtaccaccaatgtacctaagtatccttttgacagcttgccaatgtgtcaacaagggtctttgcatgaattgacagaccttgttgacactaaaggataactcgggtctagtaatggtaagatactgta

SEQ ID NO: 51326 - DNA, 1295 bp, Cannabis sativa
  modified_base (50)..(52): a, c, t, g, unknown or other
  modified_base (1255)..(1256): a, c, t, g, unknown or other
tatttataactggcccaaattgggacttcatttttttataacaaattagnnnttattcttgaatagagtattcttgaatagaggttctactgtattaggtttttatttagagaaaatgtagtattttttaaaattaataaaaaatgtgtaattttgaacattgttattagacaccaataatatttaacgcctttaaatatgtcgcaaaaatggactaaatacaaacttaatctatctatccctaaaatcaaacctacacataaaagaatattaagcatatattgtaatatttcctattttctaatagcaatactcttacaaattcactctaaataattagagcataattgcacatgtacggtgaaacaaaaatgctagtttgtaaaaacatacgatacgatgttagtaatatacgaaaccgtatacgaaccttattaattatttcagcgcgtgacacgcactctgaaaggaatatgtttccaaggaagagtaccatgtacggatatgtcagtgttatacacgcgctaataacgaaggtgttaagttaagagtaagtgggtaaaaaacgttgaccgtattgaacaggatttgtcccatgttttttttcttgtaaataaataaaaaaatatataccattaatataacacatacacgtggaccaatcaccattcaggagctcataaaagttgttattattaaagaaaaagcattgtcatttatccgagcattgttattagacaccagtagtggctagtaccttctcgacatgtcgcgttgtgattagctagcgatactctcaaaaaactattatattaaattatatatgacccgataattagttggaccaataaaaatattggcgcataggaggatgctaggtaccactggtaccttttaacatttctcctatttattccggtccatcactttttagaggtagcactctataattagttagcagtattttttaaaagttattttcttaagttatataaaactcgaaattacactaataacgctatgatatcgagaaaggtgataagcaccaatagtgccttttagcaattctcttaaaaaaatggtaaaaggcagtaatagtgtaatgtaatatcgttattggtacaattaaatattgaattccacttatttactttaatgaaaattgaaattccgtattttaatattcccagtttaattatttaattaaaatagttttttcgtaaatacagaatacaactctgtaactccagagaannccagaaaaacaacagtgcataaaagtaaaaacacacaag

SEQ ID NO: 51327 - DNA, 1086 bp, Cannabis sativa
atcttcaaaacttgatcttccgatccaccattaccagccgtacgatgatcataaacatcaaaaataatatcatcgctacgactagggtaataagtaatataacgactactgccaatcattttcctcttattactttctctactgtctaaagaagaaaccctttgaagaggccgtaccgttacaatttcattctcgttgaaatcttcccacagtgagtccattcggtcctccgagtcaagatccggctccgtgtcggagtggctcttcatcgaaacgaaaattccattggagctgttcggttcttgttcgtctgtgatttcgtcgtccgggtaaactagagacgagattcgccatagagaaggagatgatgatgagagtgtgaaaggagaattttgattggtactggccgagcgtttgttgtcgtttttgttgctttcttcgtcgttgtcctggtttttggtggttgtcgttgcaaggagtgttgggaagctgaaatcttccgtgaccgccattgttatttttaaggattttctttcttacaaaaattgtagagtactatatatattttattatattgtaattagttgggaatatatttatatatatgtggcaacaatctgacggtgtacatttaatgagggttggttataatccacagctacgtactcccagattagttgccataggatgaagatatttgtgacgttttgggaacgattaaggcataataggtggaatgtgaatggaaggttatgaccttaatttgaattttgatttattggcaataaaaggaggtttttaaaaaaggaaacgaatttatttgaaaaattgaaattagcaactcaatataagtgttatatattcagcaaaaaaaatatataaagtgtcagagcaagtgcaaggaggcactaaaccttggatttggtgtgtgtaatccctccaacgtagcagcaaatggcacattatatatgtcgtgtggttacagtgcacgacatatatgctgtggcactgtagttacggtattctttttttttttttttgtaataattattattatttaatttatatttataaatattgatatta

SEQ ID NO: 51328 - DNA, 2578 bp, Cannabis sativa
  modified_base (347)..(347): a, c, t, g, unknown or other
aattctattttaccagcgcaatatcaacttttgccagcacaaaaatgtgctagcaaaagtgacatttcttgtaatgggtacttaggagtgtgcagaaagtctgatctaattacaaccgattgatcatcaaatcacaatcgatccaatctaatagaattagatatctaatcataattatatcagatcaggtataaattttaaaaattcagtttgatcagatcagttgttggatgggacatccgatccaatgaagaactgaaccgaactgatccaattatcatccaatattcatctaattatattgatatatttttaaaatatctttataattttatatatttaatatnttttatttaaaaaaatatattaatagatttaatatatatttaacacacgagattaaagaaaaaaaaatcttagatctagaatattaattctcatcttcctaaaccctaataaaactatcaatgcgcattgaataaattttattttttggtggttttattatggaatcatgagaattaagttggactaaactaatgtttattatgtatgttggattattatgtttttttatatatattttttaatgaaattaattaaatggtagctaaaatgaattggatggatccaatctaattcaatagaaaaccagttaatgcatccaatagttggaacatggaccaatctaatacatccattaaatcaaatcagatcggatcggatgcctcaattcgattggattggatccgttgggtccaaatccattagatgtgatcaaatgagcacccctactatagtgtctaacatccttgtgaattgtgaaatataatattgctattggtgtaacttaatatcaaatcccacttattttattttaacaaatactatagaaaactataagggcgtcagagcaatgctctttcgcaacatagaatctaaaatgatattgaaccatttatatatctgctattagaatttttttttgtttagtgtagcaaccaattgctattttattgttacaaatattagtaactagttaccaaacattctgacatcgatatgtaattacaatccattctaaaacttagaacactaatatgaaattactctaatgttcttttcaaaatattagcacgtagttaccattcacccccaaaactaagaaaagtcataactcattactctgattttttttcttcaatacattgataaaattaataataataaaaaaaccattttagatttaaaaattatccaaagtaaccatttaccgtgttacttataatgacaaataataatagataattggttactatataaagtcatttttaggtatcttttttctctatctatattgaaaacctaagctataactggttactctaaactgtatttttcatatatttattttatttctttaattcttcacataaattattatttaaataaaagtatatttttgtaaacttcacaaaaaaaaaaagaagaagaagaagaagaagcccattttctacatatattacacgggcctgtatttctaagggccttatttttgaaattctttgtttagtttgggccttatatatataggtaagtcaagtaacttttttattgttattattattggaattgtactttttgggtataaatgagatatatataattattgagaaatatatttagacaaaatacatgtcaccattgacataacttccttaaagaaaaccattttctttttctttcttacaagttaacattgtctttgtggtgaattaacacttaccaagaatcaaacaaaatgaacataaattagaagataaatgtagaataaactaaataaaatagagacaagtattaacgaggttcatcaccctttttgtggtgattaatcttcaggaaaaactgttttttggccaagctttattcgatcttcaacaatagaggagtatagagaaaaatacatagttaatctcgtcaataagggtgttttgcacctcactaacaatgtcttggaccttataaatcaactcacttgagagagatgtgattaaacacacacatcctctttaacaatcatcctcattacaaaaataatattcatctaaatttctctctagatcgtcacgtaaagaagtaatactaaaagccttatataggcaactcaataagaggggtacccaaattagtaaactaaaaaaactaaattgggagctaactgtacagaccttcaacatcttaaaggtcatcagatgagactaacagtaacagtatccaagttactaaaatttcccacaaatctacttattttagtcacttggtaaaatgtattatcgtattcctgttttgactgttccatatgttgtgcctctaacaacaagagaacttttagtgttcttcaatattctacaagtttaggcaatgcctaaacttttctcttgttacactcttagagaacatattagccgagttctcatttgtgagaatcttcttaactgaaatcttttcgctaccaatgatatctcttataaaatgcaacttgatgtctacatgatttgaccgttcatgaaacatggga

SEQ ID NO: 51329 - DNA, 1170 bp, Cannabis sativa
ttttttttttttttttttttcgctcactattctcaaatcacaagtgtcattttttgacttttggctcttggataagttttttttggatatttggtggctcttttttttatttggctttacatcgattgagttttttttctggggttggatagttgctagagatttttttttatttatttttgctctgataccatgttagaatttagaataaggtgaatgtagttccatctcgaaaccaattggcaatgagtttctttttcagtataaatttatatttttatgaaaaattatgtcttaagtacttaaaaagttgttcaaaaaaaaaaaagtacttaaaaagttaattttgatgcaaataagtcattaaccctaaaaaaattacaataatagtttccaaattcgagattctcgtaagtccattagttctcattttgacatatttgttagtgttgcttccaaaaatgacatgtgttgatattaaattgtggcataagtcttcaaaaaatttactttgatgcatataagtccccaatatcgaaaaattgtagtatagatccccaagctcgaaattatcattcgtctgtagatacccaatttaaaagctccattcctagttctgaaaattgtaacataccgaaagtttattggtccacatatcataattttcttttgaaaatcattgaattaataaaaaaaaattttaaaattcatttacataacaaaaaaattattaaaacctttaataacattttttttattttctttcattaaaaatttaaaaaacattatatacatatataaaaaataacaaacttctacaatttgccatccatccttctcagtggtgaggcttgccatcaaccaataccatccctttaaaccgcaatcgacgacaagcaccgccctttcagattgttgccgacaatattcgaccacatcatcactttcctcacacgcgaggctcgcatcaacgactccaatctcaaccatcaacttcttcatctccaccttcttccccatcccaccccactatcccaaaaaacccaaaaaactaattaagcaaaataaaaaaaaatcgaaaaaaccctaaatcgatgtaccttgctctgaacctctcgctgtatctattctgttggccccccatctctggagatctgtgttgttaaccta

SEQ ID NO: 51330 - DNA, 3232 bp, Cannabis sativa
tgtagaatgtttgaaggttttaaaggattggctgcaatggcatgctgcaactgtctcttggcctcgattaataagatggatcggaagagctaaaatgagcaaatttaagaaatcaagttctggctgcctcaactacttgcctcgtgtatgttttagggagagcccggaattctagactttgggaagactctcatgagggcacagattgttttattcaccaaatcaagcacactatcaaacaaagaatcactctatgttggcctaggaatgtcaaggaaagggacaaagaatggtttcaaagtttgtaaattaaaagagtatagagtacaaaagaattatgctagcatgtttacatttgtatagtttgttattggccctaggtggattttctaataacttgtaaatcttctgttgagcaatacaacttctccgattcataaaaaaaaggttttattaacagcttatacttgtctgtttgcttgcggtcttgatactgatgagaagcttttagtaatcttattccttacaaagaatttagtgaacaactcgccatcaaactgagttccattatcaaacaatattttgatttgtattccaaatcaaatttgcaaatgatgttcttgatggtcaaatcgagatcttttttgcaaggtatggaaagtaaaggttcaacctgtatccattttgtgaagaaatcgactgctaccaccgggtattttgcccctcctcaccctgtgggtaatgccccatattgcgactgggaatgatgaggtcatcattcttaactctgttcgtggtatgcgaggtatatgtgaaaacccttggcatttgctaaattttttaacaagttcatgtgtgtctttgtgtattgttggcccatagtatccttgatggataattttatttgacaaacttttccaacctacgtggtccctacaaaagccctcatgaatttcctagattatttcactggcttctataaaattttccttcgactattgtatagcaaggcattgaatacaacaatttgcgtgcctcatttttgtttgtaggaagtttcccgttgagtagataattgactctaggtgtcatccatgttggtgaagtatctaacatctcaacttcttcctcttcatatatgcttgggttgctcaaaacctcaaccgataccaaattcaacttgtggagatcatattaggatgccagttttgctaatgaatcgccatttagttttgttctcttcttgttcaattttaaaataatcaaacttttccaagttcttccaagccttctctaaatatttggccattttcaggcctttagcttggtattctcccaaaacttggtttataattaattgtgagttgctaaagcatacaagatttttaaccttcaatgtctccgctattctcaaactagccaataaagcttcatattctacctcgttgtttgaagtatcaaattgaaatctcaatacatagtggaatttgaagttgtcaggcaacactattatgacccctgcccctgagctgttctcatttgaagcccccatatacatatagcctccgagtttctgtattgtgttcaacatcaaggtcttctcttgaatttattccttcaattagaaagttagccaaagcttgaccttgtaatgacgctctcgggtggtaggtttcatcaaattgtcccagctcgatcgaccattttatcaatcttcctgaagcataaggttttgataaatcttgtcttagtggctgatccattgggactttgattggatgtgcctggaaatatggtcgtaatttgcgagatgtatcaatcaggcgtaatgcaagtttttcaagagggggatatcttgattctacccctagtaacctttaactaatatagtaaacaggttactgttgcttgttttttccctcttattcttctatccattcaaatttcttattgcctcgtaaaacattaaagaatggaaggcactaatatgttgacttcgagataaatatattcaatgctaccattcttcatgtcaagtcttggacttcttttagcttcgctagtgagggcatctcaattagggccttgatttttctaggttagctttaattcctctcgcgtttactatgaaacaaagaaattttcctgaggaaaccccaaaagagcagttctttggattaagcttcatattatacattccaagtatctcaaagcattccatgagatcctttgtgtgatctttgctttttatcaactttaccagcatatcatcgacatagacttccatattttgccaaatctaattttcaaacactccattcactagccattgatacgtcgctccagcattctttgaacaaaatggcatgaccttataacaataaagtcccatatttgttaccaaacatgtatgttcctgatcaggaatatgcattatgatctggttatatccaaatgatgtatcgataaatgtcattagctcatgtcatgctaatgcatccactaagtggtccatcatgggtagtgggaaacaatatttcggacatgccttatttatgtctgaaaagtcgatagaagttctccaggtgccatttggttttggtacaagaactgggtttgaaatccacaagggataaaaggcctcacatataaagtaattggtcaataatttatctacctcttttttgagtgccccttgtctctcggagtctaagggctgtcagttttgcctttttgctgggtaactagggtcgatgtttaaatgattgtagattacattagggtctatccctatcatatctgtatggctccaagaaaattgaccccggttcgccttcaaaaattcaattaattgctattttagtttttcatccaaattcttcccaatgtatacacagtttgtaggattatttggatctaaaaccaccttttccaactcttcaatgggtttaagctagttactctcatcttggactcagggatctagatcttcatcttccttctcgcctccttctgttatgaccactattaattgatgattggctcttctattttgaagttctatgcgataaatttgcgagccaacaattggtcgcctcgtactacacctactcacgcttatgttaggaattttagagataagtgcttgattgaacttacaacccctagtccaatcaatggagggggacccatcaatacatattagaccgatggaagatcaacaactaagaac

SEQ ID NO: 51331 - DNA, 1133 bp, Cannabis sativa
tgacctggtaaccatagtaaccccggtacttttgggcaccataaagtaactaagacggtaacaaaaagtttacctggtaaccatagtgtaacccaggtagtttttgggcaccacaaagtaactaagacagtaacgaaacgtagcctgagtaacctgatactttttggatactataaaagtaacatagaacaattgtgggcataagaaatataataacaaaaagtaacttggtatttttgaataccgtaaaagtaacctgagacaattcctgttgtgtaatactatttctacttcccttattgcacttaactatattcatttattctttcaaaaaaacaaaaaaaaaaactatattcatttattaatatgacttgatgttaaggtactaggatacttttaattctatgtctgattaagatttaggtttcaagacgctagattagtataattatttatttgtgttggtggttttgatgtaggttaaaacttaccatgctacttttaaggttctaggtttcccaatctaaaaaaaagtaacctatacttttcaattaaataaaaggaacaaaaacaataacaaaaggaacttggtacttttcaacaccataaataaacctctaacaacaattacaagcgtattaaagacaagaacaaaggtagcaacaataagtaacttcatattttttacaccgttaaaataacttggaacagtaattatgagcatagaaagacaaaataaacaaataaaaataaaataacatgatattttttctttttttgaaatcaaataacgtgatattgtacaatatataaaggtggcacaaacaatgacaaaaataacttcgcattttctgggcaccataaaagtaccatcaaagtatcaaattaatatgataaccataagttgtacgttttaacaattaaccttattaattatttaatttaattagcaataattaattatgaatatatttgaaaaaaaaaattgttaaaatccaagtataattttgctggtattttcaatgggagagatatcccgattagaatagagactattattttaactgattaccataataaaaatacacttcaagttgtctgcatctcagtcaccaaaaacagatgcagaaaga

SEQ ID NO: 51332 - DNA, 672 bp, Cannabis sativa
gtcgttgaaaaaaaatatttttaaattgaaaacggtcacttgcagtatatgggacgatttaaagtcgttgcctatagtagtataggcaacagtttaaaaccgtcacctatagtataggtgacgatttaaaaccgtaccgtatactcgtctgtataggcgacaattttacactgtctggaatggttttcagtgacggtttctaatcgtcgcctattccaccttttttgcaacggttgaataggtgatggttataaaaactgacaggaatactttacgcaaccgtttaaaactgtcgagaaaaactaatttttttagtaatgatatcaactgttagaaatttatatgaatatataaaaaataaatcaacaatttatgcaatgaggaattaaatcgaacatatacacgatataactaaacgatcgaaatacatcctgtgattatttgagctttaattccacatgtgcttcagatctacaaaagaaaaggaaactagttagtgtgggtaatcgggctttcaagctttctctactctttttaaagacttttttagtttcacagaatgagtgaggagctcaaggaccgtaccttatatttttaggtgagatattttataagtatttgcaccacattaattatcataatatttcgataattaattcagggaataaatta

SEQ ID NO: 51333 - DNA, 3295 bp, Cannabis sativa
attaattatcatcattaatgcttggttgtatttttctttattacattgatttagtttcctattcttttagtcatatttttgtataaataggaattcagcctattatattattctatattattttataagacgttatcaacacgagtctcttgaagttcttgagttatttcaaggtcatgatacactaaatatatatatttatatatatactcatctaactgaaacaatttcaagaatccttttttttttctttttctttttctttttatctatatgtctatatattatatatgtatgtatatgtttttatatgtttattattgaattcatatatagtatgctctattgtttatctatgatatagtaaagaaaatctatataaattatgcatatattcagaagattatgtatcctcgataaaatattgcatatatcataaagattatgcgtcctcaattaaaatgcttgcaaactaactatgggtgagtttagatcctttattaagtatatcttacagaccatgggatacaacatagatacccttgtcctacaacacaccaaaaaaatggtctagtagaaagaaaacataggcacattgttaagaatggccttgccctattagctcaagcctccttaccccttaaatttttggatgaagcctttagaactgctgtctacatccacaacagatttcctactccacttctaggcaacaaatcccttattgaggttctgtttcacattcaaccagattatacagcctttaaaacctttggatgtaggtgtttccaaatataagaccatataataagcataagcttgagtataggtccacactatgcattttcttagggtatagcctcaaccacaaaggatacaagtgccttgatcctaatgggagactttacatctctagggatgtaatctttatagagttttcttttccatatgaaacacttagtcaatacacatctcacttaaaaatttctgacaaatccccaatagtgtctcttataatccgcacatgctctcatcatcattgcacttattccatatctgatctgatgaatccccaatctgagattaaccaacctactataacaaatattgatccaccccaactagtttctactactaacagttggcttccaagtcaaccatctatttttaatgtaggtcaatcttccggacaaaatgatgctcaggttgatactccaagtgttactttgtcaacctctcttgctacagattctcagctaactattactcactctaaacaacatctggacacacaacatctcaccacaattgagcctcctgctacaactgatgctcagctcaattgtggtttgagcagacctgcattagttaatactgttgttactctagcaatgacaattggcaaaaatactgttcagggatgccatcaacctcttgaccagcataacacacatcatatgaagactagatccaagtctgacatccacaaaccaaaagctcttttagtaaccagagaaccatcatctcttcaagaagctctaattcaacttgtttggaacaaagcaatgagtgatgaaggaaggcaattggttgcaagtgggtttacaagaaaaaagaaaatctagatggatctatcctcaaacataaggccaggcttgttgctaagggatttcatcaagaatatgggtttgatttcactgagactttccagtagttaaattactattagggttgtcttgacaatggccttgtcaaaaggttagcttattagacaattagatgtcaataatgccttccttaatggagacttacgggaagaggtgtacatgttacaacctttagggtttgaggtccctggaaatacagacttggtgtgcaaattgcacaaggctatatatggtcttaaacaagctccaagagcttggtttaagaagcttcaaaactgccttttgtctcttggtttaatctcatccaaatcaaaccattctctgtttattcaacatacatctacttctgttacactgatcctagtttatgtagatgatatgttgattatagggagtgataacaccacagttgacaccattgttgcagcactcaacaggcagtttgctcttaaggatctaggctctctggcatattttctttggtattgaagtgacacaaacagatgctagtcttcacctgtctcaagcaaagtatgcaaaagaccttctagcaaaggctcaaatgagcaatgctaagcctgctccactccaatgacaagtggtattcatttattagcttaccagggaaacccttggaagatgtccaattgtataagtcaattgttggagtcttacaatatctgaccattacaagacctgaactttcctttagtgtaaacaaggtctgccagttcatgcaaaaacctttgtctacacattggccagcagtcaaacgaatactcatatatgtgagtggtacaacagatcatgggttgcacttgcaaaaactaggaactttgaatcttgtggcctattgtgatgcagattgggcctcagatccagatgatagaaggtcaactacagagtttgctattgtttttggctcaaatctaattgcttggaaaagtaaaaaaactacaaactatctctagatccaacactgaggctgaatatagaagtgttgctagtgttacaacaggattgacctggttacaatacttgttttttgaactctagatacaactatctcaacctcctaccatatggtgtgacaatctaagcaccataatgctaactcagaaccctgtgctccatcaaaggacaaagcacattgaacttgacttgtatttcatcagagaaaaggttcttaacaagactgttcagattaggcatctctcttcctatgactagctagctaatgggttaaccaaagccatatcaagtcaaaggtttgctgagtttagacacaaactcaaaattgaagattgttcaattatgagtttgagggtaggtgttgaagacagttaaaacaattggtgttagttagtgttcgttgaagttagttagtattgattaaacacgtgttgatttctgttgagagttagttgtgatattcttgttatgagttgttatataagctgtaacacttcattttaatcaatgagaatctttcctcaatcttcgcatctctttcttccttcttcttctctctctatttctctctgttactagttctagtgttcatcaatggctcaaaacttcaacaaacggtagcactcctcttatttttttataagagtattgctata

SEQ ID NO: 51334 - DNA, 1687 bp, Cannabis sativa
atggttaataaagatgcattttccattcaaaaaaaaattaaattatatataagccaccataatttgacatgtgtaatgtctaattatgttattattttttagttatgaaatttatagtttttgtgaataattttgaatctatttttgcacaattaattttattgttttttctcttatttatttattattgtgtaattgaaattttcaatatcaagtaaaatgcaacccttaataatgagtggaagtgaatatatatgtacttagtacttatttgctcatgcattttctgtattggcattattatgtatgaatgcagattcgcctgagtaactacgtatgaattaaagtgggagaatgtcatatcaagatttggaggatgtgttgccactgccaatcaccaatgtctgttgattcaataattaatatttggaatataatgtgtaatattcgaattgtgttgttgttttaattcttaaatgggtgtctatacatttggtaacctgtattttatttaaatacaagtttgctaccatgtatttttaatagggattgtttcataaatacacaaaaacaatataaaaaaattacaaaaatttagttttacggaattttaaatatttttataatttttttgattttatttacaaaaaatacggtgtttttatattgtatttttgttaatttgttgttgattttttgttatttgtttgttatttttttgttgttgttttaatattattcagatgttacttttatgtaatatttttgttgttttcgtgtcgtttttttgaaaaattgtagaaaaagaaaaaaaaattcttcaaatgtaaaaatgtaattttttacaaaaaaaaattgtatcttatgtaattattcctttttgataatgcttatttagtactaagcaatagactcacaaagagtgaggtcgatcccacgagaattgtagttaagtatgttaaaattaaattcttacttctatttgttaaaataagacttggaggatgttattgaaacttatgtcctcaaagtgactttgaagagaaatgaaggcttactaaagaggtgtatttgcatcttcagagaaggaattaatgtccacaaagttggattagagattgagaggatctcatccaacattgatacttggacttcacagttagaagcacttggagtacacagatcaatacacaatgcagctgaggcttcttcaagctatgtccaaaggcaaagacagttgaggcaagcatattcttatgttgaagacaatgttgttgtcggatttggaaaagatatagaagagttggtaactcttttgactgaaaaagagacccctcataagcataaggtaaccctatttttaggaataattaaattacatatcctatatggagtcaaagcaacaataatttaacatgtgtaatgtctaattatgttattattagctaatgcattttctgtattggcattactatgaatgaatgcagatcgggatgatgactatatatgaattttctgtggaggatgcgtttgccactgcctatcactagtgtgtgtttgttcaataattacattagtgactctttttcctatcttttgttttttgtgttcttctgttgatgtgttgtaattgaatgaatcaaaatttgtaacttgaatattaaaacagaaagtaaatcaagaacac

SEQ ID NO: 51335 - DNA, 726 bp, Cannabis sativa
tatcatcaaacaccaggcatgcaacatttttatatgcattttttttatcagatatctaaaaatacaatagaaatgatatcactcagtttgtagtagcttttgaagcatttactttatcagttccacacttatattagcttagcctaattcaaaatatgaatctcaaaaccataaacttgataaattaaaaattttctctttatataatcaaaagaaataagtaattgaaaaatagaagaaaaaaattacaaccaactcaatcattaaatatatatgtgtggagaaaaataattataccaataatagagagaatttgatcccaatccctgagggcgacgaacaaagagaacaagagagggttagtggatgaatggctaaaaaaaatgtaaagtcaaaataatctagaaatgaaaataaaaaactaaaacactaaacctgagagagagccatcaacttttgggattgggattgagtcaacactgtcgtcggggttaggtgagagccgtcagcgacgagagagcaacaagaacctccgtttgtttgtgagtcttcaacggtgagagagtaccttcaagccctgccgtccatgagagaaagaagaagagaaggaatagttgagagaaagaaatagggttgccgctgagttttgagggtaaggttagggttttgagagagagatatatcatatataagatgatttggggctgattttttttttttttttaa

SEQ ID NO: 51336 - DNA, 1439 bp, Cannabis sativa
ttgatacaaaaaagaggtattccttaacttatctcctaaaaatttataaatatatataattattattattattttacataaaatatcaactcattaaacttagcattctcaatacaaaagagcctgaaactcgacaagaatattattctcaagaattatgactagagaaatatcaaaattatctaactacaaaataaattactcgatttatttattgtctaataaaatgtaaactaacattattttaaaaaatatatatgtaataaaatgcaaacttatattatataaaaactttatttatatatgttagttgctaaattttttttatttaaatatttcattgaaaaattaatttattttaaatatataactaatttaattctaaaaatagaatttcttttaacaataacattgcgtatatatataatatactatgtatatacattaaggataatatagacagaaactgttattaatgaagctatatataatatataagctaggctggtccactaaatgtgagatatattaattgggcccatgtaatggtatagtttgtacgtgtaagaaaaagtatagtgtatctgcatgcagcccatgcaaagtttaggagcagcccatgctaattacaacaaccacatgcatcatcgatcatttgcagtcatatcagagcaggtctgcttgtgctatgtgttatcatcatctttcttcaatttcttcattctcatatctaattggttcgggtaacacatacatcttgagaatatactagtacaataaagtgggagcggtaatcatagatacagaatctataacttctatctggacatagaagtgaaataataatttctttcgagctttgcgtaatagagataaataaaagagctcttatttcaataattatattagtttactgaaatatcatttgtagaatattacgtgttttaagaataaaatacattgaggggtagaatagtaaatttgtccctcatcgatgtaaattatctatagagaatctttgattattcagattataatgatagatagttcatagtgtattcatatcttgaaacatataaaatgctttgtataattaagagtgcgattccgaatctatagtggcgcaaagatggattaataagttagagaatttacttggtaaattctagatttacttattgaaagcttggttagataagtccatagtccccacactagttgagataatactgcttgtaagactcagttaattggttttaactaatcaattataaatctaaaattagactatgtcttatatatgaatttttactaagcaagggtctaattgtgaagagaggaggttttaggatttatttattaattaagagattttattaagtctaattaataaataaaataaatgacaattttatttgatatttaattttaattattaa

SEQ ID NO: 51337 - DNA, 1228 bp, Cannabis sativa
gatttcaatggtgatgccttgattggatccaaggataagaacatcccattgcataagtagttagccccaagccttcacatgttattacccaaagatgctttactgatatctttggggtaacaatcttttttgtctcctcttgagttaacttttttttacttatcatcacctaaatttttttcttgttttcaggcttgtgttggttatgcttacaccctagataacaaacacaagaaggtgattgagcttgctaaaaaactctcagttgtagagtgtgttgttgctgaggaagattaggtggctgtcttgaaggaaaacattaattctctaaagaaaatcatggccagtctttgagaagtggttaatagtgcaaaagctcgagagagtagcttgaagaagaacctggatgctgcttggaaagaaagcttcagaggttgaagattcttctcgattagaacttgatgagcacactttagctgatgctcaacttgaagatcaagttaaacgtctgagagagcaagcgaataaactggaggataagattgttattaatgtcaccttttacgatgacttatgctttgatgtcttctatcgtgcttggtcatccaatggaggagcacggtcattcaactagtcggcattccttgacacagaagtcctattctttataaggcattgtgagcagagttttaatgaagatgctctccagagaatagacttaaactttaatggagatgagccagtagttgaagaagccgcaagggtcgaaggctacaagctcgagcatcctcacatccctcctcctgctaatgtgccagttacaaggaatgaggaacaaattgaagttgttattggcatagaaagcttcttggcttcataggacattgtcttagtccgtttttcttttctgtttttagcttttagctttagtgtgttagttggctgtcccgaacagtctttcaatgtggataagccttagtaaaatgttatcatacttgtttaaatcaaattaaaaattattttaacttaataaaaactttattccaatatttgctttttaattttactttattcgttaccacttgactgtttaacacttgcacaatacaccatgtcttaagaaacttaatcactgggagttatttcattgtttcttaatgttatctttaccatgagagtacttacatagatgtgaaaaaaaaaatgaatgctcatgtaacatatagct

SEQ ID NO: 51338 - DNA, 1002 bp, Cannabis sativa
gttggaaatgagtatagaagggtgaccaagatgtttgtgctaccgatcaatatcatttgatataattattgaatttcaaatataagcaaattgtgagggggacacatttgaagttgaagcttgttcaagaatgtagagcttctcaatttactaagtcattccaaccgaaatcgttttgggtgcttaaatgaaacataaagaattagtaattatattattttagtcttgtaagtaagaatgaataggaaaaagattacatttaagaaagggaacaagcaagagattgtatatggtaatctactggtttatatgtactatgccaatattggcaatggcaatcaaagagtcatttggtaaaatgacatgtttttgatgagggacattgataaaactagaaaattgactaaaatcaaagaaaatatgatgagtggcactactatccataattcaaaatgagaagggatagtatggttactagacaagttagaagcagccacaataattaaggttaaacattagataaatttgtcgagttttaagttcaaaaaattatacctggacatggctcgtggaatgattgatttggccggattcactggtcaccagtttgcgggtcacaggttgacccagtaactctattaacttaaaaaaaaatcaaattgtatgtagttttttctgtatattaaattaagcatataagttataaacttataacatcaaaatctattttcgttagattaaaaaaaatattaatttcaaatctaaaatacaaaaaaaaacaatctgaaaagtttcaaactatattatataatatatattatatctaataaaaataaaaggattagattttaggattttttttatttttaatatattatacatgtaataaaaagaaaagtaaatttggtcaagttggcaagcgaattcgggtccaacccgaaatttgatggctataaaaaatcaacccgcaaactcgtccgaaagtgtactgggttggacccg

SEQ ID NO: 51339 - DNA, 1163 bp, Cannabis sativa
tttatatagggcacaaaacccaactgttttctaggtgagttcaagctcccaaaccgcactcacaatgaagagatggacaagttaaggttaaaaaacctatggttggaagaaaccatcgcaaacatgcaagaagtgcttgaaaaaatcttaaaaggaccctttgaagcacctttggtcaagagaaaagagcaggaggcaagaaaaaggggagataatgtgctagaaggtaaagggatgtccaagtactcaacaagtaacacgtcagaatcctatccacgaaaaagcttcattctgcaaagatccagatccctcttcatgacttaaaaaagactgagtctaaagaaatacatggtgattggagagaaagactccgtcaaaaggccaccgccgagaagcaggcatcgtcgctgatctctcctcgcaataaggagggaccaagacccacgccgccagacctccaggaaaagataactaagaggaggcaggagcttgatatggaaatggaagatctttggtgaaggatagcgtcagccgcttctgaagagtgcaactaggatgaagacaattttgatgatgaatcgcctttctcaagggaaattcacgtcgaaccactgcctaaaaatttcaaagaacccaccatgccaccttatgaggggattaccgacttgaagtaccacttggacaccttcaaagaaataatgaagatgaagaaggtcactaccaaggaaagataccaatgctttgcagtgacgctcaggggcacaacatacaagtggtttaagcaattaaaaattggatcaattaccttatggaagcagttcaccgataaattattggcctaacaacacacctcctgagactacactgtccctaggatgagtttagcaaacatcaagcagggagaggctgatagcctgaaaaagctacacgcaacattttaatgctaaagtagccaaaatcgggaagttaaccaaagacgaacacaaaatggccatagctgtaggagtttgcccaaagatcatgctatggaacaatatgcttaagagggaatcaaaaaacatagaatacttctatgagtgagccaagaagtacatcaaggtggaagatgggcatgagaacctgaatatgtgaaagacagtcgatgtaagaatgcccttgtcaac

SEQ ID NO: 51340 - DNA, 1125 bp, Cannabis sativa
ctcgatattaaattacactgataacaatagtaaatcaaatccaattcatttttagactaattattcggacccaaaagggagagaagaaaggtcctataatggcttgatgtttcagaatgaactgcatcattcaatggcttcttgtacttcttaagatattcagccttaatgtattgcatatctatttcagtccttgttacaattaccctaatcaatgtggtgtcattggttccaaaacctttcattgccttgtacaaaacctgttaaaatcgaaaataaattattttcattaaaataaagttatatctttctccattggtgaaatcaaatcggccaaatgttactagaaattcgagcaatattttctttcaaacaagtttatttgttatgctagttcactgtttaaatgaatttaaaagtttgttcggttggtaagaatgaaaatataaaaaatggaatcgagaaagagaatgtgaaaaaatatgaaagaaataaattaagaaaattattaattttttttatcttgcattggaatgacatttttacttattttgaaatggaatagtcactctatttaaatagtagaaaagtcattcgaatactttcaaatgcgaccaaacaaagaaattaaataaaagttgtttttttttctaaaccaaaaacatcctaaacaaggtcggcccgagaatggggcaactaggatccacacccaaagcctttcaccttagtccgaaaaattctttaataaaaaagctctcaatttgatttttaaattactatattttgtaattttactattatttattttaaaatacaatattttttttttaaaataaaagatctactttattttttaaaatacaatatttaatattttattaagaataaaaattcaattattttttcaaaacactatattttaaatttttaccacaaaatacaaaaaaattatataaattttttcacataaaaaaacccaatgatatttttttggccgaaagcccctaattggcttagcacggacccgaccctaagataaaaaaaagggaaatttacaaaaatactggaatttgagttaacttttacaaaaatactgtcacacggaaatcttttcaaaaatactgt

SEQ ID NO: 51341 - DNA, 769 bp, Cannabis sativa
tttttaaaaaaaaattaataattagcctattggcccccctaataattaaatcctagctccgcccgtgactatgtacgccttattctccgtccttcctaatagaatacatagcattattaaagaactaggggcatatgttaataaggcttgtaatatcgaagaagagacctcgcaatatcaaataaaagccacaatatttatcacaaaaaatgtgaacacacattcagcaatttaaatgaacgttgaaacatagaaacaaaatctattttcatcgcattgaacttttccattttaattttgtctatttaatagatatataaccttccaaattatatgtttttattttttatttttttttcatttctttgttagtcatagcgtatggactcaacaaagcgtaattagctaaaagataacaacatgattagattctctatacaaaaaaatgtaagtaatacaaccattttcaataagagctttaatttcttattgattatatgtagtttaacttcaaattaaaagtgatcataaaacaagtcagaaattataaaggtaagacaaaaggtggatcaattgcaaatttagtcactatttcataatacattattttcaaaacataaaatcaaacacacacgacacatttctccaaagccataatgttctcttaatcacaatatcaaccagagatctcaataggtttgacatcaggcttcttcacttcctccttgggaacagtgacagtcagcactccattctccattgcagcctt

SEQ ID NO: 51342 - DNA, 1189 bp, Cannabis sativa
aatgatacaccaaggaaaagaagattccaactttaatgatctcaataaatctcaggttttataccgaacaaactctattaggttctccataaagattcgttaaacgccaaggagaagaagctacttccgagatttgaatatcaatgtgatgaaaagaatagctaagcagctgcacatcgccctcattacaccaaaacatggccaccccaccactatgtcctctcgcatcaacaaaatacaatccatcaaacctcaccgcaacccgtaacctttctaacttgtccttacgacagagagttctcaaacaaaaacagaaaattgagtttttttggacaatatctctgagttaatttatttttatatattttaaatttaatttatatttatattcatattcttatttttattttatttttaaattttcattcctttcaattaaataccacataaatgtatagttttatgttccatatagaaagattcatattgttttaggtttacaatagggcaagcagagaaccagttgaaactcatgacttataaccgttccttatccatgtttatttaggcagccaattaaagactttttgagctgatatttattctcttgacttttttatttatttatttttattttttcttttaagatcacttgacttttatgtattagtaaagaaacagttaacttatgttttagtaagtactacacgtatctttgattaggtgtaggggtggtaattcatgtcatgattactataacatgatatgaacttgataggaattattgtggttataatcataaaaaatagacgcaagttaaaattagattgaactcggataatacgattattaattgggtcaggttaaaggttaacatatataatatgaaattgacatgaattgacccatttatatataatatattattaaaattattaatttatagttaaagtattattaattttcataaaaaaatatataaattaggaaaaaattacttacaagaatataagataaataattaatattttgatattataagaattttatttattttattgattatttgtgctaagttcaatataaatatataatcgacacgtgaacacgataagttaatacgagaatatgattgattgagttagattttaaattttttgacacgcaatatatatactaggtgaatgta

SEQ ID NO: 51343 - DNA, 1949 bp, Cannabis sativa
  modified_base (332)..(334): a, c, t, g, unknown or other
  modified_base (1262)..(1268): a, c, t, g, unknown or other
  modified_base (1475)..(1481): a, c, t, g, unknown or other
  modified_base (1923)..(1923): a, c, t, g, unknown or other
aacaagttaaccatagcaatttaaataaaataataataggttttatataacaagtttgaattaaacaataaataagacacacatgttacaacattggatagttagatataggattgctttaatttaaactacattatcaattaaattaaattttgaaaatctttaaaaaagatatatttaatttcaaaaattactaaataattattttaaaataaacctacaatttaaaaataaggtttataacaaatttaaatatcttttcaaaaattatcagctaactttttaaatttatgttattttaaaataataaaataaaattaaatatctaatannntaaaatgataaataaatatcattaatctaatttataatttaatttaaataaaataacaaacttttgaaagttgataaaatgtctagttatttttaaaaattatctagattattttattaaaatatatcatacatttttttaaaatttcaaataaggtcatttataggaatcatttaaataatgaaaatataaaatatctaaccttaaatttaaaaataagacaaaataattaaattttaaaacaaaataaccaattaagcaaaaaaaaatatagatattatccttttttaggttcaaaatctactaatatctaaaattaattaataaaataataattaattttaaaatgataattagatttaaaatttgaaaaataaaaatctacttaaaaatttacacaaaaaattagaaagtaattccatgaaaaaattggatttggtgcggatggtatacattgcataccatccgcgcatgcaggaggagggagctgaccgaagtttcctgcactagcaccttgcatgcaggatttctacaggcggaggaggccttcagacagctcctgggcgagctactttggacaaaatcgtgtccgaacatgcgtgagccccgagtgacactcaggtgtccgcgcgtgtacatgggtgatccccattctgatttttttttttttttaattttcaaaaaatcataactaattcaaataaaatcgcaattcagttctataaaaaatgaattgcttaatattttccataatatccaaataaaataattctagatcgtgaatctaattattttacttaaaaaatttgtaaacatcaagtaatcatcaaataaacagatagatcaacatgaatcacatccaaatcacacattcatcattttaaatccatatttcttgaaagtaaatcattactatggctctgaggcnnnnnnntggaatatattttactaggatctatatttactaacaagtatgtttaataacatcctaaatatgaattctctaaaacaatagaattttaacacatataaagttaagaaaccttacattgattgcaaaaaccttacattaattgcaacagaataatatgtctcctcccactcaaatctctaacacttattcctttctgtcgtagagtannnnnnngatctgagcccgattctccttcaagtgttggattcttcacaatcttacacactatgattgagtacttaacttgctatgagtgggcatacactcattcactatacgctcgcaaatttatgaagaacaatagagagggattcgaaatagaagaagaagaaggaatggtggctctcaaaaaactctaattttctgacaaaatgtaaactaggttatgtgtgttggatgagaatgagaccattctattcctcttatactatttcacctagggttaggatgtaaattatatggaataaaaaaatgataaaataatagcaaaaataactctatagtggtcggccatatatagatgggccccactagttataattttgttattttttgaactatttatcttatattttacaattaccatatcttctaattttaatcctataaatgccanaactatttatttaataattataatta

SEQ ID NO: 51344 - DNA, 1123 bp, Cannabis sativa
  modified_base (1090)..(1092): a, c, t, g, unknown or other
atgctagttagggtgttacactacttctttagtagccctctctaccatcaaggccacctgatacaacaatgaaatgtaagaaaataatgtacattagacggaacaaggatggaagagccaaagcttacccccactgcctgttgtttagcggcatgacccaaggcgaatgcatcaatgctactacaagttgcccatgtttcttgaggaagcctagatgagctactaaccacttggtctaaaagctcatcaataaaaagtgcagtttctctccccaccttgagcgccatccagttctcttcaatgtccactattggcccagcgagaacagtgtcaaagaggccttcagaagtttcaaccctcttcacggctgagagcctgttgactctcatctgaaaaatcctcctttcctcctcctatcgcctccccaaggcatgttcagactccctcgctctctttatagtagcaagatcaagaaggatagtctttgtagagaagttgaatcccatagaaagaatctcaggtaggaaagtagatggctcgtgatgtggttgaaacagttggtgttgttgtcgctgttactggtggtattgttgatgggactattgagtaggtggtcagttaggtgaactattggaacatactctcgtgccttttccttttccctacgaaacctcctccccttgcaaagcttgtcaagccaacctctctcggtgggcctagcattcttgctttaaggagtatatgcaggcacaaccaacataggataagtgagtgaatccaaaattataaatttgggaagagtatgtgctatatgagatccaaagtaagaattaaatatatggaaaagtaggaatggtgttatccttgagagacatgttcagttgtgcccgcataataacaataaggaatatttgattcgttgctataaagacttgactgactggccctccttggaggaggttacaaaaatgacaaatcttggtatattcttcactttggataggtgtcccaagagaattctaaagttaggaacactcttaatataaagtaaaaatcctaaagcacgtgtctattgggttttatgccctannnaaaactctatttcaatgtaatccagattatt

SEQ ID NO: 51345 - DNA, 765 bp, Cannabis sativa
aaaaacaaataggtgagtccaaaaagaaaaataagtaaaaagatttttctttttttcagaaaaaaggtaataagaatttgatcaaagacatacccttaatttagaataataaaggctgtgaagtgaagcataaataataaatcagaggcaaggacactgaaaggttgccatcaaaggtgtcctcaacaaactgataaatgttcaaataaaggaccaccattttcacaaatttaggcttaaaaatccacaaacactatacaccacactccatttgatcccatgtggattttccttagctgccagttcttatccagctagctgactatactgttattttatttttcttttaaatccaattcaaaaattgaggtattataatccctagattcatacaaattactagctaagtgggttttccctaaaaatacaattgggatggtcgatcttgttgatataccaaataacatacaacttactttctcatttatacacattagcctaatgttacttactctctaatatatttatatatattaggctaatatctctctaatatatttatacatatcacgctaatgttacgtgtaatcacacgtacttagttatatttaattttattttaagttatgtattttgagttttgatagttatataataagaatattacatatataaaaaaatatttaatttaagttgtataaaattccttttagcttatcttccttgtaaataaaggattttaattaataaagtttgatctttagg

SEQ ID NO: 51346 - DNA, 758 bp, Cannabis sativa
tgaaagcagtttatttgataaataaactgcccacacctgtgttaaataacacttcaccattcgaaatgttgcagaaaagaaaacaagactataaatttttaaaaacatttgatgtagcttgctatccttgtcatagagcctaccaatcccacaaattccagtatcattcaaccaagtgtgtcaatttgggctatagtgaaagttttaagggttagaaatgcttgagtagcacatgaagaatatacatttctaggaatgtaatttttaatgaagctgagtttcccttcgaaatttgttttctaaacactgagcaaaacaaagttttagtgtccaaattcccccatggtaaacattcataaatgcctcatctaatttttctcatgatcagccgcagcaaaacatcaaccctcaaactgataaagatcccaatttaaaagaacctggagcatcatctcagtatgtaacttcttctacagatcaagattctgaacacaactttgatctaggtgaaataaatgcagcacctgcagccaacagtcaactcaaattattccaactcatccgatgataacaagagcgaaagctgggatttttaagcccaaaacttacttgagtaaagctcagttcagtgactattatgctgaacccatctctctcaaggaagccttaaaacacgaaggatgcaatggtgccatgagtgctgaaaacaaagcactgctgaagaacaaaacttggatattagttccaaggctgcctgg

SEQ ID NO: 51347 - DNA, 826 bp, Cannabis sativa
aaatcaacctccaccttctttaactgaagaactacatatattccaacctttttttggctaacatactcacagtttttgccactactattgtgcatccaatgaagattttaaagttctcagtgaaagcacacatcatgtgaaacagctctctctctgtaaatgtttcttcttgatgaggggagtggagtaatgactacttctcacatctcaataaaattctcatgtgatgttgatgattaaacaaaaaggattataattataacattgccatttagtaaggaagatgcagatttctcaaacgtagttgattatactttataactaatatcgaagtgaatgagctaggaacagaggctgctgcagcccactgctgttggtatgggtttattcggttgtgctcccacagttcttgggtcagaccatcctttcatgtttttatgaataagggaggattttcacaggctcacagcttattgttttcactggaccactttacaagatcttcctttatcttcaaaagtaaaaggcttagtaaaactcccttttgttatttttattttatcagatatggaaatttagattagtatgtttaaatataaaacattcttttaatatatcatctaattagaaataatatatttatgcttttaatatttttttttaaaaaaaatacatttacatttcttttgaaaaaaacttctctctaactctctcactctccaacattgaatcccgactcagaactcctattagcaaacacacagactcaaaactgttaggctaaaattagtctaagattcgggtcatatttcggttagttttcact

SEQ ID NO: 51348 - DNA, 509 bp, Cannabis sativa
aatatttttcgcataaaggaacttcaatagattgactcatttttattttttgaaagttagattgcattgaattgtgtgtttgttgatgtggcttaactgtatgaagagaataatggcttagctactgaactataagtcaataattatagggagagttcagctttagcctctcaaactaagtaagaccttattgattaattagttaaccaagatcttattgattaattggtttgcgtaggttttagtgtcaattattgttgcctgtccatgatatttttgggctatgattgtattgagtctctcgaacatggttaaagtgatttctatctgaatctaattattttttagtataaactggctcactcaacatcatgttgtttcttgatatattcggtttgtcttcctcttcgctaaaaagcttaaataaatatggtaattttattattttttttcctgatactttatatggtaagatatagtcactctttgtgtgttcaaattagtatcta

SEQ ID NO: 51349 - DNA, 858 bp, Cannabis sativa
gagatctcattttttctgtgtgtttcaattcttctttctcaactcaaccctctctcactcttttgctcctcgcaagtacacaatggaagaacaccgttgacgagatggtcttgggctctctctttccattggtgcctctcatttttttgggacgtctctctctatttagggtatttcgacgattgtagtggtggagcttcaccaaagttgagtggtctccgtcgctcgttcctctctctcactctaggtaaaagttctctcactctttctatccatccgtctcgatcttgatctctcaattattccattattatttttttcgcagacgatgaacaacgatattgacagcagttcgccgtagcttagccattaggcagcgacattggccaacttcggcatcttgtcaaaaattgtattgtcattagggtgtttagggattttgttactgattagatttttcatctttctctaaacttttttactcattttgtgtaccttgtaaaagatttttgtatttgttactgattaagttttatactgtaattgttactatttttttttttttgtatggggtttctcatggtggaatctcaccgaggttggggtttctcggggtgggatctctttcgggttaggatttctcgaggtgaggtctcctcgaggtttgggtttcttggagtggagcctcactagttttgggattttgtattgtgtttttcattatttattattttttttaaaagtaaaataaaagttatggtaaattgcggcataaatacctaatgttttagattttatacacttaaatacctaatgtttatttgtagaggcgaaaatacctaatgttacaattctctt

SEQ ID NO: 51350 - DNA, 933 bp, Cannabis sativa
acccatacacggaccaagacccaacgcggacccaaaacgggaccaggacccgtacctaaactcgaactcaaacccaaactgggtcaggactcaaaccggacctagaatctaaactcgaacctgaacctagaagacccataccaccggcgggacgaccacctaggaggacccagacctggacctagaccaaaaccaaaactgagacctagacccgaaccaagacctggacctagacgggaccgggacccagacccgtacccaaactggacacagatttgaacccagacctgtaccaaaatctaggaccccgacctggatgggggactcagacccgggacccgaggcttaaaacccagacataaatcggaaccaagaactcagacccagactcagacacgagacccaaacccgaagctggacccgaactcacaccaggatccgaacacagattcaaacttggacccaaaatcgaccctgacccaaacttggacctagaacgggacccaaacccagactcgaactcgaccccaaactcggaacaggactcggaccgggacctgggatccgaaccaaagaccctgacccagatcgggttcagaacccgaagccagactcagacgcgaagttgaacctgaacccagactgagattggaacccgagactcagaccccaaccaggacacgaacccagacatagacctagacctggacccaagactcgaattctgacccaaaccttgaccaaaacctggatttaaaccaggacccatacctgaactcggactaggatttcaaccgcaagtcggaccctaacctgaaccagaacccaaaactaaaactagaccaggaccaggaccaagaccagggactagaaccggacacaaacccaaacccaaatccaaatcagaatccagactatgaccaggactcggac

SEQ ID NO: 51351 - DNA, 1264 bp, Cannabis sativa
aaaaaaaaaagagagagaaaagagagaaaaggaaaaagatgaaagacatcatgaaagagcttaagttttattatgaatacagttgtacaatatatacaagagttacagcaactaaaacaagattagaagtaactgaaagctaactaactaactgacaaaaaagtaattagtattagataactaataaaatagaaattgtataactgtctgctcttaacaggcacccattggtgcatatcacttttttatgtattaatatcgccattggttcgattaaatatcaagtttcatataattaatgtaataatttttagaaagtatcgctaaccaattacaatataacatatcaagaagtgaccaaacaccactattgccttaagaatgattgtcaataaagaaagtacgtatatctatatgaagatatataaaaacaaaaaacaagtgcacgcgtcctccatttcatattattaaattccgttaattaatatgtatgaattatgataataacgagagaggaaaaggtttggcttataagagattacgtgacctcaaatatatatctctcttctcagttattcataattattcttgtattgttgcaatcccaaactatatctatatatatatatatatatatgtattcaaaagaaaaaacaaactctatctatatatttatatatataatcaagctattcgactcatatacttaagaaataaattattatatcgattattattcagaagggttagttaatatgcactactaattattattaccttttctctttctctgattcaactatagtctatgtataatatatatgtgtatatacgtatatatgtatatatttatttaatgaatcttatatgtagtaataacaatcgcttaataatggcttgaatttacagaaaacaaattagtaaaacgtacatatcgaataatataatggctaaagaattaaactcccagttggccaattatgaatgcgtcgtcaagaagaaactagtgattaatataaggtacgtaattgattgatattatattaattagtgaagcaaggtaatggtattatgttttatttattaatttacattataatcattattaataaattataaaattggataaatattatagtgagaagaccgaaagcgagagcgaggaagatgaaagctttgccaaactactgcaacctgaacaaaattgctttgatcctgtcatgagaattggtcgtgggtttgaggactttctctccaataaatt

SEQ ID NO: 51352 - DNA, 1291 bp, Cannabis sativa
aacacctattttttgagtgttctctgtctcggtaggtggtcagacttgtctttgattggctgggcaaaaatgcttggcctttggattacttgggatggttcaattggttgtctctgtcttctttgagtttactacatgctatagatatctctatatttgcagctacttgttatagcatttgggtcaacagaaataaatgtatttttgagggcttttcctatacagtgagttaaagagattacaagtttagtaacttaaaaattacaaattgttaagcacatgaatgtatagagtggaaagattatacttgaacataattcatttgtaatggggtggttgttgagcgtggagccgtattttttgtagtgctcccattggttgtagttatttgtggcttaatgaaattttttcttttttgataaaaaaaataataaaaatatataaggatacaaataataaaatattaaatatcagagaaaaaaataaaatatttaaaattttaatttataaaaaattgatggactaaatttagtgttatgtttttttgggttagttgtggcgcttacttgtttcctattacccttgtacatggggctacttgtactaaatgcttgcttcactgaaatgattttagtgtaaaataatagaaatgaaaaaaaaaaaaaaaagaaaatatcaagttattgttaaaataaaggttaagcaagttagcaaccatgcatataatttcataaaaaaatacttccaaggaaatcattgatggtttaataaatttgggatatttttatgaacaaataatgtaatataaaattctgttataagaaataattaattaaaattaagtgagaagagaacaaaacaaatgactgtagaaccacctattttaaatatctgttccttaataatgccccagaacccacctgactccattgtttaacattttagttttattttcttaattcagactgaaaatgacccaataatcttttatgcatataatggtcactcaattttttttttttacaaaaatattattaaaaattaaaagtaacctaaaaccatcatgattcatgagtcataatgcaaaattattgacattaataattggttgttttgtcaagagtaaacgttgttgagaagaaaaaagaaagaaagaaagtgcacttaattttttttttttgaaaagcttaaaatataaatttaaataacaataaatggttgttcagtgttaccatgtgataattttttttttttttttttgacacagtaccatgtgataattaagtggtga

SEQ ID NO: 51353 - DNA, 1159 bp, Cannabis sativa
ttctgcttctgcaaacgcttacagttttatattttcttatatataactgacattttgtaaaaacacaatttttcaaatttgaaatatataatatatatcacaaatctttgagtggacttacatatcctgctaaaaaaataagaaagtgttattgataatatggtgcaaaaaaatttatgtaaaacatgaaacatatataattttgtatgaaatatgaacttaaatgaattatatacattatgaaatatgaaatatcttcaattatttattttttgagcttcaatcccacacgagcatctgatttataaaagaaaagaaaacaagttagtgtagataatcaggcttctaaactctctccactctttttagatagaatttattatttttaccgaatgagtgaggagctcgtggaccgttactctatatttataggtgagatactttatcaatatctgcgctatattaatcgtcagaatgttttgacaatcaaattagaaaataaattaattagtaaatcgtaatctgaacatatttagaatattcattcttatcacattttaatttgtgatcgtatacagtcagcgagataaaacaaaatcaatttaaatgattttgtaccaatattagaaatattctaacattctccaacttggtcagcatttagatttaccacttaaactcaacgttcctcattacataataaacatatgaatcatagcgataggtcctcattatgtgttgaataatatatctttcatgtattacaatataattcattatgtactttatgtggcagtgtacttaaacgaataaactataacccttatgtttattctgctcttttgaaaatttctaaaatataaaattaagatgtgcataaatataagaaatcatcaaaataagaattttattaataattttagttgtacaatcaaaaactgcataagtggtaactaaatctcatatttagtttctgatccttaaatttgtattgtgacatgtctttagtcaaagatatgcgatcttctaatttagtattgcattctttagtcaatgatatgcgatcttctaatttagtattgcattcttaatgacaaataatgcttctttattgctaaatacttaatgttgatatgctagattcgaccaatactctgtt

SEQ ID NO: 51354 - DNA, 3130 bp, Cannabis sativa
ctctatattctaccctgattgcacattcagtttggattctgttccaactgatttgttacctattttggtagcagagatagttatctaataaaaattatttccattcaaaaaaaaaggagcttattcttcgtatctaaacgattttgtcgtataatttctttcaagaaacggcatgtcgtgtaaggatctcgtttactttctcttctccactaacatagtaacatcgttggtaaaaatatggaaaaaaggaaaaagaaaaagaaacaaattgtataaatattgccgacattttggaacagtgagatgttctaagctctagattgttcaaacaacaatggtagctagctaagactcctgtacagtactgtatctattctctccttcatcatgggaagcttcagactttattcttcttcgacatttcatgtcaatgccatagctgttctttgcgtggtcggattttggatctcccaattcagatgtacagaagggttcgactctcttttacagctcccacaatatgggtcaccaacaactccactcagatccaaaagggttctttccctttgtgattttggtgccaagggagatggtattcataatgacacaaaggtactatttttgggtattgtttatttatttttttttaaacaattcgtttcctaacatattagttattgtatcaatcatttttaatgtttggttatagattttggtcaattgatctagcgttaaaaatacataaaacttactatccatgtggctgtggggtcacttaatcacattatcaaattaatatttaccacctactctaaacagttcaattgtttagggaattcctatattataagttattattatgatgagaattttaaagagttatttgtatacttttggtgttatgcattgtgtgccatcttttgttatgtgatcatttcatatttgatttcttcaggctttgataaaagcttgggagaaagcttgttcattttctgtgaagacaaccattgtagtccctgctagaaatacttacttaatttatcctatttatcttggagggccttgtcgttcaaaggtcactataagggtatgagccaatacttgtagtgtttcagaaagtcctcttctttcttcatatattttcttttcatattttgtcattactacttttattatatgtattgtatttctttttgtagatatctggaaccatcactgctccaaaagatcccaaagcctggtctggtttgaatgcacgtaaatggctttacttctatgaggtgaaccacctcaccattgaaggaggaggcacaatcaatgggatgggacatgaatggtggtctcggtcttgcaagcgcaacccaaaaaatgtattacaatcttgtatcctttcattcatgtttgttctacatattagtttttcatgacttgttctaagagattgttctttcttttcttgggggtgtttcagccatgtcgacatgctcctactgtaagtgttactatattgtttatgaacatgcagttttgttttaaatttcatttttcttatctgcacttcagctgagattacaatcttagattagtatcaattacaattcaggctattacattccacaaatgtaagaatctgaaagtgaaggacctaatgcttgttgatagccaacaaatgcacatggcattcactaactgtatccgggttttagcgtcatacctcaaactcgttgcacctggttctagtcctaacactgatgcagtccacattagctcatcaagaagcgttgagatcaaacacagcatattcaaaacaggtcagtgagagcatctccttcacaatgtcagcacaccctatgaactatatgccttgagtttgacattggcaataaaaaattctcttgtttaggtgatgactgcatttctattgttggtaattcttcacggattatgatacgtgatatttcctgtggcccaggtcatggggttaggtaaagtaaagggcttttcttttttaataaaagaagattatatatgtatcaaagatcaccttaactgactctaacctacatccatagtattggaagcttgggaaagtcaaagtcatggtcaaatgtgcatgatgtaacggtagatggggctttcttgtccaatactgaaaatgggttgaggattaaaacttggcaggtaagtttctgaaccaagctggcactctctaactcctagagcagttcattacggttgaatctaatatttttttttcaatgttttttaagggtgggagtggttttgcttcaaagattttattcaaaaacgtgttaatggagaatgtatcaaatccaattataatagatcaatattactgcgactctcagaaaccatgtcacaaccaggtaggaattttgtcagtggcagcttatgccatcagttccttctctcaaataataatgctaactaaagctaacaacactatatcttaacatgtttttggagaagcagactatggcggttaaagtgaagaacatatctttcattcacattaaagggacttctgctacagaggaagcaatacaatttacttgcagtgatgacttaccctgtgaaggattgtatttagaagatgttcaacttcaatcatgcattggcgaaacgaccaggtcctcttgttgggaggcatatggctcaagtttcggtttggttgatccaccagcttgtttttcagtctttgatggcttcatcaaagagccaggaatatcaaatagctattcacgcgtacagagcagttaatatagcttgccattttcagaaacctggccgagtgattatttatacaaccatattttgagaaggggagtttgttctcagatttttattctataattgttgtaaataatatttataagcattttgataaggatggcgatgtaaatatccaattgtttgttaataaaatcatacaactttttattttgctcagattcatgataactgataaagggccatttatcattgttgatagaaaagatacaaatgaggtaactagtaactacaaaaacatctttggtgggaaaatgcctcttttatatatcattatgattcaaataaacttatacaataatcccaattacaaaaatta

SEQ ID NO: 51355 - DNA, 1419 bp, Cannabis sativa
ggttgggacgagaaagaagagtactaaagggtctcagggaaccgtgcagacgggtcggaaggtgacatgtaaagattaaagtgaaactttttttttggtggaaagggatgatgatagtgatatgccaataataggaaaaaggcagtagtagtaatacacacactttttgttagcaatagaaaaaggctaatcttctttttgtgtcttttacatgcaaatacttgtagctttttgaagctaggttggtttggaagtataggttttgtttttctttttgaaattcaaatatgaaactatagcaattatgatgtaagtacttagaaattactcaaatttcatattttgtagtgagaaaaaaagtgttaagagttaatgaagttgttgaaagagtattgctataggccactgtgtcttataattcgttatttttatgatttgtagttttataattggttaataaattattataatttttattaaattaaaataagtgaaatttaatattaaattgtacgattataagtgtctaaaattatttatatgatattgccaaattatttttatatactacaaaaaagtgatcaacatgttgttacttaaatttaatttttattgtaaatttttgaattaaacatgcataaactagtgagattatacaaagttaactttgaatgatttcctagaattgatttaaactgaaaaaaagttcagtatttccctccaaacaaagctcaatatttactttgaaaatataaactaaatagcaaaataaacttaaaatactatttaatagtctttaatatttttgtttaatttgtctctttatcaatctatgtgtgtaatgaagaacttcaataataaaatgaattggttaattaagaccaaacgtgtcaaattaagattaattattttaatttttcttttgacaaaactaacattcattgctcatattattatttgtaaaaagaaataaaatttgaccttatttgatacaaaatccattataataaataattttagtaaatatttatttagtaaatctatcttaattaacaaataaataaataaataaataacaaagatataaaatccttaaaatgtccttaagaatgaagagtaattttgggttcctgatctaagtgggccctaagcacaaacctaacctgtttatgtttagaatcaggcgtgatcaatattcaacaatggaattactatattattttttattaattttttttagagagtaataatttataattttgaacaagtaagaatgaagagtaccaatcttttttaatggaaggattcaaaattgtacatttgaatggatttattatcttcttactttttttttttccttccaagaaaagtattactgtcaaccttctattacaatttctttgtctgtcaacctccata

SEQ ID NO: 51356 - DNA, 1941 bp, Cannabis sativa
  modified_base (483)..(509): a, c, t, g, unknown or other
ttttttttgtaaggagactaacaataaattttgattctcgattcaaatgctatttttcaattctattttcatatattcaaaattcttattctataaacttgctactaatatttttcaatcgatgaaacgaaaaggcaaactttaattcacgtatgaaaaatcaaactttcaatctcaataattaatagaaataacatcaaattttaagttctcaaaatctataaaaataaataaataaaaacagattttataaacacaaaatcaaacattagaacctcagtaaaacactaaaactcaaacaaacgcacacaataaaatttgaacctaaaacttaacacacacatcagaataaaaattaaaccataaatgaggatttatgttactatttttcaaatttcagtattttattagcaacaaatttaatatattaattatttacgacacaaattttttaatagtaaaattaaaattttaatataattnnnnnnnnnnnnnnnnnnnnnnnnnnntacataatttattttttatatataattttaaatatttatatgtccggcgcaaagcgcgggatgtttactaattataattaaagaaatgttaaaaataattaataatatttttttattaatgtaattaaatattagattttatatattttaatttaataattatttgattaattattcgcaagatagttatctggtattagtatatataagtattgagtaatttgtcattcattatgtaaccgtattgtttccataccataagcagagcttagcgtgagcgttacaacacataggattggattggattggtttggtgtgtatgtacgtaggtgtagtaattacctttaaaaaaaaataactatgatatagacaaaaggacatataagtttactttgtaatttatgtataagtaataagatactatcaatagggaaatctatgtcatcctattaatatatattgtgactcagacacagtgtatgtgtacatgagacagtagtaaacaatattatcatgcacactgatagcttttggcattaattaaccattaatgaggtcatgactatttgtatatccgaaagcaataagataagaacacataccaataataaactaattattaaatcaaagccaatacgtttcttttggtattaaaaaaaataatatgtccacctacccacttaattcaattcagttatgtacatatatacttgtttagcctttcaccttcctatatctcaattaggggtgggcatgaattgatctaattcaataagaattgaccgatctaataataattgaccgttaaatattagatatctaattgtgattagattggattggatattattttcaaatatccaattggatcggatcggatgttagatgaggtgcctaaaaatccaatacatctaacatctaatcaaattaattagtattttcatttagtttaaatgagtagttatattttgtatgattatagtaaaatctatatgtttatatgaaaattaaaattatactctttttttcttgaattggatggatccagtctaatccaatacatactggacctaaaatattagatgcattcgattcgatccaaaaaatattaagtctaatatattgagtaaacctaaattaaactaataaatatatataaaattcatctaatggatagaaccgatccaatccaatggatgttggattgattggatgacggaaattaattggatttgatcagatggtaaaatctaacaattaattggatttgatcggatggtaaaatctaacatccaatatataattggaacgaggaacgaatctgaatagatctacaaaaatattaaatgtgatccattccaatgaacaccaatattcattaaagttgtacaaaaatagagaaaaaaaacttcttaaataataataataataa

SEQ ID NO: 51357 - DNA, 812 bp, Cannabis sativa
aaacactcttttaagggcaatgctaaaatttagaggaggctcgatactgccacatgatttttcatttcttgtgttcctacaatataaaaaaaaattacataatcggttaaataaaaaaatacaattgaaaaaactaacaaaaaatagttacagaaaaattatacatactttttttgttcattaatcgatccatgcaatgtactcttggtacccagtggagttaatactaataatctctttcacaaaatgaaatgattttcctatgatcaacttctacattaattgtcattttaattcaccttcttttgtttatcttttggttatgaagaaccaaaatcattaatatgtagctgagaaagattatcacctattaaaaccaacatcatttttcatccatttttgaacattattcatgggtaacatatataccttcataattattgttgtcaaccatattcaaaaagatcattgatcaacatcaatattatcatatgaaaacttgtatacccctcttgtttatctttgaaaactccagcaaaaaccttttgaacaaaaaaaaaacataataaatactagactaacaaaaataataaatcactttctcaaaacagacaattgcaactcacttgacccatcatcaaaatcaaatactacatttttatgcaagacctaaacaaaaaacaaacataataagatttgatacaaaaacagcataagcatataactattaataagacacataatcataacagaaaaaaaaaaaaaaacactacaaattaaatataaggaaaaaaaataaaaaaaaaccatta

SEQ ID NO: 51358 - DNA, 757 bp, Cannabis sativa
tatgtggatatatttggctttgggagtattttggtcatctgacaatttaatgtattattcaacaaaagtaatttttggaaattagaagaaaccaaattttgattttgaacctcttggccgaccctctctctctcccttaatctcttcactttaatttcttcgattttgaaagaaaaaaattgattggagtggattttcgagagattactagcttgaagcttgtggattgtggtaaagcttctaaaccctttttgttgatattaaattcttataattgaatactctttcaattggtttttgatgatgttcatgattttcttgaagtattgatgcatgttgtgatcttaaattaaaattttgatgattttagtggattcaagcttttggggctatatagcttgtatgtagatggttttgtatgattttagggttgtttcacatgttgaatctctgggtttaaagctgggatttctggtttcctttgatggtttgaaggctttgaaattcaagcttaaatcatgggtaatgtgtagattatgttcatcctttgggtatgttgtgaaagtgattttaatctttgttttggcttagaattgttgtgtaaggtatgagagatataaaatttgagtttgtgaatgggtttgtttgagttttggtatgaaaaatttggcatttttataccttgaaaatttttttactgggtttttcgaaccaagtggccgcggctggattttcggtcaacgcgaccaaaacctat

SEQ ID NO: 51359 - DNA, 1359 bp, Cannabis sativa
tgttagtaactggtccaattcgagacggacaaatctcctcagcaatagtttgctatttcattcaatgcataaaaagcaaattacacaatgttctcactaatatattctttaccaaaacacagaaattgcaaaaaaagaaatcagctcctgtagtgcaagttggttagcctcggggcttgtcagcttctaacggccattatgtaatcttggagccatttcggtttcgagcgcaccctttgcccacgtgtacccttttccagcttctcctcttgctccattccttttccttcagctgtatcggcttggatgagttctgttgctgcatttaactcttcttcttggctgagccattttgttatacccttctctactcccttgggctctaaataaattggacttttcaattgggccaagctatcaataatctacaatattattacttgtataaaatacacaagccaaaataataaccaggttgatcatgaaggcatcaatctcagcatctggtactctagacaactctaccagcaagttgtaacttgttccaattcccaagcactgccccaaaaagccaatgtttcacatactgtcatctcatcataatgaaggttaattatgttgactaatatgagaagagaatagcacaaacccttaaatcataatcaagttttgccgcaaatgcttttagcattattgtttttccagatccaagaggaccaaaaagtaaagtcaacctgaaaataaataaatttgagttatatatagcatttgaaaataacatactttgaaggctttgctataccactcatggagtatcttaaccactattttctttgatgaatttcattactcttcaattcactaaaaattgtccatatgtttattttgtaccactcaccactccaccttttggggttccattcaaacaacttcaacaaatcctaaaagcttaagcttattctggattcgtcccaaccaaatctttatttttcaaataaataaaacaaaaataattggtaaaataataataactaagaagaaatgaaagatcgatttgatgatattttttttttgatactttgggcagagagagaaagagaacaagagagagttattgatattgaccagttaaaagggtaaaattaccaatacttaatttttaaaaggcaaaaatgtctcaaaaattatcacttcattatgatacttttataattctaggagcccaaattatctgattgaataaatccttctctatccgttgcgggtcgaggactccttctccttctccttccccttcttcaaactccgatttgtattgttcatagagaaatctctgatcaacgatagaacaagatccat

SEQ ID NO: 51360 - DNA, 529 bp, Cannabis sativa
gcaaaattggatttggaggaggtcgaatctgaggccttgtattggaaaaattcaataatctgtattgtgctaagggctaacccaccattcagggtttttgaaggatttgtaaaaagagtttgggggaatttgggaatcgagaggatagctagaatgaactcaggttttactttagttacatttcgagatgaagagacaagggatttaatcttggaaacaggggtcattcattttgataaaaaacctgtagttctaagaccctggactatggatatggatgctgctaggatggtgaaatctgtccctgtatgggtgagattgaatggtcttgggttacaatattgggggaaaaatacattgagtgctcttgtgagtactataggcaaaccaataatggttgataaggtcactttgagtaggacaatgatcaaatatgctagagttttggtagatatggagatttctgattgtccaccaaaaacaatagcttatgttaatgaaagacagcagttagtggaacaaatggttg

SEQ ID NO: 51361 - DNA, 715 bp, Cannabis sativa
  modified_base (465)..(466): a, c, t, g, unknown or other
gtgtacaatgtcaatctatttggcatttaacataagaaagaaaaggccaccttaaataacaaaatagaagcaaagattaacatattttgtccccaaattaaaaaattagatttgagagttaaatgtggcaatacataaatattaagttgtataatattgaataaaacaacattgttacaaataattaatatatgatatttgttttaattttggtatgggagagcagtggattgtttgggaaagagttgttgcataacacaaatttaataagttggtctctcatgttcaaggcattcttttttttggtggctgtattatgcattgcttcttttacaactaccatcaatcagatttacgatcttcacattgacaggtatcacataattctaatttcaatttttttatataacaatctaaattctacttattaaaagaaatttgaatagatttcaaaaaaaaaaaaannaaaaaaaaaagaaagaaattatatgcattttatgacttttttttttttgactgtgtttttaattattaatttgagttaataattttaggaatatttaattatacttgttatgctattgaacttctagtaggataacaattataatttttgtgggtcataaataaagttgggttatttgtttattaaaagaatgtgtaagattttttttagatttataaaaataagtgcactactaatctccctagctac

SEQ ID NO: 51362 - DNA, 1138 bp, Cannabis sativa
ctcaggtgatatttggcataatggtgcctaataatgctcttaattttaaccaaaataaaattaaataaaaagctaaactgtaatgctcttaattttgacttcattggcagaatccaacttgtaatctaataagcttgacagcattgttaaagaccaaaataaccttcatcatatctaccctttcgcataaagtgaatgttcaatgaataagggtaatatggtaatatgacatgaaagcccgacaccacgaaagaaatatgaccgttggaagagatcgacagaagaaaacgaaaacgcttcaaatcattaaatactttcaattatatcccttactttctttgaattatataccaaatctgaaattcttcactttagtaaactttccatatgagaaacgctctttctctctcttctttctctctctaacaagctaagaaaccccaaaaaggaaagaagaagaagaaagcagaaaaaaaggtggaagctttgttgttgttgttgttgtagttagtttcgttaatggcgaagcgtggtgctgaggagatgattaatgaagctgtaacagcagaaaaagaggctcacccatatgcatttcatgtgtctggacctcgaaatgtgtcttctcttaattggagagagcttataaattctagttggtcagtacccatttcatcattttctttaatcgttatatatcaatggtgtttttattttatgtttggatttggttaattgggcaaataagaacaagttcattgattttttcaatctaactcttgggtttgttccctaattgaaagtttgtgaagaaaggatcgagaattattaagatccaaatgtgtaaactatgtatggcatgaaatgggaatctgatactgatagtttaataaatgttaatactaaattttagtgatttgaaatattgatcgtgtgttgaattgagtctatcatgcaaatttgggtttaatgaacattccctctttttttttgatgaatcattcatggaagttaactcggggattgatttcttgcaattttacttggaactttcctttttcgtttgtttgtgaatattgactaagtcctattaagtgttgcattgttagtggaacaaattagtactgtgattatcatttgg

SEQ ID NO: 51363 - DNA, 670 bp, Cannabis sativa
ttgttttcataatctttattattgttgtgtgacgaaactagttgtttgatgaagaaaccactttcttggtgatttttctggtaattttgctagcgacaatgtcgattctgacgaatttttcaatgctagcagtaactttggcaacttttccgataccggcaactactccggttattttttcggcacgaacagcaaactctagaataattgtcaaaattagcattattgctggtaaaatcaccaataaagaaaccagtttcttcataaatacatatttgaagagtttatatgttgaaaacataccaaaatttaaaataatattttattttttgccatagtttgaaagtaagaatttgtcaaataagtgtgtacacattttaaacttatagatctcaacaaaaaaaaaaacaataattgcaataattgaatatctacataaaaaaaattaaatatatattgcaataattgcaagtaaatagtatcgagcaaacatattatttcataaaaatcatgatttttaagccccattgagctagatggcagatttaattttgaaatctaattgaattggatcagatgatgatttttcaaattcaatcactaattagattgaatcgaattatagaaaaaatattagattagatcgtatgttcaccttagtactaacatc

SEQ ID NO: 51364 - DNA, 870 bp, Cannabis sativa
cttatcaggactcattgagtgaagggtatccgtgacttctgtggcagtaaaagggcggagcagtgagcagttcattgcttcagtaacagtagtcggaatagcatttaatacttgatgcaaagcctcttcattggtgcctgaagcagagaataaatcaccaaaaaaaaagagcagataatgtcggtcaatccttgtttcgaagtgactgcaacaccaacagtattgtgcaacattttaattgtgttattggactttcttgaagacgcataagcatgaaaaaatttagtgttctcatctccactttgaagccaatctattcttgatctttgctgccaatatacctcctcttgtgacagcaattcatctaaagtgtcctccatttttttcaaattacacattgatgcattggtttgggtctgttgattattcagtatttcaacttctttatgagctgctgctattttctttttaaagttgccgaatttgttgtggtgccactgttgtaaagaactggaacaagcttctaaattattgcagaagttatcaattaaagtaccttctaaatttgatttccaattctgatgaatgatatcagttgctgcagaatcagatagccaaatcttttcaaacctgaaccttgaaattcttttaatgtcatgattttgggctgccaagggaataacttcaacagagattgccctatgatccgatttgtaatagtccagatgctttgttgtaatcagctgaaaggtgttgtgccattgatcattgataaaacaccaatcaagcctttctttgattgcattgacattgtggcgccctttaatccaagtgaaaggatcaccttcaaaaggttgctcataaaggtag

SEQ ID NO: 51365 - DNA, 984 bp, Cannabis sativa
tttttatttttaaaaaatagtaataaaataagaataataattacaaggtagtatactcattttttgaccatggaaattgatataaagagtcaaaattgaatttcatatacattattaattatttattattatatttttataaaaatcaaaaagtggttacaagacctatacctagctcctctgcaagctcatcccatacaggaagaagtgtaagcacaactaagaagattgccactgcaacaaaacctttcctccatgtcccaacctctgttacatcattcaagcaaggcttctctgcatccctctgttcatttattaatcttacaataatcaattaatcaagttttcaaattttttattaagtaaatactattttggaccccgtgtttcgaaaaatttaatgattgaatcctaagttttgttaaatgacaattcgaaccctgtgtttttcaaaatggtacgtaatagtttccaacataattttcgtcaaattaaaacttaataataatctaactttgaactgttctgacccgattggtcacattatttgtatttgtttctgctaaaaactaactttttcaaaacacggggtctgaaatagtatttacctttttctattttacacacatttgtctcaatttataattttatgtacctgacagagaagcacatacaatccccatggaagtgatagaggtccaccaagcttttgcaaccagaagaaaaagaacagatatttagcaagaaatggtatatttggtgttattagtccctgaattatactacttattacagtttggtcctcaaagttacaatctttatactaaacttctaattttctaacaattaagtatttagtaaagtggaattgattaataaaatattaaaagttttaagggacttaactgctaaaaatgaaaacttgaaagaccaaagtataataagtagagtataattaagggactaatggaattaaatactcaa

SEQ ID NO: 51366 - DNA, 1199 bp, Cannabis sativa
gtaaaataatttccaacagtgctgaccagcacacacgatctcttccaaatctccaacaatgacaatattggacaagcgcaacaataatggctttggccaacataatggcaaaaaaggaaaattcaatgattctcgtaagccatgaagtctaagggagaatgaggaggaggagtgtgcatgctctcctaccaaaactcctaatgcaatgcatgccaacttgccatattgacaggtgtcaccaaaacctaaagcacttagctttcaagctcggccaatataaggccacctgtcaaccttgcatggccttaaaaggccaagctcttgccagcttcatggctaaatataaaagaatatctcgctaaatccctcaagattcgagagaaaagtaagagcagaagaagcaagagcaagagcaagacaactcaacttagaaggttcattgaccacccgcttgatgaaggcatggccctcagggcacctgggggcaatggctggacgaagcaataaaggtcaatttcaaagcttctaacaacgaggctaaatatgaaggtctaattactggcctcaagctagaacacaaagtgtgggttgaataccaagacatacaccacaactctcaactaattgtaggtcatgtcctaggtgaatatgcaactcaatgcgaaaaatgatggcatatttgagctaatttcaatactagttaagtcagcttaaaggctatactaaaaggcaattccctaaagacaatacaacagttgatgcactcattcgacttgccagtaataccttggcagccaaggaaaacttggtacccgctcagtcctttaaagagctaagcatcctgatttcaaaagaaatagacatgctggacaactatccaatatgaatgacacccatagcagcatgcttccaaacaaaaaccttgccagaaagtaggtatgaggaggatagttgctaggtgtctaatcctagacagcgtagcacacagacgtggtatcccaatactacctctaagatgtgttatcaagtaaaaagttgaagagctattgataggagtgcataaaggctctacggaaatcatgttggggggcaaagccgactgagtgtagatgggatcaaactgtaacatcaacctggcatccaaagggctagccaataatggcctcagtaggctagccgaccatggaatcaaaaactct

SEQ ID NO: 51367 - DNA, 597 bp, Cannabis sativa
tgatcctcaacctcttagattttaatgtccctagctgttgttttagtatccaccttaggaggttcttttcattcgacaatggccatcacaaagagccgagaaaagtatgggtccttatctaaacctttcgtataggtttgcttggttttaaccattactttatgcttgggaggcaggtttggttcaaaggtatgcctcgcaacaatggcagtaatttttgctagtttggagtgtttcttcaaaggctctggatgaccttctagcaatgtgtcaagcacgttagcccagaccttataagtccaagtagagggtaggtaatgcctccaaaacatttgttcaattcccaaatgaactagatgtatccttctctgcttatttcgacaaggtaatgatgatgttgtaccacagccttgggagattccaacgagtcactcataacctctcactcatcatagctcaaagtggatgagttttcactcattgaagatgagtctgcacggagcctaggctgggtctcgtaaagaagacgaagaaggtcactatcaatccagtggttaccttcctagtattccccagggttcatctacaaaaaaagga

SEQ ID NO: 51368 - DNA, 1212 bp, Cannabis sativa
atactaaaaaatacaaacataaattataaattataaaatatttactaaaaatataagataaaatactaaacagagtctccgtcggggcggagagtgtgattcccgtccccgccatgttccccatttagacagggaatccccgctccagagcaggtccctgcaaggccatccccgtagaagaaatatgcatccctaatactaattactacgtgcctcttactcttagcatttctgataatattaatacgataattaataaaatttaatggtgcacaatttcaaatattcgacttttagggataaattgtgatctttatgtaatactttttaatatgaacctttgaaataataaagttcaatattcattcactttgaattattaattcttacgtagatacatatgtgtttattttattgaagaatatgtaatacgtaacaaattaagattatttcaaaagttgcgttgcgtagaaaatataccatacatttaaaatggaaattaaatgtggaaaaaaatgattctccttaatttgaaaattattcatgtatctatatataatattctatctatttgtactagttcatgagttttgacctaaatacaaataaaaataaaattacaagaaagaaatatgaaataagggtaactaattatgttttcgtcatttaaaaaacatgataacctaattttttataggctaataaagaattttttctcccgaactttgacatgtaccaaatcatgcccttgaattttttcggtcgttaaaaactctccctgaactattgagattgttagattgaaggacttttgtctaatcatacaaagcttgtccacttcttttaccatctttaatatgaatatactcatccaataacttaagatactaataactatcaagttaataagctgagttttttcagcataggagagaggtttacttgcccatgtactcagtttttgccttattttacttagagaaatgctaaagggcaccagtgcctagcactcagctcctatgtgtcaatatcgttattggtccaactaagtatcgggtcctatataattcaatataatagcttttagggagtatcgctaaccaatcgcaacacgacatgtcaagaaggtgttaggcaccactagtgcctaataacaataattttttacttattatagctttacagtcttcgtatcttcacttagtaggcctc

SEQ ID NO: 51369 - DNA, 1446 bp, Cannabis sativa
  modified_base (1400)..(1420): a, c, t, g, unknown or other
aacttttttagtcgttaaaaattcgcctatttaaattgttagatttaaaaaattttgtctaatttcattcaattttactgtttcaatgattgtttgtgtactacattatgctctccagactttgatatttatcaaatcatgtcgctcaaactttgatatactaaatcatacctctaaactttcatacatgttagaatagttttactaaaattagacaaaaaattattaaatttaacatctcaatagtttaaggagaattttcaagagctaaaaatatttaaggaatataatttaatacatgtcgaaattgaaagaaaaaaaatcctaattaaccaataataaaaatatgctaactatcatgagatgaaaaatgaaaatgaggattggtgtagaagaaagcataaatggagaagataaataactatgatatatatttctttcagtgcactcaatatataattccattttttttttaaaaaaaaaaaaaaaactacagaatatgccacgttgagtactattttagttatagcaaagcttgcaaaacataatagaaaaaatattttcacttttttagcacatgcatatataaatgtatgctttttatttacatcactgaaaatacatatttcttttttcttttttttttttttgaacacctgaaaatacatatttcaaaagctattaatttttaacttttcctctccagaacaccaaaccaaactcttgcacatactttacaaaaataaatcaaaatattttaaaataaaacaaaattccctcacctataaaagaaataaagaaaaatatactaaagtagttgcatatctttgcactactcgatattcctttttttatttcaattttttacaaattcatttattccttcaccctatttaaattatttgttattattattgatgatagtgtagttttataattaatgtatgacataactttatttatatatttataaaagaaattgagagtatgttgtttgactaaaatatatgtatgggaaaataggtggaaaattgaacaatagaaacattttttttagtataaaaattactataataagacatatattcctatttatattaattgtcttgaattaatattaaattttaaaaaatattagcatattttttgatatttttattatataataatatgtagctaaaatttaaaaatatttaagatatttacggcataaatattttatcattttaattttatatacttgttgatctcgcttttagccaacgacagtgagtgtaatttaataagcgacaagtagtttataacgattgatatatgataaagtaatataaagacataggaattttatagaggttgagcgtcgagcagtttggtaatagttaggggtgttcatccgatcnnnnnnnnnnnnnnnnnnnnnaacaacatccaatccgcactaagtgc

SEQ ID NO: 51370 - DNA, 1721 bp, Cannabis sativa
actttgcgaggaatttttttccctttactgttctcagaactaacccagcaactactttcgcaaactggacaagcctccttagatacattctcattgtaaaacaagcaatagttgtattgacagacatggatagactcataacccaatcctaatttcttcaatctcttcttcccctcgtagtacgttgatagaattttattttcctttgaaatacaaactttaacaactttaataattcatcaaatatgttgttggggatgtttcctctaacttttagatgcaataacttcgcaaagagttgagagacaaaatctaatcacaaccaagatagaattgagctttaattttctcaaataagtcatcaaaatgttttttgtggttggtccctcttatgcattctctattgtcgtaggaaggaagtcttgcagaatagggatcatttcatcctcttcataatccccaacctcttcatcatcaacaacatcctctggctcccagtgataagtccacttctcatatcatttcataaaatctcgatcaaatatgtgtgctctcacattatctaatttttcaaagctagtaattatacatctcatataaaggcatctaattcttctattggaatccttatattctgacgccgtcgctaaaaaagattgtagtccattctaaaattcaggacaaccaagattcctaattttggtccaagacttattgattgcgaccattacagtgaaggcgacaaatgaaatgttaaaagttttaatcatttgtaatgttttatgaatgttttataaaattgttttgatttcttagttttgatcactttggggtccataacgcaaggtaaatctatagttttgttattggaaataaagtgtagaacacgtttcttttagattttatttgtaagtatactaaagctatgacatatttgtaagtatactaaagcaatggtatattcttttcaactatttttttttattaactatatttgtaaaataatatgaatattttatgaaagatgataatattatttattattttatgtaagaccataattttaaagtttgattattatttgatgatatttaatattaattacatttaagttatttatacttaatttgaaaaaatttaagttatcttttattaatattactaagtaaatgaaatcaatcttactaattttattattttgaataagttaaaaaaatgtaaacaaattaatttttcatttctaatataattttttttatttaataaaaatattgttaatttgtttttttaaaaaaatagataacagttagtcttatttattatataaattttattttttattttaatttttaatatacaagttgttaattttaaacttattttaaaaaaatatcaaattactaacattatttttcaaaataaaataaaaaataaaacaaccaatttattttttaaaaagaaatatatgttttattattaataaaatttaaattataagtaaaaatttaaattaattttttatttaactaatgaaatttaatatttatcttcataaaaaaattattctaaatcgtactattattttttgattattttcattatactaaatattttaaaattttattatgaaaaaaatatattacttaaattttaataacatatgttttttaacatacccaaaagaatatatagggatatgattttgtcccgtgatgtacttt

SEQ ID NO: 51371 - DNA, 2116 bp, Cannabis sativa
actaaaacataagggggttttgccacaaaaaaataaaataaaagggttaagtgtataaaaattaaaacataagggagttttgccgcaaattgctctatcatttatatgtatatttttttgatttgaatcatttttttattatatatacttttttttaaacaaacaagacctggaaccaaagaaataaaataggttacaaggatctaaagaagacttgaaacacaattgttttaaattagttcttcatcagttcctaatgctcttcgtgggaggtcgtgcaccataaaattattgcttctgggtgtaaaattaattgatgcattaggaaaggaggacaaagagtggatgatcttccaaatcaaactagagagggctaagagatccttttgctgcttcaaaatttttgagacaaggacttgatagtctgtgacaataatatcaatagggaaatgaaccgcctggcaccaactcaaagccctaagaagagcctctgcttctgcatagataagtggaaggcctgaggttgctgaagataagaaacttgcaattatgttgttttgtgagtcttgaactacaataccataaccatgcttgttatcctggctcttaaccgtagcatccatgctcaatttatacattctaggggaaggaagtagagtgtcctctcccaagtggcagtcaactcctctttttgaaacaaattaaaacctcttaatagaaattccttaatgtcacaagctttattattatgaaaaaaaaaaaagtggagaaatgatttgtttccaatacttacctgccctagaacagtgtaacaaagagtgagtgttagaatcaatttggttaaaacaaatagagtagtaaaggttataaaaaattttcctacaaacttaagtttagagggcaggaagtagttaaaagccttccaaataaaatgtttaatcttaggaggaacattggaggaccaaacagacttccaccaaggcttgtaagtgtcaggattggaggaactgagattggagtgagaggaattggctaagtggtaagctgagctaacagagaaggtgccaaaaggattatgcccccaaatgagacagtccttatttaaagggtcaattggtactttaagaatcgtgttaagaaagtccgaatgaaaataattattgagcttattagaatttctagcacaatcctccctgataaaataagaaaccatgttttaaggaggaggataatcatttttaaaagtaatagagctataattgggaatcaagttggggctaatgatctgaacagaattgccatcccccactttccaaactaaacccttagacagaatgtccctaccccagaggatacttctccaacaaaaggaagaataatgaccaacagaagcttgaaggaaatcattatttttaaagtatttagcttttaagggggaagccacaagggaatcagggttagtgtagatgcgccaagcctatttagcaagcataacttgattgtggtgaataatatccctaaaaccaagaccaccataaacttagaatgacaaacatgagtccattttttctaatgaatcttatgatgcttgttatccaaagattcccaccaaaagttagcaatgggcggtcttcctaaatgcttacaaatggagaggggaagcctatagtaggacatcgtatatgaaggaatagcttggatcattacttgtaaacaaaatctctttatcagctttagaaaaaagtttttgattccagacagatagtttactgcaggctttttaaagaagaaaaagaaactaacattttttagaacgagagaaacattggaaaacacctaagtatttatcatgaatgaaatgtttatccaccatattaagagaattcagaaaagaaattttatctacaagattagtgttaggggagaagagaatagaagatttagcaagattaacagtttgaccatcgactttattataaatggtaaggatatccttaatagtattacagccagggccgaccggccctgagggtaggcgggctaggcgtgcgcctcgggcccccaaacgcttagggccccaaaattgtgaaaaaaaatattaatatatagattaaat

SEQ ID NO: 51372 - DNA, 761 bp, Cannabis sativa
gcaggacgaaaagataaggtgattcgtccatcaatggtaagaaagcattacaagttgatgaaggaatcaggtgtagatgtttcgtacaacgaattcgagtacgctcatttggacttcacattctctcatcgcgaagaactcttggcttatgtcatgtctcgcttgcttctcgtggaaccaactactctttcgcgacaatctagtcttaaagctttaaagctaaagaaaaaagaactggttaagaatgattccaaggttgaagaagaatcgacaagccagtaatcatatattgcaatcccggaaatggcgatgcccttccattttttttttggtttcaggaatcggcattggcattgtactgaaaaggtacggattggtgttatagattaatacgtatagctttgtatagcggttcggtcatgttccccaccagttttttgtggggtcattgtgctgaagttttatttgagtgaagctcagctcaaattggtatataaaatatagaatggtttgtaagagtaagtagttttatgaacttaatactgtaatttgtaacagatgttgtaactttgtagttttatgtatttcaacgtgtttcggctgccataggaattgcttgtgttttttcttggttgttgtatcaactttcaaaaaaataaaaataaataaaaaatatctgtaaataatttaggtggcgtttggtaatacttttttaataaattttctgtttttaaaagtggaaaagtgaaaatatttttcaa

SEQ ID NO: 51373 - DNA, 785 bp, Cannabis sativa
caaatacatttgtaaagtacaataacagaacaaaattgtgtccctatatatattcatcactactttaataaattataagacaaaatggtatttcataaatgactaattttttaatttaccatgaggaaactatatatatcaaagaagatatgatagaagtcactttcatatataacaagtaaaaatctctatctcctatataagaagaataaagaaaatgtcactttcaagagttcatcatcattcatagaattatgatcatctaatattttctacggttgaatttactaattaatgcttatgtctacgtagtagagtagtggatatccaacaaatacatatatctatgaaaatattaaatttgatttaatataattaatttctagaattttcttgttgctactaaagtttttagactattcttatatttactacaacatctagagttttcttatttatttgagtactcttgaattttgtagaattatctttcacatgtattaggagagagccttatgtagaacaatgtagaagcacgactacaatatgggcttttagaggctgttttttcaacccattttttaaaaaggaaagctaaagggtgtgaaaatactcacatagtatgaaattgacatttagagacagtttttcaataaaaattgtaagtatagaatttatatatagcctatgtcgtcgattgggggttggaaaatattcagagttttttattaaccctatggcgtcagttattgggtattaaatgacgccataggtgcacacgtgtc

SEQ ID NO: 51374 - DNA, 735 bp, Cannabis sativa
tcttgttgaattatttttgtaatttttttcaagtttttattctattatataaatttttccttatactagtcatgctggcctaataaattgtaaacatcgactatagtattctactatgttgtgccatcaagtttaaactttgtataaattgtaattaaagatttaatttttggattcatggcactaaattatttaatgtaaattctttagactataaataatttcatctttaagaagaataacttttagctaacttcaaataattataaaattttgcctctgcatgatttgagtttaaactgatgtactaattaagcgaaaatatagcaaatgatcaatgattgataataatgacaaaaaaaatatttgcattttttttataactatttgcattattgtttttataaaaagaaagaaagagaaaaattataaaatacggtggtggggcatattagtggagttggtactaaccccaaagcctaataaaattttcattaatttgattgagtttgaatatgattgtaacacaattttaaatttatgaaagcgaagctaatagtcaagtttttcttgaaaaaaaaaaaaaaaagctaatagacaaatcgtacacgcagttacggatccaaaaattttattttgtggaggcttatttattattaaaaaatatttatacatatattataattactcttactaaatttatttaatttcgtgggggcttttttattattttag

SEQ ID NO: 51375 - DNA, 825 bp, Cannabis sativa
attttatgaccaaaataaaacatttttggtaccattaaatttgctagttctatcccctttttcttcctaaaagactttccagattaagaaatacttcaattcaactaaagattcttattctccatatataacatgattctggattaatattgaaaatatttgggggattaattaagtcatgttgcaagataaagtaagtgttctgtggaagtcaacttgataatctaaaagaacccaaataaatatgtcaatggtatggtggcaatactaaaattttcaaatgcgtatccatcttttttttttttaattcttaatttcttattcgttctaaattattttataagtctacttagaaattgagacttctagtgaatagtgataatattgtgtaagactcaatattaaatgtgaagtactgaatattaaattgtgcttaacactttttgatacgccccttaccatttgttttgtaggaacaaggagagattgaaaaagactttgcttctgatgacactgcatcagtactaaggaaactttatacatcttttggatcaacacctttaatcataccaaaagaaaaagatggaggattcaagagtataaaagctccagatacattaccctcttggatttctgaagaagtcatcaattactatgccaataagttcaaccagacaggctttactggaggattgaactattatcgagctttcaacttgtagcattctttctttatttcctattattgaatttgaaattagttcattaacatctatgcttaatggttcttgttaatccaatgctcttaaagactttggagttaaa

SEQ ID NO: 51376 - DNA, 1005 bp, Cannabis sativa
tgcattgggttctgcttatccgattctaattctgtctcgagcgttcgtctagttttttatagtaattgagagctatcaagtcagatgtcaaatcacaacttcatattttcactttttaagaaaagtgactcacttgcaaattgggcagtttcgagtctcctgatttcgcgaaataacaacacctctgagaactaatgaacagcttcaccaaaacacagaatcaaactaagtgatgtcaaaatatcacttacgcataaaaaaaaaaaacatccccaacacgtttttctactcacctagcgtccagttgacatcatatgtgaacttgggtgctagatgtcaacttaggctctggtccgagaacaaccttcaataaaacagtcataactcactcaatattgattcgatgacgcacttcaacttgagtttcgaagctatttcagtgatctatcaagtcatgtatcatacttaatctaatcacaattatgaagttcttaactctaatttcgtcctcaagagggttacgaatttaagctaccacttacccgaagtgggtcctgcgaacgcgactcaagttctagaaattgaagaccgacctccaaagtcaattttactgtatcatcattggtcaaaaatagcctaaatgtatttttctatatattttggaatattttattattatttaatagaacctccttccctataaaaggagagctcatctagcacttttttcatattcaaaaaagtgtccataaggtcagagcatctctctctagaagttagagctttcagacaatcaattttttggtaattctcgtgaaaaataaaaattcaaaataaacgaaactccattactaacgcgacatggggagtgaatataaattcttgtgtttgctctctattttacttagttatttctagctttcatctcttctatacatacgaccgagttgatcatttttcagcatcaacacatatactaaaaattatataaacattcaactcatt

SEQ ID NO: 51377 - DNA, 1052 bp, Cannabis sativa
tttttccctagttgaagaaccctaattctcagttcttgtcctaagaattcaatttctaaccctttgaagaaggggtaatgttctatttatagaggagaaccgagtatgggtatacccagaccagtagagtttttaggtgtcaactaagccctctgatgggtgaaaatacaatatatatttactttaggccactgaggtgaggcctaattcacgaggtgaagattttccgtacaagtgaggaccatttgaggattccaagtgtcgtgcacaaccacgtctataccgagaatgtcagagaatatggtattggactaaaatgtgattttcttttggtagcgtgcgcactccgtgagtccaaagtagaggaaaaactctaacactctgggacttggtgtctagagggttttgcgtagggtgacgttcagaaaccttccaagtgccttttcaattgcccatatttggatagccccatgagggtatcaagactggtcctgatggactcttcgtcttcaagaccgaacaacacctcctggatcgagatgtccgaccttgttaggttggtgagctagaatcacatccgaatctagagttgtagtatgaattcgtaaacaagctagatatcatccttattgggcccagatttgggcctaccttgatggataataggctttagaattatacacatcatcactctgaaaataaggataaaaataagtcacagtataaatagaccccatcccggattatcacatcattgtaaatatgatgtactaataaatcatgggactaaatataattgaagcatataatcacaaatttttttcactatgaagattttactatgattttgaataattgtatgttctgaatatagtaaaatttagatattaaacatataatcatgtaaacataagcatgtgaataaagcaattgactaagttgaaagtgatttgtatttctatattgacaaataaatgagatcacatagattaggttttattaggacataaaatcctaacaataactactttaaatacaaacacagaacaatt

SEQ ID NO: 51378 - DNA, 995 bp, Cannabis sativa
tatccaaacgtatatatacataagaaaagtaaatgatagtgatgaattattagtattatatattccgtcatgcatgtatagatataaatagttgagcacttgtaaccgatcccaagtagaagcttttataatttgtataataatgaaaatttcaacacataataattaaattcatcaacatattgatgatgagatctcagaaaggggagagttgcttcctggagaagaagaagccggaaggcttggcgaggggcaacaaggctagcatcacgggactttcagcaccttcggcagcaaccaactgcccagtattgcaagtgatatcagttttgacatagccagggcacacacagttaacgcacatttgagggtatttcttcgccaaaatccttgtgtacgcgttcagcgaagctttcgaaactttgtaccccgaaatctctgtaggccacttcttggcttctaacttaccttgtttgaaatcattcagaaactcactcactacctcatctatttgctcttctcttagcttatcaacatcgctcagcatgtttttggcccattcattcggtatgtactgtcattacaaattaattaagaaaaactaattatatgaacaaagacttttgaaaactatatatgcagttattataattatataaatatgatatttatacacgtacttgtaagagaccaagagaggatgaaacattgacgattcttggtgaatcagacaattggaggagtggaacaagtgcttcaatcgttgctttggctccataataatttgttttcaggcattcttcagccgattcatagttctgggtcattatctcattccaattgccgttctctggctgtaacagagaaaattttcttgtgaaaaaaaaaaatcactaatcattaaattagtcaaatttttgtttgatttggatctcagccgtctttgcacttaggataaggttctatcttaaaaccaattggcaatgagtggagta

SEQ ID NO: 51379 - DNA, 990 bp, Cannabis sativa
ttaaggtagttatattactaggggaatagcattccaaggctaaacccttaaaacaaataagataatgtttcactttaccattttcttgctagcattaactcattgcaaacagcccctagtaataaaattatataccacaaataaattagggaaattatccaatatactaacttttttttttaaaaaaaattacggtttgggttgctccggtagtttttatgtaggttgctatacaaattttgattgctatacgaccgccattgtaggatctgtttttgagcaactttaccacctggcaaaaaagtaggggaagtagttgttggaagacaaatccagccctcgcgccggcaccagcaccggagtttctagctggatagattcgttgcatctgatgattcctcctgagttagtcgtcgtaaccgcatcaggtcatagctcctttgtttggcgctagcacctcttgcactgctctgtctgtgcgcagtgatgcagtgggggatttgagcctaaggatatcggcagtcggtcttgctcctagagagttggctggctagatctgagcttctgaggatgaatatcagtgcagcatgtgttttaagttcacgtgcgtccatttcgactgtctttcttaggcaggcggaggcatcaaatctttttctgggcaccacctcagatctgcacatttttggcctttggccaaacctcgacaagtgataaggaggtcttccttcttctcttgcacggaccttcttcccaatagtcttgcatcggtaaccgtcgtgcatatctctttcttcagcttacaatgaaagcaccaaaatatttatcgagtttttcggtaactaaataatttcagagcttaagtaagtaatgaaggtataaataatgtaataataaacaagagatttttacgtggttcaggctttaactatctttagtccacgagcccattttattaggctctttgaccggtgattgtttatacaaata

SEQ ID NO: 51380 - DNA, 1442 bp, Cannabis sativa
  modified_base (27)..(31): a, c, t, g, unknown or other
aaaatagattacattgaaatggagttnnnnntagggcataaaacctaacaggacctcctttatcaacattaacacaccattatatcctagacttgtacaaattttttatacgtgcattcaacattgttttgcacctttagaggttaaagggacacttagaggagtaacttttgaccttaatgctgattctttcaatgctttgctaggagcacccaatggtggtattttgattaaacctaaactttctcttaagaatgatagaatctttaacattgatgagtgttctaggaatctttgtggtgatagtcccattatcataaaaccaaagacacatcaacttaccttagaggccaaaatacttcataaattcattgtggctaaccttgcacctaggagtggacattaagatgagataaagtccatagaccaattactcatgcacctcatcatagcaaaaactacacccatcaacttaggctatctcattctaaagttcattattgatgtgtataaacccgctatggttaagaccctcccttttgatttccttttagctacctttttcatcttttaggaatccctacctcacatgaaaagaaagtttaacccacatctccggtgacattttagattcaaaacttttaaggctatgggtcacacttttactaaatgatatatgtgtgttcacaccaaaaagaggacaacgaatgcaaattgacctagaaaatgatgatgaagatcaagatgaggatattaacttgaccgcaagtgagagtgaagaagaagaagaagctctacctcaagcacctccaatgccccaagcttctcatttcaatatcgaagagacattttctcgtctccacacctcggttgacactcattttcaaaccttacgagatgaaatgaacacacaattcactaacattctcaacgacatgaccaccttgaggggaaacatggagcaagattttgacaatatccaaggcaaaataacacaatggagggcatacaaggatctatttggacctccaccaaactagccctcttgtatttattttttgcatcttgtctcatgtttatttgttttttagcttgtgtgcaaagacttagtgcattttgagtttatgtgttggatattatttttttgtttgtcttgttggatgttattatcctttttatgtttttgttggatgttatgagtttaactcttttaatttctaatgcatggtatgtgttgctttacttttttctttattttgtgtattctttgccaccctttttgatgatcaaaagagggagaaaaattctatgatttttttaggatatcttgcattttaaagttaagtataaaattgaggaggagtttacaaaatcatgcaaggtaaaattgaaaggtaatttttttttccttgcacactttaagagggagctaatctaatata

SEQ ID NO: 51381 - DNA, 1449 bp, Cannabis sativa
aataagattttttttttgttttgtattgttaaagttttattagtttgatatttttaaatttttattataacgttataataataatagtgtaaaccgcttaaaccgcatcgcaccacactgcattctatattccctaacatataaaatttccttatatttatttcaaaagataatatctagtaaagtaatatgataatattcccaatcaaaatggtggttataaaaattataggcagttacaaagtgcatcgtgtaaatactttttttttttagaaataatcattgttattataaattaagatcatttacaccaacagataaaatagaagagggaatttctcctaaccaacacatgtcttcatccaaccctaaagcaaatttaactaatccacgagctgcttaattagcagttcttttaatatgggatactaaaacaccaggggagaagtataagagacaacgcacatcaaatataagatttgaaaagcaagataaatcagttgaagtagaatttagtgctgcagagactctcaatgcgtcagtttcaatatgcgttatagaaagttgtaattgtaatacccaattgagagcgtgaaaaagagattttgcttccatttcatctgatctaaagcttccttgaataattttagaaagggcagcaacaaccatgccatcgtagtcacgaagaatagcacctactcccagtttttttttgctctaaattcatcgctacatcaacattcaacttgaaaccatttatgctaggtgatgagtgatgccatataagtctatcatgagcagcaaaaaaacttaaggggattgtcaaaatttattcaacatctattggctggaaaaaggtgtttaacaagttgatattccattccatattttatgtaataagattggaaactgacatgagagatggaccagtatagctttctggtttgaagttattgtggctgggaatccaagagcagggtcggcccttaagatatttgggcccaagacgaattaaattttagggccctcaaaaatatatataaaaaaatattagaaaaaggaatttaatcccatgaccttaaacattatgtcatccacctcaaccaactaagctatgaatatttgttgcttataatatacttaaataaaagcttaacaaatttttattattttttttattttaggcccccgaaaagtgggggccctaggcacgggcctagcccgcctatgcttagggccgaccctgtccaagagtcaatatcacaagcaatgtagagaccattattaatcttatatctcatacctttaagcagtaagttcctaccccaacaaatactctgtcatgtataagatggagagtgaccaatgttagcatccaagaaggtggtgtttgagaagtatctatgcttgagtaaacggctcaacaatgagttcggcatatcaaaaagg

SEQ ID NO: 51382 - DNA, 1290 bp, Cannabis sativa
ggatattgagttccaggttagggagtttctttttccttcgagtgtcaccaatgaaggggatttagagatttagataaaaaggaaaactaagtcctagatttattggtcccttaaaaatattggaaagggtaggtcaagtagcctatcggctagctttacccccttctttatttggagttcaaaatgtgtttcataatttaatgcttcggaaatatgtgtctgactcgacccatattctgagttatgagaacattaagcttcggacagacttatcatgtaaagaacaacttgttcagatcatggatagaaaggaaaaagtgttgcgggacaagtattctgctagttaaagtgttgtggagaaacaacaagattgaggaagcaacttgggagttagagtggcagatgcgggagcagtatctcgagatgcttaggtaaatttcaaggataaaatttctgtaaatagggaacagttgtaatatcccaaaaacaatgactatgtttaattggatatgttttattaaatatgaaattatatgaatattagaataagattataatcttacttaagctaattatgagataattagtgatttttaagttaataaataattgagaataatttattaattacggaaattttattggatcatgtaggtattatatataccatttttaaaataaaatattttcgagttcagcgattgtggaaactcgatggattggctaaagatatcacgacgataatataatgagttttattggagttgtaccagattgtattagtattcttatagtgtcagattaattaggatagtttgtattaaccaaagtacccctagactatgaactagcttaagtgtttatttgagggtaaaataatcattttttctaagattaatccttttattttattaaataacctagaaaacaaaagacaggctatagtatagagaacttgagagttctaaatgctttctatgcaacattaaagatgagaccgcgactcacttatttttagagtgttctttctccttggaatgtttggaaaaggtgaagtcatggctgaattggaaaatagctgccactaccttagaaagaattgtaatgtggataaggagggctaaattaagcaaggtgaagaaattaatttttgttgctgtcattgcatcccttatctatgaaatttagcgcacaagaaacaatattttatggcagaattctaatacaaatgtagagattgttattattaaagtgaaaaacatagtgaaaaaaaaagaattacatgtatat

SEQ ID NO: 51383 - DNA, 1268 bp, Cannabis sativa
atagtacagatttatttcaaaacaatccaatactgttctcaataaagatcaaaagtttcaatttgtttcataagtggttgaacatgtgggcatggagagtgttaaatttcttaaactagtttctatttcgtaatccataatcaattttttttttttacaagtattcctgaaatgtgaaaggttgtttcaatttatcatttgggcaaataatgtatctattctttatgtgaagctttaaagtattgataatcccatttccttagctttttaaaaagatctcataataccaaaataccttttaacaattttacaaaataaaattgaacttaaatacatagaaccaaaaacaatatatttaccacatatgaaaaaatataagacaattttttttcctattctctacattaggtaaacttatgaaaaatttacctaatgtgttgattatgtgcattaaaaattaacgagcatcaagcaaagtaatgcttatatcatttgtggaagatgattcaggtttactggatgaagtgtctcctttaattgaacccatctgcatgaaataggcaggtgctttgggctcaggcaacttgttttggctattcaacataaaaatgactgatgacatgtttggtctgtccccagaaatttgttgcacgcataagaggccaatgtggatacatcgtaacattttatctacatcaatgtcatttgagttgattaagtacttatcacccaaatctataagcctgctttcttttagtaatgtccatgcctggtagtacagaatccatgagatcagtcattagttcattctattataattgagtaataatattagtgatatacttatacttattattacttacatatccgatgagggtgagaccattattttctttggggaaacctctatttttctttccacttacaatctctaataccaatataccaaagctgaaaacatctgattttactgagaatagtccatcagaaatatattcaggagccatgtaaccactgcataaaaattattttggttagaaacctggaacgacagcactttgctcacaagtggatctgatacaggttataatttagaataagatgaatgaggttccatctcaaaaccaattggcagtgggagaagtaacccattcatcttatatatcacaatttatttccacatatgagcaatgtgagactaactttgataaaaacagtacaaataaattaatttaatttagaaacaaagacataaaagagttaaccaa

SEQ ID NO: 51384 - DNA, 1848 bp, Cannabis sativa
tgtaattactaaagactttccatattaaacattagctactaaaaaatattatttttccgtataatttttaactattttgccaaacaagatattgagaattcatgtataattaccaacttatatgcaaacacaccttgcaatttaaaatagagtgtaattactaatttgtgtaattaccctacctagtaattacacagttatttccaaacacaccctaaatataatttgataaccgatttagttatttattggatcggatgtaattcaatttgatttttaaaatttacattcgatctgatctaattatgattagatatttaactttattatattaattaaaattagattgaatcactttctgcatatccctaatcctaatcaagtcattatattgagttgcataatgtactatgcacatatatttgtctttatatgaaaaaaatcatattgtaaaaattaataattttgtatatgcggtgcagtttgaaacgtaattattaaatttaaaactataaattgcactacaccgtgcagtttggtaaaattgcaaactataattgcagtgcaaagaatttcaaaccctatttttttttacggtgcaggctgttgtacggtgtggacggtttgataaacactcttaaaccttactcacattattaatagggataatttaaaaaaaaaagttaaaaacaacaaaaaattaaaaaagtacagttgtcaggattttaaatattcttatgattttatttacataaaatacagtcttttgatgtatgcttatgttgtacttttattaatttattgtttgattttttgttatttatatgttttttttttattgttttgatattattttcgtgttacttttatataattttcttattaattttataaaacaccataaaaatatatatataaaaaaatcttgtaaaaatataaaacattgacaaaaaaaaataatactttatctaattatctcctattaatattcacataaatcattaatttttgcaaatcattgtcactttcttctctctctcttgtgtcatacatacatacatagatttagcatagataagttgctatatatattaagtaaaacatttgttatttaactcataattttgccaatttctacacacaaattattaggatttaggacaaataactttttcctcttccatttttgtatattcccaattgagagtttatactaaaatatctattatgtatttttaaaactgatatttataaatttaatactaaatagaaataatttggctttggcccatataagttccatttatctaagtccaatttcctaatatttacaataaaaatgtacatcatctatggtccaatttcttatttgggctttaaggtttgagtcttcttttaggttctctcccatcaaatcactcaatgaatttcttcatcatctatggtattggtggtgtgggtctccaatgtaaatacataaattactttaggaattatttcacaaatatataaaaataaaaaaattcaaaaatacagttgtacaaaattttaaatattttttttacgatttttacgattttatttatagaaaatacggtatctatttgttatattttactctttctaattttttgttgattgtatgctattttttttatgttgtttagatgttatttttatgtattttttgattatttttttataatactgtacaaatgtaaaaaaaaaatctttgaatataaaaatataaaggtgccgtttgataacacttttgttttctaattttttaatcaaaaaatgaaagtaaaatttttgttttttaaaattctgcttttgaaaaacaaaaat

SEQ ID NO: 51385 - DNA, 1899 bp, Cannabis sativa
tttctcccccttgtgctcgtcacgtaattgagcgtgacttgccatttccttgtaatcggtagtgttgtttaatgaaatccttattctcaaaaaaaaaaaaaaattatattttccgaggtttctatttatgtcaatttataatatagttaatttatttatattgcttggtgtatattacgatacattcaaattacataatggtaaaatatttaagacaatacttcataaaatttatcatgaataatagtattcatataataatagaatctcaacttattgaataataagatttatttagaccaattaaaagttgtatgaattgcatcttgcggcgtccgtaacgaatgctactaggttgatccgggcagtagtcatattgtttttcttaaagattaagcaatgcatgcgtaaatatgagctaatttagataatgaaacttcaaataatttatcaaattaattatagtttgtttgatggtatttatttgatacttgaataactaaagtaattttgaaactaatgtacgtacttttagaagggatgtatttattagataaaaaattaatgcaagttgatgactaatgatttttgataactagacaattcaatgactatatggcggttatttgtgacaaagaattaaagtttgattttggaggagcttgagaaacacctatcacatccaagggagatagcaggtagtgttcatgtatgtattataagtatatgcttgacatgaatacgactcatttaataatcgtgccaaaaaatcaaatccaaacacaatcatttacaaatgggttgatactacatgacctatatagctcatttgtaagtaaattttgtttaaacataccaatccattaatatattaataatgacatgtttaatatgttagaagaattaataaactcaagatactaatttttatataatttagaacacaataataatttataataattaggtatgcctacatgattgatccatgtgcaatactatcaagtaagtcttcctccctcgatctctgattatcaagtaagtcttcctcgctcgatcagaagcagtttttatttatctgattattcaaaaggtatataattgtgatgagacaatatgtatttataaagttagggagggaacttagctacataattatagttagattgggtctgcttatcaaagactttagttaactaaaaaagctcacaattctgcttcaactagactttatactcacaaaagctaagccgattaactattgatcactaataatatgtgctaacacaacaaagaactatccaatcaactaaaattttaataaaaccaataaaagttaatgtaaacccaaataaaaatctaatattctcccacttgagctacattaattttaatacatatatattatatatcaaaatagttttatttaaaaacgactcatgggttgaacaacaaaaaatatttgtggcccctttaaaaataatttttctttgatagcatgtcaatatgtcggtctaatttaacctttaatattgaactataacaatcatattatttttaaatcaataaaagacatttataattacaaataccaaagtattaaattgacatggtcaataagtctagtagtgtggtaaggaattatgttcaacatgtgatcaattaaataacataagtcctcaacttcactgataccgcaatgcttaataattaagctagtgaaattaaccttatactacttaataataagttagtgtcactaaacatgcttaaaaaaataagccaataaaatatcattatcattaagcaattaaacttaaaagacaataatcactacaagataaactacatgtttttaattcaatcattctccaaaatataacaaaatataattaaaat

SEQ ID NO: 51386 - DNA, 1003 bp, Cannabis sativa
tggtttatgagttgtggccttgtgatattgattcaaatgagaagtaaagaaagaacagataatatctgctggtttgggcttcgtaccatgtatttctttgtttcgttctgaccaaatacaccacattagacatatgatcttctctaaatcagcatcattgtgagcagcagcaatgtgggagaagatatcataacctttaatgttaccaatattcggtatagatacatggaaattgaactttctccacacaaccttagcacgatcacatcgaaatattgcatgtccaactgattcccacgcgcacttacaaagtgcacaagccgtagaagaggtgatctttcggtgataaagattcacagaggtagggagagcatcatttatgaagcgacaagcaaagattttaacttttttgggcagccttagggaccaaaacctgttccaccattgacggttggaagatgatgaagaatgtacattcatagattccaaactcttagctaagtggtagccagatttgacagtgtataatcccatgtcaaaatgatgccagataagcatatcctctcttggaaaaggacttagaggaattgaaaagatacgtttaatataaatagctccaaaatgatgttctaagatccttgcatcccattgcctatcagttgagatatagtgggctaccgtgaaaagaggatcaccacagtatgagtaaggggtaaatgtagtattgccaggtaactatgggtccgaagcacatctaatcttattctctgtgccaattttccatcgcaggcctttcatcaatagatctttaccatcacagatactttgccaagtgagggcaggtaaaatgtctttttgagccgaaaggaagtcaccattcttgaagtagcaggctttgagagctcttgccagtaaagaagaaggattctccaatatcccccatgcttgcttcgccaaaagagcctgattaaagtagatgaaagaacgaaatcccataccacca

SEQ ID NO: 51387 - DNA, 1478 bp, Cannabis sativa
  modified_base (339)..(340): a, c, t, g, unknown or other
  modified_base (1016)..(1036): a, c, t, g, unknown or other
acacctaattaatagcctaacttacataacaaaagcatgaatgaacttatatgaatgtactattaaatttaaagtgcaatttagaagaagagaaatttaatataacaaatgtggaaataaagaagaaagagaattatattagaaaaataaaaattgcaagaagttacacttgagtcttgccaaagaaattagactagaaaagacactgtctttacacaaaaactaataaactgaaataaagaagaaggaaaaaagaagacaaaattttgatataataacattagctaaaactgatgaaatttacaatgccaaatggtactatttatagtcacactttgnnctccaaaatggtattttagtgtaccaattagttggtttagggcaactccaattgagaaatttaaatttaatgttaaatcaacaccaaaaggatactatttcaacacttttttttttcaattccaaccacaatactaaaaattacactaaaaagtatattctttattattatattatttgattaataaataatattattatataattatttattattttttaaaaaaaagattatttaattattaagaagtacaaaaaaaaagaaaaaagtaaataagcagttgtctacagttattagcgggacactatagattataaccaaaatagggttacttttagtgttaggttggaagtttttggtgaaaaaattacatcatattcaggtttttaaagatctatggagatggccttagtggctaaaaaagctgagaaaatgaaaaaaaaaagaaaaaaaaaaaactaaagcaggtggtggagagagagacatgaaaaaggagcatgtggtggcttttgttgctctccatcagttcttgtgtcaggtacatgggtcccggttgtgctagcctagtggagagagtgaaccatgcatcacttggttgctgaggagttgacttcgtggttcactcatgcttgagaagcttgttgggtcatgtgttgtaaagaccgcttagctttannnnnnnnnnnnnnnnnnnnntagggtttaattatgaaaattattaattagtatggaattagttatttatgatgatttatttgaattcagaatgcatttcgatgtcatatatagaaatttcataacttttgcatgtttgtgcccccacaacattggaacgcagtggttggctattagaatcatatcctagtatttttagtatagagggactatattgttaaatatttggaatgtcgggaataggtaggattttagaatttctcaaaatacccctaagtgcccattatgacttttagtgtgggaggggcaaaatggtcattttgcaccactagccttttgtcattttgtgagttatttaagttgataaatttgattattttaaatcaagtatgttgatattatctttaagtgagtagatttttattcattttttttttcacaaagtaagaaaattagaaaaaaa

SEQ ID NO: 51388 - DNA, 1181 bp, Cannabis sativa
tgctcgtttagatctctaacccttgattcatatttgtagcagagtataatcaagatctgaacttgaattctctttctgacaacaaatagactacataatttttctcactattctcagtattaccttgaattgtgagggaatctctcaacactaaggagcatgaatttttgtgaaaaaaaatcaagagaatttttgaaaaaataaaattaaaattaattgcctttcttttgatacagtttgttagacaagagagagtcatgagtagagtcaaatatcattatgtttaatttataaggagatactagggttaggttttagaataaataggctgaattaaaaatgaaaaatttacaccctataatgtataattttattttattatttttactgtgacacacatttttttacaaaaatagtgtccatttttttttagagagagtgatttgaatcacacttgataattgtcgacgaggaagaatttccagttaacaagctaattgtttagccaaagatatacaaagtcagaatatgagtcactacaagcaaagcaacgtatgtaagaccaagttatctcgaaagtttagacaaaacaacttgagaccacctttaagaggcatctgatataaacagccaattgatgtccattttttatattgtgtgatgtgtttggtttaaaaactttatttttcactttcttttgccatttgtcatgccatgagctctttttcatctttctttcatttttaaaaaacaaatgttgatttgattggctttgtcacatctataacaactttcaagctttttctttttttataaaaaaaaaaaataaaaataatataaagcttatatttatcatccaaaaacgttatcttcttcattcatattctcgtctcctttatctttcaattttttcttcttcttctttttatttttttctcttgtttttaaaatacatccacattttttgtgttgtttgtggttcaagtatggtttttatgttggttattatcttttttatcagttttttttctttcaaaaactattttccctcccattgaagattcatactttgattttgatcttgaagaagaagatttggagatagccaaatagatgaaggtatttatgtttttttagggtttttatattttcttgttcccaaactcattacttattgttct

SEQ ID NO: 51389 - DNA, 929 bp, Cannabis sativa
attaatattaatgatcatctttaatatatattttttaattacaatattctcatcaattgttttttaaatatttaatttattgatgaggattaataatattttactttttgttatataatgcaacataaaatattcctagtgtattggagcataataataaatataatatttgtttatttttaatgttaaatttagaacaatatttatatttagcattagatatagcataatgttaatttataaaataaaattgagttaattcgtaatcagattattttataaatatatatatctctatcaaaataaaatcattgctattagggcaactctaataatgttgtagtgtgttcctgttaggtgaggccacaaaatgacactttaagaaccagtttggcacaattgtactgtggagaaaagtaattgtagttgtgctgtgagaaaaaacagatgcagtagaactgtagaaaaaagctgagctgagtgttggtaaattataaaatatctcgacatttttaaaatcaacttatctcaataatctcatcaacatgactaactaaaatggttgttatatttttgacctttaatagggtttccaggatcgccgaatctgaaaatatttttatttcataaataacttacattatatccacatattctaaataaatctctgtaattaataaattacgcttatttattcacttgtagataaattaggttagtgggatcatgatcctactcattactacctaattaatccataatatataataaatcttaattattcataattagatttctgaaatattacattgtgcaacacgatctgcatcactaaggtactaaggaggtggagaaatatcttttcgacgtatccaacaagaattcgttgcttccaaagaagatagttgtgatcattaagtttgatcggg

SEQ ID NO: 51390 - DNA, 2301 bp, Cannabis sativa
  modified_base (812)..(820): a, c, t, g, unknown or other
  modified_base (1137)..(1140): a, c, t, g, unknown or other
  modified_base (1175)..(1178): a, c, t, g, unknown or other
gggtaaatgttatccgtgttttcaaaaggaggacacttgtaattcctaaagtaggattggcccaggacggcctagcccaaaacctttccatgaggatagatccaacctagacgatgaggtaggcccaaacccacctttagcctagaaggctcgcctccagattgaggctttcagatccaggaaggtctcttgccttcccgagattgaattcaaatgaacgtagggacacatccaaagagggtactttaagaggcaccttggaagcctagtatagggtgatgtggctgccctctggctcctggtcccaccgaattagggcttgtcccctttccttttgtccaacaacacgtatctaacaccacaatacacatgtgcgacgcctgtaggacatttgtcccaaactgcgtggtccctatatagatgtgcaaacgccttcgacccacgagccaaaattctgtccgtggacctaaagtcatgtatttcatgtatttacttcaatagtggacctagtttatacagaaaccctagcgggtcacgggtattcctagacccgactcctagcctataaatactacttcgtaccctcatgcaagtggttagaattggaagggttagaaaacctacaagtaagaaaacacaatagcaagaagctagggttcataaaatactcaatccaatctgcacgattcaatccatccaatccgcaaagtgcaaagtgcaaagtgcgtgcgaatattatattcgcattcgcacttgtgcggattggatgttgattgatatgtaaaagtaatcgatccaatccaatccacacnnnnnnnnntatattttaaaaaaaattatatatgccattaatattttaatgcaaaaaaatagtaattcaaggaggcgtttggaatgaagtgtatagagaatataattgtagagaaatgtgtaaactatgtttagttgtgtagggtaatatgtaatcatattcccggtaattgaattacattatttggttgagtacaagaatcttatatattattttaaaaaataaataaaaatatttttttttgtattatatctgtttaatattaattatacataaaaataaaataattattcattaaagaaatatatttgttaattagtaaatannnnaatatatttgttaattagtaaatattaaattttannnnattttttattaattaaaatgaactaatctatatattttatcattatgttatttatttttgttcgcaatgtcattcatgtacaatatccacataaaatttatgtataatgtatatatatatatatatataaatgttattgctaatagcataaaaataactcaattaaaaataaaaatcgatctcacagactaaatatatatcgtaatatatttttttataataatcaaaatattgatggtatttaaatttatttattaattcaaaaataatatttaaattaatttaatagaagagaataattcaatcctattcttttttaagttatcaacattgccctcttcaaggataattatattactaagggaataacattgtaagcataaaccctcaaaacaaacaaagtaatatttcacattaccattctattgctagcattaacccattctaaacagcccctaagaatctattcatatgatataaatatattttaatacttaataaattaattttatattgtattattatatatggaaaaaatataatttaaaacaaaaataataattttgttcttatattttttttttatttttttgaatttgttattttaatttattgttggagacataaagaaataataatatattttattttgttgttaattatgtaaaaaaatatttttttaataaatattaaataacttaatattaataagtaatcaatccaaagtagttgatccaatccacacttttgcaaattagattgtattcgatttgaactattgtgcatattagattggatccaaaatataaaatctacacttagtgcggatatgatacattatgagcgaaatagtgtagatttgattggatgaacacccctattctagacttgagcttgtaaatcccattgtaatacattaaggccatttggccaaatacaagtgactcgtggactagggttgattaacacttgaaccacgtaaaaatttctatctccatcatttgctagtttattcttaactctctttaattggtttccaaaaattacggtaaatactaacagactagttatttatattgtataaaagatattaaaatttgagattgatataattttatggctt

SEQ ID NO: 51391 - DNA, 1147 bp, Cannabis sativa
cagtttggccactatgaaaattactagtgatgtccttcgaattaaccaatgttccaacgaaattcatagatttaatgaactgattattcaagcactttcttttagatgacttcgtaattgtcttcgttgaagacattctgattttctttgactcagaggcggcatattatagacatctttcgatggtgttgcaacatctctggaaacataagctttatgctaaacgcaagaaacacgagttctggctaccccaagtaagtttcgtagggcatgaggtgaacaaagatagtatcttggtagatctggggatgattaaagcaatttagaatttgcctcgacccaggtctataaccgaggttaaaggtgtcctgggattagcaggatactacagaagatttgttgaagagtttgctaagatttctacgcccttaacgcaattaactcgaaagaattgaatgtttgtttggagtaacaagtgcgaatgtaactttgaagaattaaagcagaggttaattatcacacgagtgttaacctttctagttagtgatgagaaatttgtgattattatgactttactaaacaagggttagggtgtgtttagatgcagtttgagaaagttattgcacgtgtgtctaggaaattgaagaagtacgaacattgatatcccactcatgatattgagttagcagcaatggctttcactttgaaagtttggccccattatttgtatggcaaaaattgcaaaatttacacagatcactaaagcctcaaatactttttcactcagaaggatttaaatatgagtcagctgcagtggttagaattggttaaaggctacgactgcaacattctatatcaccttgtaaaagcaaatgtggtagcagatgcactaagttaaaagggtctagggcaagtctatgaaatgaagaggatgtcaccaaagttagctgaggatatgattatggcggggattgaatatgtagttaggagaaagctagccaatagaacaatacagtctaatttgttagaaaggataaagatagcccaacaaagtgatccagaactataggagtacaaggaaaagtttaaagtcgagtcaacaaagggcttttccatctcatcaaagagattgctacgatttaagggc

SEQ ID NO: 51392 - DNA, 718 bp, Cannabis sativa
ttgaattaatgaattaacagcattgtcaacaggagattcaatttcacatctagaaatttgaagcttgtcaaaaccattggtcatattatctggagtagcctaatcatcagttccatccattattttaacgacaccaacatcaggggtaatgttgtcgacttctttctacattaagattttatgaattcgaagctcattcatgagtgttgtcagttgaagtatgcttgtttagcatataggctatgctggactggtaaaaatctggagacaagttgttgcgtattagactaactgttaaaaatgtgttctaaaaacttgtaaaggcatttattttttttaaaaaaattgaataaattgatagaacagttttttattttttattttttttgaataaaagcattcatagatagaaaatgtttagacctcactgtcattacaaaaaaggttagcaaaaatggaagtagtcaataaacaactataccgcttgtgggtaaaagttcactttactacattatgggctacaagtacaaagttataagctctactaatattagaaaaaatacaactaacaaaaaagaaaaaaatcctattataaaaagaagagtagttattaagcggccaacaagactccttcccattgagagtattaataaccaccttagagtcgctctccacgataatgaacttgcaaccatttcgtttagctgcttccaaagcc

SEQ ID NO: 51393 - DNA, 1517 bp, Cannabis sativa
gagaaagtcttttattcaaattaataattctcattttttttaattcaattttaataattttataataaaattacatccacacaacacttgtggaggagtgctatataaactagctaagaagttgtaagttacaagcatagaaatatttgtgtgagtttttcttttgatcaatagtaattattaataataatcatatcatcattatgggttctattaatgaaaatactattactactactcaagagttatcccaaggttatgtcaacttgtacaagcatatgttaagctatgcaagttctatagctctaaaatcagctgtggagttaggcataccggacataatattcaacaaaggcaaagaccaaaccatttctctttaggagttggtctctgcccttcaaattccttgattgaggactaattttcttcgtcgtgtgatgcgtgtactggtacaatctggcatcttcacgaacgagaaaggatacaacgacgacaaagaagaagaagaagtatatggcctcacgccttcttccaaattacttttgactggtggtaaaaataatggcgtcccaagcaagcgtggggccctatgtatgttcttgctgttgttcttgagccagttactgtaactgcattcgggtcaattggaaattggctaaagaaagaaagtccaaccacgccatttcatttagccaacgatgaggggttgagcttgtacgagtactgggggaagaatactgatggattcggtgatcgtttgaatgaaggaatggaaagtgattccggggttttgaaatttgttctcaaggattttaagtccgttttcgagggaataactacattggtagatgttggagggaataccggattaatgtgtaagatgctccttgaagcatttccacacttgcaatgctcagtgtatgatctagcctatgcagttgatgccaattctcataacaatactcaaaacttgaagtttattgaaggtgacatgtttcaaacagttcctcaagctgatgcaattctattcaaggtatgttattatttccttttctataacactttcatttttcttttaaaatagtgttatcataagtattgtttttgtatagtgtgttttatcaggttgtagtgatgaggaatgcactaagattttgaagaattgtagagatgcaatctcaaggaatggtggaggaaaggttctgataatagacaataatgtcataaatagcaaaacagaagatcatttagcaatggagactttgctctactttgatatgttaatgatgactgctttgactgggagagagagaaccaaaaaggattgggagaaaatcttctttgaagctggttttagtagctgtaaagttacacccatgtttggtgtaaagacacttattgaggtttttccttaattaattagtgatctaattatggtgtgccatacccttgaaataagcatataatcatcattattatattatgcagattatgtatcaccaagggaaataaaattt

SEQ ID NO: 51394 - DNA, 2481 bp, Cannabis sativa
cctaaactcaagcttatgcttgttgtaaggtctgatattgggatagcacttgcacccaaaggttctaaaatttgtgtaatcaggctttgtgtgaaacaaggtttccagtggtgatttgttgtgataagggagtaggaagtctattatggatgtagacaagcagcccttcatcccaaaattttaaaggcaatgaagcttgagcaagaagagcaaggccattttcaacaatgtgcctatgttttctctcagctaaaccattttgttggtgagttgtgggacaaggatgtctatgatggataccattgtcagcaagatatgatgtaaatgacctatattctccccccaatctgtttgcaaagttttaatggacttgcctaattgtaactcagcttcagctttaaagtgttggaaagttttcaaagcatccgatttattcttcaagtgatacaaccaagtaaatcttgaataggcatccacaaaatgtatgtaatatttatacccattaaaggaagttgtgtgagaaggaccccacaaatccgagactactaattgaagtggctcagatataacagtagtggatgctttggggaaaggaaatttgtgaatctttccaagacaacaagctgaacagacagaaaattgagaatctttattaagagcagggacattacaagacttaagaacagtttgaacaaccttctcggatggatgtccaagtctattatgccacaaagtaaaattgttttgaacattgacattacatttaaaacaattagacatagtgacagatgtgttattcaaggtggctatgaatgtacacttggacttggattgatgattgtcactgctactggtttgggaatgaacaggctgacaatgattggtgactttagcttgggcaggagtggagtagataggacctatttgggattgatcaaaagtatataggccattcttgtgtctccccatcagcaaagtggtatgactcacttcctccttaacatagcaaacatcaccatgaaattcaaaataaacattgttatccttagaaaatttagcaacactaatcagattttttgtgatttcaggcacatgaaggaggttatttaaaacaagagagtgagaagtatgctgaggaataaaataggattgaccaatatgcttaattgacaaacctgtaccatctcctacatacatttggtcctgtccaccatagtcaaaacagtttgcaatgttctgaacttggggagtacagtgattagttgcccccgagtcaggataccaatttgtatcatccaagctgctgtttgtagcaatattggcctgaggtatttgcgtttgctgaggaccattacttcctgaattagcaccagattgagaacctgaaaaggacttatcaaagcgataaaaacagtcgagagctgtatgtccaaatcgcaagcacaattgacattgaattttgctgttcatattcattccagacctgccccctcgattctggaaaaaattacctctgccaccaaagttcgtattcgaaacaaaacctgattcacctccacgattgagattcctgttataatttccaaattgaccagctccattggactgaaaattaccccgtccaaattgttgtttgaatcgtttccaagcaatgttagcttcgatcatcgaatcttgctcatcagtgatgagattagcactcagatcagcttccttccccgatctttcaattctggattcagaagccaaaagcaaggcttcgatctctcctacagtatactgttcaactcgagtattagtagagatcacgaaagtatcatactcgctcggaagacctttaaagatggctgcgacatgatctcgatcacttagtgtttctcccacagaggcgagaagatcgacgtgttgtttcactttcaacaggtaatcgttgaggctcagtgttcctttcttgaggttctgtagctttgtacgaaactccaagattttcgaagatacctgtaaagtgaaatgtttctccaacgttttccagatctgaagtgctgagttgcaacctaccatccttgtaagtaggctttcagtcatcgacgatagaagccacgaaaccagcagctgatcctgcacttcccagtcgatgaaggtttggctgactctgttttgagcacgatcgtcatcagtagcgaactccggtggtggtggttcctttatgaacttcaagagacgatttcctctaatggcagcaagaacttgctgtttccacagcaagaaattgtggtcattgaggcgaatcgagatgctatggttgaaatacacaggttcttgactgtgagaagctctgttctgagaagcttgagtattagtgaaggttgcgccattgttggatacaccagcagctccaaccgtagccatgtttgcattgagcggaggccattgctctgataccatgtttgatctcctagccattagaacagaaccaaagaa

SEQ ID NO: 51395 - DNA, 1353 bp, Cannabis sativa
  modified_base (375)..(384): a, c, t, g, unknown or other
tggtacaatgtttaaaaaaagaggtaaaaatgatagactttaaaaaaaagagtaaaaataaaagagtaaaaataaaagggtatagagtgtaatttcctctaaaaaaattacaaaatacgattcatcaaaattttaaataattttacgatttttattattttatttacagaaaatagtcttttaatgtatttttatgttgtacacttgttaatttgttattgatttttattatttatatgttaatttttttttgtgttttgatattgtttgcgtgttattttcttgttacttatttttatgtagtttttttattattttttgtattgtttttataggatattgtaaaaatgtaaaaaaatctttaaatgtaaaaannnnnnnnnnaaaaaaaaaaaattacaaaaaatagtgtattatatagttatcccttctttaatgtcacattttttggcccaactttgtaataaataaaatttaaatttttacgttcactttttaaaaaaaaaaaaaaaaaaattacggtattccataaaaatataagaaaaataataaaacctaataagaaaacaatatcaaaacaataaaaaaaaataacataaaaaataatatacaaatacaacatgaaaatatatataagaaaacaataatttatgtaaataaaatttaaaaactgtaaaaaaaaaaatatatatatatatattgaaaattccgtaccgaccgtatttttgtaatttttttgttgtttttgtatttttttttaaattattcttttttttatttagcaatttttaaatatataattaattttaaaatctatatatataaagctagaatataagacagtaacatgataaaattgatttaaatgccttaatttattctcttattttaataatttttaaatacctcaatctattttcttattttgatcatttttataatttttttttattatatttataaatattagttcattaatttttattcctatacaagttaaaaacttcatatgccatctaagaaaaataatcatcatatactattttattttctctaattttgaaaaaaaaaaatagttaacaaaaataatataacaataactcattcctcactcaataaatttgttattctaaattttatccatttgacgtggcatgtccacgtaagccaagtccaagtacacatggaatacaatcttgccaatagcaggacaaagtctccttacaaggtatggcaaaaccattaagcagcaagcgaaaggagttaagtgagtcgtcaaggagttgtaacaccatgtctggccagctaaggggagcatataggtctgccaggatgagcttatatggccggcca

SEQ ID NO: 51396 - DNA, 887 bp, Cannabis sativa
cagtgtaattacatggtcagacaaacatgccaaattgtgtaattacctccaattacacacaaatccaattacattgtggctttctaaacacaccttaaaaatgatagtagggaaatcctgtcatgagctgacttggattggtgtgtggattcgtgactaggcaaattaagctaattcttaacatctccttacatcaacaaactgaaacactcctcctccaccctagctcttcacctccatgtacatgcccattaaaaaaacaattctgcccttcaatattacaaatattattttttttgctttgctgaaaataagtgtacttaattactaatactatctacttgcaaaacgacacttgtgatgtatcgtttcataacccttttttcaaggatactattgtcttgtcaggtcagttaagtgatagattatatcgtataattgtattcatgtgctttactttgagtagcttgaatggtcgctatcggtctctcagatttgtgggagttagaaaaaaaaatattattggatacttaataaaaacataagtaatattttcaaaataaaaaatgtatatttttcaaatttttattttgagctcctggactgagtggatctaaacgtaagcctaacctgtcttagtccaggactagccttggcctagactaaggggacatgaagatggtctatgagaaaattgggtttggtgccacaaagaccccgtttgccaaaaaccttggtgtgaaatccatcaaaatgacaaaagggttgtccatttttactcttttttgttgtcccataatgggaaaattgaacttcgtgggactaagattactagttcaactccttacgccatattgcatactttctatctacaatgttgtgattga

SEQ ID NO: 51397 - DNA, 1390 bp, Cannabis sativa
aaaaaaaaaaaaaaatcaatattatacaaattgtttaaatttaataaattataatttttaattaacttatttattatagatatatgagttagtttgtcaaaatttgcaataaattaaatggaatataataggataattagcagtataagtacttaaagttttaagtttataagcgtcataaacccaatgtttatttttaactttgagtacttatgctactatttaccctgtataatataacaattgataaatatttataatacatatatatataatcaagacaattttaatctttttagtacaataattaaaaatataaaaattattaatataataaacaataactcaaaaaatattatttcaatatataataaattaaagttatattatttaattatatcacaccagttgtcatcaccgtatttcatttataatcgtaatttttgtcatccagtaaatctactccgtacataaaacaaatcaagagttaactacttatttttatataaataactaccacattattttttatccgtttgaaaaaataagtaaagaaatagattatagatagagagatttgatgattttagaatgattttttttttttttaaaaaaaatggattattaaaatgagagaattaaaaagagtggtagatgtattttgagtgtgtttagagtaatatgtcagtgtctcatacctcttttttatatatttaaaaactttagtttcttctacatgtcatcttcaacaaatgttacaaattaaattaaaaactctttgtgtgacctacaaacaaagaattttaattagtgttacctaactcagaattctatttcaacaatatagaggaaacctaccaacaaagaatttcttaattctcaagtatgcaaaatgaaactctattgaatgataatcgaagaggacaaagaaattaaatgatgagagaattgagagagaatgagagagacaatatgattttaggattttattatttgaatggtataatttataagatttagataaataggctttactactagtttatggtataatttattagttttagatcaatatttttgttttgtttaaataatagggttagatattttagtttttaaaaattaataaaacatattaagtacggatgtatttattagttttaaatttatatgtatttagaaaagtagattaaaaaatagaaaataggaggataaaaaattatcatggagagcatggatgtatttagaatatttttagaatgatatgtcacaaatacattgatgaacaaattttcgtaactatttctctcacaaatacattttctacaagatattataaattgtgatccgagttgaggatgtatttctttatgcttcgattgttgttgac

SEQ ID NO: 51398 - DNA, 2191 bp, Cannabis sativa
ccctttagcatttctcatagaaaatataactccccactacctagtttgttagagcatctctaatagttaaattttagagaatgtttgctaaggtggacaacttagttggcaaaatatgagagtgctataccattgaagagaagtggatgttattttaagaatttgtattgatgtcatacattaacattgacgctatcttaattttttataaaaaattaagataaataaagtaataccttttataattaaaacaaataatatatttattatagcattcttgaaatgttttataacattggagtgtttgtagaagtaagagtgtcaaaaataatgtgaaaggttttagcactttaaagaatattgcaattagggatgctcttatttgattcttaggtgcctatgtacacgaattcaattctatttattatgtctctggattttgtatagatttgggtctatgggaacagctttgagtcatttcttgtggctgtggttgtccctgagagacttgctctggagaactgggcaacaacccgtaaattgactgatgattttaaatcactttgtgaaaatccgaaggcaagtaaatacattttggatgagctcaacaatattgctcagaaacacaaggtatgttgaaaattgttggacaaacattgtcttacatgaataaatgtaaaaatattgagccatttattttactcatcatcaaatggttttgagatagaactctacaattcttgtcgaaaatgatcattagtttccatgatagtagcttatgtattatgctttttcatctaacttaaatgagaatctttactacagcttcgaggttttgagatgttaaaagcagtttacttggagccaaatccatttgacatggagagagatcttataactccaactttcaaattgaagagaccccaattgcttaaacattacaaggtatgactcgtgtctctttcaaagtttcaatcagttgcctatgacatgctcacaagatattgaattttggtcttttgttgttttctttattaatgatgtcttacataaattatctctaggactgtattgataaattgtacaatgaagcaaaagaggcaagggtatgacgaacgagagcagttgaacttggtccagtacgagttgttgtgttctagtatgaagctttgttgaatcagtttgtccaaggagtgatttagaatatattttgtatctatataaataaggattacctgaacagttgtgattacagtattcaatttaatgttactttgttatacctgacaaaacattatggatataataagatgtgaaaagtttccatcacaaactgtactttgtattgtactaatatgagaaagcgtagaccatttcctccaatgcaagatttaaatgtaatgtcaaatttgacacaaaaaattgactttagaactccatggaaggccaaacctacctttggaaaaaaagaacaaaaagaaaaactaatgccaaagatttcaattaagaagccaaacgttcccttttaaaaggtagtgcacacctgatataccatagttcgaaaattaaaacattgtcaaataaaatcaagtcctccacacagatttgttcatacatttattcaaattcaaacattaaaaagatgatcacaagttacacacaatgacaaatgaatttctcttagagtcggaagaaatgaacagcagaaattaatccaatccccaagagtgttgcaatcctcgaactgatcagaaattttgatctacagaatgtccagaaccagagcccaaacagggaagacgaacaaaataactataccaacagtgtttgagacgccattggctttcgtgaaagcgtttctgaagccaccagatgctcttatgtgctcttgcagcaagtaacatgcaatgacaagacatataactagcccaatccagccatccctaatgtacccagcaattagacttggagctaccactatgagcagaatcaaagaggcaggtagttctagccaatctacataaccaccgaaaatcagtaaaaaaaaaattcaaacgatggttgtagatgcagttaaaagctatgatcatataatacgagatatagaaactatacctggaaagtgctgagggaagaaaagccgcaatacaatggcaacacaagcaatccatttgcccacatcccccctgaa

SEQ ID NO: 51399 - DNA, 1549 bp, Cannabis sativa
tgttttcgattgatttttttttaattattactttaaaaataaaattagcgattcattaatttaagcattcagaatacaatatgacctttatattagttgtagcgtttgatatattttctatagcaccataaccaaagtagtgcataagacacatttcttgagctctaaagacaaatacaagacagtagacaccaccttctcaactaaaatttaattgtatgtttgacattataactaaaaatttattttttatttttaaaaatagaaaattgttttttgaaaataattaagcttgtttggtgttgttttttgaaaacagtttttaaaaaataaagataaaaaaaataaaaaaattgtttttagaaaatactaactaaacgcgacttgtgttttgaaaactttaaaaatgattttttgttcttatttctaaaaatacttttttgaaaacaaaaaatagaaaataatactaaacatgctctaacactctgcagtagacaattgtttagaacaaattggaacaacaaagtatctaaaaggcaatttcttaacaaaacttcgtgcatctcaaattcacgcaacccatgatagtatatcattgttttaaacacgtttgcttggagcccaaaagtctctgagaaccttgatgggatgtcacatttactgaataataaataatttgtaaagttaagatgggttaaaatttattttttttatgcataaagcaagataaaaatgataaaatgattcgaaattggtcaccctctcaaattgatgctcatatttctttaagttccccaaatactcctcccaattcaaaggtctcactttctctctatcacatttccctctctcattctttcatacaattcaaaccaccaccctctctcatgaacgacgaagcgtcaccaccaccatcgtctcgcctatccaaacccactccgacgaaccaccgattggcctacccatttgatcgacgaacaaaacatcacacccaaaactccttaaaaccccaaattgcgaatcactaattttgatatatgttggtgtttagttgatcgatcttttcctttttgtgtgattttcactgattttttggtataaaacaagttttggtgaaatctgcatttttctgtgattttttcgtgaatacttgataaaagtactatttaaaggttagggacaaactttcgctgcaacccatcgaacccctaaagaataacgtggtacaaattcttttcccaattttttgtcattttgacaattctgagaaccacatgtcatctataggaatcttatacctcagtctaccttaattaggtcagtggtatatatttttttttttgaaaaaaggtcatttttgtcttcttaccacccacaacccttaacccaagtaagaaaagatgtcactaaaggcattcctaacactacactacacaattattcaaaaaaaaaaaaatactacactacacaacacgtggtatttacataaatattttttttgaactataaatttcattcaactagatcaactcgacttcaacaatattag

SEQ ID NO: 51400 - DNA, 1053 bp, Cannabis sativa
  modified_base (715)..(727): a, c, t, g, unknown or other
aaaataattaatttttaagtttaaccctcaaaatataaaaaattaataatgatctatcaaaaattaaatattattaatttaaaaatattgatatttaagtttaaatattaaaaatattattttatttaagatatttatagttttgaaattggaaaatccgaaatagggtgaaaaatcacccaaaatggatttttgatgactccccacgagacaggctacacgcagcctctcacgcgcactgaagggggcattcgtagggtgttgagccgagaaaactcggggcctgtagcctctaggcatgccaatttcaaggtcatcacacgcacatccctccttgtctgaacaaggctgacggtgcacattagagaaaaattgtctgatttcctcgcgcggatcaccttgtccgaagtgtgtgcgcatggtgctcgaccataggcacccaatttttcaaacgttcataactttctcaatttttatcagaataaagtttcgtaaaaactaaaattgcttaatttttgacaaggaatccaaatatattatttttagagtgaaaataaaattatttgtatggaaaatttttgtaattcacattcaatcatcaaatcacacataaactaacatgatctcagagtattatcaagatctgagcttggatctctttctctccttcgggttggttaccaccatcttctgcactatgattgagtacttgacnnnnnnnnnnnnngcatggcactctatcactatggcttgagtatgaagaacaatgaaggaggttcggaattctatagaagttgtctctcatctactagttgtctgacagagttagaaactagatttggcaggttgaaagtgttatagttgaaattggatgagatgagagcatcatgttccttttatagtgtttcatctagggcttaggttgaattatatggattaaaaaagaacaaaatattggggaaaaatcacacatagtaaccgaccactaaagggccttttactagttatatttttgccactttattttaaccacatattcttctttcaataata

SEQ ID NO: 51401 - DNA, 1057 bp, Cannabis sativa
tttttttttttttttttgtacttgataccttaataaacccattaaaatttctcttaaaaaatacaactaagtaaatagtaagtgtaagtgttatccttatttttggagagaggacatgaataattccaagacagattcaactcagttgttctaggcctaacaggcccaacgaagataatagattggatatattattgaagtcaagccttttggatgtcgccgatagatggctcgtctagacaagatacacctccgacacagcgtatcttcggatggtatcaaagagatcttgtagatgagtgattactaggcatcccaatatctagctctgtatcacaacaatttattacataatctcacaatatcatgactttatttttaagatcttgtccaagattcatatattctgaataaagaaataaagtaatagttaataacacattaatgtgtctttattatccacaaaagttgggcacggtttcacaactatcaacgtgatatgacaaccacgtcagtagaagatcaatgcctcatgggtcaggcttaaccaaatgagcctgaaatcaatgtattatcagcatatacgccattagtggacaatgtatacatacaagaaccctaacacaataaatttaagaaaatgcattcatgtaaatggttagaatctcattctttgattgctcatgcaaatccttgtgttcaaacacttggtaaaacacttgtgtaaataaataaggctttttcagttaatgttgcccaattagttacactgcggtcgcgttagtaaatgtcgtatccacagggaggaaaaatacactcaaaaggacaattagtaatttcacaagaataaaacaagaaccttgaatgtgatgagaatattgaaaaaatgatttttaaaaattaaacgagtaattaaaatgagaagtgatcagaaaatgattatggaagacataagattcatacatacaattatattttcttataataaaattgattctttaaactcaactacaattctacaccattaattatagttggaaaatgtgtataattaagc

SEQ ID NO: 51402 - DNA, 1175 bp, Cannabis sativa
aaaacaattttttaaaacaaaaaacagaaaacaataccaaacatgctctaagaatcccaacaaaagcaatcttaactaaccatacaatgttgtttatctacctgaaaagtatgctgagttaatttatatgtaattttattagtcaaccgatgtacatgaattagtatagatattttggaaaattgaacattaaacttgctaatcctctaataataaattaggatcattgaggaaagaataatgtttagaagaagcattaacaatccctaaccaatctacataattcaacaaaaagtaaagaaagacaattaagagccaaatttaatgctacaagtaaaaccacaaattttgcctggataactgaaaagtaatcctaactattgcttgttacaattattaatttcatacattgtgcttgcaaacttgtttttttttttttttttccaaaaatagctccaacgaaagaaattaatttgaacgcaaataaataaaaattatacattagtaagtaaatgtacataaatacaaaattatttataataaaataaaaacaccataaacaaacaactcatctactaaaaatatattcctctaatgtgtatagtattggctgctttagttgttttctttttttataatctatctcaaatgtaatgtatatgtaacctcatctggatggagaatgtatgagagaacatattttatatgcaaaccccatttattatttatgatctttatgctcaatataatggtaaatatgtttcaaatttttagattttttatatattgggttcttgacctaagtaaccaattaatattatatttattatagaaacacttatataaatatatatatttctaaaagttaattttttgttttttctaaccaccatggtgtgcatttctattctggttttgacaagtttgagtgaggttaattttgtattatattatagccaatatcatatataagtcgtagaatactatttgaaaaacagtttgattttcaatgcattaatattttttttataatgattttttttttttttttaatttagtgataaagaattgcatcacttttttcaatacaaaaaattacatctgatttttattttcattaaggttaacggtaactaatcttttttttttttgagacatcgaacgggcgtccctct

SEQ ID NO: 51403 - DNA, 982 bp, Cannabis sativa
tctctctctctctctctcaattgattttatatgattgtaacaaataagtaccatagagtcattgtatttggtcattatatggataaattgatttactaaatattcattacatgatttgatttttcgaattaattatcaaaatattctgacaatttatgtgacgtagttattgatagagtatcttacttataaatatagggtctcgatcctcgaattcttcactcattctgtgcaaacaaaaaattctatttaaagagagtcgagagagcttgaaagcccaaattctgataccgaattaagttattactaggattgaagcttaaagatgaatgattggaggtattttggtcctttcatcgcatatacaattttgatatgtctatagtttatatatatcaatcttatatgctttatttttcttattaaaattaatctaacagttggtattagagcattttatctttgcattgatttatactctgagtttttcgtatatgagtatatatactattgattgttggattcgctaatgtctgtaaagaccgcttaactttaatttaaaaattagcagatacataaagtttaattatgaaacttgcctattagttatgaattattattttatggagatttatttgaattcagaatgcattatatatgtcatatatgaaattttatatttttgcatgttttgtgcccgacaacattagaacacagtatttggctattagaatcacggcttggtgtatttttagtatagcggggcaatatagttagacattgggaatttcgagaatagccgagattttagaattgaccaaattcattgaacgcggtgtttggctattggaattgtatgccaaattcaagaagtgcgagttttggctatcccaggtgtctcttcttggacacattgtcagtaaagatgggatcaaggtggatccggggaagattgtatccgtcagggattggccgagaccga

SEQ ID NO: 51404 - DNA, 970 bp, Cannabis sativa
ttatttcttggtgatggtgagcatatgaaaagatgatatcaatctttcaagaattacttgagatatttacacaagtttatgaagtattggaagagagaggccgaaaagagaagagaggatggaggaaaaagcttgattgaaaggcttgatgaatctgaaaaaaagaatgcatttgagtacataaagatgtcgttgatttttgttggttcatatttgtctgatctcatcagtgaatttattctggtgattgtgattttgggtgataggaatgaaataataaagaatcttgaagatttcaaagctatgataaaactactaagtttggataatgatgagaaaaattcaaattccattgtgatcaagagtttggtatctgtgatccaattgacaaaaacaatggtgaaaaagaataagcgtttggttttgccaaaaccggggaagttattaagtgatgatggcgacatagagttcgagttgcttcgaatgatacttaaagaagttttgtgtgttgaagttgttttttgttgtcctaagatgactgaggttttgacagataatccatacatattacatggatcttctcttcataaatactttacggacagattgatggctttggatttgaagatgaatgagctgagggcgcaaacatatttgctgcctcctataaatgaagaaaccaaaaagaaattgaaagttcttatacaaacaatagatgaagggtaccaaaacatatggaagaaacttgatcttaactcaacatcagcagcagcagcatcatcatcctaataatttgttttgtgttcgagtttcaagtattctaagggtattcaaaggatttgttttgttttagtacttgaaattatgagactcttcatttctaatattgagtttgtctttcatttcttttaaatattgagtttgttttgttaatgcccttgttcccagattctgttttggggttgaaatg

SEQ ID NO: 51405 - DNA, 694 bp, Cannabis sativa
tcatttcaaattaactatataagaagtttaaaacctaataatacaacaagaacagaaactccaaccaaaatttcaaatttcaggcctcaaatatcctgcccaatcaacaaaatctttaaactcaaaccttaatactaattaaacatatgataaaacctactatgctacgcttgaacattcctaaatcaaaattgagttaagattttgggtgctgcgttgcgttttcgataggagagaaagatacagacagaacagaacagatcaagagggagagagcgaaccttgaggtgctgttgctgaagatgaggatgtaggcttggtcgaaaggggaagagggagacgaagctttgggttcgtggagcttgttggtttcgacgatctgcgaccggtgagaggcgatggaataatttttttctaaaggaaaataaaattttacattaaaaatagagataattagaaaagggaaatttgaaattccatacttacaatactctaaaattttattcctaaatgcataattattaaaattggtcatatataactatattactaatttcttaaaaatacccctaatatttaaaatccctaatctcatcagcctctctctcaactcactctcgctcaacccacccgatcccaaccccaacgccagctaacggtgacggcagacccaatcgactcacggtgacggacc

SEQ ID NO: 51406 - DNA, 2643 bp, Cannabis sativa
accatctttatttatgttctaacctgatattcttttttattttctctaaaagcttgcagccatctctgcctataggaagctccatgagcttcactgctatccttcgtagctatctctgaacattgatcaacctgagacacggactgttgttgttctccatgagttgttatggctgatggtttcaaagaagattggtagagaatttgttttggaagtgcaagcctaatgccaacaccaacctttcaaaaagaaaaaataaaattaaaatggaacccccagctcctgattcttgtgtgaagactccataatatattgatgatgatagatggcagaatctggagtcccgttggggtgttaatggctatggaggagacttgtgtgaaggacatattaggtaatgcacttgtaaaattgggtatatttcaattaaatataatgtagaggtatttttggttaattgataaaaaaagagggcattcctcaacttatcccaataatttttgtgtatttatagtattatttttcctataatattaaataaataatatgtattttttgtattttgatacaattattaaatttacatccgtacaaataaataaaaatcttgcatggaattgcctgtgtaaaagcacatgatattaattgttatgtatattggttttgatagaaaaaaaaaatggtataaagatataaaattaaatatgattgtatatagatatttcgtcttgtttgaatactgtcgtttaatgaaagcacaataacttctgcaaaagttgaattattgaggaattcctattccctttgtgtgcactgtgcgcagtgtcacactttttctttttaaaatataaataaataaataaatatcatccatttttttcagtgtgtattatatcatcttatttttaattaatgtataaatatctttatttttgttttctgagaagaaaaagccccatagaacacaacctttaaaaaacagtatatgctcaaatgaaggggccaaagacaatcatatatagattcattgataataattggtatcatatctaacataatgttctgaatacaagtaggataatcggccaccaaattactactatggcaaaaaagtcatatgatattaagttattaacaatttaaggacaaagtataaaacaaatattttgaaaagaagaacaaggcgctataataagaagaatcaaggggagcccgacattgtaacttgagcaccatgctttggcagtcggactcaaaatacacctagtgaagcccaaatatatgacactgacccttagcctttcgaagagccataacctccgccatctccgaatcataacactcagggccggtcttgaaaatatataatattatacacctcaaccaactaagttatgactatttattgtttataatacacttaattttattttaataaaagcctaatatttttttttttattttgggcctccaaaaaaggaccctaggcacggcatagctcgcctatgcctaaagtcggtcctgataacactccaaaattgttaaacttattttaccaagatattaatttattaacatttatgtttaattatctcataaacaatcaaatattctaaaaaataaaagccataaaacgatcaaataacacataaaagattagacatcctcacattggttgtagcgaaattaaatatcttcttccgttcaatttctctaatctctaacccttgaatcttgttctctaggagagtattattaaataatgaacctggacccatgaccgaaacagactaatggcccaatatatttgattttttcattattttttaaaagaaataattatatctttctccaaatatacaatttgtttaattttatttaataattataaataattatcaaacatatttataatttaaatatatttattaattagacccataaaatgtattaattaacaataaacccctatctttcttttcttctcaaatttttccaaacttagtaaaaattgtcaaataagacatactcctattttagaattctaattaacttattaaatcaattaattgagtctataagacagtattatctcaaataatgtaaggatcatgggcctatgtatctacactctcaataaatatatccaaaatttaccaagtaaattttcttgctaattattaattcctcctcacttcactatagattagaaatattgcactattgattacatagaatgctttatataccaaatataactacgctatgaattatccattatttcaatctaactaattaatgatcctctatagatggtctacatcgagtagagacaaatttactgttttatcctttgatatgttttatcattaaaacactcagctatatataaatgatatttcagtaaactattataattactgaaataagcgttcatctttatatgctttagccaagctctaaggaaactaccgtttcacttctaaatagttatagaagttatagattccaaatctataattaacgttcacactcaattgtattatcgaactcctaacatttaagttgttgggaatattttatcaagatctagatttactaacaagtatgttgattaacatcctaattatgaattctctaaaa

SEQ ID NO: 51407 - DNA, 1707 bp, Cannabis sativa
  modified_base (38)..(40): a, c, t, g, unknown or other
agcgaactaagcacattgagattgattgtcattttgtnnntgagaaaattcaacaaggtctgatctccacaagatatgtgaagaccggagaacaactatgagatatgtttacaaaggctttgaatgggatgcaagttgattatctttttaacacgctgggcatgaataacatctatgcaaaattgtattttagtagtttgctatttcctagctttgtatataaatatgtactattctatgaaatacatacacaatttaattcactattttctacaattattaatataattaaattaaagcataaataaaaaattaattaaaaagttaaataaatacaaatttatattgctctaagtgtttgtatattagctatcttttaattaatattttatattttataatatgtgtttgtatttttagtattttagtatcacttttataattttttaagttaatatttaaataataattagtatattgaataataaataatatgtaatattttaatgtttaagtgatttaatattattttacatttaaattttataatatgagtttgttttttttttttagtatatttgtattatttttaaaaaaaattgttatgtttttaagttatattttattgtttttttaagaaaaaatttactgtaagcaaatgtattacactaatattattctaaaattactttaattatttaaggattatctaaatattaaaaaaaaaatcttataaaaggaacatacctcataccgattgatgatgtgtaaatgaactttgtactaaaattttaatagaataaaaaaaacaaattatatgcaatgaaatgatgagaaaaagaatggaaaaaataagagaaagaacaaaattatggggtgcagaaaactaagttgagtagagggtagttaataggtttgaaatggcataatttttttcatttgttaaccaattatgtaatgtgaccactcattttcatataatttttcgagactaatacattgaaaatataatttttcgagactaatacattgaaacaataagtgtaggtacaaaatgaatggataaaataagagaaagaccaaaactatgcataaagttttttaaaaactttgaacatcaataacttttgatctggttatccgtttaaagcggtttggccaaccaatttttcttaaaaacgctattttgtatactaaattcatgttatgcacccctttcactaaattgtttgtgttttattttgttgttttactgaaaataacttaataaaatttttatgttaagtattagaatcgaagtttatgatgtatttgttatttctactacaataaaatgcgcaatactaatttccttttatatctattcttatatttaaattaaatcacaaaagctaatttatacaaaaatagtcttttggtataatggtaagaatttatcaatatatatttttggtcacaagttcgaatctcaatagactactttctgtattttttttagcctactatacatattcttagcacttaataaaatctattcttatccctcaacaatataaaaatataatatatactttagatagtagtaagtactcaataatataatatttttgtcatggttcaaatctccatataccttttattgagggaggaaaggggttcccaaattttttatttttttaattgtaatcgggaaatttgtgtacttgg

SEQ ID NO: 51408 - DNA, 1018 bp, Cannabis sativa
  modified_base (851)..(858): a, c, t, g, unknown or other
  modified_base (977)..(982): a, c, t, g, unknown or other
atttatctaccaataaaagatcagagattattttttactattgtttattgtttggtttacatgtttatttcatgattaattttttaatatataaactctgttaaatcctaaacatatagatattcacaattatagtgttgtcaccacattaaaataattatgattatatgcttcaaactatttaagtctcatgatttatcagtgtgttagatttaatctgacgtgataatcaacgatatggtttacttacacttggataagtggaatgtcatttttaagaattagcaaattaaacttggatcggatgtataggttttacattggactgttgatagtggaaaaaaatatcgtaaaattaccgttatatattttccaattcaatatcacttaattaatattagatcaattgatttcaatcttgagatgattaagctttaagcgaattgtattatttgagtttcttgatttgttcattatcagcttacccgtcggtctagctcatagttacatattgggaactcggtagttcaatttagtgggagtgttattcatagatatggacatctatagcttttatgattatttagaagtcaaataattatttcctttgagcttggcttgagggattaattttttttttgtcataaagagcctttgtttatttctttgttatcttatttatttctttgtattgtttatatgttgtgtaataccctaggattgtgaaatggattagcaaaactctaattagataattatgtattatttgaggaattatattattatataatttaatatacaagaatttacatgatttatgctatgataagaccccgttggtgagccagggnnnnnnnngtaattttgacccgagaagggtaacacaatgaaatgaatttattaacgtgcttatgggattatattattatatatcatgcatgtgttgtctttttcaagtgtgttctgacaggttggcnnnnnntagtcacaaccgggtatttcgggccgcactgggttc

SEQ ID NO: 51409 - DNA, 2483 bp, Cannabis sativa
ttaacatcccccctcaaacttaggttggatagagatacaatcctaagtttgtccctgagaagaagaaatcgagcattggacagggccttggtgagtatgtcggcagtttgatcgtatgcaggggtgtgcttgacagttagagctttggtaagaatcttttccctcacaaagtacaggtcgagttctatgtgcttagttcttgcgtgaagaataggattggcagacatgagaactgtgctaaggttgtcgcaccaaatggttggatgcctaggaatttgtatctttagttcactgagcaagctttgtatccaagtgatttctgctgtgaggctggcaaggcttctgtattcagcttcagtgctggatcgggacacagtgtgttgcttcttggaagaccaacagatgagattggagcctagataaacacaaaagccagtggtagatcgtctgtcattgatgtcggatgcccaatctgcatcacaaaaaccaaccaggtctaaggatgttgatcgagacatgtcaagcccatagtcgagtgtgccttttaaatatctcaaaattctttttactgttttccagtgagattcaagaggtgagtgcataaattgacatactttgtttacaacaaaggcaatctcgggtctggtcaaggttgcatattgaagggcacctaccaagcttctgtactgctggggattcttgacaggatcactgccaatgcatgatagtttttccccacctgtcatgggagttggaagactgttggcacattcaagtttggccttgcagagtatatctgttatatactttgtctgtgaaaggtgaaggccatttgctgtagcagtcacttggattcctaggaagtagttgatatccccgagatccttgagtgcaaatttggagttcagttgagcaatcagagtagatatttctgttgaattacttccagtaattaagatgtcgtctacataaacaagaacataagttgtatgattgttctgaaaccgaataaagagagaggcatctgcctttgaactgtggaattcgtagtgtaagagagaagtccttagtttgtcaaaccaggcgcgaggggcctgttttaagccatagatggctttgtgcaatttgcacaccatgtttggaccttgttcttcaaaaccaggaggctgttgcatgtaaacttcttcaatagaccattcaaaaaggcattgttcacatcaagttgtttgatgtcccaatggttgtaaagagcaatggtgataatgattcggatagtgggtgatttaacaacagggctgaatgtttcagagtagtcaaagccatattcttggtgaaagcctttggctactagtcttgctttgagtttagacacactcccatctgcattttctttaatcttatagacccatttgcaccctattgcttttcttcctggtggtaatggaacaatggtgtaggttccatttcttttgagtgccactatttcaatgttcattgctccattccacttgggatcttttaaagcttcttggacagttaagggtgttttagagcttatatacactttaggtttgtatactccagctttagctctagttaccataggatgcgtgttgacaggtggctcttgggatgttgcagcagagttcataggtgatgatgcagaatcgggttgctgtgatatggatgctgagtgggatagaggtgattggggaggcataggtgagtgattatggatgtcatttgctctactgggatgagtttgagtttgaggaatgacaggaacagaggttgagggtgtgttgagttgagagtaaggaggtggagagtttctggtgtgagattggacagcaaaggggaatttatgttcattgaatataacatctcgtgagatgtatacccttccagtagcagaaaggcatttgtagcccttatgcttcaagctatagccaagaaaggtgcactcctcggatctaaagttgagcttatttttattataaggtctggtgtttgggaagcaagagcacccaaacactcttaacatgctatagtcaggttcaagattgtgaagtttgtgaagaggagtgtctcccttaagcacagaggaaggcagtctattaattaggaaggctgaagctcgcacaacttcatcccaaaatttcaatgggagagaggcatgtgcaagcagagtcaatgcagtttctattagatgcctatgttttctttccgccacaccattttgttcatgtgtggttggacaagaaagtctatggtgaataccatgctcaacaaggtatgaggtgaatgcttgaaattcacctccccaatcggattgaaggttcttaatgggtaagcctaattctttttccacttgagttttaaaattgataaatgtctgaattgcatcagatttgtttttgagtaaataaacccaagtgaatcttgagtaggcatcagtgaaatgaacataatagaagtaacca

SEQ ID NO: 51410 - DNA, 1130 bp, Cannabis sativa
  modified_base (32)..(50): a, c, t, g, unknown or other
taaaaaataccgtctgacagtatttttgtaannnnnnnnnnnnnnnnnnnataccatgtaaattttcctaataatattacaaaaaatgtgtaatgggcacttgaggtacatttcaaattttgatttaataaataataagagaattactttaaatactattttttttttttttcaaatttacgatttgggttactccgttagtttttcattatgtgagttgctatgtaaattttgattgcgattcatgttgttttgtttgttgctatgcaagtttctatgtggatttcaataaaaatgcaaaaatgcaaaaaagaaaaaaaaaaaaaaattgttttaaagtgtaaaaaaaaatcccttatattaaggtacatagtgcatttcgatataaagtcttacacattttgattttgatttaaaagataagatgagaaaccactaactaattataaagtaacaccttagtatgatattaaccattttaaagtgctaattagcaatactctaatatttaagagttaacgaactgttagcacaatattcccgattatagtttaaattttatatattaaattattatagggtgagaatttgcatggaatgtaaactattattcaaaattttgcagttgtgtatgtcactttcatcttcgacaaatattcacttactgaaactaaaaccttaccaataagccccttatgtaattttgtagacttgatcgctcactcaaattaagttatttcttttatcacgtaccaaaaacagataaaaacttataaatttacatccctatacaagaatcaacttatattcttagtaattgtatattttttagatttgattgaagtaattagttatcaccgcatcattgaatatttattttttcttcttcaaatttggctatatatatatatattttttttttagtgaaaatacttgttattataaattaacaaagagttcatctacaataacagagtaaataggctgaggaatatcctcaaaccaataacatgtctcatccacccctaacgcaaactttgccaaaccatgtgccgccttattggcagtatgtttgacatgcgatacagttacattagggaaaaaggacaaaagacaagagatgtctacaa

SEQ ID NO: 51411 - DNA, 1167 bp, Cannabis sativa
cagtagctgaactcccatggattcattctctttttacagagctgcgcattcaacttcctagacctcccacagtatggtgtgacaacttaagcactatccttctcaccgcaaatcctgttcttcatgctcgcactaagcacatcgaactcgatctctactttgtgcgtgaaaaggttatgcaaaatcaggttcatgtcaaacatgttccagctgtggaccaacttgcagatggcctaactaaagcaatctctagtcaacgttttcccctctttcgatccaagcttacaattcaagatcttacttctgtctctgacgactcgaattgtaatcttgaggggccgtgttaagggtattcggttatttctgttagtgtcaggttgtttcagttagtttgttacaattcattctgttagattgtttctgttgtaaccaactactctctcttcttcaacttgtcctctatataatcttgtaccttcaacactgttaataatgagattgctctttcttcatcaatcctctttgctatctttctggtttctctttcagtctttctttcatcttcttcttgttctgtttaatctttagctatggccaatagattcaacagtgcgcaatagcaatgctcgtaatatatataacaattatacttaaataattattaatttttttttaaaataaggacataatgtgatctaattttgttaattgaaggtaaggtcattagtggcatgtctaaaagtaagctaatctaattttctctgctattatatactaataagtaaagtttagaaaaaaaaaaataaaacaataattaacaaaaatttatatatataaaaaaaagaataataacataaaaaaaattaatatcacatgctcgcattgtcttttatataattatatatttacttaaaaataaataaaaagaaaaactaataaaaattattaaaacaatacgagagaaaaaaaatggtgaaaaaaaatatacaaaagactttaaaaaagtattttaaaaaaaataaatagagtgaaaaatgagagatttttaaagaaaaaaaatgtgagagtttaagagaaagaaagagaggaaaatgacaaaaatattaatattattgtattcaagtattgtcatagaggatcccacataaaattgactatataaaatta

SEQ ID NO: 51412 - DNA, 1065 bp, Cannabis sativa
aaaaaaaaaaaactaattttcaaatttgatattaaaaattttgttgaattgaatattctatacaagttttcttttcatactaattttttttttttctttccacaccaaaatctaacttacaaacataataattagtttttacaaaactattaatagaaatcccctagttatcccttttatagtaaccctaactatgtgactgtctaccgttctcttcaatcttcaatttgctctaaagcctactaattatgatattttaataattataaatttttcattatatataactccactccccggatatttcaaatttctaagaaagcttataaaaatatatatttttacaagttttacaagaaatcatggtcaaataattcggtttctcttaggttgtgttacttagtttaaatagtgaagcctttcaagcctcttcaaattaaaaaaaaaatcactcatatataattatatctattatcttaaaagttcacactctactaaatttaattgtccgatttatattaattcatttgtttattataatatcaccacatgatatcatctaattgaccactaaatttgaaacaatattaaaaaaaaacaagacacttttaataattcaacagatattgtcttagaaattaaggagaagtcatatattaatgtgatgtgagtacaggttctttattgtctacctactatattaatttgattacaaatatgtgttattattatattatatatatatatatataaaaaaaaaattgcaagtgtgacataacaacgagctgaacatgttttttttttattctaacaactcaaaatataatatgcaataccttattaacttattttacacattacgtccctagtggcgataaataatttgaaataataattattctgtttttaattttatcccttcattcttgactcatgtgatgaaatctttattttgtttaaatcaatatgatgtaaattaatattcagcaatatatatatatatatatatattgtaaaatatataataactatggtaattaggttttttcgtagcattttcgatat

SEQ ID NO: 51413 - DNA, 650 bp, Cannabis sativa
gatagaacattgcagacataccatcactaccggggcttttatctggactcattgtttttaaagctgtctgaacttcggctgctgtgaagggtgctgtgagtgatgaatttacttcaggcgaaatggtgctgggaatagttgcaacaacttcagcaatagcatcatgatctgcttctgttgcagtaaataactcaccaaaataattagtaattatgcctttcatgccatctttagaggtaatcttgttcccattgctgtccaaaagagagacaattttattctttgcttttcgagatgtagcatgtgcatgaaaaaattttgtgttttggtccccactttgcaaccaatcaacacgagatctttgttgccaatattgttcttcttgttccaaaagctcatctaaaacattctcagatttcttcaaatcatccataagtaatggggttcgtacaggctggttattgagtctggtgacattcttttgagcattggaaatcctatgtttcaaatttccaaaagttgagccatgccattgttgaagagaagaagtacatgctgctatattatgcagaaaattatccatggctgagccttgtatatgagattgccattgcttttcaatgattgccgtggcttcttcttgctgtagc

SEQ ID NO: 51414 - DNA, 1088 bp, Cannabis sativa
  modified_base (718)..(732): a, c, t, g, unknown or other
  modified_base (785)..(790): a, c, t, g, unknown or other
aaataacattaatacatctatatttacttcttgggatagtttcctgattaagttcctttaatttttctgtttgttgttattgtttccttgatttttctgtttgttgttattgttttcttgatgtcttagcttttctttcgtttgtcgaccactcttagagtatttctaatggtatattattttactaaattagtataaaatcttcacaaataacagaatgttagttgagaaagtaactcactaagcttctcttgacactgctgacaagtcataggctccaaaacaatgccataacaaatatcaaagaaacaagatcccatttcttgaaaagaaaaaaatgattttttctaatatttttttttaaaaaaattttcccttgtattggtagtattgatgatatgaatatatttatcatatatataaagaaataagttgtagtacaatattatctattaaatttttaatgtgtgttactatattatgcatagaaaatcatttaatctaattacaatctattgattcaagctcaattgatctaatagaattggatatcctattataattagattggattcggatgtaaatattaaaaatctaatcggatcggatcggttgttggatgggacatccgatctagtggataactgaccaaaatgatccaatttttatccaatagtcatccaattatatttatatatttttaaaatacatttataannnnnnnnnnnnnnnatattttatttaaaaatatatatttatggcataaaaaaacccatataaatgtnnnnnnaaaaaaaaaaaaaaccataacctaataatgttatttacttatgacataaaaaagtaaactgtaccctcaattcccatatttataaaaattctccttttacaaatggagttttttcacaagctctaagaatgccaagagtcccctttgtagcaagctcaattacttctaccttgcatcttgagaaacatttaggggttttttcattaatgtacaacaaaaataaatatattaggaaaaatgtgcaaaaaaacttaattataaaaactcatacattttaataacatatttactaatattt

SEQ ID NO: 51415 - DNA, 915 bp, Cannabis sativa
ttattattattattattatgatataattattattttttttagaaaaatatcttcgtcttctttttttattgagtaaaatatcttaaaatcacaatttatctttattatcttttttataagaaaaatagtgacatcataaattaaaagcaataagaggaaatagataggggaggaggtttcatccatccatatgtaatcttcatactctctagatcatatttttgctaaattttatcaaaataattaagctgcattattagcatatctcatcttaatatgagagacaatattataattctaagcgtaagaaacgtataaatatggggtttgatcggatttatattaatcagtactactactcaagatttggcacagtaataataaccttactgatctggatcgtactcttctctcataatgagttctatatagtgattcttgtactgacaatacaagatggatggttgtcttattagaccattttcaatgatatacattattttattaaattagcgtagaatttttacacaagtttactctaataacactcaaattgcactaaattagtgtgcaccaaattttacaccaatttgtatatacattttttaattgtactctaacccttattttattttattttaaaatataatcttacattttaattaactctcaaattaaatatttttacaaaaataataattaatttaaaatactaacgtatttaaaaatacaaaataacaataaaaaatactaatactaattaaataaaaataatataacactaagttataaaactaaaaataataacattaattaaaataataatttcatcacttgtggatcttagctaaaatatcaaatattagctattagctatatggactttaattttgaaaaacttaatattcttgagct

SEQ ID NO: 51416 - DNA, 1336 bp, Cannabis sativa
taatgctatgcctaagtggtctttttttagatcgatacgcctactgtggttttattaatttttttttttttttgatatatatgcttactttggtcttgtgcggcgaatttgtttatttaattagaaatttcctttttaatgtttgttaaaaggatctaacttaattacaattcacccttaaatattgaatatttatgttatttttaaatatttaattagattgaaatcgaatgttagatcagatctctaaacattcaatacatctaatatttaatcgaactctaagcgggctctgaatttagtgggccataaaaaaataattattttgagtccttatttaaaaaaaaaaattagtattttttaaaatcagtaaaaaaattatataattttcaaaggaaaatatttttttttgggcccctaggctaggtgggtcctagacacaggtctagcccgcctatgtccagggtcgggcctgatcgaactcattagtattttaatttaatttgtgagagcaattagattttatgttgttatactttaaatataggatttttttaaagtgggaaattttgaaaatgtcctacttgtgaagatttattataaaatggttctcactatgtttttgtaggtataaaaagagatacatgaccactacaatatagtgtagtgtaggagattattattaatttactctgagtctcacctatttaatgttttataaacccatatttttatgggaaatcaccatctttgtgggcttttaaagaatttatattcattttcacagtaatttttaatcttttctattttgtatttgtgtttctttaattttatgttaactttaattttttattcatttttacatttcttcctccctttcactgttcattgatttctcatctttcttatttcttaactgaaactaattcaaaattgatcactttggagaaccttcactttatttgaaggtaacaatttatatatatgattgaatggagcttttcttatttggatttttcgatataatgtagcttacctaatcagattgagaatttcttttaaaaatttctttcactctcaactctttgcattgatttatttttcttgcaatatttttatttttattctcttttggctttgatgtttgatgtcgcttagaaaagaagtaagactcatacgtggaggactttgattggtcattatagtcatctgggtcaactagatttgagcagaaggatgtagtatagaaaaggttgatgagagatgggttagccttgggtatcagtaggagcgccattaaaggaggagggggtgagttttgaaactgaaagtgtat

SEQ ID NO: 51417 - DNA, 3089 bp, Cannabis sativa
  modified_base (1243)..(1243): a, c, t, g, unknown or other
ttgcaccagttctccttgtctttgtgcaatttggaggggtggctcatcaacatctcttcttcgatttttctttggtttgcctggcaaaatgtttgcatctggaggaaggattggattttgacctgttttgggccacttatcagggcttgggacagggtaaactgtatgttcataacacttcttgaaagcctctatcttgtaacaaaggtgaacataagcatgagattgatggttgcaaaaccagattgcagctaaggcatgtccacatgggatgcctgtcaactggaatctcctacacgtgcatattttcccctctaaattgacagtgaaaccacctccttgattcatctaaatttggaacatagttgcatttgcccttgttacgacacatcgtttagcaacctctgttagcttagtagtaattttaacaatgttgttgtgtatagggcttttccattttgatatactctccattttttttgtaaaaataacacataagccaatacctaaaaagtaacaaattaaagttcaaaataagtattttttcatcaatgagcattgtagttgaagcgaacataataagaaattacctaatggactccaatagagtaataattggtttgtcccttgcatcaagaattgcattgttgaagctttcacaaatattgttcaacaacatatcacatttcaccccctctttgaaatgtgattttgtttattctgatggttgatttgctgccagccagttgtatgccctcacattcacattctttatctcttccattctcctatcaaaatctgcttcaatggtggatctgtctgcattccacagtagttgcttcagcagtagtccagggaactcattcttgaaatttccatgcatatgtctcacacaaaacctgctatctgggctgtgaaaaatgttttcaaccgcattttgaagccccttctgtctgtcactcataaaagtgaatgactttggctcaatgggactcaagtcatctcttaataactctaaaaaccaactccagttgttggttgtctctttctcagtgacagcataggctattggaaatataaaatttgttgcatcaattccaatagcaaccagcaagactcctttgcaaaaccccttcaaaaagcacccatcaagtcctataaatggcctacacccatttttaaacccttccttgcaagtatgtagacagacatagcagctttggaatattcttttatcaccttncatctcacacttaattttggcagtgctacctagattggtctccaagagttgtttgaagtaatcctccaagattgcatactgttcaatgactgtgccttctagttctacctttgctatgttctttgccctataaaactttgtggtagttactttagaatattttgtgtctttgattatctccaagaaggacttgtactcaattgatggatgtaatctgaatgtgtctctgaattgttctggtagccattgtgtagtaatatgtctattatccaaaacaatgccacaactctcatgcttaggttgacatttgtttaccctgaatgttttcccatcttgcttcacatatgcatagagcatcaagttacatccttcagcattacatttcaccctaaacttcttgcagtcattagccagtagaatgtactccttgttttcatgaatgaaatattccttgattgtcttccttagaacttctatgctagcaaactccatgtatggtttccactccaaggcatccagatttgtctctggattgtatggcaatttatatggtcctccaccttcattttcttcatcactatgaacactgcccatttcatcttcttcaccaatgtcaccttcatcttcacagaggttatcaggaaccaattcagtgtgccttccccaccattcacaattttcaggttgtgtgtagccatgcctctctacttctggctcaccacagtattcctcctcatgcaaaacaaaatcagcatctggttgggtttctggttcagggtgagattttggttgggtttgagggtcaggttgggatgattgtgagggaaactaaaagttaggttgggttataatatttggtttaggtttgggctgtggtataggttctagttcaagttggggttgtgatatatgttctgattcagtgtggggggatttgtagttcctcctctgcctaagtcttttggctcttggtggggtttctggttgagattggggttccttaagcttcctcatttgcctaactcttttggctcttagaggttcttcaagtttagggtgggtttcagattggctatgagtttctggttcagggtggggttgtggttctggttgggtttagggtgttgggagaatgatttctggttcaatgtggggttctggtggagtgtggggttctggtttaatgtgggcatctggttgagtgttgggttctggttcagtgtggggttatgattgggcactgaatctcaacctcctcctctgcctaagtcttttagctcttggagattcttcaacttccgtataaccagtgatctccacatctggggaacctgttgaaccatgattatcctgtaaacaaaaagaaaattaaaaattagaaacatgccaacaaaacagagccaaaattattcattttgacaaatatatacactaacttgggatgctggtgctacatctggcaaaggggggctttgctgtaatggtattggatatgttgttaggcctccatcatcatccaaatgccccaaaatctcctcagcccagtccataatttcaaaaatattctgatcatcaggtggatctccacgatcttcaactttgccatctccatcatcatggtcatcatctccatcatcatcaccagcaacatcatcatctccatcatcagcagcagcatcatcatcttcttcagattctaatgatgaggaggatgaaatatgaattgtctcaggcacaatattacatggttgggggttgcactctcgagaatctacctcttcatcaatccattgtgctgctaaatcaccccattacacaaacttgttgtagaattcatcattaggat

SEQ ID NO: 51418 - DNA, 986 bp, Cannabis sativa
atatccacactttgcggattcgattggattggatcgtgcgaattagattggatcaactattttatggacacccctatgttatactaccacaataaagtgtcttagtataattagttaacaatattgagtttattaaagtaaaatcattagatttattaaagtaaaataagtaagacttgatattgagttgtaccaatagtaatattacactttataaaagtattaaacaccataaataccctttaacatttctcaaaattaaaagggcaaaccaattaatttaggtctcattgatatgtgattcaaaaattatattttcaaaaaagatttttggaaacataaatttaatttttttatattaaaaattgtttctaagaatgtggttggtaataaattattgaatttatttttaataaattttttaaaattgtgattgggtgataatatcaaaataaaaaaagtacgagaatatttgaaaaaaatttgaattcaatgatttgaaaacatagaaaacataaaattattcttttcatttgtttaagggttaatatcatgttagaccatgtgttttacaaaaattactgatagattctctattttgataaatgataaattagaccctatattttttaaaatagtactctgaactgattttatgtcaaaataaaacttaataataacccgatctagatatattatgacaaaaatacttacgtttactgtatttgttcgtgttaagaattgtcttcaagttggttatattaaaaaaaattatcaaaaattgaacttagagtactatttatactattttagaaaatatagagtctattttatcatttaataaaatataaggttcaatcaataacttttacaaaataaaaggttcataatagtattaactatttttttaacctaaaacttaagaatataatcatattcagatttagagtgcgtttggaaatctaataagaaattgtatttgagtg

SEQ ID NO: 51419 - DNA, 1609 bp, Cannabis sativa
tttgattggttagataatgcatatactttttatgccatatttatcgtaacattaataattttttccatatttctaaaaataaccccttatataaagggattcttcggaccagggttagaggccttgggtacgggcccctactcaattttcgagtcgactctaatgaatgattaacaaaattttataataattattaaatttaaacatgtgagattagtataacttctgatatcatttaacatttttctattaaatataatagagtttacaaatgcattgaaataaaactatatatatttttcaataaagggttactagaggcatatttcatctaatttctcccccaaaagttgtataaccttgtacaaataaatatatcatgatgtagaaaaatacttttgtacagtaccccatactcgatttgcaatttcaggtccaaacaaatagggcaaacttgaagaaaattcgatctcaattgttttactcctcaccatcttatctctctttagaaggtacattctctcaatctcatcaactttttcattgttctcaacaatacatttttctaaccaaattcggagcactcgctttgcaataagatcgacatgttcttctataatctcatctattcgctctccagcctctgactcaattttgactacaatagcagtaggagacacgattcttcgaaagtaaagagatgaagagaagtaaggcttaacttcaggaattttctcgagaatttgtctttgagcatctaattcggtgtcttcatagaatttttgtaggtaatctggatagagagcaaggtcttttcgaggtggtaggtcgagaatgagtactagggtttcaggactactacggattatctccaataagaagtttggtgagtttgttgatgcatttagataggccgagagacttgttatgttcaatgctcctccatttggtagctcgcggtgaatccaacctccatatatgaaatcaatctatataccaaaacataatacatatatttagaatgttaggatccaaaccaaagaaaggtttatctaattaacttggtgtgattaaatgttaagataatgtaccatattttgatagtttataattcgattgaattagaaaatttaaactaattaaattcatgacaaactaaggagaaattccaacaaaaaataataataaaaaaaaactattttacattcaatatataattcccccctttaccttatttcttatatagacttatatataacctttgtgctaattgattggtaacaaaataattaatattactaaactacatatttctccaacatttaatcaataattaccatgttattatgatcacaataagatagtgtaccaattttttttgctaattgtgaacctccaaacaatatttaatacatatatatatatataatcattataattaatatttctaatgcaaatttataactacaaatatcactattcaaaaagggatttttgtgtcagtcaacacgacaattaacattgttattaaccgacgcatttgatcaccgaaaaaattaagcatcgtccaacaacgttaatcattatgtgaaacttaatactcaaaatt

SEQ ID NO: 51420 - DNA, 2795 bp, Cannabis sativa
  modified_base (2384)..(2387): a, c, t, g, unknown or other
ttttttttaattttatttaagtaaggttcgggtctggggtcgtgtcggggctggccgctagggtttgagatctgggtttgagtctgggattcaggtgcagatctgtgttcgggtccgagatctaggtccaagtttaggccgaggtcggtgattgggtctgaatccgtgtgtcaaagtccaaattgaagtcggagttcaaaatattgcttaaaaaaattatttaaaaatatttgaaagttacttttttctatatttctaaattataaaattaaaaagtaatttttttttataaaatacgtttttacttttttaattaaaaaaattaaaaagtgtaatgaaacttattattttttatgtttttttttttttttgaaagggtgaaatatatagagtttaggtgaactattaatgtgtatctatatataaacatggaaccctaataaattagttgcttggttttttttgcttatatatacataatgattaatgatatatatagatatatacacattgtcataagtgtataggtgttgtctggttaatttgattgctatatatataatttgatatagtattatggtatggtgcaactatatatgtcatcaaatttatggtacaacactactactagaatagatttatatatatacaattatttatataaaaaaaaatgacatgaatttctcttctccaccacttatttattttataaaaataaattaggagtgcaaaataaaaaaaataaaaataaagaaaggacaagaaaatagagagtgatgaggtggggttgggttgggatgagctgtccaatactgaattagatgctttatctgatgcttacctgtgcctgtctatatatatatatattgtatctatctatatataatatatagtatttatttatatatatttatttgagtaacatacataaccaatgtaaaatattcacattaatttaaatcacctaatctaatctaatcacagcaagtaattactatattcaacatatgtttacttgttataagactatactaatatggtaataatataaaccctagtagaagaaaataagtaactaattatttttttgtttagaaaaataccataaaactaataaaaatatcgaaaacaacaaactcttgtcctaataccaatagcgtctaacaccacaacttttcattccaatcttttagtcaatctctgtgctcgaaaacggatgtcgaaatatttttttttttcatggcagtatttcttatgcttacaatattatttctataaaaattttacctttttttaatattatcaaaaatgcgtttgaaatttttttgaatgttaaactgaattattagaacttatattttcagtaatgtaaattattcggaattttttaaaaatttataaaaataacattgtaactataacaaatataccgctatgaaacaaaatactctaacatgtaattttagacgtgaatgttaactaagaagttgtaattagcacgcttctatgataggaatatggcagttctctcaagtaaaaagacagaaatacccctggatctaggtatagattagattagagcaacatggaagtgttgataatagtacatatatgttgggttttcaaggcccaaaagttgtggagaatgtccagacttcaaccacagcataaaattcaactatgtaagtttgttttgtgtcctaaaaaaataaagattggtttttttttttttttttttaaagtttcaatttttaattaattaaacattaaagaagactgaagtgaaagaccccacgagtgggtttttttttttttttctgggtgttctggtttatagtagcttcaattcaaggtccccccacctgcatctttctctctcttctttctctctctaaaagaagaagaagaaagacaacagtcaatcccaaagcaaactaaccccacatacccaacactatcaattttaagtctttggttacttactttacttatgtccaaaaaaaatgaaaaaagaacacatttttatttcattaatataaaaacacaacctttctctcactctctcttcttattaactctttcaaagtttcaatctttctctatatctcttatgaccccaaattttcaatttttttaataaataaaaaaaaaccctaaaaccccttttttttttattaaaaaataaaatatatatcatatcccaatatacccacaacacacacacacacacaaacccaaaaaaataaaaatttaaaagaaaaaaaaaaacaaaaaaaattaaacccttccccaccaaaatggacttagcagatttgcaaagcaataacaagaacaacaagcttcatcagcaaaaacagtcatcaaattcttcttcttcttcttcnnnntcttcttcttcttcttcttctcatcatcaatttgtggtcccttttgatggcagatcttcttccaattcacctttcatgggctccatttcaatccaagctggtctttcccatagccatggccatacaaattcatcaacaacaacaacaacaacaacaacaacaacttcttcttcttcttcttcttcaacgacaacaacagttgatgcttcactagccatagcaaccagatccgaatctcttcctcttaaaaaccagttagtggttgcgccggcggcgccggcgccggtgaaaagatcgactaaagatagacatactaaggtggatggaagaggtaggaggataagaatgcctgccacgtgtgcagcacgtgttttccaactcactagagaattgggtcataaatctgat

SEQ ID NO: 51421 - DNA, 1131 bp, Cannabis sativa
actttctcatgatttggtctgtacagtagttgttagagttttctgctgtatgcagttttggttaacttacagtaatcatgcaattatgttttatagcaatctcatgttactgatgagaaccgagtaatccaagctcaagaaaacaataaaacagtagaaaaagtagatgatcgatattaaatttttcgagaaaagccaattacaagccataggagcccttaggcgtctattctcttactcacctatatatctaccctcccaacaacgactttttatttactatattctagcacaccatatttatcctagggcctgacagtactcgtgtaggttcagaaccatcccattggtggcaatggatcagcttctatttctgatgtttctccattgaagctatcgatggacaggtcttttcattctgtcgatgtaagttttcttggggattgtttctttgtttatttaaacgtatttaagctacaaaatcaatatatatgattgcatttgtgtctgctgttgttacttttgtagggtcagaatcattccattagtggcagtttatctacttctgctgatgcttctccgctgaagctatccttaggcaggtctattgatgtaagtttctcgccatatctcgacgttattatttactcggggcaacttaatttaatttcaatactgtaccgaatgtgttgatttggtttccattgttagctgtaaaattgctctttttgctgttaggctcttttagttcatgactggattttagtcattgcaggaggacaatacaagcagccagcttctgccatttcgagtatgaacatgacaataagattctttggtttgtttcttttttgctcctccggagtatacagcaccgcatactcaagactacgggggagcaggctatgtacagagcagttacagtaattacgcgtattttttttgtgcggaaatagaaagctaccgatcatggtaagctagaaggagaagaaaccacattgattgattttgtagtgttattacaattctataaaaagtagacacaatttagttttaccactagagaaaagtgatcatgaagccattgtcattctcaatttcttactaaatcttttgcattgattgatatga

SEQ ID NO: 51422 - DNA, 1173 bp, Cannabis sativa
attattaatatttggtggtattgaattttaaataccttctttggaataaggtgctggaatctgtaaaataaactactccagtttgggtgtcaatatccaaagcatttgcaaatccaaagggtgagccatcagcagaagtggcaactggttgggccagacctccactgggcccaaccattagaagcccaaagtaagcatctgcaatgtaaagattacaagtgttcttgtcaaacttcaggcccaatggccttccacaggttggctcgttctcttggttcgttgacccatcacagatactcctcggcctaatcaaacacagtagatttaaaactgtcataaattcgttgatataatcaagtagtatacattgcttcaagaaagaaatctatacaatacatctgactagaatatggtatataatatagtatatatataatatatatataatatgaacttactactttaatgaaaagaaaaggtaatatattatatatattagtatattaccgattaggtgaggtgaaggcaaactctttccaacccatgtttggtccatgccattttaggattgtaccgtctgaaaggctgacgtagggtccatttccatggcaatcgaaagcaatgctttctggaccagaagcccttgaaacctctatctgctcataatttttagggtacacaaatgaagcagctacagctgatgataaactcaaaatataaccaaaaactaacaaaaccatcataataaaaactggtgcctttagtatcatcattctcatcatatatattctctcttgtggtttctggatgctgctgcaatatataatatatgtatgtattatgtagatatatatatatatatattatgtatgtagatataaaaattcatgtatatatataatactattccaactacctgtgttaatgctcagtactcttaattatgtttgtaacacatatttcaataggggaaattagtactttgtttttcttttaattgaaaccttagaagttataaatgatgtgtcagtttttttctaagtcaagttgttaagttggttctttttgagggacaatttgttgtaaattatatacgagggtattttagtcacaaagatttaatgatagggacttttatttgcaccccaccaaattataaatacactccattat

SEQ ID NO: 51423 - DNA, 1339 bp, Cannabis sativa
cctctgattggtgaggcggcggcgcgtcatcttgcgttggacacggcgaggctcaggaggcatgactatgtcttagtggagagtgattcagatgtggttatcaaagcgttgaagggaatgcactacatttggaatgttgataattatgtatctttgtgtaatcaactctctaattattttctttcttgtaacttttcttttatgtcccgtatttgtaattttgctgtccataatgtgactagatgtgctttcgcccagaactttacaggtgttatgaagtcatcctccatacttgtttctatccattgtaatgacgaggtctaattttctttatctattgaacgtcttattttttttaaaaaaaaaaacacaaaaaataatataaataataaataataatataaaatagtcatttgtctacatattttaaacgactatatttattggtgaacattgaaataaaaccaaaattacgccatgttcacaatgaatggattctttagcgaaattaatttatttttgttccgaatgaaaatactttttgaagaacataatagagatggcgtatattgtgcaattcttttgtaaaaaatatagtatggaccatggtgtgagtggtgataagctttcgtataattttctctaacctttaatgcatatacgtgcagctgcaatgcaatgtgttaaagccattcattcgtacatacaagtaaataatatataactactaagacttgaatggagtactactaattcagacatgattaatgaatgccggcaaaagtagcagcaaaaggatttgatgcccttcaaatattaaagcaatacgttataaatatatagttatttattatttttgagttttttcattttacattttaaaacagttttgttttgtatttttacagaattttacatagaaatttttattacaactaacgctgtaatctaaattgtaacaaaaaatcgtacagaaacccctattgcaattagcgctgcaaccagtttaaatttaaaaaaaaaattaaataatagtatatgtggtaatatccctattatttttatatattattcacactatattttttatatatacattattcgcactatattatttttatatattattcgtactatattttttaaaaaaataattcgcactatttatttatatgtaaatatatatgtatatactagcaaaaatttattatgctaggagaagtgatacattaattaaaaattaaagaaaaatataattagttattaggtgaaattattattatgtgtatctaaatactataatttataatttttgacaattaaaagtaaatattggatg

SEQ ID NO: 51424 - DNA, 996 bp, Cannabis sativa
aaattcagaaagcataatttagtacatgtcaaaatttaatggataaaaatgctaattaaccatattttttttatataataccataactgatgtcgtactagtaagtattagttttcttattaatattattattataatttatgtatgttgtagtactgtagactcatttccaggtctatatgtttccattttaagctttgaatatatataatatctgactcataaccaagtcatcttcatttaaatggccctacttagctagacaataataatcaaatttgctggcaataataataataataatagtacaagatgtagttacactattatctaatttctcatgaataattaattaaagttaaacacacctctaattatatattacagaaaataaaaccatatatatgccattgctacctttatcaaatattattaatgtacttgggtaacttagagtaaatcataagtaaattattgatttaatcaatctttacttgtacaaataattttgtattatatcaacatcttccttccatattttattatacttttgccttaacaacaatcaattcatttggtcgtgcgtataatattttggttttttttttaagtcaaatgtataataatcttacatttattgttacactataaaaatattataaaaacttattagcgatttatcggtaggatgtgaaagtctataaatattattccgtaatgattaatagaaataaagattcatttagccatctcaaaaaacatattttaaaagatttgccatgtctcaaaaagaatttgttactttaaatctataaagtgtaaaatccgttacagattttatttttaattaattgagaaaaatttgtaaattgataaaacttggggattaaattttccatctccaaaaaaaaccactcttatcccatatcagaaaaattctcaattctgcctttggggtttcaactctcccataaagttcgtattttgtcaattcaa

SEQ ID NO: 51425 - DNA, 1189 bp, Cannabis sativa
  modified_base (199)..(202): a, c, t, g, unknown or other
gaaaattaatgataaaaaacattttattttttattttatttagttttgtaacttattagactttctctaatggaagatttaaaatttgtgctaaatttagcacaaaaaaaattgtgtttatttagctcattattattatattaatgatcatttaatattttattaagaatgtacaaaaattattattttttattttttnnnntatttaaataataataatatggtaactaaataatgagtattgttattgggcactatctagatgtgacgtcctaagattagttagagatattacctaaaagttattattgaaacctgatacttaattgcacaaatattaatatgataccgagaagtgtgctagggtgctttttacttttagaaaagaatgtaaaatttagtaagtcaatgaatcataataattagtgacattatagtaaataaagaaaagtaacatttattctgggctaaatttgacacaatgcatatatggtgcaaaatttgacacaacttttaacatgtgttaaatttagcacactttttaaaacactattaaagtggcaatgagtgttgagatttaggtgcaagtaaatgtaaaatctaaacctaacttatttatttattgcatcaaaaactaaaactcaaattcaatctatttataatcacaggcttatataaagaatattgcttaaattttgttaatacatcagctcataaatatgtttataccatgtctaacatatttttaaatcatagattattattggttttgtgttttgtggttttctacttttttttttgtgttgattgctttgggtatggttggtcgtataattattttcatttattctgttttgaataataagtttgtaattgcttaacttttgtttgaagattattagcttatagtcacagatgggtataatctattaaatgtgcatttgggaatttaacatttttttatacttgttagaggcttcgtaatcaattatttattagatttttagttggagttgctgttagatttttcttcattattattgtaacagtttgataagtttatttttgataattttacactatgtgagttatcttcatgtaatggactttgttcgatttacctattaatgctttttttctctcaaagaaaataatatatataactattttatgatacaattaagagcaa

SEQ ID NO: 51426 - DNA, 2254 bp, Cannabis sativa
attgaagccttgcaattgaatgggggaaggggttaagtctatctcggtaagccatatcccttggaatgccaatttgaattggatgttaacagagctcccattaaccataagaaccgtggaaactcgttgtttgcaatttaggcatcaatcactaaaggattgttattgggtaatcacacatttttggcatcatcctctgtaaaggtgatggaaatattcatcattttggggcactgtacgggagattgcaccagcacacacactttcccttctactacctctttcaagtacaatttttgcgagtttttagtacttctggcaagatggggtccaccttagattgcaaccatatgtccgtccactaaaggtggagtgagtctaagaggatatggggttcccggtcctggtgcaagtaatgccaccccaaccgagcctggtagaacagggagtacaggcaatgatgctccttgagcttgagaacatccaacccctatagagggataacaacgttctactattcggtaacaatcatgtgtccgtgtacgaccctctatttgggatagatgatcaggatttggacccagtgtctagatatcccgcttggaccaacatttcaatctcaacttttaaataatcatactcatttgtggtgtgacccttctcctcatgatactcacactctttattttgatcacatctattccttcctccatgtgacattcgtagaggtttcttgtaatggaccatgttataggtctctttgtacatgttttcttgagtgtctattagacttgtatactctgtgtacttctggtcatactcctttcgtggcttttttaaagaatcattgtaattgtggcttttaccccctatcttttttcagggttggatcacattagactcttgggcctcagttttcccttatccaagagctacactacatcccgtctatgctgccccgtacctagaaaaattggtctacgtaccaaatagactggaagtagcaggtccgtaaatggttggggaaaacaaagatcgtagaagagttaagaccggagccagaactttgggtgtgaagtttggagtatcaatggaaggaggtagagttagaggaactccaagatcctgtatgtcagaatcctctaggttgataattccttgggccttcaccataaactcactcaaagttttggctctctttctgtgcacctctcccaatagcagagagccaatagctaatccggattggagagccatcaatttcatgtcatcgctaactttagtctgaggaactacatccatcatcctttgaattaaagcctttaagatttaattaggctgttgtttgacattagtgagagaaccaagttccatgtccttgtcacatgcaacaataaactgtttgcagaaagacgactgtaagtccctctagctatcaattaattttttggctagtcgcttccaccaatcttctgcagacttagtcgaggttaaggaaaaacataagcacttggcattgtcactgactcgggcaacttgcatcattttgttgtaattttccaaatgcgctcacgaactagttcttccttcatctaacttaatgtgaggcactttgagttttctagaagtgcagtctctgcaatcctccttacacaaggttctgggtcttcatcctctgagtccgagagggctctgctttgttttttaaccaacttggttagagcagctatatgctcctccaacctcgttatgtcactctcaggaagattacatcctctcatcttatcgcttaagtggttcctaaggtcacccccacgtggccttgccttttcacccttgtacttctcgtacttggcatcgattcactgtcgaaggtctgtagtggactagttgtccttagaatgtcccacgatcatccttatgtctcgattgacataatcactagggtggttcctttgcccttttcgcttagttactcttgcatttttccccttagcgcggtctttcctctaggatcaaaagggtgttcaggctcgaaagcaccgctggccctctgcatccttgagggttgtttgactggatttgtgtctttttgtttaggaatggacttttgtgggagctcatctaccttgcctttatatttatccttgcgaggattcaaggttttgacttttggttgtttgtgagcacatccttcaaccattacttcaactgaagggtcatctttggactttgccaagtctctaaactttgt

SEQ ID NO: 51427 - DNA, 1353 bp, Cannabis sativa
  modified_base (1300)..(1319): a, c, t, g, unknown or other
ataattcctcaattaactcataattatctaattaagtttttgctaatccttttcttaatcccgggtattacagaaagagatcaagattacctgctggactgtatcttggaatctccaccattatcttgtaaactgttgaggattgatagtgtacgatcaagcatctgaggcgagcttaatagagacatagccctaatttggggtgaacttcgagatcaaatttctttgtgttcttgtgtgtattttttgtttatctctaaccaacaaagatcgatctagatctttgctattgtttggctctagtttgtgtttggattttctaggttcaagggttagagattgaagcccaaagattcgagcttgaggaagaagacaaagcatggttgctagcattttggggttgatcgaaagtgttccgatctttctaggttttggttttttaccatacctacatggtgtcattttggaggtgtgaacttagatccaaaaaaatgtgtgtaaaaggtcattagtgaccttggtttctcttgtttagtgttagttggtgtaggtttatttctggaattgaattcctacagtggtacagagcttggttcaagctagaaagtttcaattaaacctagaaacaaggtcaagaaactaaaaactaagataaaaatgaagaagaaagcaatcttttctatcaagaacatatgaacaagattgctctaacctaaatctaatttgctacattcttgttttgttattgtgttcatctaacgtgagtaacattaaactggatgtcaaaaaattcgatggatcagaagactataagatttgtaggaaggaaattctagctcttcttgcttagaatgaactactaagggttcttagtgaccctagtgaatggcgagaaaatacctcaaatgaacaacaagaagaattacatgaaactaatattcgactaataagttttaacttatctgattcttttatcaagttagttgacaaagaaaacactccagtaaaatctagaagatcaatttcaaaagaagtctttgatcaacgagatatttcttaaagaaaaaaaatttagatacaagatgagcttcagcaagactcttgatggaaacctagatgagtttctaaggttacatattgagctggccaattctggagaaaatgaggcatttagtgataataatcaagctatcatcatcttaaactcattacatgaatcatatagaaaggtaaagaatgccattaagtatcgcaagatagaatcacactggaagaggtgattgttgggttttatgccctnnnnnnnnnnnnnnnnnnnntaatcagatttgcttattaatatagatcagaaat

SEQ ID NO: 51428 - DNA, 988 bp, Cannabis sativa
gctaggttttctcctttagcgatccgagagaatgagagagattggtgtgaattaggttaatgagagagagaatttagtaaggaatatttttcaaaagaaatttaataaggaattaaataagggaatatatggtacaaaaataggaaaattaatcatgtttaattgtggatttcaattaaaaaataagaaaattattattttttaattaggctcatgtccagctattttggactagaaaagtcccccaaaatatttatctagtctagcattgttggagttcaaaatacaccattcttttagaaaatatatatatcacgtctactactggttttctagtctaactttattggactagatagaatttttttctagtcctacaatgttggactagaaaactcctcaaaatctttttatgtccaacaataattttgttggacttaaaaaagggacattaaaagggttttttgtagtagtgactactgacagtctcgcaacataagaagattctccaccagtcagcatagaccaccatgtgatgatcatctatccgcagagactccgaaaaaccaacctagacaagcagttttcgaaatttctagaggtagttaaaaagttgcccatcaacattcccttttgcagaagccttggaacaaatgcctagttatgtcaaattcatgaaagaaatcttgtccaaaaagaggaaaatggaagactatgaaacagtggcattgactgaggggcgtagtgcgatattgcagaagaaactccctcccaaactcagagatcctgggagtttcaccattcattgtaatatcaggagaatagaggggataaatgcattgtgtgattcgggagcgagcatcaatttgatgcctctgtcggtttttagaacagttgggtgaggcaaagcctactacagtaaccttgcaattggctgatcggtcgttggctcatccaagaggggtctgttgattaacatcctaaatat

SEQ ID NO: 51429 - DNA, 1907 bp, Cannabis sativa
aatgctacaatctctctgccgatttgagcaattaatcccacgaatcctgggattgatttggtgagtaattcggtcaaaataaaattaaaccaaggagatatggtgcatggaaaatcaatagttcttgatgacaataatttgccacctgtcaaaaatacacaaagtcaaagcatgttggttttggacaataaaagaaggaggcccaattctgaattggaatgtaatgggcctgatgacaattttgaagaacatatggattgtactggagtggatggttcaaaaaacttgtctagggcaggttctgtttcacaggcccgccattcatcatgaatgtgttaagttggaattgtcgtgggcttggaaactgatggactgttcaattccttaaagagattgtatctcaaaagaaacccaattttttttttatgtgaaacaaagtgtaacaaagctagaattgagtggcttaagaattatttgggctttgaaagagcttttagtgtggaggcccaggggagtggtggtgggttggctttactttggaagtttaatgagtttggtaagcttttgggcttttctaaccattacattgattttttggttgaatccgaagcaaacaacaactggaggctaaccggattttatggagagcctaaccgttctcttcgtcggagttcctaggacttattgcattggttagcaaacaacaacacaactccttggtgtgttattggtgatatcaataacattatcagtcatgaaaaaaaataggtgggcagagatacccgaattggctcatgaatggcttcaattcggcattggaggattgcggtctggttgatcttgagctcgttgggtacccgtttacatgggagaagagtcgggggactagggaatgagtggaggttaggcttgatcgtgccttggctaatgattcttggaacatgaaattcccctcagctaagctttcaaacctggaaacgtcgacgtcagatcactccccctatttctcgaaccaaaaattgttcaggaagttgttggtcagccccggttaggttcgaaaatgcctagctcaaggaacctatctgttatgagattgttcgggataattgggacaatggttgttcgactggtttggttggaaaaatcaattcatgtgttgtgcatttatctaattggggaaaggaactcacaagtaatttcaaggcgcgaatccgtagttgcaaggttgtacttcgttctttgaaaaataagagagatcccttctctctgcagcagtacggggaggctaaaaagaagttgtttgaggttcttgatcaatgtgaagctttttggaagcagcgttcaaagcaattttagttgaaaaatggtgatcaaaacagccgatattttcatgttgcggcatcaaacaggaaacataacaagaacattcaacatctaaaaaatgattaagggcagttggtggactgggagaatggcttatcaggtataatccttgattattattcgtctctttttactgcatctaacgtggagtttaatgaagttgttagtgaagttcctactttggtttcaatggagacaaatcatgaattattaaaaccagtttctgaggatgagatcaaggtggcggtgtttcaaatgcatccagataaaagtccaaggcccgatggcatgacacctgccttctttcaaaagtgttggcctattgtaaagaaggatgcggttgatttggtgtgcaatttctttagaacaggcaacttggaggatacttgtgggaatgctcacatcgttctcatcccaaaaaagaagaaccctgacttgatcacagacctgcggtctattgctttatgcaatgtaatttacaaaatcataactaaggttaggaccaatcgcatgaagccgcttat

SEQ ID NO: 51430 - DNA, 1419 bp, Cannabis sativa
  modified_base (859)..(870): a, c, t, g, unknown or other
gtgcttaaattcatgaaatagaataatatgttgcaattttgtgtgaaatctgttagttagggttagatttaggaagattaggaagaggtctgtcgaaaatgggatttttttagatcgggcccgatggggcctgatgcccgtccgatggtcgggtccgatggggcttggctggaggttgaagatgattacccgatgacctgatatagggtctgattttagggtctaatgcaccctttggcttgtccttgggcccgatgccttgggctcgatgggtccgatggcttgggcccgatgggtctgatggcccgatgggttcgggtgggaagatgatgggaagagagtagttgatgtaattggagaggttattttagggaaaacaataaagttgtcatatattagaaatattggtaagtataagttttagagaaattttttaatgtaatgtaagcataaaaaaataaatttcccttttcttatcacaccctataaataaattaatatataatgttaggtgtcgtttgataatacttttatttttaaattttttaattacaaaaataaaagtaaaattttgttttaaaaattttgtttttgaaaaacaaaatatgttctataaccacttttgtttttcaattttaaaaataaaaaataaaagtgtgttcggtaaattttatttttatttttatttgttaattttatttaagtcgggtctggggctggggtcgaggtcggggccgaaggtcgggttcgggttctaaagatttaggttggggtaggagtccaaaatattgataaaaaactgtttaaaaaaaaattaaaagtgatttttttttttcaaaatttttaaaattttgattcnnnnnnnnnnnnttgaaaagtaaaaacagttttatatagaacaagattttggaaaatatttttatttttctaattttaaaaacaaaaaactaattaaaaaagtgctaccaaacacaatcttagtttttcatattttaataattttaatcataaaattatattattttaatttatttataattaataaaatcatatcttattattattattattaaattataagattttttaatatttcgtgccatatttttcgaacttgtccagtgcttttcgagttagtctattcatgcttacgtgttgtgcctttcatgctatatcgtgcttaagtaaatatatttgagaaatttaattttttatccttaacattaagggaaatttttttccttaaacctaaaataccttatattggtaaaataggataatatttacttaattcccacattaccccctcattcaaatcttactcaacacttaactatgaacccagccacccatcggacctagccccatcggacacagccccccccatcggacccaggcccccccatcggacccaacccc

SEQ ID NO: 51431 - DNA, 1116 bp, Cannabis sativa
  modified_base (48)..(50): a, c, t, g, unknown or other
aaaagtaaaaacaattttacagaacatgattttgaaaaatattttcannnttttaattttaaaaacagaaaattgattaaaaaaatgttaccaaacgtcattttaattaacgaacatctcactaaattttaaataaattaatgtttaaacatgtaaattatttctcatattttagttataactttcaattcataagtatgagttctatatatattattggaaaatttataattttgtataaaataatgttattttattttattttattttatattcacgttatttaagagttaaaattaattttaaattacaaatttgatttattacaaaatttcataatactatcttaatattttagttataattttcgatataaaagtgtccaatttcaattagatatagacatcattggaactaaaatttgaaaaactgtaactttagatgataattttttatttttttagaaaaacgatatatttcattaagataaatcaactattacggaagaacttaaaaattatagacaagtgtccgttcaaacacgttctcctacactagtaatagagattgatagtgtgtgggcaatactattcgtagaccataaaaaaacattacaataccaccaacaacaactatattaaagaatttacatctaaaagataaaattaaaagcaacatttaaatgagagttattcgcccatccaaaagacatcgttaagtcacaaagaatactcgagagattgaacaaaatgcggtgtgtaaacaataaccccatcctgatggcaagtagttccgctacatgatgaacactaaactcacctagcatattgactgtccaagccaaccaaacaacaccatcgtcccctcagatcacccatgcaacccacaaaccccctaccagcaatcacaggagcgttaatggccaacgaaaaaaacccaatggctagtggcattcatccactccacaggccgacaaacaaccggagctggggaagagccacccagcaagaggctacgctgctggtgttctcgaaactcaaacaaatgatttcaggcaagctccaagataacatcaagtctcgactgagcaccaccaaataacatagagttacgatc

SEQ ID NO: 51432 - DNA, 741 bp, Cannabis sativa
accacgcactgctaattgcgatgtacttgctcagcagagacacgaattcctgagatggatggatgactaggagtacatccttcgatcttaccaggctgagctggatcaccgcaactaagaagccatcgacttgatgaggcaattcaatgaaagaactgctggaagaggccaaaatgtcatcaaaaatccacttcaaggaagactagttgacagatcgaggagggtctatcagtaagttatctaattaagttcttcaggaaccaggatagaccttcctctacctgaaagaggacatgccttgccacaaagatctaatggcgagaacaaccatatctcctaaactagcagtgtaggggtcggccagagatcttaggctcaaaaacagccccatcggctaacctttggcctgatagccacctactagtgcacttctaaccagccaggggagtgcactccctccccgaggggagcgagccacccaaaggccaatcttcaactggctaggaccgagaatgggtggaaacacccaaaataacaatctgagaagtgagattggtcactttaggtatctagattcacctaactccaacaattatgatctacctcctatcaatacaccgacaacatcagccaactggggaatcacgagcggccaggccttgcctagctagtacagggctggcttgccatggatagctgcttagtataggattggctagctagaaccaacatccctacgta

SEQ ID NO: 51433 - DNA, 1103 bp, Cannabis sativa
cttttcccaacattgtgttgcaataggacaaaaagcaagtgcatgcatgattgtttcattatgcaaaccacataccgggcaaagactattcacatcaactctcttgataattaattgaactttagttgaaagacaattagtacctcctctccatatcaagttcttaacttttggaggaatctttaaacgccacaactcattccaaaaatctgaagcttcaacattattccacgctcccttagctttttgaagcaagttgaaagcacttttgacagaatattcaccatttaattcatagtgccaaaccaacttgtctgctgccatatgttgcagaatcgggacagcagccactgctgctatgtctctatcattaaacagatcttgtagcagctccatgtcccaagaaccactcccaatctccatcaaattccccactacagccgtggttagagctgggtgcccagaagtgacatacgggtcttcttccattgagagccacggctctcctttgacagccaccatactatcaaggccaatcttccaacgagcccccattttaacaacactttgagcttcaaatatactacgccaaataaaacttgggttgttcccaatagttgccgtgagataagatccattcgggtagtatctagctttgaaaattcttgaaaccaatgaagtagtattggtgagtagtctccaaccttgctttcccaaaagagcaagattatggtctcttaaattacgaaagctcattcctcctacacttttatgttgacaaagcctatcccaggacatccaatggattcctctatcctttgtgttggaagtcttccaccagaattttgccatatgttgctccatgtcatggctaatatctaaaggaagtaggaagacactcatagcataacttggcaaagcttgagccactgttttaattaagacttcctttcctgctttagataaaaatttagagtcccaagattgaactctctttctaacccgctccttcaagtaacccaagactgcatttttgttcctgcccatggtacttggtaacccaaggtacttactattctcatcagccacgaccattctgagta

SEQ ID NO: 51434 - DNA, 1166 bp, Cannabis sativa
aaaaaaataaataatatgaacaaatttattattaattgcaacactttaggtggattaattatatttaggtttaactaactatatggatgtactctttacctcacaacatctaataatttgttattttttttatttaaaaaagaaatcacccaataatttttcatatattaaaaattttattatatagacacattttatatagaatagacactattatacggagacattttaaatagacactactgttttggttgaggaaaggaaggcaattgagacaacaaaaaatatttactttttattacatttgagatggtctatcttgtcaaatacttaatgtctgaaacacaattaaatttcaacaagtttatttatttatttatttttgaaaaaaaaaactacacattcaagtgttaattatttattccttttaaaaaaagttgtaattatttttattatattaatattattgcggccataatttacggtcattatcctttaaaatttaattcatttaaaaaaaatggtaaacttaagtggtctttgataacttttttgtttattaaaaataaaagtatataactactttcatttttcaattttaaaaataaaaaataaatgtctgttctgtaaatttatattttaataaaaatcaaaaaaaaaattatgttaataaaagttgaaaaaaattataggaagttcctatggagtcagttatttcataataaccgacgccatagtgtccttatggcaacagttttttagaacccctttagcgtcgactagaacaccgtcggtagtgaattttgtaaaaactgacgctgaaagaccttaaaaactacctctaaaccccaattttctagtagagcaaaacatctaatttcaagctatatcgagagagttatagtcaaaatactattagtcgtcacaacaggaaaacatgcagaaaacgagcgagtcgcgacttgcaaaaaaaaaaaaaaaggaattttacaaattttgtatataaaacaagttggaactagatttcttaaatcattcaaacttggagaccaatttttggcatcggtggattttggaaaatctttctaattgtgtatttaaagaggctgagagcttagatctaatactatttaaaagttgagagaaattctgagtgttgaaggagg

SEQ ID NO: 51435 - DNA, 573 bp, Cannabis sativa
ttttatatctatattattgttttgcaataatgtatatgaatccaaatcatgtgtgtactatttcgttgttatgtcaataattaaattttattataatttgtgtaatttaaataatttataagttttgttaattaataattaattgcaaattattaattaattatatatgtgttataaatatatgagaaatattttacgtaaaaaaattatatatattggtttggtaagttttataaatgtcgtattgtattaaataacaaaaaatacaatgtttagacaaaattttatagtgtacaattaattattacggcaataaaatttaatagtgtgaatcgtattatttaattcataacagatgatttgtattaattaacttgtatatattataatatttaaaaatgatcttcgatatttggatccatacccgacccagacatatagattttagactcggaccccaaaacctcagccttgaaccccaatcccatgacctagaccaagactcgaccctacacttcgaagccctaacacagaccctgaccttgaccctgacccctggattccagctctgga

SEQ ID NO: 51436 - DNA, 1403 bp, Cannabis sativa
atatatattgtctggtggaggaggatgttcaaagcaagaaattaagcttctcttggtgtcaataacgaatcaatattattttcatgtatattataattaattaacaaatattattacacaattaattttgattttcatattctttcttcccataattataatagtacgtagtactactggtcagtatgtggacactaatatatgataaattaatgttatactattactatatatattttcatatattattacgtactaaagtatatatatacatatactccgcgccaaatgtggctccacctgtgtacttaataattatatacaaataattgaacccttttatataataatgtatttataaaaaaatcttattataaaaggtaggcatccatatatattttggtgctcctttttattatgcaggtattttatatgtatatccatatagaacatttttacatatacaaactttgttttcttcttccctctcatgatgatattatttattaagaatctttgttaattaaggatctatattatattaattaattatttgatatttgtgatgattagtcaatgaaggaacagtagtactgctggtcaattcaacttttaaggcagaaagacacattaatagaaatacaatatatttaattaaaaaaaaaaagcctagagaaaaaaggattctctatattgagaagatgagctagctatatatatattgtttttttttttcttataataatttcttgctttttaattacttgattccaatcctatatatatagctttaactttaaacactagtactcctatatatacttttgttttcttcgttgaataatattgattagataagttatcaaacaattaataatactttcactacttttgatcataataattgattgagtttctttctattacagcttctacatgcactcatatataaattattaataatgtcttcttccaacttttattattggttacggccactcagacaaatatatatagtcaaatctctctctgttttttattttttttttattttatctataaatatttaaatattggtcaaatattgtgtaagaaaaaggtataattaagctggtaacttttctcttgtataaaaatttatttatgttgaataattgaacatatatatttctttaattatataacattatatattttttcggggcaacaaaaaaaattaacattattttggactgtacgtacctagttttcaatttcattgcatatatgtatactatatgtatttgatgctctatatttttcagagtgagaaaattaatatgtatatttgtattttattatatgtgtatatatatagagttaacattttactatatatgaccttttaaaaaaaaaaaaaaaaa

SEQ ID NO: 51437 - DNA, 1223 bp, Cannabis sativa
gtgttttcatcaccacattagtgttataccagcttggctcgactaaagggttgagttggcttgtgttcatgtatggggtgccattgtttacagggaatagcatccttgtgacaatcgcatacttgaatcatactcacccttcattgcctcattatgactcgtcagagtgggattggttgaaaggagcattgtcaacagttgatcgaaactatggatcaattctcaatagggttttccatcaccttacagacgctgctcatgtagcagcacaccattttttattcgcaacaatacctcattaccatgcaaatgaagccaccaaagctatcaaacccatattgggagagtactactcttttgatgatactccaataattaaagctctttggagagagactaaggagtgtgtctatattgagccaaatcatgaatcttctcctaataataacaaaggtgttttctggtacaacaacaagttctgatgatcatcaagttaaattatatatcaacatatgttatatgtgttttattaaaagtgtatgtgttattattgataagaataaaatattaaaagggtgagaaaagagaatttcttgcctttggaaaatggagctagagagttaatataagttgggcatgtactaagtaataggtgtgttaattaaagtgtgactttgaacatataataataataataataataataatacttttaataataattttaaatatgtatgacaaaggatcatcgatattaaattgaaccaaccaatattagtgatataacattttattaaagggctagacattgtttgatatttttctttatgttgcataaagctattttattatctcaaagattttttttttcagttagtgttaaggttttaaactgataaagtatcttaataatagaacattggctaaataataaaggtgaatacatacggcatatatgagtttagtttatgaataattagggtgaagctaattttaatcaacgtataaacattcaggattttttttatatataaatacccaaaaaaatagaattattacaaaaatagcacagcttgttttaatatttttacgaatttaaactttttttgttttttacaaaaatattgaatctttctcatttttattttgaaagggtatgatttaatagttgtcaaagtttacttgataaagttgctaatatacaaagacacgtcaacatttaa

SEQ ID NO: 51438 - DNA, 906 bp, Cannabis sativa
tatatatttttatttttttattagtttttattatataaatcaatataaataaatttttaatatatgtaaatgtaatttaattggatcgttttaattggattttaagattgacatctaataactgatccgatccaattagaatctaacttttagcatccaatccaatccaattataattgaatatccaatttttgtaattagattagattggttcggttcggttcaattgtattggattggatgttgcccaccctagtttgaacaatattgaaaatcgaaatagatgtaactttatgaaatcactaattgaaattagcaacgaattaattaagtagctttgaatctttttaaagaatataaaaataagcatagctggtaatttaattactcatgctaacatggtgcaagtgtattataattagaataaatgctcttagctaagaataattattttttgacatattagctaagaataatttaaactactaatcatatattcaaatgttaattatggaattattttattggaatcggaatggtttacgtgaccatcgaccaaacaaaatacgtgatagtccaaatatttgagttaaaatcgaagaaaatttatagtcgttaacatcaattttcctcccataaaattggtgattattattagttaattaatttaaaataaatggacctctatatgtagaatccctatattttatcttgcttttttaactgatatgctaatgctcttttacatttaatataataagaatttgattagtgggttcattagtcattacgtactgtccattaatttgattggtaaagctattttacaaagttgaaaggaccttcaaaagttcagtactaatcctaacagaagcttccttcataccacaaaagggtacgttattc

SEQ ID NO: 51439 - DNA, 1443 bp, Cannabis sativa
  modified_base (51)..(52): a, c, t, g, unknown or other
taggaccctgaattaattttttatcaaaataaaatttaattataatccganntaaaagtgttatgacaaaactatttacattttttgtatatgtttgtatagaaattgtctttatgttggttatattaaaaaaagttgtcaaaaattaagctcagggtactatttttactattttggaaaatatatggtcaattttatcatttaacaaaacagtgggtccaatcagtaacttttacaaaacacatggtccaaaatagtatttacccttaataaatagattgagcttaaataaaaatcataaaagaaaaaagagacaaagatttttacgtggctgagacggtaatgagtcttagtcatcgagtcaatattattaagctctttggctatggagtattttacacaagattattctttccaaatttctatagagtacctagccaaaatttataaccctttgcatgttgggatacaaccatatttatagaccgaagtcggattctcgggtgaccttggatacattaggatttgtcaatgtgaataagctcattaatgggataaaatacaattagggatggagccaggatacgatcataggggccaacttttaaaatttaaatgtcaaacaaatattcaaaaacaaaaattgttcataatttattaaaatacagaacgtctctcttgcatgtcacgaaaatcatctataagtgaatttacactaaatgtttcagcaattttcttttcaatatacactagcaaacaatcagtcaaaaattcatcttccatcttgttgcaaagtgtagtcttcattatattcatagccgaaaaagatcgttctgtagtagctgtagaaactggaagtgtaagaataagagttaccactcgatatacaagtggatagactttttctcatcttgtctttaccatccattgacataactcataaatactttccaaatctgcaaaatcaggaagttatcgcacatgatcaaaatgttgaaattgcatccttaattgtatcatctcatattcttcaaagtcttgtgagtaatacttttgtaccaacttacatatgtcatcaattatgtatgatacacgcatttctcttggatctaaagttaaacttagaatgagtaattccattgcattatcatcaaatttgttacttatttcttgcaattgagagtctatcactacattataaatatcaactttgtaataatgctttaatgtcatgccatcttgttggcgaatggcctttcctcttgcaatgtaatgagtatcaaaatttggcacatctatattaatagcttcacaaaatgttttcacctcatcaactaatttatcccatctatcttctcttaatttttgaatgagaatcttagtagatgaaacaagatccatttcatttaaaatatcttgagattgaagttgcaaagcttgaca

SEQ ID NO: 51440 - DNA, 1234 bp, Cannabis sativa
acaactttagaaatccaaaccgtacataccgtacataaatgtaataaatgtaaaatgtaaaaaaaaaagttaaaaaatagtatatgagataatttctcaaatcttttctcatcttttaatacaatcaaagttataggtgaaaattaatggatttctgcacaaatatatattatgtatggacccctaataataatgaggggacagtagataagatatgataatagaagatctttgtatcataaatatcaatgtcttgtttagataataaaacagagaaaataaatttacctcatttattaagagtatacctaatcaaagtatttatagctataaatagaatgtttatagttgtagaactcatcatcatacacatataacaatttacacaatattatatagatatatatggagatgaagatgaagatgaagatgactagcataataagctttattgtagttgttgctcttgttcctaatcttccttctactacttttgcaatttcaggtgggagagctttgaataatatcattcaacttcaatcaaaaatcaacggtcaagatagaaagatggtgactattatcgaacccgcttctttgaaaacaatattgcttgaaagctcgtcacaaaagaattgtgggggtgaatattgttcacctaatagtccttgcgaacctggatgttattgtgttggatcggttgattctggaaattgcattgcccttttctaaaatagaactacctaatttaattatctatcgattgacacacatatatatatatatatactaataatgtcaatcgtaaatatgtaagtgtaatgaattataataatgttatgcgtacttacaaatatgcatgtgtgggcatgtgtgtttgtttaagtacgttacatcttatatggatgtaactatatagcattatgtattatttattattaataaattagtatatgctgtattatattgtgttgtgtacaatttactaattaatatatatttatatttgggagctaatatataataggtattgtaatttttatctatttataggtataataatttatagttattgatttaatcaaatgacttaaattaactcttagaaattacgccataattaatattcgttatttatacttaattttaaatattaatttagatccaactaacaatactccaaagctaactctaaacttataatttttcttacttatttaccttataactttttata

SEQ ID NO: 51441 - DNA, 2737 bp, Cannabis sativa
  modified_base (2686)..(2687): a, c, t, g, unknown or other
gatgttaatgaaacatactttgtagtaaatctagatcctggtaaaatatttccaacatgttctgccctggccagagtagttagacggacgatatgggggtcggcatatgaaggtttcctgacagtctgtttggttcgtaccatcattctacgtttggacggagctctatcaaaagtgtgccttgaaatggtcacaacaaaattggcaataggttttccctctgcagctgggattggacggccctcgggcaaggtgtcaactgcactcgaatggaccctgtacgcccagagggcaggaagataacgtctccaacgtttcctaagttcccagatgaagcgatcgtatccttcaccacgaatctggccaagatagaaatggtgttgcacctcgggctccaagaaaggtgtatgatcgctactcattttccaatcttcgaagctagaatttaaaagatcgtcactagacaaggatgggctaccaatgagacatgtgtgatcttcgtataggagttgaagcaagtcctggtcgatatgatgcttgcctccccaaaactcacaagggttcatctacaataggtgggagacaagagaataagagttggttagagtaacaaatgaaaaacagattgtatatgccgaccaggcttgattgagaatcaaaagtaaaggtttcacccagaaatagaattttcgttcccagaagtttgaaacttcaattggaatttgatttttgctaaaatcttatggacgagtggaaatgaaagttttaaggttaaaatcgaagcgcagttagatatccaggtattatggttaaacatgaatggaatttccgaatcctaaacctagttattctacggttaacctagaacagttcaagaacaagcaaaattcacagtgaaaaatttagaaatcatacatacatttcattgcaaatgtataaaagtaaggaatgaggaacttactcattgatttgaaactttcttgctctgctcacgtatcgtcaagaatttttctatgaattcctcaaagaacttgggagaaaacttagttgaaaatatattgctttggtttttaagttaaaatggctaaaatgatcaccaaaggttccaagtcctatttataagcaatctgaaaaaggaattaatcattttaaaattcaattttttgggttccccccaaaagtagacgttaaggactcattgcagggagtacagctgttaagcgtgctcaaatatcaaaccataatttaaggtataactatcaataagcattaaatggtcaaatagcgaagagatccctagtcagagtcacatcagatcaacatccatcattaaagacatgtgtcacccagtcaaacaagactccaagctgagtgaagtccatgtgcgaccaggaaggtcccgcgcagacttggaagacaaatattatcctattttttgcaccttgatgtggcaatgataatggatggcacgtgtcccacatttctgatacctggatagaggaaagtattcctagcagcccattaatggttgcttgacatctgtgacactctgatatccaagcaggatggtcgagaagatgtccgaccgggatgctgacatgcttatgccgagcgaagcgtgtaagttggaagttctagagatcaatctcgtcgtttccaagacacgaagacaatccctataattgtgggattgagtcagaaaatagaagcaacccacttcagttttctatacattacattataattataaaattactgtagtttctaattttattcattatagattaagggaaaccattcttcatgtattaagcccttataaatagtgacataatctcactatggagggggtggagagaattaatctagaaatacactgaagagagaatagtgatttaagagagaaaataactcagagatccattgtaagagctttcgaaagaagaacactttattccttctctcaagtcaatacaaatacaaggggagtaggctattgctattcttacggggccgaacctctttaaaatctagtgttcattttactctactgttttgctttcttttatttatcttatttaattgctttattttctactcactgtcattagatagaagcgaggtcaacagtgccatatatcgaaaataatatccacatcatcaagccaattttttaggtaaataatgtttttaaaatttaaaatgatattaattaaacaatagatactcaattgatttcataaaatacattatggtactagaattatatattttctttaaattatttaaaaaatgatactaaaatttttaattctctttaaattattaaaataatttatattaaaattttaccaaaaaaataatatttatattaaattaaattatcagcttaaattgttatctaacataaactaatattttattatttaactatttttttaaataattatatgaaattattattttattacaaaattagttataagtatcatatatatttatataagggagtgacaaagaaatacctgaaaagacaacagtgataacatatcagattatcaggctctggctttcagtggaggagataacagtgactgtgattttcggtaaataataaacgatttgatctgaaatagtggcagcacacaaatatatatatatattgtcgggttttatgccctaaatnnaactccatttcaatgtaatctattttattcaacatcaataaagaaacaga

SEQ ID NO: 51442 - DNA, 1323 bp, Cannabis sativa
ttggccaaatcctaaccctctaccttataaattttctgtttttttttcctttctttctttctttctttctttctcatctagctctagccatgagcaatagtagtagtagtaccagtattcatcctagttgaccaaggagacaatagtaataaaacaaatactgatcaaaccctagaatattattatggggagagggaagattgtgattcggaggattgataactcaacaagccgccaagtaactttctccaaacgaagaaagggtttaattaagaaggcaaaagagctcgcaattctctgcgatgcagaagttggccttgtcatattctccagcacaggaaagctctatgagtttgccaacaccaggtttgaccactaatacatatatctttaatttttctttcaaaaaaaaaaaaaaggattgattaataatcctaatttgctttttcataatattttgggctggaaaagttgtggattcggtattaattagctagctagtttggtttctaataataatttagtaaatctggttttcatcatatgtgttattataaaagctagtaaatagtgtaattaattatgatcataattaattggagaaggttttgtgtatataaatactgttttattatataatacttatactgatttatggtacggcatgcagcattttgtttttcattgcatgggagtagaggccgcccggtcctttccctgcgagttaagcagatcaatacatgtttatatataaatatatatatataacagtacatgtttatccccatattaatatataaacatatatgcattgatatcgtgatacattaatagtactaatatatgtacctctcttataaatattatatgtgcaaacaaatattatttacagatatatctataaaatgtttgagctttatttgagaagtgaagattacattaaggttttatctcctctcatctttttttactaataattaattattccgatccatataaattgatcgacatatatatagaaaaatttatccctaattgtgatctcagtcaatttatggatcagaaacaattaaggttagtgctagctaattaagtatagctatagaggagtttgaggtagctagaatattttttggcataattatatatattatagatagcctcattcatttcttatccattgctgcagatccatatatgtgtatacacatatatattatcatttcagtataaactataactggactagatattactcatgatcagttttttcaatatatatacatatatctatatacacacacaccataattataaaaatta

SEQ ID NO: 51443 - DNA, 1265 bp, Cannabis sativa
agagagagagagagagtcagtttagaaatgaggggggtaaaattggatttaagtaaaagttatcccattttacaaattatgcataattttagatcaggataccaatttcagtccctaatatgcatataattttaaatttccctttgaaaaaataaatatcccacaaaattatgtattatattaatataatattaataataatttatggtgtatattcagtgtatacacggtatatgcaccatatatattatatacaatatatacattacatataatatatacatatatatacccaaaaatatatatatatatacacccatatataggagctatttttttaggtttagaggtggaccaaccactatggtcacaccgtggccagcggatctagggagccaccatggccacggtggctatggttggccaccataaggttcaatcgcacgaggaggagcattagcatgtcaaaattgcctaagacccgagggggtcttcagttgtgtgaagtaagggaggcggaggggtgagccaaacttccttggtccatggctcacggtggcaacaagaggagcccgaagaccctagaacccaaacaagttccttctccaagcacgaccaccaccaatcgcaaggctccaattggacccgactggttttccttgtgtcttaagggactcacgtccctcttgcatgcattgcatgcatgagtctccttcacgtgggaatggtacccgaagccacttgagtgactgtgtggtcgggtttcaagtttagaaaccgagcttacatgcaatatacattacattaggtatataatttacatataaattaattttcataaaattaaaattacgtaaagaaattcctatgccccatatgacttatattattttctaaaaaataataataacaaagcctacaccgaattttaccatataattaatgattcatcacatctcatacattcacaataatattataatccatttacatacatatcacatatatttaaatacataaaacctagcacattatttaatgtatatacactcatggaactgctctaaataccaattattagttttatggtagtaaattagatatgcagcaaaaaatttaaatttctaagtatcattgtaccatagcccaagaatagccagatgtataaccatgaaatcaaaatatatgtatacatgttgataactatcagggtatcctcgaaacttcttgtaagttagatgcaataacctcataccgtagtattc

SEQ ID NO: 51444 - DNA, 1256 bp, Cannabis sativa
gatactctggcccttccaagtgaccaataccgaagaacaattcttgtttctaatgctttttcttgcctagatctggacaatctgcccatcgctctgctcatatagaagctagaccctcaacattttggcaagagttacatatgctatttagttttgatagaaagatggagagacttacatctttttccaccacaaacaagctaggaaataggtctgtaaatccacttaacctttctgcaaatctggccaacaacaacaacaacatcaatggtgatagatgttcaggttacaatagaggaaatcagaacaatactagtggaggtccaattggtcatttcagaggaagaggaggtggctgaaatattggtttaaagcctacctaccaggtatgtggcaagtatgaatattcagtggcctattgctataatatgtatgagaagagtttcatgggaagcactctacaacaacaaccaaatcaaaggaccaacaagagcacatgtctttgaagctacacttaacactctggatcatgaggctaggtttgtagcagtggagaaataagccatatcactatcgatccaaacaaaatgcaaaaaaaaaaaaaaaagaatagaattgtaagaaaactgatattgttggtgattgaaatcagttaactatgaagcatgttggaactagttatttactaacaaggcttgatacatgtttatactttaaagagatgttacatgtccctaatattgcttaaaatcttattagcatttcaaaggtgaccatcgataacaatgtctttgttgaattttttttatttgtgcttgttgacttagaaatctagacataaatttttaagccacgctcactcactatattggcgagaatgatatatatgttaagtataaatatagagacacaagaatttatagtatttcactccttctatcacagtagtaatagagctatgtctacttcgagtttttatttttacgagatggattacagaaaaatagtttagtctagatgctctaatttttagagagagaaactagagagagatgctctgaccttgtggctactttctaaatatgaaaaatgagctagaggggctctctatctataggtgaaggagtgcctattaaatatgaataaaataatccaaaaaatatgaaaaaaaaaaatacatgttggctattgagggtaaaattaaattttgaggtggatcgtcaatttttggagttcgggttgcgacggcagaaccc

SEQ ID NO: 51445 - DNA, 1104 bp, Cannabis sativa
ttgattttctaagtatagaaaatcaaatttccctattaaaataacttaaatcactttaaacaaatatttactaattaactttgtgtcaaaaaaaaaaatatttactaattaacttgtttaggaataatgcagcaaatgttgagcaagaaaggattgtcccataatatccatctagtgttgtaatatgactatgaaataatattaaatatttaaattctaatagttataattttttatatatgactatgacttgtgtataactgttgaaaaattatattaaagtaattaaaattaaaataaatataatttaataattaacttattaattgtataaaaatgtgaaaatatagagaatgaattcaagcacgaaaatggttcatctcaagtgaaatactatacgaaaatatctcgctgtgagtcatgttaggtttaccttataaaattatttacaagacacaattttttttttcatgatttggcatgacattaactttatttgtacaaaattttcaaaatatgaatcaaattaaaagggtgacacataaatacagttagaagtcttatagcaaactaaacccataaaaaattataatctttttttttttgaacaaattatgaaattttattaatagcaattaaataaaataatagcttgcaatcgaatcgcgacatctcttttgttggagacacgattaggattataattagaaaaataaactaaataatcaagctgcctaattttcaaagcatcacggttaatcttaagaacatctatatcctattttatttaccatttagaaaacacaacaatagaaattgttgcagcaggttcaacctcatagcttgaacaatcaattataagcttactaaaagaaactaaaaactttcttggttatttttttaattaagaaggagaaaaaaaaaagataattttgatttcttttttattaatcttttttaagaaggtataggtttgttaacttaattactttaattcattttatttttttttttaaaaaaagaattttaaatgattttagaaaaaattcttggattttaaattaattattttcaagtagaaattagtgaaaattacatgaaata

SEQ ID NO: 51446 - DNA, 1462 bp, Cannabis sativa
tgggtctagctagttactatagatattttgtcaaagtattttccaagatagcaactcctctaaaaaactcttctcagaagacacaaaagtttgtcttgtcagataagtgtgaggaacacttccaaacacttagggacaaactaataataggccatgtattatgtgtttcaataacacaaggacaaaagtgtttgtgtggtgtactgtgatgcatcaaaataagggctgggatgtgtgatgatgtagaatgagaaagtagtagcgtacaccttaagacaacttaaggaatatgagcaaaggtatccaacacatgatctggagttggtagcaatggtttttgcgttaaagatatggaggcaatatcgttatgaggagaaatatgaaatttataccaaccacaagatcttgaagtacttctttacacagaaggaactcaacatgaggcagagacaatggctagagtttgttaaggactatgattgtaaaacccactacgactcgtggaaggccaacgtagttatgccagctttgtaatactagtacaaatggaaaagccactgtaacgagaactttaagaaagtggtatataaatcattacacaaagactagctaacctaaccactgtctcaacgctgctacaagaacttaaagatgcataagttgttggtgagttcttatagaagaaaagggcacacttgccagagaaggagggagagaatttcttttaaaggtacaaacgacatgatgtggtataagggaagagtgtgtgtagccaacgacatagagcttaaaagaaagatcatgatagaagcacacaatacaccctactcgatgcatcaaaggtcaaccaaaatgtacaaaaacttaaaaacaatgtactggttgcaaaggatgaagaaggatgtagctgaattagtagcctaatgtctcacatgtcaacaagttaaggctaaacattggagaccgtcagggatgtttcaacccttagaaatcttaaaattgaagcgggatgacatagccatggactttgggacaaggataccccgaacaaccaagaaacatgattctgtttgggtaattatagacatgttcacaaaggcatctcacttgttctagtaaagtctacttacaatgcagagcagtacaatgacttgtacgtacaagagatattgaggttgcatagagttccaaagatgatagtctctattagagtttcagtattcacctccaagtttagggagagtctacataaggcaataaggacgcgattaaaacttagtacaacatttcatccccatacagatggaaaatttgagcgcaccatcccaatactcgaggatatgctttgaacatgtgtgctggacttcactggctcgtggagtaagtatttacctctaatggaattctcttgaaataatcgctatcaagccataatcagaatggtgccatatgagatgttcta

SEQ ID NO: 51447 - DNA, 1262 bp, Cannabis sativa
gaccatttatgaaaaagcaaaacaccaccaacatcagactcttcgacacataatcaatacactaacccctaaagaaaaacaaaaattgattcaaccatttgatttaacttattattacaaagccagatacaattattttagaaatttaaattctcaatttgatgagttaggatctcttgaaaatttcaacaaatttaaagaggttttgcaagatggctattcttattttagtaataatcaagtgtattattacacaagtgaagaaggtttaaaagtagaagatgagaagtatttaaggcaagaggttgtgaaagtggtggagggtaaatacatggtccccaacacattggcccctattctcacaacattcatccgcaagtacggagatcttgatggggaatctcgtttgacaagtggaatgaggagtgtcatctctaccttattatgtactgtcattgacaaaatgtgtagaactaagcttgaagacatcacaatggatcatcttgaacaatggcatttctacctacttggcattcaagagatctcaggcttcaatctatttccaattcgagaggttttgtatgaagagttcttggacgcctatttgggttacaaagtcattagatgggaaaaagaagtcattgaaaagttagatgcaaagattgccgaattgaaaagatgtgagaagatgagagaagaactcccgtcaatcttgtctcataagtcatccacaacattagagcgcttaagtgcagcttctaaatggaagaacaaggctctgggggatcgtttcttctaataatataatttcatcttactgtaatagtttttactttttcttcttatttgcgtttatgtgtgtgcttttcaattatgaaatcataacatgctataataatgaataaggattgtgttgttattacactactactattttttaatttatatataatcacatgtataattttcaaccaattttacttgttaaaatctcctcaaatttgaatgtttcacaagaatcacttataaattatcggtttccatattaagtttatcatttacatttttatcaaaagtatatatatatttttatatattcttgtatagtggtgatcaaaattaatcactatttagtgatttatttataacatttagatcttgatttaattgttaatattatgaataaaaacattaaatatagtaaataatttattcttctaaaaaatacaaataattagtagagaatttgttgtatggaatct

SEQ ID NO: 51448 - DNA, 1476 bp, Cannabis sativa
agggtccaattaataacttttgtaaaacagaggatccaaatagtatttaccctataattattgattaagaaactaattagaatttataagaaaagaatgatgaccttgaaatagttggcaactggagaagcatatacaaggaaagtgtaatcaggagctggggccacccctaacgcaccccccgttcccatcaacaaaggtctaatataaagggacccttttccacttggtggcacctgcaaattggtttcaaaccttttatttattctaacctaaacaactttgtacatattattctaaccaaaaaaaatatcgaattttacatattttaatttaataattattgttaaaaattttgtatgttattacccaactcctattagcgatagcggtttgcttgacggcgtcaacaaattgatcaaccgaaggagagggcatgcacatcctttcagctccaatcttcattcgaactccattttggtcaggacgaaaaagaagcaaacctccatcttcttttttatgtgcttttgtcccttcaaatactccctgttaatttaaattaattaattaatattttcacagcaaagttgtaaagaattaagtgttaagatataagaaaaataaaataaaaaaaaatacctgtgcataatttaaaattgctgcagcaggactcaactcaatattggcatgtaaacttaatcgtccttgttcaaaatttccttcttcggtgcatttcatggaatatatgtaatcagttgttattagcttaaatcccagattatcccaatccatttcgtttggctccttatcactgaataattgtccaattaattatgcagacatatcaagaacaaaaataattaatataaataaaattaatcccataacaaattattgataatagacctgtaaaacttacttcaaaataatttaaccggcataattgtaatagaatgactaaaatataaaatttatgtaaatcttactacaataaatgtaagagttaaatataaaaaatatgtaaatttacttagacacaatttatggatatgattgtaagttggtaagaaaagaataagggtgttcatccaatctaattcatactattttattcgtagtgcatttgatttgtactaaagtagcgtttgattggaggtaataaatgtattggagaatattgttccacatggattcaatgtaaaaatattgagtcatgcatatatatatatatatatatataagaatatggactactccactcatcaccaattaattttgagatggaaccccatgattcttgtcatggtatcagagtcatatctctagcggactttcgatccacacctatccaaattggttagccagccgcacaagatctagatggtgcaaagactcttgagatccgaacaaaaaataagtgagcaaatagcatggcttgtgataaggtgattcaagattgatgagcaaaaatagcca

SEQ ID NO: 51449 - DNA, 1768 bp, Cannabis sativa
gcccttctttttgtctaaacaaccgtttcttgtcaattaatctatgtccttgaggtttgatgacaacacaacaggtcttattctttatgatggatgatatttcttcattaatggatttcaaccatttctccttgttgttgctttcaatggcttctttatatcaggtgggttctgagttttccaactcatttgcagcagcaagagcaaatgtagactaatcggcaacaccatatctggcagggggtctgatgcttattcttcttctatctttggccagaatagtcatcaagctattcttgagcttcctgggtgtcagtgttgtcatcttgagttggtaattcatctgagttgctaggtggatccacctcaatgttcagcttggaagagttgctctctgtgttgagtgtagggactgttaagggattcattgccatttcttcttctctgaatatcacatctctgctgattatgaatctttttaaacctgtttcaagacaccatagtttgtagcctttgacaccatcaaggtattcaaggagcatacacttcaaggctctaggtttcaatttttcttgcttccaatgtgcataggcagtacacccaaactttccttgaaaaagtcatcaatgatactcagaaaatagtgagccccaccaagggttgggatccttgatggtctccataaatctgagtgaacataggcaagttgttccttggtgttgtgcctcccaagggtgaatttttgcctgcagctctttccatagacacattcttcacaaaatccaagttttcctgtaacttttcctttcaagattccttgcttcttgagtttagcaatctccctttcactcacatggccaagcctcaaatgccatagcttggttaagcaccatcatgtgcatttgaaacatttgacactaaaccaataactgttttcccatttagaaaatataggccatttttatatcttccttccattatagttttagtgtccttagtaattctaagcatgctttcatcaattttaattgaacatccttttgaagctaatgtaccaattgacaaaagatttcttttaaggttaggaacatacctaacttctgtgatggtcttttgtgatccatcatccatcaatagcatcacacagccaatcccttgtatagtgcaagccttgttgtctcctagtaaaacagttcaacctgttttcttctcaagattgctgaacaattattcagtagggcacatgtggaatgaacatcccgagtcaagaatccattcttggccagagtctgcattagatacaaccaagacatctgcaaaatcatacccatctgtagccacatcagcttgacctatttcattctctttttccctttttaacttgttctttaaagcaatgcattcatctctgaaatggccttcttttttgcaatggaaacacttagaattggactttgtcttctagtttcccttctcattggagtgttttgatcccttgaaactcttcttttcaggcttgcctttaacaaacaatccttctcctccaatttctagtttttcatcaaatttcttttgcatctccttttgagttcaaggctgacttaacttctgacatgttaagggtgtccttgccataaggaattgtatcaacaaagtgttcatacactttaggtaaagaaattagtaggatgctagcctaatcttcctctcccactttcacacctatattgttcagattaagaataattttgttgaaatcatctaggtg

SEQ ID NO: 51450 - DNA, 787 bp, Cannabis sativa
acaaagatcacgactactgattacaaagtcgtcaaggtagagatttgttaggttttagctcctttgtaaattgtcattgtcccacattgattgtaaatgggaatttagcccatacttaggcctatacgtattggcctttataccatttgtaatcatctaggccaaaatttgtattcattcttataaagggtgattgtttactcaatcttgccatagttgtaattttgaagatcatccaatttggtagtgaggtgataagcagcccaagaacataggtaacttttgtgtacaaaatctcatagattttttgtgttcttctctttcttaaaatttttaagttttgttttcttttatttctcttttagtattctatttcaataacattattttgtcgagctagtttaagtttttttcataagatagagagaagatccatctgtatggacaggagcagaggggcttatagggtcatttcctcctcaaatttttataaattaattttttatgtataaattttttaaaaaaatattatttttttattgtaaattgatagtttttcatttgaatttttatatacttttatttttgttcccataacttttatattttttttattattgttggagtaaacctccacttgcactgataatggactgattacaaggacaaaacagtaaatacatacaaatccctaatttggctttcggtctctaaaaaccctaacagaagttagttagaatggattaggttataatccacacctaactaacttctgtaactaactatt

SEQ ID NO: 51451 - DNA, 989 bp, Cannabis sativa
tgggccacttgtatgagtggatcagaaataggctcccacatttgaattcgccccaaactaaaggtcccttgccacaaggaggaactggcggtgcgctcgagggtgaggtacttcccagaggggtgccccttcagtagactcccgaattaccaccccgacctaatggaagagttgttatgatctttagaggacctcatattgtaagaaccaccaggaatgagttaaagcgctacgttggggccctaaaacatgacgaagaagtatgggaggttactcaacttctagctcaaaggcctaggctcatggaccagcccatcaccttcatgaaaaagatgcgaaaccagtgcattttccacaccattaccccttggtcataaacactcccattgccaataagattgttgccaaaatactggtggataatggaagctccataaatttgttgttcaaggacgctttcacggctatcggactcgccgacggggacctttctcccagtggctcacaactcataggattcaacatgatgacactcatccccatgggaaaggtgagactcctggttaccctgtgtcctgacacaccccaaagcaccttcaagtattgtacctttgtggtggtggactgccctaccgcttacaacgccatctttggcaggccggccttagtcaattttagagcaattacctccattcaacacctgtggcttaaattccctactcgagaagtcggagtgggaacaatgagggggaaccaaggagaagtaaggcaatgttacaatgctacagtacatttgtcgatcctaatggtacgagggagtgaagaacatttggcagaacaggacgagttggacccctgtatcgggtctgaagtgatgttagaacctatggaggacgtcgaggaaataagagtgtgcgacctcgacccttctaaggttatccgtctagggaaaaatctagaatcggaggagcaaagtaagatcatagata

SEQ ID NO: 51452 - DNA, 1253 bp, Cannabis sativa
cccaaagccatacattgatcaaaaggaagctcttcccattatttctatgggaggtagcctttgcaactggatgactaaatgttaaaaacacaactagaaaaaccatgtgaagctcatatgtaattagacatgtaacaaaagccaacaacaaatgaaatactagccaaaataaatcatagaaataaaactgtgttgaataccatatacaactacgaccagaatagatggtgcacaaaccagtacaatttctaagatgaagaaatgtgtggccatataaagcgtttgtaagcaagtcaacaagttgagtacctgtatacacatgaaaaatagtcaaaagtttagattctaccatttgtcttatgaaatgataccgtatatcaatgtgtttagtacaagagtgttgtaccaaatttttgaaatgataatggcactagagctatataaaaaaatgatacttgggaaaaattacaatttgccgtttcattcaactaaattagctgagtacaacaactatcaaaaactaagaaataagacaaacacaagacaaccaagacccaaactcatatgtaccacacaaacaaaatggaaatgattagaattaacatgagaacaaaaataaagacccacaactgaacaaaaaatgcaaacataaacaaagtgatccctaacaaacttctcaaaacaactagatctatagagttatcagatacaactttaatgcctatgggtgtgaaaaatcaacaagaatgatgacagcagcccacacaccctatcctttgatacttaaagctcaagaaggccacatatctggtttgtccaagaatattcaatgacagaccactttattgcaaagagcataataatggttaaaagttttgtaacctgtcagcatagaacaatcattagatgaaactaagcattgggttttagaaaaactcacatcaaagttagcatcacacaagtaactgatactcaggaggttgactttaagcctttgtacatacagtacatatgttagctgtggaataccatttaacttaaggtcaccttttcctacgatatgtcctttgtttccatctccaaaaagccccattccttcctttacctccttgtacttcatcaagacttcaagatttctagtcatatgtcttaaacagtcgctattaaggtattgttgatccttctgttggaaatattttaccagggtctagatttactaacaagtatgtttcattaacatcctaatgtgaatt

SEQ ID NO: 51453 - DNA, 974 bp, Cannabis sativa
ttttatcccaactacattaacaaacgaagaatcatattcacatagtccatcatcaaattagctcgccatgagctcaacttacataacacaaaactgaattatatctaaaagctgtcagcaaaccgttaaaacggttggaaactaatgttcaagagatcaaacctcaacatacccaacatcacaattcaatatatatatacatatatcaattttaaattcacaaaaggaatggaatttgatagaacagcactaaatcttgaagatgagactttttccgacaaaacacatttacttaaattacactctattaaaaagctttcaaagaaaccaatacatagtttcaaacacaaaatcttcatccaaacaatgaaccagaaaatttgaaatcaacaaaatccatcaacatcaaatcctatgattaacagagaaattgaataaatacccaacagcacaattcaatgtatatgcatgtatcaatttaaaatttacaaaaggaaaggaatttgatagaacggcactgtaccttgaagatgacactttttccaataaaacacatttacttaaagtttgactccattgttacaataaagctttcaaagaaatcaatatatatatatataaataatatatagtttcaaacataaatcttcatccaaacaatgaaccagaaaattcaaaatcaacaacatccatcaacatcaaatccaaatgattaacagagaaatcttgtaaacactcaacattacaattcaatatatacacacacatatatatatatcgatttcaaatttgagaccaatacataaatatataaatataaatatatatatatatgtatttatatatatagtttcagacacaaaatcttaatccaaacattgaatcagaaaattccaaagcaacaaaatccatcaacatcaaatccaatgattaacagagaaaatgtgtacacaccaagcattacaattcaatat

SEQ ID NO: 51454 - DNA, 1007 bp, Cannabis sativa
gattgtacggcatatctgaacacttctcacacttccacttcttctctccgtgttttctacagaagtgcttcttaataccagtcaagtctcctaaagccctggaaggatggtggtgtacgcatgtcttttcagggcaaacgtaaactctcttcttaggctctttactgcttcgctgcttcagcttccatggcaggttgtgccctctcctatggagttgaaggttttgatctctctgaaaccctttcccacatatctcacacaagaatctgttcgtcgccattaaagtcttcggcgacaaggctatcacctcagcttcaggatctgcaaattcaacaacaataataatattagtatacataaataaatctttatgtatatatatatgtgtgtgtgaagaagaagaagaagagcttacctggagttccgggaaggtttctcttctttttcaaaggaggagggttgatgttgttgttattattattagatccttgaagaagagggttaatttgggaaaacccatttggaataattgtttcttgatcagccatgtttggaagcatcagaaataagcttataactaaccaagctctgttgatgatctcagatttgactggatttatttgtatataagacagtactgatgagaagagagaagataaagacaagctagctgatcaagaaaggacactgctgtgttgtgttaagatgatgagatattaagaaaaaccaaagagaaatgaggagatagtattatatatatgtgtgtggatgggtggtttttttcttcaacctagctagctaatatattaacagagaattaaaactaagggaaaataataatgcaagattggatctttttctttctctctctctcttcctctaaattaataaggtttagcactccttttaattatctactttttaggagggaatataataatataataatgtcaatatgttggaagaggatgtgaaaagttaaagtattgagagtgagagagagagag

SEQ ID NO: 51455 - DNA, 679 bp, Cannabis sativa
ttttttttcttttaaaaaattcttaacttgttgtttaagtacatcaaaaacatagggataaatttttggaatttctttcttttgagataaaagttagaatttaaataatacacatctggataatttgtcttggaaaataagttgggtcatttccttttctttcaaaatcaattgggtcaattgatattttacataatttcaatattttaatatgtaatttgatattgtttatctaattcagtatgttttcttaatataatttgatattatttatctaataagtatggatatttggatgttgcaaccatacctacggaatttttctataatgactttttttttgaaacagattctataatgacttttttcttttctttttttttttgaaatccaaacaaacagttacacagaattaggcatgtcacgctcgatagcaaaacttacacaaggggaattaaccccaatccacatagtactagctttgttcaacaaaacataattgactaaaccatgagcgacactattcgcttctctatatacaaagaaaacacccataacaacatcatttaacattaaatctctaatacaatctagtattccatcaatatctctacacccatcctcctttctttggattaattggatggcatgaagacaatccgattccacactaaattgc

SEQ ID NO: 51456 - DNA, 2422 bp, Cannabis sativa
gaatagaagcggtattaacgtaaattttgcttgtatagagagaaataagatgaagaacaaaaggaaaagataaaatgaaaaaagagcgtgtttataaacacgcttgtttgaagtttatctttttgaaggatttgtggtgaaagattcaatggagtttgtatacaagcatgttgttatgctttcacgtttacaagtagcctgtgtagaggaagagaaagtaaagaaagtttctttcaagattgataagacaagcttgatgggactagacgctttcttttcctctttctttctctctgtccttccctagctaatagcttgggtgaatgtatttatagaggtatagcttatcgtgcctcttcgaggtgaactttattttcgtaaaagaatcaagaggtagctgcttttacctttatgtattcacacctaaaatcagatatatattcatctcaggttttgtacagctattattcatattttttgttttatacacatttatttactattttatttcttttactgttattattttattttattcacacaatttttttttattcattaatattaacccattgtctgtgtttaagaaaaaaaatgcttaatattttttcttcacacagacaatttttttaatgttcaaagttaattactcaccattctatatttttactacgtggcgggttggtgttcctcctccatagatcatcatgctcttctttcacttccatgcattacactcaatcttttattgctcaaagatgatactcatcaatctgtttatttccatgtatcacacaattttttttactgttcaatgtgattactcatctcttcaattttttattacgtggaggcatgggaaggaagctcttctgcttaaaaattatcacatttttctttcatttccatacatctccttcattcttcccatgtaactttcctttatttgttttttttttttttgaatatcaattctgaggtatatattttctagaggtcacaattcatctcctcactttgcacacaatatgaatcctattactgaaataaaagaactccctcctaatgctctttcgtactttaatgatttgcgaaataaattattatttggagcactctctttctaattcaaaggatgttaatcgagaacaggctatggaatgtcatgatcatatacgtcaactagatggcctaactgatcgtgttgaagagctgtgttcgagaacattgtttctcaaaaacgaactactgcatgaatcgactattatttttaaaaaagatgtcgagatgaagcgcgtccttatcgagcatgacgaaaacgtgcatgtatctttgcaatcaatttaataggaatgtggagatgttaaagactgaaatccaaatatggtttcgtcaatatttggatgctagatttcttgtctcgctaacatctctcatttttaataatcgggatacttcatttgataacatgtatattgtataatatgtatatatatatatatgcgtgtcaaaattgtttaaaatattaaaaaaaaaattataataacttaatattaaaaatttatgatccatcaaaataaaatttactttaataaataaatatatgtcctttaaataaaaaatataaccaattaaaatagtctaattgataaattttatctcggttaagtttgtttgaataaaataaaaaaaaattaccatgactataaataatgtttaaagaaagaatataaaaaaaaattttacaaatgacaatgtatttattttatcgacaaaataattatgaattaatagtgatataaagggctataccaacgcactataaaaaaaaaattacaaatgacgatctatttatttttacagataaaataattatgaattaaatatatgtatatatattttataaaataaacaaaccctaattaaatttaaccaaccaaaataatctctacgtaataaactacaaatagataggtaaacctacaaatataataatgcttccaaaacttaaacagaaagtaaataaaaaaaataaggctaaatattgtattagaaaatatataattttttgttaaatatacccgttaactatatgtagaaaccagttgaagataacaacactttaataaatttatttgaggaaaagataaaaagatgtttgttttaaaaataaaaaaaataataaagtaaatatgaaggaacactacatattgttatgtctgaattactcggcttaaaaaaaacaaataaaaaaaactataattaaatattgtctgtaaaataaatgcattgtcatttgtgatttatttttattctctctttaaacattatatattgtcatagtcaattttttttttttaattttattcaaacaagtttaaccgagataaaacttatcaattagactattttgattggtcat

SEQ ID NO: 51457 - DNA, 1086 bp, Cannabis sativa
  modified_base (46)..(46): a, c, t, g, unknown or other
aatctattaatacaagtcaatcccaaacatagtattgtattaaatnatactaatacaatacaatacaatccaacacaatacaatatagcgtactaaacgagccctaagtatatgctgcttacaaacttaaaattttgggtacttatatcactatttaccctttgagaaatgaaagagaatatggcacattagcttaatgttaacggtccacaattttttgaaccagtcagttacgtaattataaaattttgtgtgtgaaatgatattaaattttattagccaaaaaatcaaaataataattatattttactaataaaaaaataaacactgagaaaaaatatataatttaaccaaaatcaaaatatataacggattcatctcaaatcttaatttgatcctcagcactatcattatttactcacttgtttcatcatcccaagttgctcttcttttcttttcttttttgggggggttaataagaagaaattttattgctcaaaaaccttacaaccaattataagaggacaatcaattacaagacatcaaagcttcgaatcaatttctatctactatactagctttttctattttaaaataagaaatcttaaaacaaatatatatctttattttttgaactagagtatgtacaataaaaaaaatactactcccaaaaacaaatttttagtattccaaatggcgtagatcatagcattcaaggcagccacaagaaagtctctcttaaatttagaaatcttcctctagtttatgctaaaaagaagaaaaagaaaaaaagaaggctctatagcaacttgggtggagctatgatgcgccacaaaaaagtagttggtacagttaaaaacttcattagagagatgatggaacgagctgttttcacagatatgaaaccgaatatctcttctctttgtgaaaagctttggcctatagagaaacaaaaaacgtgtaatcatgtggggggagaatgaaactcatcagcactgtaaagtcctttttcggcaagttagatgccaaaatattttttattttatggtgagatttgtttgcattcataaccgattttctcacctt

SEQ ID NO: 51458 - DNA, 1351 bp, Cannabis sativa
cgtcactttggttgcttcctagatgatgcttctgctagtttacctgacttcatctggttctcttaatgtttttatttgactaacacttaaaaatatactaaaattcatttagatatcgccttctttgggaatgcaaggttcatgtaatttttattagtttttaatgctatgctcttacatgatggcatgtaggatgtctaatcacgaatccaattgccaccttctgcatactcattcatcttttacctaatcattgtaccattttacaactgactagagatgcatctagttgggtataggttgtgctttcgtcatttgctcgatcttaagtttccattgtagtacgtttctttgcctccgagcagcaacactaacatagttgctttcctggttacaaattctggtcatatcctttgtttcatactctgcttgaggttcgtcaaggtgtaggctactacatattaggcctaggaagctttcagtctttcttcgatctttatgcgccgacaacttttgaatattatcacgcttgtaggatcaaccacaagttctgtattaaaaaataagcattttttcgaaagccaactccttgaaccaatagctttgatcttctaatcctccagttcagccgagtcgtctaaactcagtttggggtcatatttaggtatccttaacatccttccacaggttggagtatggaaaatatcatcaacaattcgacaacgaattcctccacctaatttttgaacactcacactatccattgggccttgaataatttaagaccgaattcctagtgcccccaatgtttgagtgctgcttcagatgtcacattcttttgtacttcttgttcttggtgtctagtttaagtatttattcccaatttaagaatcaacattactttatttaaaagcatattcctaagtggaggcgaagagtcttccttgcaattttttttttatttttgtagggagttactttagtcataagagaaaaatttgattgaagaagaaaaataaatctttatttacttaaaagcgtactaaatctctagttacatagtcactagattattggaataggaatagaaatattttcgttggataaaatttgacaagttaaaagagactactattcgtcctccacgcatgacttggcttcagattcttcagggtcttcttctaggtcttcttctggatgttcctcgaagtttatttccatttctacatctgctggaatcggtgctggcatgttcttggattcagagtctgactcatcaatttctacttcaaaatgataatcacgtatgtcatcttctagttcataaatgttggttgttgtggatagatct

SEQ ID NO: 51459 - DNA, 1003 bp, Cannabis sativa
tttttttcatgcaatttatattttagatttaatgtatatacatttagagatccttgagactatgagacaatgataatcatatatacaattctttcgctgcgtacctaatttagtaccataaaattaatacaaaggtcctctaataacctttgatttcatccttataccaaatctgcctggtatttcccataccactttctagtagtgattcatcatgcttccgttgatatatggatgggaattatgcttgaacgtcggaggcacaagccattgttagttttatagtactaaattaagtacatagcggaataataatttttgaatatcatcgtatcacatccctaggatcatcatatgtatgtaaattaaatttgaaataaataaataaaaagaaaatttaccttttgaaacctatcaagatatccttgtttgtttttgtaagttgtatccttggatgacggtgaagaactcacaacatattcttcaaaatcttccaccacaacaaggaatagtgtgggctattatgataaagtgtatattgtgttcttgtttaatctcaacacatgagcaagagagtgatgatcatgaaaaaaggttaatcagactaatcctttttaggcttcctaaaaataatacgtatgttttatttgggtttaaacagtatatctcaaataaaattaataaagattttatttaaataaatattttaattcaaaaataaattaaataatatttaattatttgaataaatatttatatctgaatttgtcatagatatttattttgaattagatattaaggtttgaattaaatatataataaccgattgagggaatctctcaactgcttggagagaatctctcaactactttgagggaatattttaactaacttaaatatttataactactttgtaaattcaattataaataaatatttatcttttgaatttaattagttaacctaataataaatccagtgaggcccaccatatcttataggc

SEQ ID NO: 51460 - DNA, 2545 bp, Cannabis sativa
ttgtgatttgttcatatttgtgttaatacatgttttagattgaccacctctaaaacgatttataatcctaatataaaattcgaaaagcgaatattaaaaatgctctaattgaataaacatagtttttgatgtgaaactagagtattcacataacttggtgaccattagattattgcttaatgcaaactatatgtttatctaattcagagatgcaatagataatatatggtttaagacttcaatgatctgaaaagagttagcgttatttctataatctgtcatcacttaaagaaagaagattaaaaaattgtattaataattgagtaattaaaacagcaggattcatattcctaatcacttattcgtatttgaaccactttatttgatttttttttttaattttctgtcaagtattattatttttcctagattatttcgattaactaaatagaaatataagtctagtttaatagcattcaatttcaatttcatgtggttcgacctcacctatgtgaatactatttgatacgtacacttgcgtaactctactaactttgcataacagcaatttgtgcacttagaatggatgatgaactaatttagatgggtgtgttttcatcttttctctatgtagtaacctttgatttttcaaagttcattgttaaaaaaatatcattttttcttatatgatggtgtatattgtagttatttaaagtttaaaattttttaaataatttaccgtataaaacataagattcacgcacataaaaaataaaaaagacacatgtgcaataaattattatatattattttttatgcattaactaaattttcaaaaatttgcaaaatgtattaaattactacattttacactgtaatatatatatatatatatataaaaaaaaaaataagattaaaacaatctagatgtcaaaaactcaaaataggtgtatcaatatatccgtttgagagtagtaccatataattttcctaacattcctacactattgattacattataagtagtagagattttgtcttgcccatgacattgatattaggtaatttgaatttgtggtcctattcctattcctattcctatactatggtagaagagaagtagaaggtgggattgaattgatttcatttaatctctctcacccaatggagtatggagtagggtgtaggctaagagttgaaaatcacaaagcaccacaattgtaccaccctcgcgtgccttccaacctctcaacacaacattttaaagaaacaagaagaaaacatcacatgttgcccaaatagtggtaatctactttttgtactaaatgactataagttcaaatcaaatacaatgccaaataacctgtacatttgtaaattatatatgcaatgtatatttgcaggtattaggatcggtcctaaaatttgttgagcttaagatcattgagcaagaattattaaaaaatatttgtatttttttttaaaaaaaaaaaaaattagactcttaagttaattgagttctaagtacaaacctaacccgtcttaactcgaaacagatcttgacaagtattttgtctccatacttataaacaagagttcccaaggctatgtcattgtgttgttgtttctatctccttattgtgaaaaagtttcacactctttttctattggagactattaatatattttgtataagttaattgtagaatgtaatagattgaagaaaaactttcccacataccatatttgtccaaatttgatagattttgagtcattaaatccaatggttatggatgaaacattcatactcattacataccccatttctgactcccaaaataagaaaagtgacaaaatgtgagttccaattggtatgacaacttagtcatattcaaatatagtataaaaattacatgtgtatagtgtgtccacccctatgaaattaatgtaaattaataagaagagaggtttatatctatttatccaatctcaatgaaagattattaaaacattatcctctaaaagccaagaaagaaagtcaaaaatatcagagagcaaaagtgtttaaaaaacaagtggagagccactaattataccactcaaatacaaacaatcatcttctctctctctacatatatataaaaaaaatactaattacaacctcttaatcaatcaatatctttttcaaatattagaatatttttttcataacagtattcattatagttaatagtataattttgtaaatttttaaaaaattccgaataatttacaatgtcaaaaatatagttcgcgatatcttaatttacctacgcttgttaaaaaaacttcaaacgtattttcgacactataaattattagaaaattttcaaaaatttataagaataatattgtaagcataccgaaaaatattaaaaaaaaaaactccaaaatatattttctaacataaaaattaacttaaaaattataatagaagattcacggcaacactacctataaataaatataagctcttaaaatgaaattaaaataataattagtattt

SEQ ID NO: 51461 - DNA, 992 bp, Cannabis sativa
agccacaacaagctgaagtggttcagtatagacagtttgagagaatttaggaaatggaaatttgtgtattttgccaagacaacaagcagaacaaaaagaagcatttttattgattgaagacagattacacaaggacaagacttttatgccaaagatcaaaatcactaagttgatttttattacaatgattgcagacagtattacattgaagattatgttgagatgcatctgtggtattatttgtgttggctgaggacacttgtgaaacttcgggtaagagttggatttgagattggtcaaaagtatataggccattcttgtgcttccccgtcaaaagtatatgatgactcaactcgtccttaacatagcacatgtcatgatgaaattggaaataaacattattatccaaggcaaatttagaaacactcaacaaattttttgtgatttcaggtacatgaagcagattgtttaggacaagaggtttattagtatgatctgtcaaaaaacgagattggccaatatgagtaatagacaaacctgatccgtctccaacatacattctttcaaggccatcatagctggtgcaattggtgagattgttcatatctggtgtgcaatggttggtggctccagaatcagggtaccaattttcatcaattccttgagcagcagcagctaggtttgcttgagcattagtactttaagatgttgccatttatgtagtgtgagcaggccctgttaaacctgtaaaagacttgtcaaacctgtaaaaacaggtatggacagtatggcctatcttcaagcatagctggcattgttgtttgttgttagcaggaacagagggcaatctaccagatctattgaaattcatattacctcgaccatagtaggggatattagatggtgtgaagttagagaaacctggtggtggagccaaggatgggccttgatggtaatttggtctgaaaccatttttgttccctgggtttcca

SEQ ID NO: 51462 - DNA, 633 bp, Cannabis sativa
gattctcttaaaaattatgtgtttattcttcactatcttcaaaatattgattcaccttaattacataatctctcaccaaacttgctcatatattcataaatagtgtgcttatactcatatgccttatttatatcattccttaccaaatttgctccctattcataaacagccttcttaaacgttatttgtatgccttaaatacatgatgtccaacttgtttgttgctcattcacaaatcacaagcaacatgtttaattatgtaaacttcctaattatatttatcctctattcatttatctatttctttacaccattcgatcaacttactttgaataattattcttgatcttattttgtagttactcaatatatgactacaatttttttttttttttggtattgatagctgattttactaaaataatgtttttaaaaaatttatatacctttggattgaactagtcaatttttttccccaacaaaaataaataaacaactaaagatttgtattttgtgaaaagagaagaaggctcttcactatgtacaattttttcccaagacttgataaattataattttaacaaaatattctaattttattagttaaacaagtcttcatatctttatttattt

SEQ ID NO: 51463 - DNA, 641 bp, Cannabis sativa
aattaaggaggaattaataagaagagcaaggcacacacgcacgttgcttttttgcttttggctttttctttattaataaaatagctcacaaaggtttaattttaccctgtttgtgtacacactagtacacatggattctcttctcctaattaatcaacacttagtttaactggccaattaatctaccatatatatatacggtaaaacaaagaaaaagaaatggaaattagttaatatatgtagatattaatattgcttaattggctatctcgatattatagatctttctctctccaaaaagcttagcaataaccacgagtgcaatcattgtccaaataagcatccactagtatatatataataagaacatgcaattaatatataaatgaaaacattattacgttacgtatatatctatatttattgaaattaatgtacattatcgaaatttgattagtgatgtataggatcactaattaaaattaaatgagatgaaccaataaaaaatattataggtaatatataacttataagggtataagattaatgatggagctggggccggagtgccttggccctcccattttttttttaaaaaaaaaattatgtaaaaaaccattaaaaataaataaataaaattt

SEQ ID NO: 51464 - DNA, 681 bp, Cannabis sativa
ttgaaagcccaaaataaatatttcacctaacaaaaccattatttattacatgagccaaaaaaaacatcatttatgagtgtcaccacacaaacttgactcttgaccttgagagtgaggcttgggacaaagccaattccaatggtcaatcccaacaatccaaagacccaacccaaccatgctttggtcaacataaatcttttgctaaacctttctctcttattttgcatttgaatttattttactattaatttgtctcataagtttggaagatgaggtttcaaattaagattttgtacaaaatcaataggacaagaaaatagaaaggaaataaagtatgggacagaaaagtgcaaataacataaaaattaagaagaaaaaagtaccaaaaaaaacatattgagacattaatttttcaaaaggaaaatagttattaacataaaaatgtaaactaaatttataatttctcaggaacgcccaatatatagttataataatagcgttagattagtctcttatgcttgtctttcaattttcattttcattttttttaaactaacaacttttctttgcgttctttatgagatcttttatttgtattgaattaggatcatcgttaaagaattgtgttagtttattttctaattttcctgagatgtccttaatttatattcatatagttat

SEQ ID NO: 51465 - DNA, 1256 bp, Cannabis sativa
tgcatgattaaatatggattagtagggctattagcattagttatctttaaattataattttatatgaatatttatgttgggggtcctatttttagaaaataggcattagagttataatttctcaattttagaaattttattaaactctagtgtattaattatgctatatgtgaaatttataaattttacaatttttgcacagtgacaatggaaaatgcaacgaatggccattagagtcacatgggtaaacataaaacctttttatttttggggacaattatattttattatgggttgttgggattaggcaggatggtggtgtatgaccattttacccctaagccattttagtggttaagcattaagaaaagagtagttttggcattttaatttagtgttaagtggatcattccactaagtggcagctggccattttggatagaattaacttagatttattattttttttttgtattaaggaaaagttaagaaaaaattacaattagaaggaaaaagacaaagatcacctcttggctctctctctctctctcagcaaaattttagaggaaaaccaattgtttttcaattattttatgagttctcagctatggttcaaagggtttttttgattcaagttaaggtaagtcctagaaactattattccttgagtttttaagctattagttgacttatagcatgtcaatttccgttttaggtgctgtttgacttaaggtttaatttatttctatttctagtttatatatgagttgaatttgatttggttatgttggttttgctagtttgaggtgtggtgaatttcatttttgctactgttttttcttggaaactactgttaggtgattttataggtattctggaaaatttgattgagtttgggaatgatttgagaaagatatgaagtttttctagggttttctacaggaaatcggttaaccagttctgctagtactatagaatcgattaaccgtttcaccaggcaggatcctaggaacttattttccatttgggaaatttggtttatcgatttgggcagtttctagagccttagttttgatgttccctaaatatttagggtattaccatgctatttatcgatatgaaaacttctagttttgagtttaggtccccataaaggattttagcaaattgtttacccatttatgtgattgtgacatagggcctccattcaatgcgtgattttccattcaggttgaccaacacacttgaatttggaa

SEQ ID NO: 51466 - DNA, 1236 bp, Cannabis sativa
tcattatattacttgtgattagaatttaaataatgtttgggtgtaataactgtttaaatatatatatatatatatctaatcaaatacatatttcagtaattaaatcacttaatttgatttcaatgagattatgttcacttccaatattatagaaccaaatttgagtagtaaattacaaaagttagaagtactaatgcattttagatgaactctccatttttctatttctttttgaatataaataatatatatatgtatatatttgtagaaaaatagtactaattaattcgtggggggattcccacccaaatggcttttaaacattaattacttgacacattgtgagtgtttgagtcaaaaacttgtgatttacgtgtgtgtaggacacaagaaaaatggtaaaaaagagaaatgctaaagggcaccactggtgcctagtaccctcctacgtgtcaatatcgttattggtgcaattaagtattgagtcccatatagtgtaatataataatttttatagagtatcgctagccaattgcaagtcgacacatttagaagatgctaggcaccactggtgcccaataacaatgctcggtaaaaaatataaaactagtttgggtcagaatatgcaggcacacataactcccaaatattaatcaatattggggttggggacttgtgccttggaagctttttggttcacatattaaattaaatttcatttcctctctaatccctattaactattaactaatattacttacaatgttcatcattttcttttattaattatcttttaaggtttcacagaaagaacaaacgaacgtgcttaagtttcagttactcacttggtaatggctacataacaaataagcgtatttttcgttgttgagagagcaaaatttttgtattttatgtctctttaaccgattattccaaaaattaaaaattaaaataaataaataaagtacaaagtcaagcccaaacttaataaaccatccttttaaaataaataaataaacaaacttaataaattttaagcaagatttttcattttgtcttggaagaaccttaaccaagattagattttgtcttggaaagacattttggggcactatttttatttttggtatttaaataattataaatttatttatataattgaatatactccaatagaatgtaaaaaaatgtccagtaagtaaccatgatgtacttaacagaaaaaaaaaaaaaaaa

SEQ ID NO: 51467 - DNA, 1472 bp, Cannabis sativa
tatagattagtttacttacgcaatctgtaagccattcctacagtgtcaacaacttccaaaagaacgatggaccataattactagttttcaaatcctgaagtcgatgattgggaatgagtccagaacacaacttctaaaaagtatgcaacaattgctcatctggtgtcgtcaggggatcaaatgtcgaagaatgcctctatttcttattcatctccgtatggtcattaaaacatatagggggatttcttttccgcttcccacactcaaccccttcaggtggtgcctctaaagtcaaaatttcaccctatgactcactgtcacctatgtagataatacctgcaccgataggggtagctagagcatcctcataaagatcatacccatcaggaaagacctcatcatctccacccatagcagatggtgagggtgatgcagctgctagtgagggtgatgcatctgctggggcttcagtgctggagctgtcgttggcgtacgatgcagcatgctcaatatagttttgagctgctccataatgaggttcagaccacccttcagctctatatggctattctgatatacctccttcagcttagcatgagaaggatacagacccttctgctcagcctcgatcctatccaacctccccactaattctctgtactcggcaccaccaaggcttgatgaagatgatgcactaggctgagggtctgaagcagtggcttgaaaaagtatatcccaaaaaaatacagtaagcatacggtaatataacaaataaattacataggtatcgacataatgtcgacaacatgtcaacatcatatcgacaaccatcaatacaacactacgaaaaatttggatgaatagttgtcgacaatccattgacatcttatcgatatcatattgataaccctcaatacaatactacaaaaaaaatagataaaaagttgttgacaacctgttgacatcatatcaatataccatcaacaaatttgtaagagaatacaattattacaatactacgaaaaaatttgggtgaacaattgtcgacaacctgtcgacatcatatcaaaaaatatgtgcaaaaaaagtcaattaatacaatgctgatgaacaatcgtcgacaacctatcgacatcttatcgataaatatataacaccgttaaacctaaaccttaaaccctaaaatatataacataataaacacaactaaccaagtaattacaaaacgtaacaagtaaattacaactaaccaataaatcacaatgacaataaataatcataaaaaaaaaagttaaaaaaaatggtacatgagtctctgtcttaggcaaaggagcattttcaacatattccgctgctttttctacttgtattttaaaaacgactggatcttgggtgtcctcctcagcctgtgtggcatccaccccaccctcaaccaggttctccacacaatcgtaagagatggtcctcacata

SEQ ID NO: 51468 - DNA, 2897 bp, Cannabis sativa
acattaatttttaattcccaacctcttaaaataaacctaaaatacaatggtatagtggtccttccaaagctttctcgagagacaacttgatagtccaaaacccaaaatatagcctaaaaattacattttttttctcttttggaggtatatctattcttacaaaatcaaaatatacaaggaataaaataataaactaaagatgatcatgctgagaaaatcaagatttatttattattattatacttacgcatgcctactttatgttgcaaatggcagacactatatatatatatatagttatatatatatactctgcaactgcatatatatgcatatttgcatgcatgtttcatacttcaaatcatgagcagaacactactattatatacaatatctctacatataatatgttcccagctttctaatatactactgtacttccaacatatatactatagcaattgtgatcatttttcttttcctctatgaactttttacatgtaataaatcgcacccttaatttttgtaaaactatttttttttttaaataaagtaaatcaatattagacagataaatctgctaatacaatggactgaaaagcaagagaaacatcactttcagaaaaaagatggcttgactaataataagcactacgtgtcatatagtgcgcggttttgttagcaaatcgtttaacataaccaatggaaacattatttaaagaaaataaaataatctgacaatcttgaacaaacaaatcaaaaaaagaaggcatagagaccgagctaagaatggcttgaacaactaaaatgcagtccgtctcaactatcacatttgacttgttattcatctttatccaactaagcgcctctttgacacttagaatttttgcaatttcggggtggcaacttatggtagaaacagttgaaaacgcctcgagaatctgaccatcacagccgcgtgctacgaaaccagtaccaacctcatttgtgtcttcaaaaacagcccctcacaataatcttcaaactattaagatcattagatttaagaattttcgttcaattttactaatggatgcttgacgtggataaaaattcaagtaataatttgatacatatcaaatgtacgggggacatgatttagtatatggataattactacattaatgtaattgaacggagttagataaaaattcttgaatctaacaattttaatagttcagagaacacgatttgatacatgtattttaatattcagagggtacaacttgatagatggacaattaattactaaattagtaaaactgaaaggaattatagaagtctttaaattattcaacaatgttaataatctatgaagaatttttaacacttataaaatttagaaggcacgatttaatacatgtcattcggagtacaaaaatttaattagcctaaaaataatgtgtttagtccattgcttaggttgacgtgatttgtaaattattcgaactaaactatttgagactagactaaatgaatttagtgtcaatggttggttaatttggatcatttataattttttgattcggtcacggttttaatatttttcacagtcgttcaaaccaaaccaaattacttaatttatatatatatatacatatttaatattaatattagggaataatcttaattataaactttaaaaaggaaagaataattatgaaatataaactataatttcaaaccaaattaatccgtgaattcatgtgaaaaaataataatatatatatttactatgatacatcaattataaagtatttacatattcttctttagtatgaaattaagaaagtaaaagcacttatttattcacataatcacacacatatcaattaaatgaaagagctacttttaggaaagaatcaatgaagttacaaaaaaagatataattttgtaatatttttgttacatatattgttctttctagtatatatagtttggtataattgttacaaatctatggtaataattccaattaatctatatataaatacataaacatgtatcgagctacttaatcaaaagcttagtttaatcattctcattaaagaaggaaaaagagtgacaaaactaagagaaaattagtgtattcatcatagaaaatgatggctgtgaaatttaatctagcaataatattttgttctttattattggagattacttttgcaaccaatccttccattttcaatgtcaaggcacaacccaatagtgacattagtcaagtaagtacatattttttatatatataaacacatggacatctttatttttatctcaacttttatatatagttgagacattatttttatctttatcgattttctatatgattatgtgcattgtaattataagtgacatttcacttgtttccgaaacatttaaaataaaataatccacggtcaaaattaattgcatgctggctcgcttttttatatgcacttgcaattatttattttgaattttattttttatattgtaaattattcaaaatttattaaaaatgaatgaaatacctattacaattataataatataaattatcattttaaaaattaggttatagtttctcccgatgtctaaacgtaaatatccttaacgatagagacaaaagtgattacatatcctacaatattatgccctagctagaatttgtaatgttgtatttatctcatcaatatgaatatgaaagtgatgaaactctttatttcaacaatattgattcaaaattaattaattttatatgtaggctctctctaatgcttggaaacaagcatgtacatctactaccccatctgaattagtaattccaaagggaacattcaaattaaaaagagttacattagatggaccttgtaagg

SEQ ID NO: 51469 - DNA, 935 bp, Cannabis sativa
aaggatgcatttcatctgaggcatcattagcataaatgaagtacatgtgagcaaagtgaacactgacaacaagtaaataaaggggttcctattagaaagcttgggcattgcctaaggctactaagtattgacactaaatgctaatgcctttaggggctctttgaactctctaatcttttctaatttagcttcactaacttcaactaaaggtggatttgtggtgattcgttaaagttagttaagtttagctagtattacgtcccaaccagtaaattccttaaagcttcaatctcaacaattacttagttggggacaattctatctttccaacacttttggacaatgcctctaaataccaacctcttctacagatagaaaataacttttaagaacttattcttcctcctctcctaaaattctctctctacagaagtaaaacctatggaactcgatcctcttgtgagttcatagttgttggtgataatcaccattgtaacaccaacgtgaatcgataaagattaaagctaatggttgttctatctaggaagtagacaattgctactaccaagcaattgattgaattaaactcgttaaatttgtgtgatttgatttctgttttccatttaatgtttttcattgtcttgattagttagttcattttattgcaccaatagacatctctcttcttaattgtttttgaggtgattaaaacacaataaatataaatgctatttttaacttagttttagaatttttggtaaaatcattaaaaaaaaaaacatttgaaccaaaaaaaaaatggtacataatatacattttttttaatctaaccaagttaaagatatttttctagcacgaatagataaagaaaatgtaatcattctcgtcaaaatacctttagattaggttagaaattttaagttttacaaaatata

SEQ ID NO: 51470 - DNA, 865 bp, Cannabis sativa
tgaaaacctggttccttgagaactccacccagatagattagccgccattgtcaaagcagttctccatttggccaccatatccagtctgtcgttgaactcttgttcgtattttcgaaacgcctctgcaaagtctcctccttgttttcgtatatgagatggatccacttcataaaaaatgggcagaacaatctgatttaattctttgtgacatttcattatatgcacaagctcatttaagcaccaggaggaagaagcatagttttttgagaaaatgattatcgaaacttttgcgttttggattgcatcaatcactgtagctgatacatcatctataattccctcgaatcttttttggtgatctatggaaagactaggcttgatcttcttttgatctaaagctgtgtaaagatggctagtgaagtggaaatggttattattactcgcagtatcttcacctctaaagttgagaaaaacatcaaaattcctcatagtaccactttgaaagctcaactttgattagtaatgttaatacacaacacaagattaatgaaattcttacaacttatttcagtagaaatagagagcacaaaactaattaagtccgaacctttccagctaccagaaaagctttgtccgtaacatccagaggttcatcccaagcattctcaatgcctttaaccacctctggaacggagcagggtcaacgactactctcatacaagcgtattgcacttcgtcttttattttttatttttttggttatctctttacctctgatccgatttttctttcatggagaaaagcatcaccaattgtaacattctttaaaacccttggttaaaatagagattgggactgagagaaa

SEQ ID NO: 51471 - DNA, 1388 bp, Cannabis sativa
cattttttgtaattatttaagaaagtgtatacatttatgtaaaatgccttttttaaagtgtaagccacctattttctcacacaatttaatgtcgtcattaaatatactatatctgtatatatttttttgaaaaaataccgtaactttcattaaaaagtaaaatcagccataacaatggcttgcacttcgtaataggtgttcattcttcgtaataggtggtcctcattaaatatattatatgtatatatatgtatattaatatatgtatatatatttgatacatatgtaataggtgttcattcttcaaacaaacgcacattatatttttcttttctttcgcttcacgtggtggacatattatatatatgcgtatatacatatatcaaggcacacatatgaaatcgcaacttatacaaatatatgtacaaaattttttgctttccctttttattaggtactataacagtgctattattaaatatgcgtatgataaatccagtacacataagtattgatttttctattatgcccaaaatactctctttatttacttcaccccctctcacttcttctctctttccctctctcttcttttcttcttttttctctgtacgtatcaatttcttgccaaagatttattttccaaaaaacccctttaattgttcagccctctctctttttatagccccttttataattattattattaattttttatgaaactcacttaacgtaaaagtggtggagttggagaaaatatctccttaattttctctcccttttgactgacccattcatattatttttttttttttgtaatttataataataataataattattaaaaaaaattcgttcaacagatgccccctcaagcaagtgcgtgtcatttatgtaaacgtaccttgcttgagaattgagaattttttttttttttttatatttttttaacatactgatttttttggagaatgtctatgtttggggctctaggctctcaaagagctcctaatgaatttggcaaagaagtcaacattgggccacgttatcatcgctctatgtcattgatagaggttcaggcatctaataaccaccaagatcctatttctcattttaagattgaggatgtcagagattatggtgccattttttgggcaaatgtcttaggagatgttgataataaagatgatggggatttgacttaccaagtgaacgaagatttttttccgtctctttaccgttacttaaaagataacaaagtgcataacaattttgtctttcgggggcgagccggttttatgaggtgtctcattgaatggactgatcaagtgttacttcaacaccaaggtgtcttaagtaagacgggtatttatggtgctgtttctgta

SEQ ID NO: 51472 - DNA, 728 bp, Cannabis sativa
tcaaagaattgcacatgaatgttaaaaccttgatctaactagggtcaagaaggaaaaaacctccggccagagttcacacaaggggaaaagcattgcccaataggaagtcgcccaaggcggggacgaagatatggatccttgacttggggaaacaaatacaaatgttgggccaataaaagaactggaagaagtggaaatcgacccagatatcccatccaggaagctcaaaatcggtaaaggtttgttgcttgaaataaaattagctttaataaaatttctgagagtaaacctgggcatttttgcctggtcacataaggatatggtcggcattgatcccactatcatgtctcaagccctgaacattgacctaaacttttgtctcgtctagcagaaaatatgactactggacaaagagttggcacaggcactgaaagaagaggtagaaagactgcacgcgaacaagttcatcattgaagctttctaccctgcttgggtggaaaaccccatactagtacccaagtcaaaaaaatggtgagtatgtattgatttcaccgacctcagcaaggcgtgtcccaaggactgctttccacttccaagaattgattagctcatggatgcaatagccggacatgaaatcccgagcttcatagacccctactcggggtacaattaaattaaaatgcatccacctgaccaagagcattcaagtttcccaatagatattggtc

SEQ ID NO: 51473 - DNA, 1951 bp, Cannabis sativa
cttttgatagagtagagtagggttttattgaatgtgtgttgtataaatttagtttccctactagttttgtatccttcattcttagatgcatttctactatttcctttagattatgtatcaataatactcctcaatcctctttcacgccttctagggatattaggtagggtgatcccctatccctctatcttttcctcctcgatgctgaaggtctcccaactgttattaatttcaaaattcagtctggctagtttaatggtattaaggacatccttacttcttataataaggctactggcgagaatgttaacttctctaagtttggtattcttttctcccctaatactagttttaatgatagaaatgtttttcataattacttaaatctagataataaaccttttgttaataaataccttggtgtcccacaatgttgtggtagatctaaaaaatcttctttccactatctttttcagagagcctatgacaaattgaatgtcaagaataccaaactcttttctagggctagcaaagaggttttgatcaaggctattatccaagctatttcctcatacaccatgtcttgttttttccttccaaattctatatgtaaaaactttgataagctaattgcaaacttctggtggggaactattagaaattgcaaaaaaaactattggaaaaattggtctactctttgtgcttcaaagtttttttggggtttgggctttagatctttcattcatcataactaggctatgcttgccaaacaagcttggagaattttccttaacccttcctctcttctttctcagcttcttaaagcaaggtattataaacataataatttccttacagcatccaaaggccattgctcatcttatacctggaatagtcttctttggggtagggatcttttaaaccaaggacttctttggaaagttgggaatgacaaaataatctcaactcttcagttcaattggattcctggtattaaatttcttgcttataaaaataacattgtacctactgataaaactctctttttttatcactgagtctggttgttgggatgtcaataagttaaaactctttcttttctggtgatactgtgaatgctattcttaaggtccgcaataatccctccagggaagatactcttatttggggacatcattcctcaggatgcttcactgtaaactctacttaccacctagccaattcccttcccaatttttccatttcttctccttctccctccaactcatcctactttgatggaaatcaaattgaacacttaatattccttccaaaattaagcatttcatttggaaagtctttaaacatatccttcccacatcttacaacctttttaaaagaaaggtacttgataatcctcactgctctttgtgccataaccaagtcgatacaatcacccatgcactccaaagtagtttgaatttggaatcatacaagtttctcaagattttataacaataattgatattgtgatattaaagattttctcttagcaatgtttgacacttttagcaaaggagatctctctctattttttgtggcatactttgggctatttggaatggacaaaataataccatctttaattctaatcatgctcatattgcagatatagaaccaggactgtctctaagagtactccaacccacataacagtgcttcccaaaatgcatatcttattactgtttttgatacaaggtctacttctgcttcatcaaactctagccaacagatatctcaaggctgctacaagcttaattagcactgatgctgtcatttgccaggataaaaattgtgaattagttttggtgctgtggttcaaaataataagggggatgttgtggctggttgttattcttctcttctgagtgttatttccctatttatgcaaaaggacaagctctttccattg

SEQ ID NO: 51474 - DNA, 1234 bp, Cannabis sativa
aaagctacaattggttaccaactaaagcccttaaaattttaaagttgggttgggacgcatgtaccaaaacttactaaattaacaaatatgaattgggtggtaaaaaatgtaccaagttgtatggcttttgctagagttctttccaaacaccaactttgtctttttttttttttaattatccctttccaagtttccaatgtttgatccccaagaaatgggagagatgttatcaactttgaagtaactattatatatatttttttatgttattaagttaatattaaaaatgagatatgtaattcgatatttagttaaaatactaaactaatttaaatagtaattagattagattttgaggtttaattgaatcaactattaattttttattaaattaaattactaattagattaaatacattaagaaaaaagtattagattggatgagatgtctaacataaatttagagcactaccattaaatgttctattttatctttttaaaaaaatatatcaccaaaatattattttaatttcttttatatcatacttttctattcctttctctatctaatttgaatattacatttttttttaaatattttgttcatttgaaatagtttctctcattattaacaatatattcataatatttatctatatatattatcaaaatataatgagattttattttaaattaatataaatatatattaaagatataaatgaatcgcaataacaataataaaaaaaaatgttaaaaaaataattataaaatttcttaaaacataacatatatgtgtataaatcgaaatatgtataagtttttttcttaaaaaattacaataaatatattatattattcatgttgatgttgaaaattaactcaacaaataaaattatatttttacttacaattctttacactaggattaatccaattgtaagaatacaactcaagtagattacataattctttctaaatcgactgtgattctcctctttgattttcagtcctgagctcgagtatattttggagatgtattctggcagagtttcaattggattggtgtgagtaagagtttcctctttttttgaatgatgaagtctcctatttatagcgagaatgcaagtcgcggttgttgggattttataccctaaataaaacccattacaatctaatctgatttgttatcaataagagattagaagtgatttatgtttacatgtaattttca

SEQ ID NO: 51475 - DNA, 1357 bp, Cannabis sativa
atggaaataaaaaataaacaaaaggaaattccgttgccgggaatcgaacccgggtctcctgggtgaaagccagatatcctaaccgctggacgacaacggaatcatgttcaatagcccttaaatatctaatttataactttattataaagcaattatgctattattattattatttttacacagcttagattaaaaacatctagtagttaaataaataaataaaaaaacacacacggcaacaatctcataagataaggtttaattacaacaaactaaatattgtaattaattactattataattacaattcttatttattatattacattattattacggttactattaatatgttagaatcaatttgcaatgtaatataatattttaaaaagtatataaacttttttatttatttacgtatttattttttatttttctaaaagaaaaaacattattttgtttctttcttttcttcttttccttaataaaagtccttcaaattccctatataatatacgtatttagtttgtttgttttttttttccttttttcccttaataaaagtccttcaaatttttggtgggaaaaaaatggcaccctcaataatttgatcaatatgtggcccttttttagtatatgataatgtgtagcttttttatttattttatttttttttcaaaaacaattaaaaccacataaaataagcacatgttccatacttacctaactattaattcatcttacctaaataatttagaaccatttaataatctcgtacaatatcatattgaatgatgcaataatatctatcctatgtttggcccaaatatatgtatatattatggagaattactaaaaagtacgattggtttctagcattcgtctcgatatcataacgctattagtataattatgtatcgggtctcatgtagcttaagaaaataacttttaaataatatcgctaatcaatcgtatccgatgcccaataactatagtattttatttattaacaaaataatataacaaattcttattgattccctaaattctctaagatcaaaaggtgagatataagcacatgatcccattttaattataaaaaaacaaaaaccataataataacaaatatgatatatgtataataaaagtcatactataatttcactcaaaaaaaaagtcatactataattacatctattgtaagcaacatacattatgtaatttcaatggatccataaaatgtataaaacataagcaatatacacataaacagtttctgttagcagttaattgtgaaaagtaaatgataccttaaattattaacaattcagtagtttaaagaattttattatcaaaa

SEQ ID NO: 51476 - DNA, 978 bp, Cannabis sativa
agcacgtccggtcgttaactcctcacgcccctgccaccgtttctaggaccgacccatgcctcacctgcataggtacctacgtagtgtagtgtcggtcgcacattcaacatagcggtcgaactcatgtgccttccagaactagggtcttcaagcttgctgcgtacgattagccagccttacagcggtgaaaggattagacgtccccccccatgctacaggatctcagtgccattctctttaaagaatagaagtggagttagagttgttatcatgccggatcataaaagtaaaaagccgtacgaaaagccagcggacctgctcacgggagttaggcctactctgtagtgggtagacatagcagtgccatctgaaagaatataaaaaaaaaaagaaccgctggagaaaaccaattatgatggattctcaattccatggattcactctcctttccctaatatgaaccttgagtcatcaaagcctttctgactcggcctggcccggtcgccctacgcgactggcgcttcaaaaggtagtttacttgcttacttgttagagtaacgcaaaactcttgtcgtagtttgtttggcgacctaaggggcagacactttttgttatctaaaggcaaagactatgaagtgggcgaaaatgccgggctccggctccgcgcatctactaacaccttttaaagtactttctagtgtgcgctttagttttagaatgtatcattcagggtcgcgagtctactttctcatttcagtgcttgcccttttgaatcttaagtagaatgtgaattgcgtgaaagtaggatactccaaatttgagagtccaagagttttataaaacgtttttgatggaaaaatatgtgaatcaaaaatatcactgaattcaattgggtccatgaatctaagaaatagtgagaattcttgatctctctcaattcgaaaatccaggatttgaattgatgtcctttcattaaga

SEQ ID NO: 51477 - DNA, 2103 bp, Cannabis sativa
ttaatacttaacaactatataacaacaaacaaacaacggataacaactcctctttaattaatatacaaattcagacatcaacttacaaaaaataataataaattaaaatcaacatatcaataatcctaaaaaaataaaagaaacataaagctaattataaaaaaaatcatttaaaaaatggtaaaatattaaaaagaataatattattggttggtcaacatttaaaatataatattaaactagtcaaatataaatttaatataatattgttaaaagaaataacatttggttaacacccacgtcactttcaacattgatatactttttttttacttttttttaattataatctcacaataaaaatgacttaaactaaaaaaaaaaaaaaaaccttcccaacgcgccacttggcgcgttctcccgacactagatgcaagtggaatccatgcgcgtcagtatttgtcccctcgtaaattaattaacaactgtataaatgtaaaaccaaaaaaaaatgtgtcattataaaaagtaaaaaacatagatttttagtcattttttttgtaaatatccctatataataattaaccacttaaagatagatgacctaggtatcaaaagaaaagagaaaaagaaagatgacctcctagggctagtacaaactcgtgggagaccattaatttgttaaaattatcaaatatagttggggttgatactcaactcgtgggatgcctcttgaaggtggtctcaagttgttttgtctaaatttctgaaataactaggtcttatataagtcactttgtttgtagtgactcgtattctgactctgtatatctttgactagacaattagcttgttgactggaaattcttctacgttaacgattatagtgtgatttagatcactctctcggctatagaatttttgaaaattcaaggaaaggaagaagtttttcttgtcagtttaaggctcaaatcacatggaataagttatttaataaaactcttattttttttcttatatagttatcataagggctacgtttatcttaaatggacttaaaataaaagacaaataggctataaaatagagaaaattacgcttgcaaataaaattttgaaaaaaacatcacaattaacactcttatttttaattgtggaatatacccttagttttataattatttttgaacaggtatatacgtaatgcttattattttattttttatgttttttttctctttttttgtatatacgctaggtttttttttcttctaaacatgtatttatttactctctatttttttttctatagactcatatattttcaaactacaatttttttttctattttataatatcaaatattctctctctatttttttaaaaaataaaaaatcctttctaacgacactagtaatcgtttggtctcaatattatcattttaatatgtggaaaacatatgtttcgttaatgatactaaaaaagataatcaaaattaaaaataacattttagtttttttttgtttaattgacaaaaaaaacaactaaaatttaagtttaaacaaaaaaaatatactaactaatttcattggttaataaataaatatttattatttaatatttttaaaagttactaaattgtatgctacataagtttactttatgaagcaatattgatcaatttctatatatttttcagctacacgaataattatttgtgtttaaaaattgaaacattatgatctactcttaaaaggaatcattttgatatgtgggaagtatatatatatttttcagaccaatattaaattattaagtaggtaacgttttagttactaaattgtattctctcttttatagaataattttgatagattttgaaaaaaaaattataaggaaaacttaagaaaaataaaatttaagttatactgttatttgtttgagctcaaaagtgatattattatgatctattttttcaagatgattcttttgatatatgagaactatagatttttttaccaaataaaatttttagaattaaaagtaactttatatagtctcttttatattttattaattgaaaaaagaagtaaccaataactta

SEQ ID NO: 51478 - DNA, 2151 bp, Cannabis sativa
atcttgggtgcttggatcagatgcgtaaggttctggataagtattgctattggtctgggcagcagatcaaccaaaataaatccaaaattatggcttcgagaaactatattcccaacagggttactgagatttctaacttcctcggctttgagttgatcaatggtgaggaatcttttcttggaaacccgttatttgctaaagggaataggggcaaggatttcaatattgtccttgagagtgtgaggaacagaatggagggatggagggccaaattactttcttaagccgcttgcaccacactcattaagaatgtaatctcctctattcccttatatactatgtatgtgtttaatgtccccaaaaagatcaattggtctctagatgccttggtcaagaagttcaggtggacagggtcaacttaaggtgggagatatctctctcttttgagttaggataatatatggatgcctaaaatttatggcagattaggcttgtgttgcttctcggatatcaatttctgtcttcttactaaactaggttggatgttggcttcgaagcaggataagatctgggttaatttgttattggagatatattgtatgcattcgagtttttggagcaacaaactcccgaggaatgcttccccggtggcaaaaggcatttggatgactagagatttcattaaggatcacagtgtttggattattggcaaggattctaatgtcgatttttggaacaatgtttggtcctatggtgatgactgcattattagcgctggtgatgtcaatcaaaaagtctttgggggtcaagttgcagaagatcttttggaggagggggcaggttctggaatgcccatctcatcttcgagatttttgaaccagttgcagccaatgctatcacttctagcaacattatattttttcctggtaaagatcatttacttaggaaatctttccctgatggcttcttcaccctcaaagcggcttaccacaacttgaatcatggtcgtttctctaataatgaaatttcgctttactctgtatcatattgcggattactttatttcaaatttcaaagatatcttttcctcctctaatcctgtgatcaattctgagatttactcgttgattagcccttgcttaagcaaccttgagaatgagtcaatctgtgataatccctcctcaattgaaatcagagcggtggttcaggaaatgccctaacttaactctccaggtctggatggcttccctacgaaaatttacaatactcactgagatgtggtggggaaacaaacaattgagtttgtccaagaatttttctccattggaaaatttaccaaggaaattaaccgcaccttcattgtccttattcctaaaaagaaggatgcatgctgctttaacgattatcaacctattagtttatgcaatgtaagctataaaattgtggcttagatcttgacgaacaaaatccgtcctttgttagagaagattatatcccccttccagtcggcgtttgttaaaggaggatggattgctaaaaactttatccttgcccatgggattgtgcatgatatgggcaaaaaataggggagtcatggcttcgtgggggtaaaatgtgacatgtcaaaagcctatgataggctggaatggtgctttatagagtgtgtgcttaaggcttatgggttcaatgatcaagtttgtggccttatctctctgtgcatttctactgtctggtatcaactcctactcaatggtgatatctctaagacattttacccatttagaggtctcagacaaagggaccccctctccccatatctctttattctttgtgcagaagttctttctcgattaatgcttgaaaaggagaagttgggtctgattaatgggtacaagctaactagatctagtatacctatttcacacttaatgtacgcaaatgactcaattttctttatttaggctgatcttgggtgcttggatcagatgcgtaaggttctggataagtattgctattggtctgggcagcagatcaaccaaaataaatccaaaatgatggcttcgagaaactgtaatgccaacagggttactgagatttttaacttcctcggctttgagttgatgaatggtgaggaatctttttttggaaacc

SEQ ID NO: 51479 - DNA, 1069 bp, Cannabis sativa
aaaatgattgagttctttaacaatatccaatacatgcacataggagactccaaatctatccccaatcaaaaacagtgatgtgcactagaagttccacactcgatcacataggtaaaagtagaatcttcaaacaattgtgcattattgattataatgaagcaattcatataggaattcctactcgacaacaataagtaatgcaaagaggttgtattgcactttttgcattatttataaccgactgacaatggagaaccatagcgttagtatgaaccaatgcaggtggatgatttagtcaagttggaggctgccatgaaatatgagataaactaattaatgaaaaattagacatgggaatcagctgaattacctcaaagcaagaaagcactacatagcaagtggattttcagtaggacatgatggaaactagttaccataaagaccaggtattaaaggctttgagcaaaaggaaaaaataatattttctatctagtattgacactagctacaatcaaattggtactgatataattttaggtgtagaagaattacagcccgactagatataaagataaactttctttatggtgatttggggatttatacaaaacaatgattcataaaagaaagcaaaaatgacttggcttttctatggcttcgcaatgctcataggaaatggtacaagaagtttaataacttcatgcgtaaacaatgatctcaaaagatgtcaagcagatcaacgtttttctatcaataatttcaacaagtagtagaaagaaattgcagagaagatgaaaatggtaaaactcagctcaaggaggctgagggcatttgcattcaatatatacttaaggatacaagcattgagccactgtgatgaagacaagtggcagcaaacaataggaaaaagcataaccgaaaagatactctagtacaattcaatgattacacagaaattcaaataacagaaaggaatattcaaattccctaatgcacgatgctgacagcaaggcaagagtcctctgtgatgagtagcagggaaagctatggtgaacttcaattctcaaca

SEQ ID NO: 51480 - DNA, 796 bp, Cannabis sativa
aaaaaaatataacataaatttcaagtaaaaaaataaaaaataagaaacacccgtacaacaaaaatgatcaaacgactgataccccacctaattaaagaacttcctagtttttatatatataactagtcaataatatttagctgggattaattaatcatacgccagctagtgtgggagaagttccatcttaattaataaaatgatttttctgggatttctagaagcttgagatttcattagtaaacatgtaatgtatcattaaaatattatataatttattcttttcaaaaagaaatactatattatttatgtaaatatatattttaagtaataaactattttcagctgtatgtatgtatcgatagagattaaacgacacaagccgaacagcaaatgcccaattacacacaattctggccgcccaatttgaatgcttttcaaaactctatgtaaaatgtaatgtagtgtgatttatataaatatgttatattagacttgttttttgcttaattattaattaaataataataattaaaataaatttaatgtaatttaattatattttttaatagaaaaatttcatgttgttttggagattatatgttgtcctgtttgttggtatgggaaggaaagccatgagcataatttctttgattgcttgttctttaagggttcgtttagtacgccgtattgtgttgttgtattgtaatgtattagtattatttaatacaatacaatgtttggtattgacttgtattaattgattgtgtaaagttttaatatatttttaatacac

SEQ ID NO: 51481 - DNA, 1454 bp, Cannabis sativa
atgaatattcacaaaagtattttattataattattattaaaaaaaaaacacaatgagttgctctcactcacacacacacacacacacaactcgctcaatttcagttttcagatctcgccaaaatctgtctccgtataggccgtaccgtggatgaggctcagaagtactgcttctcctatttatttctttagggtttaaagctcttattcagtgctcctccaatggcagaatcacttgtctagtccaactcaccaaaagcataatctcccaattcataaaaacttaattcaaattccattttcttttcttttctcccaatcatggtggcgaaggcccagcccgagccggtcaacggcaccactaccaaatctgggtcctcctcatctaccccggctaatcttaagcccgatctgctcacccatttttccctcaagtctttcaagctcaagaccaagcaacaggagctcctgatccgagtctcaattctaggccttgtctacatcttggcattcatcactcgattgttcagtgttcttcgttatgagtccatgatccatgaatttgacccttactttaactaccggaccactgtttacttgactgagaagggtttttatgagttctggaattggtttgactccgagagttggtaccctctcggccggatcattggcgggaccttgtatccgggtctaatggtcaccgctgcgttcatctattggacgctcagatttctccgtttcaccgttcatattcgcgaagtctgcgtcttgaccgcgccttttttcgcctccaacacgactgtggtggcgtatttattcgggaaagagatttgggacacaggggcgggtctagttgctgcggcattgatcgcaatttgccctggttatatctcgagatcagtagctgggtcttatgacaatgagggtgttgcgatctttgctttgttgctgacgttctacttgtttgtgaaagccgttaatactggttcgttggcttggtctctggcttcggcttttggctacttttacatggtttccgcttggggtggttatgtgtttatcattaatttgattcctctttacgtgttggtgttgttggtcactgggaggtactcaatgagattgtacgttgcttataattgtatgtacgtggtgggaatgttgctagctatgcaaattcggtttgtgggttttcagcatgttcagtctggggagcatatggctgccatgggagtcttcttcttgattcaggtttgctcatattattcccttatgagtctcaaaggtcttatcttgctagtttttcctgaaagagtgttttgtaaaaatagccatgaaattttttattagcaaaataactttacaaaaattttttttagcaaaataatcttctaagttcgcaaaaacgatgaattatactctgcgaccataaacaaccattatggtcgcaaa

SEQ ID NO: 51482 - DNA, 1599 bp, Cannabis sativa
  modified_base (1454)..(1455): a, c, t, g, unknown or other
agagagagaaatctcaataccagcataaaccccataaacctcacaaacagtactttaacaaacttgcaatctcactcacaattacaatcataccctttaaccgtataagaccaaactacccttaagcattaacattttgacctctcctagcataagtgaaccgcaccttggtcctaacatcatccccaaatccacttcgttgtgaaaggaggaggcactggaatccatggacaacatggtggcaggaagggtgatgattctccattgacagagaagtaaggcgtgaatttcccatttcaattcaattccttggagggttttattactgacgaagtcggcagctggtatatcattgctattccaaaaataattcaagtaaacaaccttataaacatcttcaacattcagttcccattatatctcccctccatcaaaagcctaggtttacaatcaaataacaaaatttctcacacacccacatcaaaatccagaacagtgaaacaaaataattacaaattggggtaaaggagaacgtaaatgaaagagatccataaaaaataaactccaaaaattataaatcaagtatggaagaagtagatataatcaaatcaaatctgtttgacctcaaactttgtataaaatgagaaagaaaagaacgaaagagagtgagcacctttgatcctcgcgcgattccaatcgcacctaaccagaaccatctccttgttgcatccacggcctaagctcctcatctctgtcgtctacgccctaaatctccaaagtctcagacacttgtccccagaggaagctgggcagcaatatttttcaagggaaagaaagaaggcgagaggagagatattgaagaagaggagatagagagaggaagaggcgagaggtagagatattgtagaagaagagagagaggggaagaggcgattttattagggctttttttagggcgcgttttatttatgaatcaaaccccaatttatttctttttattaataaatattttatattgtttggttagtttttatagaaaaagaaagttttaagggtttgaaattataggaaaccatgccaccttttaataggctaattattaatcattattttaaaagggtgtatggtgacacgctacgcgtgtgagcaaatctatttgccaacgccttatgcgtgtcgctaacgccacgtaatcacatgtgcctttagcgacacgcataacgtgttggcaaatagatttgctcacacgcgtggcacgtctctataggccataattttttttttatttttataaaattataaattttgggttttagtatttagtgacactacatatttttagtgacccacatttcgggtgataaacaccgaatatttagagtctaatagtgtgtgtcactaaaacctactcctatttatttagtgacctacacttttatgcgtgtcactatatnntgtcactaaaagcctaatttgtagtagtgatatcacttactgttgggctttctgccctaaataaaactctattttaatgtaatcttttctattcaattatcaataaagaaatagatttagtttcattacttgtttaatgtgtta

SEQ ID NO: 51483 - DNA, 3228 bp, Cannabis sativa
actttccataggatcttagtcctaatactttaaagggacactactttccataggatcttagtcctatttgggctcaacactgatttttttaatgaatagaatatcaagtttaatcaccatcaatgaataaaacaattgttttatcaccttataatacttttttttttttttttgaaaaaagagaaggaggccatatggcaggtctccccctatattattaaagccacacttgtggcggaggaaaccttggtacataaattgtaaaaaaattcaatgaattatcacagtgaaaacaaaaaagagagaaaacccgagttttacaacaaaacactcaaatccctgctttaagtctaggaaagaaaaagcctcaaagtgtttggttttaaaaatccatgtggctgtccaaaattttattctctcccagcaaagtttgctaatctctcttgcccttcgaaaattctgctattgctctcattccacacagcccataacagtgctaacgttgtagttctccaaagcttaacttttcttttgcttcccaccggtttacttattagggcctgtgcaccaaacaaggcataacccagtccagactaaattcattataaagtaatgacctgatttttttagtgtatgtgcattggaggaacagatgctcggtcgtttcattaactggacttgcaacagatacaccatcctggagatatggccatgtttggtcttcttctcttttgtattacctcgtgcacatttactttccttagagccaccagatttttttctcttagaagaatcaccttctaatactttaactttgaagggacactactttccataggatcttagtcctatttgggctctaacactgattatcttaatgaaataaatgtcaagttttatcaccatcaattgcttcagtattttcctatattctttatggtatcggagccataaggctcgatcttctccggttggttatactttgttttctccgtttctttctacaattgttcgccccagtcctcaattagtgttcaaggtgttccaacaactgcacatcttttctgtctttctatctagtcgctcatttgatacaccacctattggaacatattcaaggagaactaagaaaattaataggagttctaatactgttgttgaggtgtcagccaaagttgatgtgacaggaaaagaatagatgaagcgacagtcaaaattgaagaacgaaaagacttacatcagaattaatgagtttatatagagaattgtttcttgttttcaggatatgggaagtaaattatgaacggagtagtgctactctaggagtgattagcaactcgaactgctagaaaattgtcattgtgattctttgattatttcaataaaaattcctctttttctctgcattcccttggggatttttggtttgtaacaaattggccaccccgagatcttatgtctccggtatgtcacattctttgaaggtactgcatacttatctcccacttcgcttcaaggggagaacaacactcttcacaatgaagttcaatgggtcatgggattagagcttcctctcgattcctctatacaatctacatactctctcgattcttccatacagtctccaaactcaactcaaacttcaacagctccaaaatctcaagctcctgctccatcttcagagtcaaatgaaacacatctacatccaccaaatcaacagttttgtgtttattctagatgacctaaaaataaccaaatcatgaatcctcaccatagtcaagagatcgattcagtggtagatcttctctcaaacactaattccaatctagatttttcctagttcattgagaaaaggaactagatcttgcactaaatatcctatctccaagtttatttcctattcaaatttgtcatcttagttaaaaccttttacttctagcttgtagacattgttactcctatgaatattgaagaggagcttaggattcctgaatggagaacaagtattaatgacgagatgagagctattaaaaaaactgaaacttgggaattagcaactcacaaaagagtagcaaaatgcaaatgggtgttcacaattaagtataatacgaatggatctatcaaaagatagaaagcttggttagttgcaaagggatttacacaaacctatggaattgactacagcgaaacttttactctgatgagcaccataggcctaaggtaaagttcacttaagtatggagaggtaagcacacttaagttctcgcaaattggttgtaaccacggtattccttcaccaccagtgagggtttttatccatatcgggtttggggctagtctaagacaatggcctcattctcttttttcaaaaaaaaaaagttctggcaaattagctaggtgaagttgttttgtaattttgtgtagggtgagctaccttttgtagggtgagtcattgccttttttttttttgaaaaagagaagagatcctcaagtcttagacaggatcctccccgttatatattaaaagcctcgcttgtggtggaggaaaaccatggttacagttaataacaaaacagaaattctaagacaagagcactctcccactctgccccagaagagaactaaaaaaaaactaaacaaaactacctgctgcccctatacaattgttttccattctctacataaatctagaaaagatagatcctcaaaatgtttggttctaaagacccaagtagctattcaaaacttaacatgctcccacacatccgcttctgatttagtagtcccttcaaaaattctggcatttttttctagccatacggcccaaattgttgctaggatcgctgttttccaaagctttgttctgcgtttacttccagttaacttagacaatatcaattgtgatacagaccttggcataacccaagacaattcaaactctcccaacacatttctccataattgtcgaatatatttgcattccaaaaacagatgtccaacatcttctccgctacctttgcagcaaacgcaccaaccaggggaaatataaagaaaaggcttccttttttgcactttgtcgtggacatttattttgtccaaagccacaagccagccaaacactttaactattgatggaacacaacttttccatagggtctttgtccaatccaagcccctagttgatggatttgatgtcagccaggaaaaagctgatttacaagagaaaac

SEQ ID NO: 51484 - DNA, 2767 bp, Cannabis sativa
ccatgttggagatttcctactcggggacagagtgggagaacttgcaattgtgatataatttggttcaaatctcgacagcatcatttctctaaataagaatgaggcttcctcaactcgatccatatgagtataattataaatcaaagaattccaagtaattatatgtttatcttctatcagttgaaatatagtatatgcatgcccaaggtcttcacacctgaaatacatagcataattagtgcattttttaaattttcaaactcataaataccattgtaaactgcaaaactacgaacttccttccccaacataacgacacccatgtgggaacaagcattcaagccaataatcaaccccactaagtccaaaaaattaccactagatctcacttgagaaagaaacctgagtgctcccatgaaatttcctgtatgcacacaccctccaccaacggtgttccaagtgatgacatttacttcattactctccatccacatgctttcaagcaattaaaatgcttcaaaccacattcccctagaggcatacacagagttcattgcattccaagatactgcatccctctcgggcattttatcaaacaaatgacgagcaatgtctataagcccaaacttcccatacatagcaaccaatgcattgtgcacaaacaagctccacttcaaagagcgatgctcaatggacatgtgtacctctcttctgaaaactatgtccatctttttgccacaaccctttagcacaatcgagtaagtgaaattgtctggtctagtccctatatttaccatttgtttgtaagcagatagagcctcaccaaatagcccatttttaacgtatgagaatatgagcagatttcaagacaaaggatacaatatcttagaattctcagtaaaaacctgagcatcaataagaagcttaaagcttgtgtaaaaagagaccagttttggaaccaagctaggatattgttcaaattctaacccaataatgtgggcatgaagttgttcaccttcagaaagtgatctaagattggtgcaggatgtaataagagaagaaatgggtcgtaataataatatgttgttggaacaaccagcagaagaaaagacatgattttggacaatagagaaagctttgaatgcctttgataaatggccctcgcttgtgaagttcttaatggctataaggatagaatctatcatagaaacatcactatttgaattcgtctctttccaatttctagaaataaatttttgaatttgggatacaaagaagccccgaaggttgaaacttgaaacaaaatgaagaagatggcatattctatatatgtataatagttgtataaactgttaaagataacatggtaaacataaactgactgcatggctctagctatactctacccaaatcagtaacccaatttcgcttttccaaattgaagaaaaggtcaacaattttcctggaaaacagttataaattactaccaaaatttgtaattgataaagtttattcattttataatttaacaaacaaacaatgagcacggatcaaagtcatttgaaataagaactggacttgcttacctttaatctaggttatacttgtacaatagggttgcttcccagtttctcgagaaccaaacagagcaaagagtaatgtgggggaggggaattactacttgagagaactagaaactcagacctcgcagcaaaggaaggattttgcaacttccaacgaaggttttaggggttttagcatatacttaccaatttattcgaagggttttattagctatcagcaataaaaggaaactttttttttttttttgagaaaataaaacagaacttactaaatcacaagtcttcacaaaatcatagcaaacataagtttattttacattctcattcctagtgcttaattgacaaatcatattttcttttttatataatcgttggggtaatagagattgaattttcagtgattgaaaattatacatttattttaccaaatatattatccaacgatttatgaatctaaataaatggtagtgtattttctcaacagccttcaaaccatacaatctaggctaaaaatagagtaaaaacgtttggagaaacaatcgatagtctacacgaattcccacagtaacactagcatgtaccatccatgtagtttaccaacaagtcctgaaccatgcttctatctgggatcctccctgctgcaccatatatgggagctagcccgccatttatcggaccaggattctctttcacctgaaaaaatcagttgaaaaaaagcaaaacaacaatttaaactcagattgatggcacccaataaacctggaaattaattaccatcttcctgtgaaaagctggctgatactagtgctgaaatggataggtttgcctaactggtgcttatttatgggaatatattgttttcgtactcttatgttttgacttaataccaattttaaccatttaaaaattaataccaatttctatactgtgttaagaaaaaaaaaatcagacacgaatttagtcggatatatttttcaatttccacaccatctaatgccgtcaaacatgaccacaaaagacaaataacaatattttcttcagacaaactgactattgaaactttttttttaatggggtactacaagcgtattagcaattatagaagggtttctttctttttttgttgcagcaggcaataatataaagttaaaatatgtattatttagtagacacaaattgtattt

SEQ ID NO: 51485 - DNA, 897 bp, Cannabis sativa
gttggcaatgatgtgatcaatacgattaagcaattttttggatctgagcaaatgcccgtgggaatgaataacacaaatattgtgttaattccaaagaagaagaaacctgattaaatgagtgagttgcgtactatttctctttgcaatgtcattgctaaagtcattactaaagtgcttgctaacagaatgaagggactgttatctgatattatctccaaacatcaaagtgctttcattctagagaggttaatcacggataacattatggtctctttttaaattttgcattatcttaagaggaagcaagtaggtaaggatgggtttatggcgttgaaattggatttaagtaaagcgtatgatagagtggattggcatttcttgtgtgccatgcttactcgaatgggctttgctgacaaatgggtacgtcttatttttggttgcttggcttcagtgaagtatcagattgttagcagtggccgaaccatgggccctattgtgccaagtagagggcttcgtgagggtgaccctatctcaccatatctttttcttgtgtgcactgaagctttctctgtgcttattcggaagtatgaggaaagaaaatggcttcatgggtgtaaagtggctaatggggcacctagcatttctcatatgctctttgcggacgatagcttcctgtattgtaaggcgacacgtgaggaggttaatcgcgttcagcagttgctagattcattcgctactgctacggggcaacatgtgaattttggtaagtcatttgtcttctttagtactaatacttcatccaccatgcgactgtctatatgtaatagattgggtatcactgaagcatctgagcacaataagtacttggggctaccgagtattgtgggaagaaataaa

SEQ ID NO: 51486 - DNA, 919 bp, Cannabis sativa
taatctaatctaattcccacaattcaatctaatttttctttagaaagaaacttttattaaccaacagcaaaaacaaactacatcaaaacaaatttatcataaacaaagaaactattcaaatcagatggaaacttgtcctcccaaacagaattacacaattggaaattatagccaacttggcaagaaaatgagcaactttattgttgccacggggggaatgaaaaacagccagcacaaggacagaacaatctgccatccaatagatcatctaacaggacgctccaatgggtccgacaatgagccctctgcttcaaatagtcaattagataggcacaatctgtagttaagaaaaaagagtgaacattgagtttttgacacaattcaagacccaatttaatagccaacccctcagccaccaacaccgtgcaaacacccttcctataggcagcagcaatgcctaaaatctacacatttttcttacaaataatagccccaaggcccattctttgggaagcaagatcaatagcagcatcacagttgagtaacaagatttcatcatcgacctttgaccaaaataaagctttacctgaggaagaagaagtggcagcagctgtagttggaatatgaacttgatgataatccacatgctcgattgcccaacatccattgagtgatgggagcaacactatgttgaaaacatttcttattcctcctgaaccaaaccagccaagataaaatgacaaagctttcaaaacaaatgttgggttgggtttcatgaatttgctgcaagaaatcccatggttcaagatgctgtttggggaataagtgataccaacctgtgtgttccagagaggacggatggcaggacaaagccaaagagcgtggcaaatggtctccattaggtaaccacagctgctgc

SEQ ID NO: 51487 - DNA, 788 bp, Cannabis sativa
  modified_base (31)..(36): a, c, t, g, unknown or other
  modified_base (759)..(762): a, c, t, g, unknown or other
aataaattggattacattgaaatggagtttnnnnnngggcataaaacccaacagtctactcagtgcttacattcccagaagtcactcgagttaatctacaaaagagagaaagtgagataaggatcggacagaggtacatgatatcttgagaaagggccaaatctctaatacttcgcccaaatgcatttataaatcgagggaaggaaactttgtcctatgaagagaatcccaaattcaagaatctcaagaacacgggatgaacccaaaacttcctaaaaatgccaaacagagtgtttttaagtatttttcaacaaaaaattgtgaaacaaatgaaaaatcaatgattatagtttgtgcgcacatattcaaaatcaaattagaagtcctattttctaaaaatgaagaacagttcaatgcttatacccagatttttcatagaggtcgttcaaagaataaattgcaaaaaataaagaaaatgcgtaaaaatgttagaaatttactcactgttgaagagcattgggtggtaactcgatttgagactagaagatcgccttgaaatcctttgaagctgctgaaaatttttgagaatttgagagagaaatgggttttctgctctgtttctgaaatttgaaaatggctaaaaaaggaaaaatagtgtctaaaatccctttttatggtttactaagggggtatcttggtaatttcacattttaaattttaggggttttcccaagaaagtatatgttgggttttatgccnnnnataaaactctttacaatctgattagt

SEQ ID NO: 51488 - DNA, 2258 bp, Cannabis sativa
tgggtccgacgggtccgatgggggatccgatgcatgtactggaaaaacttttgggtccgatgggtatgaagaaagagagaagaagagagggggtaggggacaatgtaaatgggggtattttagggatattgtaaaatgtgtcatatcccacaaatattacatgttatgtgtttaaggaaaaaatattaagtatttgtaagtataaaaaatcaaatttcccaacatatttttttatataatataaaaagaattttttttaattaagtaattaaattaagcatgaaaagttaaaattttcttttattaagcatataaatatatattaataaacatttatatattgataattattgaagaatattaattcaaaaatttttacataagaggctaaaagtttgaaaaaaaaaattataaaaatatgttaatatggaaaaaaaaaattacgaattgaactttttatatacaaaaatacaaacttcagtatactgttagatattcttttttggttattttataatttatttataattaatgtatatattttatgtaaggttgatttttcgttattttttagtcatttttttattttttattaagaaaatattttttttatgattttaaaactttaaaatcgtatttttataaataaaaatattaggtcttaaaattataaataaatcataaaaaatatatttttaaaacactccattaattaattagagatttcattatcattagttgaagtatacattctagagttcatgagatcattttcagactagaaaattagcttgggttttttgaaacatggaaaagatttgattataaatatacataataattttgtctttcaattaaattttaattctatttttctaatacttaattatcgagtttgtctttagttgttcccatgtatttgtatttataaaaatttattcaaactagacataatttttattattagtataaggaaaaaaaagtcttcaatgggaattaataattcaatattcttgatctttctcaatgacattgtgtctaattttttttatttttcaaaatgtttatataatatatatttgataatgaaatatgagcttagatagttaaacatgatcactatatattataaatgttcacatcaatattgtgtacctagttctaatgttcagatcataatccatctacatattaattaaggtgaaccttaaatatattttttttaatcaataaataaatatttatgataccatatgtaattgattcacaaacttaatttaatgatatccaaatcttaatgacaagaactcacttcatttcagcagctaatatttggtgaagaagacctttcattatctcattttatctcatatatcaattaattaattaaataaataaaaaatgtgtgatggaaatcaaaaacaagtggtcacaaatttccaatttaatacaaactaattaaaaagttctaaaacagaaccttatagttcaaggaatctttcctttttcaagtcttaacaacaactataattttttttttgaaataataataaaaataaaagacataatttcatattaagttgagtagtaatcttcatcgattaatgtttaactttacctgtgacagttttatgctttttcaaaatttagtgattttttttttctcgttatattagccgacatattggttaagatgtcacaataagaagattaaattaataaaataataaataatgaaaaaaaaaatcttttaatagaacattctttgtcacatctatttgttgggtaattaattaaatctttgttaagcacttcaactgattaatttcatcacgaccaaataattgagttagaagtgattaaaatttatttgataattatgtatggtatgagaattatctagacaaaacctaattagatagttacatttggaaaaactgtttttttttcactgacacattaaccaaaagaataattacataaataaatatttacgctttaatttttttttatatatttttgtagtttttttttatgaaaataacacgaaaataaaaaaattactatataaaagtaacatgaaaataatatcaaaacaacaataaaaaataacatacaaatatcaataaattaacaagtgtataatatactaaaaaattttattttctgtaaataaaatcataaaaaacgtaaaaatatttaaatttttttctatttttgttgtatattcgttaaataatcccttaaccaaatcggta

SEQ ID NO: 51489 - DNA, 1251 bp, Cannabis sativa
ttgagtttagcacaattttatttttgttttttgatttcgtaaaattttattaaaagtaataatttttttaactttttgttttgtttttatatatttctcggctattctctatagatggttacttaaaaaagtgatgacatatcattatagtgccttaatatagaacaagttaataacagtttatttatttgcataatcttgcttttaaaagtaggtttattgaatgatattaaaattaagaaatatattctaaattcaaaatttttaaaattgaaagagtcaattaattcaatttaacttacaagcatagaagtaggaaaaaaaaaaggtaaaataaaattggatggcaaatgtatgatatatattacatagagaggaatgtattctttttttttttttttgaaaactgatctgtaaaataaaaaaagccaaggttacaaagttacaaagttacaagatcaggataacaaagctttgaacctccccaatccaaacacactctccatctcttcccaatgctctttcagctaacctatagacataaacattttgatctctaggaatgaatttaatattggcattaggaaaattagataaagaggatacaataatttaaaccaagtctgagagggaagatctatctttccatttatgcttaattttgttcaccaccaacatttgacagtctgctgaaacttgtgctaagggaagctgcacaacagcacacctggtaagagccaaagaaagggcttgagcttctgccaagatatgagctgcagtactaggatggaaatattgtaagatatagatatatgtgtatatttatattattatatattatatatatttcaaaagaatagatcgtggcagatttcatttgttgacttggtcatatatttgagatatatcattcctattaatatgccacctgattcacttttatctcaaaattgagagcaacgttctttacgaacatttgtgctctatacgtatatataggcacttaagagaacaataagatatatatcgtaaaagagttttcatacctatacaatattgcatatatacaatatatatatacattatatattatttatatatataattattcttagctgggttatttttttttttttttgctgtttctattttcctggttctttcactgtaatcagatgacctgttgaatcctgggggattactttgtaaatccttaaggacagtgtcttgtttgcacgcctcaggtgttat

SEQ ID NO: 51490 - DNA, 2100 bp, Cannabis sativa
gccagggctcttatccggatgcatgctgaagatagctttccttacttcctctgcaactattggttgatgaagatcttcattgatttgagttgagaccttcctttgaatacactgaactacaatgtcactacccagattggaagcgctaaataaggatgagaaataatccacaactacatcctcaagaccgttatcccactccttccaattgccactagaatccttaagcttcgaaatttgattaaagcttctacgattactagccgctctatggaagtacttactgttctgatctccttccttcaaccaaaattgcttagccctctgcttccaaaagatttctttttgatccaacaccaaaaaaagttcctttttcttctctttataccgctgaaccgagagtgcatctctcttgttcttcaattttttcagctcatcacggcagtgcttgattcggagtttgaagtttccagttacgttcttcccccaggtggccaatttatctgcacaaagactagtcttctcttctaccgaggcaatattagggtcattccaacaatctttcacaatctccaagcacattggttccttcaaccaagcgttctcgaacctgaagcgcctatttggagtgaaggcaaccggaggaacaaattcaaggaagataggcgagtgatccgaaggagaaaattcaaggttgattaagcgagcttgcgtaaaggtctgaatccaagaagatgaaacaagagcacgatccaacctaacttctatccaccgagacgttccccttcctttttcccaagtgtaagggtaaccaatcaaatccatatcatgtaaatcacattcctggataacttgctcaaaaccagaaataagccaattaggatacggttgtcctccccgcttgtcactttggctaagaacattgtttaaatcaccaataacacaccacggttcacttgagttgtttaacaatgatcttaagaggttccaagtatccaacctttgttgccgttggggctctccatagacacctgtaagacgccactttggattaccatcaacttctaccataaaatcaatatggttttgagaaaaaccaattattctaccatctttgtcattcttccacaataaagcaagaccaccactccttccttgggcctcaacaataaacctcccttcatagcccaacccccggcccacaaaatcaattcgagctttattactttttgtttcacataaaaaaacgaaattgggttgcttttgagaaacagtctctttaaggaattgaaaagcccgttggttcccaagcccacggcaattccagcttaacacattcataattcttggcgggcctgtgacacagaacccgccccaataacgttttttgtcccttccaaaatactcatgttgtcaccattctcctcattcggcccattaatcttcataccagccacacgtttcctttttgattcaaggatcaacaaatctccatcaatatcctcaaaagtatcctctctcatgccatcaatcaaggtgcttcttattgctgactttcccgaaatagtactctggggttgatcaacattaattcccaattcaaagcctctaattcctccatccaatcccatggatcgtgcaagaggttgattcttcccatgattttcgcccccaatagctctccctggtgctggttctttctcggccgagactcctcccattccttcaccggagttatcccctcgaaccaataagccttgtcgaagccatttggagccgattgtatgttgtcttcttcttggcatggccttcaactcaaggttgtatggtttcttaatcagatgttgtggtgtatcaaacaaagttggacagaacttttctgaatgtccaaggattccacatatgaagcaaaatgttggaagatcctcatatttgaaattagcataacataactcacctccttttttctctagtttcattcttctttttaaaggcagatcagtacgaacagagacacgtacccgaagataatcacgccatattcccatgaaattgttcttgtcggcttctatgaaggtgccgatgtagttcccgatatcc

SEQ ID NO: 51491 - DNA, 838 bp, Cannabis sativa
tttttttgaatgaaagaaaatttattcaattgttatacttatattagacaaaaacgaaatcgtacaaatctcacaaataaacaaatgacaaaccacaccattacaataaaggagtaacacaagaatcacattagggtcatgacctcatcaacaaaccacacaaactcaatttgtgcctttgaaaaatcttacaaataagcagtgaagctttgaactgtctcgacgacactgcacgagtggatacatagctaggaatagaccaaataaaacacaaactaaagggcagagtccaaggtgctaaacaaataaataaaaagaagcctaaacatgaatctaaacaaagagtaaaccaaacaaacaaaacaaactttgttcaaacaaaccaaacaaattgaaaatgagacaacaaaagaagggtatgtacgtaattggaagagcatcattgcaacaaaacctcatcacctcgaccgaaggagaaccctaaggccaaatccatccgcaattcaaaagaaagttgaccaagattggccaagtaaagtctaaataacaaaacaattgccaagttactttccaaaaatgacaaagcaattgttaagagaggaattatatgtattaagacaacttgacttgatgatagagtgtcaaagtggttaaaacattttagtgtaactgtgatggtttgtgattgaaaaaccagccaattagttggttatagtctcactaggtatgcttacaagtgtgttagttaagttagttgccttgttagttagtttagtttttttttttttaaaaaaaaaggtagttagttagtttagttagtggttttggctctatgcac

SEQ ID NO: 51492 - DNA, 884 bp, Cannabis sativa
taggggctctcgaaactggatagaggtgcggttggaccgtgccctggtcaacaatgcttggtctcaactctttcaaggtgcttctctactaaatcttgaaatttcatcatctgatcattaccctattttcttagaacctgaacttaatcattgctaccctcctaatcgtaaatttaagtttgaaaacgcttggctcaaggagccaatgtgttttgaaattgtaagggattgttgggaaagtggaagtgatgatagtttgccaagtaaattggctcggtgtgcagataagttgagtatttgggggaaggaggtgactgaaaatttcaaagttcgtatttctcgttgtaagaaagagactcaaagattggctgataaaagagacactgcctctattcaacgtcacaaagaagtaaaggaggagttgtttcatgttcttgatcagagagaatccttttggaagctgcgttctaaacagctttggttgaaagaaggagatcacaatagcagctattttcataaggctgtcacaactaggaagagacttaacaaaattgttaccttgaagaatgacaatggagtccgtgtaggttgggataatggtcttgctcaagtgatgattgattatttctcaacattatttcaagcttctaattcgacttgtcaagaagtggttgatagtgtcaatagctcggtccctaattttgttcatgaggagctgcgtatggccgtttctaaagaggaggttaaaaaggcgatttttcagattcatccagacaaaagtcctggcccggatggcatgacacctgctttttaccagaaacgttggagcattgtgggccatgatgttgtaagggctgtccagaggttcttttcgacaggggagt

SEQ ID NO: 51493 - DNA, 963 bp, Cannabis sativa
taatatatgacaaaaaaattgaattgggtttgaaattatatattaattatatggcatggtgtcagcaaataattaaaggtatttatttatatattatagaggtaggtaggtaggtaggtaccctggagaagaaagtgtggagagtaacgactttgaggtagagaaaggcgagcctgagaggtgtgcaatacttgtgtttcaaccatttttgaacaactttttctctcttctgcggtgacattgctgagaaggtgttaatattgttattaaggaataataatcccccccatttactactattactattagtagaattagtgaagcagagtgagccagagaggaagagtgttccaatccttgttcccagcatcatcaacaccaatctcactatccacctcccttctatgatagatgatcttttcattaataactctcctacctgctatacatatataatacatgtacacaatattgttactaattactaatagtggtagttgtaggtatcataaatatatattaaatttaaaatcgaatattacggacgtacctcttcagggattggaaattgagccccagaagaagccaagaagtgtttgagtacagctacttcatcatcacgatcttcttgttggtgttgtttagaataatagtagtaactcaaagaaggtattaaagtgtcacagacagctctcaaagattgaatctcaggagttgtgagtccatgctttcctcttattttgcttaagtttcctcctccaatgatcctttctctcaacaacgtcaaacagtactcatcctcttcttctttcctacttcttctcatcatcattctctctctctctctttcttctctacaataaaatataaatgagatagagagagccttttatattaatatttgtgagaatatgttatatggaaaaaaggaagacacgaaactcatgaataatatatatatat

SEQ ID NO: 51494 - DNA, 2853 bp, Cannabis sativa
atgcttttaaagcttaatgtattgtttcatattctcctactctttcatcatccttttggtaattctgtgcaaccttcttgccatgagaaagagaggaatgctttgatccatttcaatgaaagctatgaaatagattgtcggcttagacctgatcactatcaactccatccaacgacatcaacatggggatcaaatggtaccgattgttgtttatgggatggtgttgaatgtgacatggtgactggtcatgtcattggccttaacctcgatggttcttgtctctacggctctatcaactccaacagcactctctttcaccttgttcatctccaaaagcttgatcttggttataataacttcactttctctccaattccaactgccataggcacactttcaaagttgcaatttcttcacttgggttcttctttcttccaaggtgagattccttctgaaatttcacttttgtctaagttgactcatcttgacttgtcatataatgttggtggtaatggtccagtacttgtgtctcttttgaaaataaatcccaatgttagaagcctattccaaaacttaactgctttggattctcttttcctaacttctgtccacatcacctatgaattaagtgagtccttaacaaatttgacttctttgacacaccttggtctagggagttgtggattgtatgggcctcttccaccttcacttggtaaattaacccaactcaattggttaaacctcaaagagaatgatttcacaggttacatcccatcttctttccaaaatctcacaaaactttccttcataaaaatagcaggtaatcaaatttctgggccaatcccttcttggtttggaaatattagtgaattgacgtttatgggatttttttcaaacagtttgagtggtacagttccaccatcattgtccaaactcagtaatcttgagactctcgatctcggggaaaacattttaagtggtacattgcagctagattcttttcttaaactgagaaatctcactgagctttatctaggcttcaatatgatttccttactcattgatgaaacaaaaatagatcctaacaccacactttcaaaattttattctctagcgtttgctaattgcaacttaagcaagtttcccgaatttattggccatcaaactaatcttgtactgttggatctttcatataataatatagttggtcaaattccccaaactctgatgagtattcaaaccttggaagccatatatttatccaacaattggataacaggatttcataaccacacaatcaagctaccttggtctagtctacgtatgttagaaatgcaagataattcgttgcaaggacaactaccgattccaccatcatctatcaaacattacgatgtctctaacaataatctaagtggtgaaattcccatgtctatatgcaatttgacttcaattgcagtccttgatttgtcaagtaacaatttcagtggcgaatttccaccttgtttaggaagtatgatcaataatgactccctaattgctttgaatttgagaaataactcttttcatggcaccattccccttgaatgtcagcaggaaagcgagttgagaatggtggattttagtcacaatcattttcaaggaaaacttcgaccaccaatcacaacttgtgtgaatcttgaatatcttgatttctctttcaatcaaattagtgatgtcttccccacttggttggggagctttcctctattaaaagttgttttgctgagggcaaacaaatttcatggagttataagaaaacctcaaagcactactactgagtttccaaggctgcaaattattgatgtgtctcacaattatttcacaggggcattgccacatgaatatatgctcatttggaatgctatgaaagatttcaagctcagcaatttgacatatatgaatgcatgggaaaatgacaccttgagttttaattatgagctcagtgaatatgattattcaacaacatttgtgttgaaaagtgtggcaacacattatgggaaaatcccaacaaatctagcagtgattgatttatcaagcaacaaattcagtggtcagattcctcaatccattggaatcttaaaggctctctactcgctcaacctttcaaacaatgcgctcagcggtcacattccaccatcgttggggacattaacagaattggaatccttagacctctctcaaaaccagctgtcaggacagatccctcagcaactagcagaactaaactttctccaaaagtttgatgtgtcttataacaatctcactggtcttataccgcgagggaaccaattccagacgtttgaaaactcatttgagggtaatcaaggactgtgtggtgaaccattattgaagaaatgtgaaaacatgatgctcccaccaccatctgctttaaataaaaatgttgattctgattctccaattgaaattgattggaattttgttttggcgggacttgttagcgggtttgttattggagtctctcttggggagatagtgatcccaaggacgcgactggcatggttgatttacttctctagaacaagactgagagagatgatgatcagaggctaagcaatagttgttggtaagaagtcaattgtttctttttctatatatttccattttgctaaaatttttagttttgtttataaatataaatataaaataagtagagattgatttatttttagggcaattattccatatacttttttttaaatttaatgttttaaatttacagtttgaatttttaaagtagttgcagtgctagttgcaataagggtttttatacgattttttgtttcaatttag

SEQ ID NO: 51495 - DNA, 1133 bp, Cannabis sativa
aaaaaaaaaaaaaatctcaatatggctttgcttatatgcaacattcctttcaatcttgtctatcaaacccagaatcagaatcatatttcactttgtaaccaaacaaacaagaaaaagaaacagtacaaagacaataagaaatctttcttttttaaggaagaaattaagaaatcctatatatgaaaaagataaaatgaaaaagaaccctactttctttcggagaccactggttccggttttctgaccttcaatcggtttagtgggtacagaattaatctgaaataatatcaaatcccatatcaacaataaaaaaaaatgttcaaataaaactttataagaaaaaacaaataaatacaatgtaagaaaatcaaccttgatgccctttggttcaacaatggtggcaggagacgaagaagaagatggagacgaagatgctttgattgctacacacgctgatgtgctgagattgagtggacgagcagtgaggagtgaagacagagtgacatacgacgaagatgatgaaaacgacaatgaaagttgtggcctttccagagtcaagtttgaagagagaagattgtgcagcctcgacgagagagccattattgattgatgagcgagagagagagagtgagacagaatcagtgagaaattggagaagatgttaagagagttgaagccgaaggagtgatcgccacatgtactttataccttgtgtaaaacaaaaaacactatcttgcacctgtgaaccaactgctttttccctttaattttttttcttttttttttttaagtaaatagcaatagggaaattaccttctttatgataattttatatattctttattaaatttacggtttttatttttctttcctttttaataatttctcttttttaatgtttacattaaaactattcttccttaaccattttttagggtaactgctcatttatttttctcttgtttatttaatgggaaatttacacgttatattaatttttgccatgttatacagaaattactacatttttactgtatataattatttttaaaaaaattttgagcaagcttatttaatttaacttaataatatatagggaaatttttatatatatacattatatacattaatat

SEQ ID NO: 51496 - DNA, 3002 bp, Cannabis sativa
tgcctttactaatccaaattactaaagcggtcattacatactgtcatcctttgttcaccctggcgtaaagatgaagggcccagggtattcttaaactgcaagtaagggctctgaatatctcgcatcttgccttgagaagaaatttcctttggtacagaatgtacccatccaaagaggttgatgaagaagctccagcagctaaggctgaacggagtgtgccagacaaggagagggtcattcagaatttttcagaacaaatccaaacagaatgattgatcaggatcatagatgatgctgagagggttgcacgtcctatcgtaccagtagtgataggaaaaggaacgggtatcgccccagtagagcttgaagcaaaatttttggatgatgatgccctaaccttcttagtttgaaagggtgctccttcggaggtttacggtagaaatactttagcatttactttgcttttatttaacttttacaagtaattactaagtgtcttcttctatgcagccatgacgtccaaacttggtggaatgttcaagagaaaggaaggtggctttccacttataacacatttaaaatttatgttaaaatagattcgtaggatcataatctcacttattacctaataatcccataatatatagaccccaattatttaccattaggcttatccggatattacaacatcattctcatcttttgtatctcctgccttggcattaggatcaatgaagtgaagactagatttgtttcaagtgagtaccatgattactgagtgtaatcttcagatggtatcactgcttccttgagctctccatgaaagcaccaaaatatttaccaaaatttttggaaaaaaaaaattatatataattacaactgaagatataaataattcagaaaagaaaataagaacaacacacaaagtttttacgtagttggggcattaacgagccttagtccacgagtcgatattattacgtatctttagctagaaaagcctttggaaatacaatgagcgtaagttctctatttttcctgagcaagtatcgcaagagaatttcaccatttatccaaaagatttttttgggtatttattgtgttaagagaattatacttagtttctctttttccctctaattaggattttaaattaaattacataatttgggctattctcgtgaagtctaacccatgaaagagtcgatctactgactaggaagattggatacagttaatgctgtcaaaaccgtgtcctataattgtgggcaatcaattatgaattaatttcttggtcttcatttaggtaatttcccctcttagcttgatacgatcttttggcaagatctgaggagcatttacttccttatctggtgcacttgaataaaaagggaaactggattgatcttccaggaacacgctgtctaaccttcttgaatcatggtacttgagctacttttggatatggactgtcattggcggaagcccatctggtcatggagctaaggtgctttcctggaaggtcttatgtgacttgggcagacccaaattatcttctttgggatccattggtgggctcttagtgttgacctggaatccacgtgtcccttcaagaaacacggataacattaacaaggccatttcaccatcaaaaatatctttgtcaggaactttaaaggcaatacctttacttttgtcacttgtgacgttttgcttaccttttttcttgatttgttgattcaactcaaaagttcttagtgagctcatgagttcttcaatcttcatttttccaaaatcttttgcaaagttttgtgtcaaatccgttaggaaccacacaaaaaattttctaaaccgacatagatccatctaatttttctcccaaagcaaaaaaatcattagcaatatcaaataatcttttataaaagtcaaataaagtttcagtttctgacattctcaattcatcgaatctagttttcaacatggtaaaatgtgatctctttacatcagtggtaccttcaaactgagtttgaaggattttctgtgcatcatttgtagattcacaagatgatatcaatttaagaaagccttcaccaacacaattaaaaatagcatgcaaagctttgttattataaccagaaatttttttatctccagtagtccaattaagttcaggttttaccttagcattaccttcatcatcattttcagtaggtcgagaccaacctgtaagtatagccattcattccttctcatcttgtgatttgttagaatattacctgtatattagttgtaaaagaattagggtaactgatattttgtagtttcctattttgttattggtagtttcccatttagtctcctagctttgtatataaatacgtactattctatgaaatatatacacaattcgattcactattttctacatggtatcaaagctttgtgattcgaaattcgaaatttgaaattaggtttcataaaaaaaaaaaaagagattagggtttgagtttagggttctttttcgaaaatcttttttggagtgcgaatttattctcaccgcccactcagcagtgttgcccagccgccaatctacaaaacgtcgaagtccggtcaccgaattcctcgcgcgtggggctcacgtaccgcctgaagtttctgcacgtcttcccacgcgcgacgcatggaggtgcgtgtgacagtgtcttcgatggcgttcttttgccgtttctttagtccactcgcatctctttaaggttgtaattcagtattttcttgccttcttcgtgtttgggtgttcattctttggtgttcattttctctgtcaattgtgtttgcttttgagattatgacaaagataaaatcagattcaaaatcagttgttgtttttgatttggttcatgtcgaaaatcacggaccataagttgattggttcgaattatttggaatggagtaagacgattcgactgtatttgaggagtattgacaaagatgatcacttgact

SEQ ID NO: 51497 - DNA, 4291 bp, Cannabis sativa
gatatttgcggcataaataccataagtttttggttttatacacttaaataccacatgtttgttttcgacggattaaatacgtaaagttacatttccgttacttctgtcactacttttctattaaatcctatcaaacatagagtatttgcggcataaatacttaatgttttaaatttcatacaattatataccacgtgttttttcttccgatacttaaagttacatttacatatataaatgtataaaatctagaacatcaggtatttatacgcaaatactcctgtgtttgaataggatttaacagaaaagtagtggcggaagtaactgtaacttaagttattttatcagtgaaaaaaaaacatgtagtatttaagtgtataaaacaaaaaacggatgatatttatggagcaaatatccctttagtatataatcctagtgagtcgactggtccaagtagccatatcatttccgccaccagaacaactcaactcacgcaccaaatgccgacaatcgccataactttcctctccatactcttggctgtcggagtgtacagtctcatcaagaagctgcgaagcagaggatcctcactccccctacctccaggccctcgaccatggcccatcatcggaaacctccctcacttgggccccgcaccgcaccatgccacagcggctctggctcggaaatacggcccattaatgtacctccgattgggcttcgtggatgtggtggtggccgcctcggcgtcggtagcagcccagttcctgaaggtccacgacgccaatttctctagccggccaccaaactcaggggccaagtacatcgcttataattaccaggacctcgttttccgtccttacggtccacgttggaggatgctccgcaaaatcagttctgtacatctgttctccggcaaagccatggacgattacagctatgttcgccaggttcgcttaataaacaactttcttattaactaatttacataacgctcctgatctcattaaataaccataaatttcattaattggttaattataacttgctttttcaaaataaatcctttcattccatcaacaaaatacacaaattagtagtttatttaagatgaattattaatttatacgtaatatgacttttttttcaatagtaagaaatatgatttttgtttccaaatatgattatcaaatcatttctttgttgaaaaatttcatttaactttgggaattccgttcaaatttgactaacatagatttgatgtgacattgtcaagtgatgatacatcaatacattaatattagggagtacttcgttgataaagatacaaaaataacaaaaaataagaataaaaataagttattaagattttaactattttataaaaaatatagtattttgttttttgtatttttatgttataattttattaatttattattatttgtatgtaatttttaattgttaatttgatgttgtttaaatgttattttcatgtaatatttttttaattttcgtgttgtttttataaaatactataaaaatatataaaaaaaaatatctataaccgtaaataatataaaactttataaaaataatattttatataattatttcttaatattaaacgtataaataaaatagtatataaattataaaaatgatatattaatatcaaatgtgcctttggacataaaactggaactatagaatattaaaataaaaaaatctaagtttttttttttttatagaatataataataaattttctaataaaaattagagttcagagaagattaaaaaaattaaaataatacaaaacttttaaaaataaaccaaataaattgaaattcaattttttttaattatctaagatatttgtggtaaattttttttaatattataattgttacacatatgatcctaataaaaaaaaatagcggtaaaattattttatcttacgattttgttgtagttgtaccccttttttggacattaagtgttaaatatgtcgtcacgtgtattaaataagctaaagaaatatgtcgtcgcgtgtttttgaactagcacttattgacacttaacaaccaaaaaagaatacgattacaacaaaattgtaatataagaggtacttttgcctgcactttttaattatagtcatatgtataacaattgtaaatattaaggagatttcaccgcaaatatcctttatttaagccttacaaaatgcgttttaattatttatttaattttgtttttttgaatgagaagagataacctcactacaatagaacaactaaatcagtcattacaacatcgttgatagcggaagaaacattgttgccaacaaaattacaatctgactaacaacacatatcatgaacaagacaatgagcggtgttgttagtagattattttacaaaacaattttgaacattaaatagcgaatcaagtaaaattttatactctaaaacaaaagaaccaaacaaagaaagcataataattgagctctggatcgcttggacagcaacaagcaaactagttccaataataacatcatgccatcctttttttgactcaacttagagcctctttgatgccaataatctcagcaagattgggttgaagacaacttagtttaaacaaggtataaaagcctccaactgttaaccctcatcatcttaagcaaggcaaccaattccataagcatgactaactgaaaaatagcttcatccacgttcacattgatctttgtttacttctggtttaatctaatgctcaacactagtattagtataagaatgaactaacagcgggtcgaaacgacgagaatgagcatacctccattgatcaagaaccactcgcacggagaagacctcaccttgttattcctagaagatcatttttggcctttcatatagaccatgaaaccaataaagcctcctctataatatttgcacaatccttacttaataacaccataaaccaagcattaaatgcagcaacatacaaaaaatccagtcaatactcgacctattccaacacaaatgggcaaaagcaagacactatgacatgataaattgattcatcatccctatgacaaaaaatacaatttaaatccatgggaacacgttttatacacatctgagtatgagttagtaaacaaccagaaagtgtcttccaagcaatggagaacgtttggagggatattggctttccacaacttacgttagatattggattctataacagtagaccaagcccctttttgctcatgcaaataatagtatgtactcttaattgtatgaaaactagaattcttatgcctctaaaaccaattatcaacaacaactgaagagctaaggaaaagactaagaataagatcatgatccgtacagatcattgacaatctcctcatcccactccaaacagtccatggccagtaattgatttagcttagcatcaacaagactaggatgtaaagatatgacataaggactaattgcattaggcaaccaaggagaattgagaatattcacactcaatcccaagctaatcctaacatgaacccctgatttaataatatcttgtgtctcaaaaatacttttacatataaaacttggattttgacccaacacagcagagagaaaagtttcaggaggatagtatatggcttcaaaaacccaactaacaaaagaattctcaaaagcagaagtcaccaatcttgtttaccgagaagagtcaagttataatcacgaagacttctaaagtcaagatcactcatgcttttaaacttacacaaacgactccagctcatccaaataacacctttagaacagttggaattaccctactagtatttagacatcattttctcaaggtcaatataggtctataaaggaagaaggaataccgacataacataacttggaagagcatgagcaacattttcaataacctcatggtctgccttagaaagaaacttacccttccaactttgtatccttttctgcatgttctccttaaggaaacccaagattgttgacttattgcgaccaatgatacatgataatcaaagataaaaactattctcatcaactgcaaccatgcccaatcttgtacaaagcctcacatgcaaatcaacatgcatattggaactaaatagatggaggatttagagaaatttaccctctacctagaggaaatctcaaacagatggagcactgtacgtattttataagcctcttctttagtactacgacattacacataactattatctacaaagaga

SEQ ID NO: 51498 - DNA, 1308 bp, Cannabis sativa
  modified_base (1213)..(1216): a, c, t, g, unknown or other
aaaatttgtactctacctaaaccctaaaaattacccaaaaaatttaaaccaaaattactaaaaccaaatggagtggcgaaaatgcagataataaaataagtgatcgtaacccaaaaaaaatgaaaaagaacagaagaatgggggtgggtcacttaccgtttgaagtcaagttgttgtacgatgaaaagctctaaaatcgaaggcagagtgaatggcgtgaaaaactttttaaatttctgaggtcgaacagcatatctaagtatacgcgcaagaagtatctcagtgacagtgagggcttgcaaagctcttgaaaatcacaagggattgtttcgcagaaaaagctcaagaaattttgaaatggaaaaaatagaggaaaggttgttccttttttcagtttaataccttgggtttgatctccgttatattaaaagacaaaagatccaacagatagaaatcgaaggagaagtggaaaagatggctcattaatgttaatgatctgctttgaaaatataaactgccaaattaaaaagcatgcattttttcaaaatggattaggatggatataccctcaatagtcatttaaaaagcattttccagtgaaaaggactttttaaggggccattgttaaaccccaaattcaactatacttcagaaagtgacgcgtgttaatctcgtgaaatatgaaccaacaaatataatgataattatgtcattaaattaaaaatagaataagtcattgaatatggaatttatagagtatatttgtaactcgctgactgtatagtattaagcgagacagggatatacaaactatcaattcatgtatttacaagaaaccatcttgtctcggaaggcataatccagagggaactgtacacaatgcatagtgagacatctatctcgctatacatgagaaagtatcaacgaggtgaattggttgttgaaacacttagcgtataattcacattataataactaagtgtaatagctggaaaacatggttgtccagtctataaggccttatggtcaaagagcagttcttaagtttgcttagtacactagtgctcatgccattgttggaatgcatataaaccaagtcgttcgtctatgtacaaagcgagatgcctctgacgagatacttctagcgagatgcctctaaggaggtacctttagcgagatgccccaattgttgtaaatattttaccaggatctnnnnttactaacaagtatgtttcattatatgaattgtaagacaatgaaataaacacataagggtttaaggaaaccttacatttgatgcagcggaat

SEQ ID NO: 51499 - DNA, 1385 bp, Cannabis sativa
ttatcttaagattcatttgattgtcttctaatgttcctttcttggattaaaatgatgcctactcataactcccactcaactacaggtgtctggtctaatgaattcataagacgtctcactgttgatgcttagagaattcttttcacgacttttatcttttttggaatagttgaaattgttctttagataaataaaatctatatctaggagccaaaaagcttcctttagatagccatttatagaaattaccaggtataccataagccacagatttagataatcttaaacctactatactaggattaggaagttttgataagtccatttaatagacttattatcaaaatttcccttcttgtccttgtaatagaaaacttttggttactctatatgaatggttttaaccatagttgttaagtagtcaaaaatacatatttattagtgtaaaaataaaaaataaaattaattctatataatattttcataaaattaatgtaatatatttttatttgaaaataatatagtgttgagttaattttgtaacgaaaaataacattttatgacataaaaaagaaaaaaaaaagaaataaaagtaataaagaaaatgcatatctctgttacccccccaaaaaaaaaaaaaaaagaaaaagaaaatgcatatcgcttataaaagaaattacaaattaattagatttcaaataaatatttttattgaattaatgtgatatattttggatttaattttatcggaaataacatttgtagcattaaagaaaagagaaatggagaatagcaaaattgtggcccaaacctatgaaaaacaacattttttaaaggtcaaaaaccaaagaaatcaggcccaaaactggcccaaacatccctccaccagtagacatgctcattacgttgcgagctgggattcgttcgctggtaccagtgccaggcacccatgtccccctcaccctccactcgcgtgtgtggcacacgcataacaccccagccgcgggtgctcctcaccgcccaggtgcacgagtggtcccaacagccaaagagacttttgtctcacctcttctgcagccgccatgtgccacatgcaaccaatgagagagtgacacgtggcactccagttgtaagtttgtgtaattgtatttacctacatgcaaattgtaataagtttaattgcacattagtccttttacctttctataaatagaagcttaggttttttagaattcagtacaatttcacagtttcagatagaaaaatctagaaaaaaccctcgaagcggtcagtgttagtttactgcttttcttagttaattttcttatgggtttctaagtttccttattattaaggcagatgatgaaacctagtgtatttactta

SEQ ID NO: 51500 - DNA, 1440 bp, Cannabis sativa
acttgggacttccaaaaggtgtagttacttcggtcaagcttcaaggttaacggagcaagactttgaaaaatggatacagaaggagtagcactagcaggttgttgtgctgatggaaccggagtagcaggggttgcagaacctcctgtggtagcagtggaatcagcaggagcagccatggaaagctagctctgataccaagttaaaaagagaattaaagcaaagataatggtagagaaagcttttactgctatattactatattgctcaacggataggattacaagaatgtgtacagatatttatagtacagaaaggataattctagaagagaataaaaaagaatattcacaatacaaatatccaagagaatcaaataacagaaaagtgtactatttgacaaacaatgattagttgtcatcattatggtcctcctccaattctattatggtaattccattattttcaataattaataataactcaataaatataaaataaaattaataaatgattaagataaaaaaaaatttaaattactgaaaataaatatttaaaatacccacttgcaaaacgcagattattttctaatttaataaataatatataataaaaaaaaatttataataatttcgtatataaatataactaatatatttattattttctagaagttaacaaaagtaaataaaaaggaataatttatactatttaataaagagaaatactaaaaggtaccagtgatgcctagcaccctcctatgtgttaatatcgctattggtacaactaagtatcgaatctcatatagttaaatgtaataacttttaagtatcgctaaccaagcgcaatgcgacatatcttgaaggtattaggtaccactagtgcccaatagtaatgctctttaataaattaagttgattgaataattaatttaattttattggaactatgaaaaatataaatctttcacttatttacacaaaatgcacgatcaatttctataagtatcttattaaataacaatactgatatattatctttataaaataaaaagatatttttattagtacccaaaaataattaaaaaatttacaaaaatacgaatttatgagttttcttataatatttttacaaattttgacttttttaacgaaaatatggaaagttattttttcatttaacaaaaaagttcacaaaaatgttgaaaaaaaaaaaacctaattaaaattaatatttaaaaaagtacaatacttttaagtaattttgtgtaaaaatcctaaaacaattcaaattataagcggatcctctgtccaaataacctgtccattcctctgtctaaataattaaaacaatccatctcattaatgacttgacagatttttatttatcaactccattccgttagtttattatattccttatatagaatatttatttataata

SEQ ID NO: 51501 - DNA, 2152 bp, Cannabis sativa
acggtcatcggataggttgttccttctacactggtggtgcatcatttggagtcactctagctacagccatttcccgttctaactcctcgttcctttggttggattctatgagcctccaacggagttgtcgattttctaactccacaatagggatgtatctcgtgggattgtaggcatcaaactctcttctcttggaaaattcttcctcagggtcacttctgttggagttcttctcagtaggaccctttccttagttcaatctagtttgagtttgtgatccctggggctcttttctcgatcaacgtactgtctcttcttccatgactggttcatcatgttgagtattctccataatattatggtctagttaaacaaaggaaaatgtgtttcgagtttttttttacaaaggctctcaatgaaagtaccaatctattaacttatatttttgttaacaataaatgaagcattgtaaataaaaattaactatttataattaataaatatatatgaaacaccaagaacttttacgtgattttatagttaaaatctacaactccatgagtcagtattatttttgagtatttctttacaacgattcttgattacaaaagaatttctctaggtattcactcaatctcacaaattttattttccaaaaaaagattgatcccttctccttaggttgtcccttttataggatttttaggaatgacatttattctcttttgagtttatctaggtaaccgctcataaaatgtggacaacccccacatttcatatttaaaacatgtagataaataaaataactgctggtaactgcttttgtccttatcaggaagtagtttcctttgccgagatagcgtatctaaaatatagcttgcattcttcaaagatgtttgggaatgactgatcgtattccacgcgatactagtcaagatgtttgccctcactattgccttttatgtcaactctaagaatattctttaggaatcctgagataagtcacattttgtgtattcccttaattttttaacatactcacgagtatgtgggtcaatgaatcgcaagctcttaaagaactcgttatctaccctttccaacaacattactttcgttcttgtatgcttttaagtgatcctagttagctccgagatgaccccagaatgttgtcatctcgcaatactcatcatgtgttagtaatattgtagcatagcacaagataggtatatatgtttatggttgcttctcccaaggcaagataactgttgtaatcatgatcctcttttgacgttcgagattcatgtccatgtgtcttgtccatatttatgagtcgaaatatgggcataacatattacaaatttaatttttgaaaacaattttgaaaatactgattaaaataatgacttactttaggagaaagtcacttggtgtgaattattaagttttttaaactatttaaaagaatctaatattttatgctattgatttcactaaatgcaatacacataaaatatatacgacaatcgtaataatcatatttctacatatgcatgattatcgaaacagtaaattgtatagtatttcatgtataacatacgcaatgcatgaagtaatcaactattagaacataattgtttaaaacaataaatagtgaattagaaaccagataacaatttagagcatgtttgatattattttctgttttttgtttttaaaaaagtatttttagaaataaaaacaaaaaaatagcttttgaagttttcaaaacacaagtcacattcggttagtattttctaaaaataatattgatcaaaagtgaattattttttaaaataatattgatcaaaagtgaattgttttttaaaatagaaaacaacattttgttgtttttaaaattcttatttttgtaattttattttttagaaattgttttaaaaaaaataaggccaaacaagcttaattgttttcaaaaaataattttctatttttaaaaataaaaaatagttttatagttatgataccaaacatacacttaatatttctaaaattataactcttaaaatataagaaataaaattaatcttgaactataagccacctgaattttcttcagctcaattttctatagacaatgcagattaataggagtgtc

SEQ ID NO: 51502 - DNA, 949 bp, Cannabis sativa
tttagagcaagaggtcagcagtgttttcttaatattttttatttttaaatttttaccataaaatagtctttttaaaataaaagaagaaaaggtaatacttttgaaaaattttgtcaaaaaaatgaaaactcttctttattgtattttgttgtttttgaatttgtattctccgtctctctcttttttcttttagtgtgtgaatatataagttcttctattatttgaaggctaattgattaattaggatgcttgcttttttgagctttaatatgtatcaaatcatatgttttgaactttttataccgttaaaaattctccttgaatcattgaaattttaaattcaataatttttgtccaattttactaacagaagcctgacatggataaaaatttgggagaggtgatttaatacataaacaattgttgtattagtaaaattgaacataattgggcagattctttaaattttacaatctcaatagttcagttataaagcctaactttaatggctagcttaacagaactactcatagtttttatagagttacaaacaaattcaaagacacacttgttacgattacactaaatagaacagaagacagtagaaatagtggcattgcaaataacttccatcaaatttgagaggtgattcatactctgatgcctccactcagcaaaatcctttggccaacgaattaaagccaaccaagtcgtaatctctgagatgactttatttgtaaagagacaataaaataataagtgttggtgtgtctctatatcagctccacaaataggacataagcaagaaatgagctccaaaagcttactaaagtgaactcaagtaaaaagttggtcattgatcgtttgctgtaaggctaaaattagtctaagtttcgggtcgtattttcggttagttttcactatttgtttctagttttaggactatttt

SEQ ID NO: 51503 - DNA, 1328 bp, Cannabis sativa
acaacctggggaatgtaggtcagcggtgaggaatcaccatcgttcttctcgaacccatagagagagggctcgtacaaacccagtgggagaaatacaacaaaccacgctcaggggggaagaatagagcttgaagaagaaagtgtgacctcagagcatttaggcccacagtcgatcaactcgaggagtagagagtgctcgtcgggctaattatcaagaaagcacgggaaatagtatatccgcaagtcacttgaggatgaggtcaatgagtaaaatgaggtctgtaagtagggcacattctgtgagtagaagaaggactattagcaattactcccaaccggacctgcgagagcacttgaattagaaaaaaccttatcttcgccaacaacttggcccaaagcaagaggatcctatccaattgcgaataaacgagttggaggataagttcaggggaaatcaagtgggggtattaggaagacaatttggatacgactctgacgaggagccaaagccgtaccatccagatatcatgaacactccttttccccaaggatttcaaaaccctcatgtctcattgtatgatggaaccaccgatcaagtctcgcatttgaataacttcaacacaataatgcgagctagtaatctgacaaacaatttacgttgtatcttgtttcccacctcgttagttgcagtagcaagtaactggttcaacaaatttactcatcattccataacttccttggaacagctgtccaaggacttcaaaaaacaattctagggcgcaagggataggcgacccgagccatcctcgctaaccaacataaagccatacccaggcaagatgcttaaggcatacttaagtcgtttttgcacggctgctacaagagttagaaatttggatggcagtacacagcttacaacccttcaggtggggatcactattgatcaatgaaccgctgggggcttactgtgggacgacttacagggtcgtccaatgaagaacatcactgagtttaacaaaagggctcagatgttcatcttaaaagaggaagcttgaaaaaagatgaatttgttgaaaataggctcgggaggtaagcccagcaatgtttcaacaagtactatcttaatacgacttgataactcaggggtctctggctcaaatagaaaggacgattctaaggaatcgtcaaatgataaaaagaaacaaaagaagcccgataagtccgtgccagtttatactatttatactaagcttaatgaaactcgggaaaatatttactcgcgcatgagcacaaggttgccttcaacaaacccgagcccatgaggcatgc

SEQ ID NO: 51504 - DNA, 1466 bp, Cannabis sativa
attttgattttttttacgtaaggttattttaagtttcaattttgattttattatttgtaggttactgtttttttgtattattaatttctttgtgtcagattattaaatagctgataaacgtaacatttttttttttcaattttcaacatctaactccgaagatgactccaacatctaacttcaatgacttttcgataacaatgacatctccgacgactttgttagcagtgatgaaaagtctgacaactcttctagtaacttttatgtgcaacagtcataaccccaccgacttttttgtcttcaatgaaaattccggagttttttctacgagaatggctgctcctataacttttctagcgatatttgttcttaaaaatcttaaatttatttatgggatttttttggggttcccattttttaaaatttatttttctctaaagttactatattttatatcataagtgatacttgaatttgggctaataatgagaagctgatacgtatgaatcagcccaagccgtatatattattaaatgaacactaaataactcgtctcgggaataatagttaatataaatattcaaactcgtcaccgcttaggcaaaagtgagatgtgaatacactactataatttagaattttagcgacactatatagtgaccctcacttttgtgtgggtcactaaatagttaagaataatttttagtgacccgcataaatagacttaacttttagtgttagtttctcataatacgagtcactaaaaatataaaatgtcactaaaaagtattactcataattttctattttttttatatattaaaaatattgaattatagagtcacgtcaggaatgactagcaaagcatatcctgacatacctagcgcgttactataggtgttttttttaaaaaaaaaaacaaaattgtaaagacacataaggtcctctctctcctttctcaatagatatttcaattttattttttcattaattttttttttcatttagggtaatagttttaaaactctaaaatagttttcctctctctccttttccaagcgcctctcattttcagattatctctctctagctctcttcttacatctatcttctctcatccctcttctcccttttagatttataattatcaaccctcctccattgaagacgacgacctcccaaagccaaggagagctccaccgacggacgacgggcacttccaaactttgagcccaagctatctccctctgctctaccctaatatgtccacagttgacatcttcgtcgctcaaacgcccactaaattcacccatactgctagcttaatcggtatatttattttttgtacacctaattatctctctctccctctctctgtctttgatctatgcaggtggacggcgtttgaagatcctcgtgggtctcgcttttaatgtttttgtggctctgggtacacgatcgacgtt

SEQ ID NO: 51505 - DNA, 2169 bp, Cannabis sativa
  modified_base (978)..(979): a, c, t, g, unknown or other
ttctctcactttcttacagctcaataattttataatattttattagttgccgaaaatctcggtcaacatatatcaaactttaaaatgttatcctaaaaataaataaaacttagaaatgttactaaaacaatgaatttttcatataaaataataggtgatttattaaaagtttttatacataagcataagaaaagaaaaacagcaatataataatatatgtacttttctgttatatttttcaaaatgtaacttatatataagtaaattaatagtcaaaagtagatacaaaaatttgtttttaatcttattaaaacctaatattttgatacttgatttaaaaattgcatgaagactttgtttaattggttgttggttttcttttttctttgttaattgattgtggattatttaaagaagtaaaccacttaataatatataaatcaattaattaattacaaaacatttttatagtaattaactaagttagtgtgaggagtgataattgactttttttttcttccccaactctctttttaattttttaatatatatgaaaaattttacgatttctcttcttaaaaaaaaatatattgatacaattttatttattttggtatccgcaagaagattttagtctaattctttttatggtcgtgtacattataattatttaagatatttttataaaattttgagatttttgaacaaatttaatacgttaaaaataaggttcaaacaacattttgtatgtgtaactattttattttatatgtatgtgaaatagattgtttgaacacatttatggtaaattattccgaatttcttaaaattttgtaaaatatcttaaataactataacgtacaaaactatgaaacaaattagactaaaaacttcttttgagtaccaaaataaataaagagtgcaataatagattctttttagaaacatgcattgacgaaatatatatatatatatatnnatttatatatatatatataaatgaataaataggactttgttctcgaattatatataattactattttattgtgtcttgaattttttatgttattttaaagtctaattgaatcatgacaactaccaaattgtgttcatttatttaaattttgagagcacaatttaataagtctaaaatagttcaagggcatatataataataggttaattaagattttttgtcttctgaattttgacatgtattaaattatgctcttaaatttttctagtcgttaaatttttttcctgaactattgaaactgttagatttaagaatttttatctaatttcattcaattttactaattcagtgattatccatgtactaaatcatgcccctaaattttaatatctatcaaatcatgtcccataaacttttattcatgttagattttttttttactaaaattggacaaaaattttaaatttaataatctcaataattcaggaaaaatttttaacaattttaaaagttcaagtagcatgtacatattaaaattcgaagaataaaaatcttaattaacctatataatatttgggatggtgagacatggttaagtatcaatttcttaacatacaaaaaaacaagattttaccgtgataataatttagaaccaaatacaattagatctaatgatatatagtttcaccaaactgtcaaccgaatgcgtatactcaaagattaccaaacactttaagtttaagttagttacaaatttattaatttaagttagttgaatttttttttctatattatagttatttaaaatattctacaaatgagaaatttaaaataatttacaatataaaagtcagtgttcaaacagtttatttcacacgcgtgcaacataatgtttgaaccctattttcggcatgttaaatttttttaaatttcttaaaattttgtagtatatattaaataattataacttacatgatcatgataaaaaaatttaactaaaaaatgattttgaataccaaaacaaatagagatacttcggtgtatcttttttaagaaatgcatttagaattttccaaaactatataataaatgcaaaattatagtcccccaacgtgcactcaactacttttactacatttgttcattgaattatcaaccaaataattaattatagaaaaatgtcaacaaca

SEQ ID NO: 51506 - DNA, 2492 bp, Cannabis sativa
gcaagatgcctccactactcgtcctcttcccgtgctgtggtgttgaaggtagcgtagtcgtactcacttgttatgtccttttgattcctttccttacaactcactaagcattgaccatcttattgagaggtgtggcgacttgtcacaatatttaaatgtcgtatatgatgtcgagacgcattcaagcaagcgtgttgagaggcatgcacacatggatgcaaagtgagtgcatgctgagtggcttcaagctacaacatgccgagtggctggaagcttagtgcatttcgagtgggtgcatgctaagtgcatgccgagtgggtgtatactgagtgcatgccaagtggctacttgagcacgcataccaagtggctgccttgcatgcatatagagtggccacttgagaatccatgtgagtggctacttgagcatgcatgttgagtgggtcacccgtgactaccttcgaaagctagtcctgctaatatcttgaattaatgttgacttattttgaaagttagccttgttaatttttgaggttaacagttgcctcctagtctatacaaattcttataagtgttcttgtagactaagtttgatgatctttgcccctatcgttcagttcaatggctacccctttaggtgcttatgccctgaggtctttttgctatgatcctttatgtgggagtgttggctctaggagctatccctactccttttcatggtgggtatttgtcacgtagagggagtgttagcctcttgagctttctcgacctcttttatgagttatcatttgtttgagggagcattttgccacttaaactttctcaacctgttctctggtgtaaccttttcatggagggagtataaactagtagtctcaacctcttctcagttactcattagatgtaagggagtttggccccttaggcaacgcttaccttttttaagatttaagattttattgggggagctttgaccccttaggtagagctcaacccctttaatggtataatattttattaggagagcttgtggcctcttaggcaatgctcaaccccttctactgcattcgtggtgcttagagtgcatttctaaatgctagaaaattggtactccttttagagaggcgtccctctcatagccatactccttccttattcctatttccttttttttaacccctttctggttattcaacattgctaggcactttgataacattgttaggcactttgataatttcgattgacaaatataatgaacaagttgaatgggtaggtggagagtaatgaatgccacctgtaaagtgaaaatttaatattttattgataattcaaatacgtaagcgcctaggtgcattttttatttttggagatcaactttggtgccctctttaagttagtacaatgtattaaagataggatttccattgtaaggagtgctctcctcgattgtctattggaaattaaagaactttactctgaagaatatcttggatgtttaatgtttacaggttatatgttaaaggcttcactcaaatgtatcaatttacaagtgttgggggtatcgcctatcagaccctataagggtctgacaagcatcctgaagaacactcacttgtgtttatttttcaagactctgttaccctcctccacacggatgtacttctccgctctcttgtaaaagtcatctatgccatcacattctcttttcaacatgtttttccatagtccacttccacggtttactccagcagctacgttaatattgagctcatctttggacactttccctaatttgatgtcttcaacgttgaagcgctagatgtagcttcacaagcttttttgttccccttgcttcatattagtgatacttgtgataggcataacataatcacatgaagcatgatgttgttggaggaattcttccaaaaattacttccaggatgtgattgttccagatcctagccttttgaaccacttatatataactcattttagtgtgaccgcaaagcattggcacctctacttgcatgacacttttttcatcttcattagctcattaaaagatccaagatggtacttcaagtcagttgtaccatcatttggtgtcatacccgactcctcaaaaatgggtggaagtacttcaacttgaatctctcttaagaaagaggatcttcatcaaactcatcatcatccaagttttccttcaaggcggtagctatttttagacatagatcttgcatctccacttccagttccttcatctttttgatcatcctttctcgagagttagcgagtggagcttgggtcctcgttatggtttgcatagggccaggatgaggtactcctcttgtcctatcattgtgtaactttccaccaaggctaaaggataaggctttatgtttgctttgctcttgggaggggggcataggtgttgggattttatgtcctaaataaaatctattttaatgtaatcagatttactaattaata

SEQ ID NO: 51507 - DNA, 1963 bp, Cannabis sativa
tgttgctttgttaaggacaagaaaaccggagcagtgttgcttaaaggaaaaatcagagatggcctctaccacctaggagatgatagctcgagtctttccaacactgccctgcaagtgaatcttgctacttcaaccttttcttctcagcctatgaagagtcaatatgagtctggtattcgtaattgtaatcaggttgattcatcaaccttttcttgtaataaaccaatcaataaagactcttcttactattctcttgattccaatcccactgtcttactttctcatgttaatgacataaataattggcacaaaaagttgggccatcctgcttctcacacattagcaaaaatattacataaagcaaatatcccttgttcactaaaagatttacagttttgtcaagcttgtcaaatgggaaagagtcataggctaccctaccctctttcttcatctcgggcaaatcagccccttgctcttattcatacagatttatggggtccatctcatgttccatccaaagaaaactacaaatattacatagtatttgttgatgattatagtaggttttcttggatatttcctcttactatgaaatctcaagcctttgaaaccttcatcaaattcaaaagccttgttgaaaaacaattcaatttgccaatcaaagctgtccaagctgatggtggaggtgaatataggccttttgaaagatttttagctgaccaaggcattgtttttaaacaaccttgtccccatagtcatgaacaaaatggtagggttgaaagaaaacatagacacataactgaaactggtttgacacttttagctcaagctggtcttgatctctcctattggtggcttgcctttcaatgtgctactcataccattaatcgaatgcctacacctgttcttgataatcttaccccttttgaatgtttgtttcatgaattgcctgattatcatgtgcttaaaccttttggttgtgcttgttatccacatttaaggccatatcatcatcataaactcgattacagatctgaaatgtgtttgtttctgggatattctccaaagcacaagggctatttgtgtgaaaatgctgctggtagaatgtttattgcaagaaatgttgtttttgatgaatgttctttccctgctcttcaaaataaagggtgtgcttctctatctgatcaaaagacagacaacattgcttgtcccaccatgagtttcagcactgatttttctccagttactgctgcttctgacagtgttgttgctcctgctgataccactgctacttctggttttcaagaggcaccagcagtaagttttcctacaccagcttctaatcctggttcttctgctgatgtacaaactgctcctgcactttctctgtaaaaagttgtctctcccaacattcagcaacctgttttagagactctgcagattaattctcctaccatgtctactggttcagcagcagctattgtgccaccagctcctcgaactcattcaatggttactcgatccatgagggggatttacaagcctaaagcctatctagcaaccaaatataggctacccgaatcattgttgccccaagaaccaaaatccctgcaatcagctctcaaaagtcctatatggaatggctctatgtctcaagaaattagtgccctcaaatctcaaggaacatggatcttggttccttatgagcctcatatggttttaattgataacaaatgggtgtatagagtaaagttaaatgcagatggcacacttgacaaatgcaaatcaaggctggttgctagaggttatctacaacaaccgggtattgactttcaggacactttcagtccagttgtgaaaccggttactgtgaggctggttctagcattggctgtcacattcaattggcaagtgagacaattggatgtgtctaatgcttttcttcatggtgaattaagtgaaa

SEQ ID NO: 51508 - DNA, 4970 bp, Cannabis sativa
tatatatatgcaataggacagtggtttaactttcaaaaaagtaagtcataatttgctgaagatcaatttcaagtagtacgtacggctgaaattatgctctgcaaatatacattttgaacaatggattataaaggaagctcttgtatattgaactccaaatcttgccccttatgattgaagaatcacaatagtaggtgctaacttattattgtgtactctctttcagctcttcttgtgtaaatgaaggaaatttttctgaattctggaatcgtgatgatgaagccagtggttctgaggaagccatatctgattctgatggtatatcatattttcaacaattttaattttgtattttgtggttggcaattagaaagaaataaatttgtggaaaaaaaatacttgctatacttctatgatcctgttttgtacattcactggcagatggtattgaagttattaggagactaggccattcaaagttgccaaaaaaatctggatttaatgagaagatggatttcttgcaacgtgcagaagaaaaatattatgagagcaaacatgagcaggtttgcttcgatagataacattttgcgttagtttcattcgaagtcggaatttcatgtctttttccttttctcttctgagccttctatcatttgcatatgcattttagaaatcaatcacttaaatatgctactacatatacataggtgatgattttaaagttatttactctgcatatatatgatttcagctagctaaactaaaccgttaacttattctaaattttgttttcctgctctcaacttgttcttattactggatgaagagcaataaacaaaacaagaatgctgtatccgacagcctgagagagtcaagtaggcaaagactattaaacgctttcaagcaagctcgggagaggcttggtgacataaagtacgctcataactcatgcacatatttcttttttgagtcctgaaaaactttcaacttaatgtattctattccttttacattgttggtatttactgttcaatgtttctttgcacaggcatcaagtggaaacatcagccacttttctcgaaaacgagtgttacaaaaaatatgggaaaaccgggaaatcattctattattcacaagtggcaagtactgtgaggtggctatcaaccacaacttcagttgagctaactgatcggcttggtgccattgccagttctgcatctcaaccagaaacttcatctctagcttctcctactttggatcagggtcatcaagaacacaccactgaatgttttgaatcaagtgttgtacctaaaactctcacatgtgcttcaccaatagaatgtttttcttctcctagtgcaaaactgccagcaattccatcattttcagagttcattaacagtaaaaaggcaaaggacaagcaaccgagacggtcacctggtggagttgagaagaattcagagaaaaggatgaagttgcaataggctgtggttttgttaatttctttataggaagggtaatagtgtaaaacactttgctgctttgaatggagctggctgttcttatcatatagtgcatgaaattaacttcaaaacttttgtttcccaaaatttatttttcttctctttctaaagaaaatgtaacgaatcattgctgcactttaatttttaaatattacgttgatgattcacatttccttatttcaggctaatacgtctatattagactcaccttttgttaatttatataaaataataatttatatattagtgtaaatatttatttattaagatattaattatgaaaacacattgagtgcattactcattagtgtatagtcgattattaattcatatactaactgcgggttgtttttttctgaaaaattattattttataaatttagccaattaatttgatctagtgttgaaaccaaacaaacagaagtataacttaatcgaagttattaatttatggatgctatatttggacaaaactgaactttttagaggactccacattttattttagaattatttttctaaaaatatttactttaggagtattataatattattctttttatataataaaattataacgctatatactgcaccaaatacaatataatattaagataatataatgcaatctttaaccaaaaattcagtccaatctaatacagttttacatgccaaacgagccacaagccccaattcagtacatagtctccttctccatcaatattacatggtgtgtctttctagactcctagtggtctccatttaatttcatacagcaaaatccacactaagcagttttgagtggaaacttcccaatgaagttggaactgaggcttcccaagtaaagatgatcctcaaactcaatagctgttgtaacaaacctcatcacctttccttctaaatcatcaaatttcttcctaatctttccatcagcagcaacattcaccaccgtcgctttcccctccgcgccattcactagctctactagttttggaaacgttgctatgaatttcttcagtgccttaaacttgtggacaaactccagcccttcattactagcctgcatttttcataaacaatcacatcacaactatgatggtaattaaaaagctcaatatatagttttatgttacctgaattaaagcgatccaaaaagacccgtctggggcaagattgatgttgtcaggtccaccaggaaggttttcaatgaaaatatcagtttttcctttgttctctcccttgagccagtacttaaggcacctgaatctggtcacaaaaacgacaacgtatcattaggtaaacaaaacagtcctctcttgaattttagtatgaccaaaaatgatcatacatcattatcaatgaaataatcatttacttattgtgacatgacagcatggtacatgtttagtcttcttattcatttactagtgttcatgtaacaattttaccatgtgacttacttccatgattcacagaccaccagataatcttggtcctttgagagagcaacaccattagcaaaccccaaatcatcaagtataactgaagtttcctttgatgatggatcgtacttgagcaattgcccatgtggttttgcctcaagcacatctagataccagttatggagtccaaacttggttgatgcaacactgaaatacacactaccgtcggatgcttcgatcacatcatctgcaaatctaattaaaacaaaccaaaatctcaaactttgcaggctaatatgctgataattttatttacttttttacattaccatttctttcccttacattgtttaaatagactcaaaagtgtatatgtatatgtacgattttggataattaacataagaattttccctgataaaccctgtggccgcagagtggtttttttttgatagctctataaaacaatcatggtcccattgcaattgaaccactatagaaaacaaaaagagtgttacatctccggccccaggatttgccaagttgaagagtgtttgtttaaatttaatgtagtctactagataaaatgagaaactaaaaactcaagagcaaaaaactccaactacacacgtgtatagaaaagtactaaaggagaaaaacgacatcaaaccatgatgtatctatagcagtagtaatcggtccctaccccaaaaaaaattaaataaataaaaaagattcccttttaaggtcttattattagctaaggagggctgcaggtcccaacaacacctccaaattgcgattggccctattgttgtgtgtcgtataataagaatttggcatggcttgcacatggatcatatcaattgatcacgcggtttagttgtgtcgttttctattcttggatagctttaaagactcttacttactatttctctctcacacacacacatcttaacttgttcaaatagagtttcacttcttactcattccatgataaggaggcagagttttatctatagcattggccaaaagaactactatttcatattataaagacaagaaacgagtaaagctcggttgtcgtttactgataagggcaaaaatgtctgctgattgtttgaaacactctgtttagttttagagacgccataactctttcggaagtacctccctaaattggcttgtctgatttagttgcatatgtaaacaatggtactatgctttagtagactttttgtacatatcatgcgtattcacttaccttattttggacccgttaacatgtgaagtgactactaatacgccattttcaccaaccttaagcaaaccctgaaaatcaaggaaaaccagaaatggtttaaattcttgaataagaaaaaaataaaataaaataaaagagtgatctttctctaccttttctgtatcacatacaagaagatcaccttcttttgttgtagtaattcccagaagagtatgaccacctaacatcttccagttttcccaggagccatttttgtgcattctttttatccaaccatctcttgtagctgtataaattatgccttctttatccacagcaacatcttccggtctctcaagaaacccttctccaagtttacttacttcctagtgagacataattcagaaaaaagtaaaaccaaaattagatgataacccttttgaaagatttagaaaaatgtgcatgttcaagtgtccaatccatgtgacatgaatgaattttgacctgtagtttgttatttggaggaaaaatggaagccaaagatgttgttgaaggaagtttaagtgagtcaggagatattggagagaagagaaaaacttgaactgtaaaagctagcaaacaagctaatagaaagcttgaaaatgcttgcacagcttgttttgaggttagcaaagccatggacggctatggtggtacggccacacaatgatcaagcggtggaaaaaatgtgactatagagaatgaaaatctctagattttcta

SEQ ID NO: 51509 - DNA, 995 bp, Cannabis sativa
acgttagagagtcccatattggtaatgtgtgaaaataatactatatataagatgcatgggcgaaaattatgtgcaaaaaatagtcaccgtcttaccatacacaccagaaaaaatgcacttttaaatgagtcaaacatgtcaaatcgaacgaattggcaagaaccacaagacaacttacacaaactgacaatagtaacattttttttttcattcataaattagaaattgaagttgggtatccatataagaaataataggagctcacaatatgatcgagatgagcatgagtgatgaaaacaaaattctggtgaatagccctggtgggacaccgcccaatatcgaaagcacatttgaattcagggactatgacgcaagtctcttgcccaccaatggaaattccctcaatcgaatagccttccaaatccatcccctttcgaaggacctgcgacctagcaatccggtactcgtcatcttcgatggctcggccgatggctggcaaaaagccgggctctttgagggcgttcaccaccggactcggacgggtgagaagtggaagtctgcaagtctttgatggtgcagctgaaatgggttggtggggtgagaatagcagaggaactttggatggtgaaagggtcagagagatatgcatttttggatgactgagaggaacacatataagagataatgaatgggggttttagagaggtttggcagcttttttttttttttttctttttcctttttcctcttttctcttttgggagggataatgcaagaaaaataaatgaacaatagaaaaacttcgtatttatttatgctaggattttagtcctccaaactataaatttattataaatattctttaaattatttgtagcattataaattaatcattttgtcaaattatatcacaacttagtcaattgtcacattcacattattgtaaattgtactattttactcctacattctatttaaattagttagaatgttta

SEQ ID NO: 51510 - DNA, 696 bp, Cannabis sativa
tttttttaaaaaaagtttaaatattctcacatattgtattaaattgaataatccttatgaaaaatcattccattttttacatattgtattataattgaatcataatttttgtatagtgatgcatatttattttactgatttttataattttttaataatttatattgtggaaaataaagttataacaataagtacaagttcattcaaacatgagaaaatagaatcctttagatattgtttttctaatgatacatacaagttgaaagaaattggaaaaactgaaaattatgcaattttttgcatttaccacttttatatgttcatgtttacaaatgtgacttttttgttagttttgaaaaatacttttttatttctatgtactagaaaaatggtatttttgggttcatttttgtagaatttaaaataccatttttattttttgggtccatttgttttaacaaattaaaaataggatctatttttttttgtgacaacaaaattataccttttcacaatttggtacaagaaatatactaatttagtcatttatgattttaattcagaacatagcatatgccttgatgtaatcaaaaaagttaaaactaatctttctttttttataaaagaggaaaaaataacggttgaaactaatcttagttttttaattagaaaaatattttgaaattatttttattt

SEQ ID NO: 51511 - DNA, 1046 bp, Cannabis sativa
ggattttttctgtagttgatgtggcgaggattcttacaattccccttgctgcttcagcaacagatgacatttaggtgtggaaccatcatacttctggagtatatactgtacaatcggggtaccactttgcctgttcacttgaaacacagcaacaaacttcaacttcagacacaaatagctcttggtggaaatccttttggggtctaaacattccatcgaaaattaaaatcttcggaaggagggttatccaacaatcaataccagtggctgctgcattgtttcaacgaaaaatcattacatatgctgcttgtagcttatgctcaaatgcttgggaatcggtggggcatgctttgtttagctgcaaacatgctaaagcagtctggcgttcaacagattttgttcttgattaccaagctcccagtcgatagaaaaatggagattatatgatgttgctatcacaaacttataccaaatctgagttagaaaagattttatgcattatgtggtacatttggtatgatagaaacaacatcattcattgtaaagaaccccaaaaaccagaggcaattgctgctaaggccctggctcatctctgcaattttcagcagactatgcatgcttcaaaacctgccctgcaaacttcctctgttgtgagtcatcatccatagatagcacctcctcaaacaaagttgaaaatgaatgttgatgctgcttttgatttggccagcaataaaatgggatttggagctattataagggattcttgtggccatgttacagctgcgctatctaagccaatgcctgggaatttgcagcctcatgaaatggaggctaagactctctattatggtctccaatgggctcaatctttacatgttcaacttgattttgttgagtcgaattgcctactgttagttacgggtttacaaagtttagcatctagaaatttaggtttttctgatcttatttctgatgttaaaaatcaattgtcctatttccctaatgtttgtgtatctcatgtgcgaagggatgcaaatcaagctgct

SEQ ID NO: 51512 - DNA, 976 bp, Cannabis sativa
cactagtactagtggtacctagtacttttctatatgtaaatatcgctattggtctaactaattaatatcgtaccttatatagtttaatgtaataacttttaaaaaatatcgctagctaatcacaaaacaacacgtctaataataacctcctttattattatttgttcaaattaataattaaggccttgtcataattttagggtctaccccctgcagagacgggccaatggccaaatcttaacaaaatcgactgttgaaattattataaccaccaaacaatatataagaacacatcatcaaaataatatatattgaattgttgattgatgatcatggaagacctagctaggacccatgagatgataattattaacagaaattaatggttgaaaataatatatacaaaattttcaatagttttttaaaattatttatttttcaaattttgtataaaatagtttttccatagctatatccaattctagtttggatgtcattaattatcttataaaaaaaaattaggaaactaagtcgcgtttcgcgcagttttatatccaattttcataatctttttaattttatattttttgtacttatattcgatgatataatctaaaatataacattttaatatgtgtattacaaacaaagtaataatattaaaattagaaatataattttctgtttttaaaatatatagaataacaattttgcaacaaagattaaaaactgtggaactaaaaaagtaattgcattgttttttctaataaaaaaataatatttataaatttaataaattggatttgtgattgatgatatagttttttttaaaaaactatttagacttttttttctttaataaaaaaaataatttaattaatattatgaaagttttcacattttatttattttattttgtagagtcagtggaatatcatctccccaacggtgaatttagcatgccacctaatttatt

SEQ ID NO: 51513 - DNA, 1013 bp, Cannabis sativa
tttctgctaaacatagggggattcgatagttcaaacctttcacatttcaaaagcttacaactcatttttattttcatcttgcatccacttttgagttaatttacttattttttgtttatttagttgaatcattaatcatttcatttcattttggttcttaggcattttgcttggtaattaacttttgcaatagaaattttatttttatagtccttgtggagacgatactcgttacttatcattgtattttacttgtttgtgactacgtgcacttacgtatatctaattttttttcacaacaaccttgatctgattaaaactgcagtagtccaatgctcaatggctttattattatcacgaaataacaataaagaatcatcttttgttgactgagcaaactgatattgatcaagagcacgccttgctgagagaacaattgtagcagcagtagaagtattctggttccaaacgacaacattacgagcttgccaaacgccccaagcaaccatagctgcctcttccaacatgattacacctaccctgtgagataaattgtgccaccaggatgagaaaacagtttccatccagctgccaatatcaacacagaacagtgccaacacgaacgagcaaaaggacaaccaacaagtgcatgaaattttttttctttttattattaaatatttgatactaaaatctaatcatttggtgactacataactgtgaaaatattattgttctatatatattaacgagtgatcctattttataacaattatgttctatttaatacaagaggtattttattattttaaatatgtattttatatgattaaaataatataaattaaaggatcattcgtgtaacgtccccgcttcaagcctccattaggcccttactcccacgaaataatgactcttataaacgagtatttcactctggctgcatcatggactgatgactggccctacagaccaacacgagtgtttctagcgtgctttttcctcactcgcac

SEQ ID NO: 51514 - DNA, 3988 bp, Cannabis sativa
atgtctaccaaacatgagtttaacttttttggacaccattttgctagctttggatatatatcctaacaaagttttatgagaactttggatacacaaataacaaaaaatgaaactccttcgttttagcaaaaaaagaataaataaaaataataaataaataatgaaactcgtcccattgagattctagtactttttttttttttgaaacaacaagaggctgattacaaagaagaaaacaaacaagcacaaacagcctaaagggggctaagaaactgcctagtcttcgtctctcaacctgagggctaacttcgcaagggagtgagctttgtcgttgtgctggcgagggacatgtagcaaagtagcttcagggaatctggagaggaaggttctaatctgatgaacaagagaagatagtggagagtagtcatgccaattaccattgaccttagagacgaggttaatgcaatcggaaaagacaaatctaggttgcaaattggaagaaaaacaccaatgcagtccttcataaagagcttgagcttcagcaaaaattggggaggaggcccctggtttgaagatccttgcagattgctgaatatgagacagaccctacatgtaaaccattccaatacctgttgcagaggcattagtattaagggcagcatcaacaaaaagagcagtggttgagggagtcaaaatatgatccaaggcaacagggcaatgattattgattagtagtcggtgttgagtctgaagaatgggtttgagcatcctggtaatcatgcagaaaacttgcaacaatatcttgaacattattcgttagaataggtttttgaaaaaggtgggcatttctaatgttctaaatttgccaaatgataccaaggaataagggaagatgatctctggaaattaaggtaaggctatgcagataaaaatctttgatatcaagcctatgatagtcaacaaaaaactgcttaaagttagagtgatgccaaaaggatttaactctggtacagtgaaggagagcatgagaaaccgactctgcacttcccccacaataagagcaactagcagatgggatagcatgcttaaggaaaaggtttagagcacaagggagaagatggttgaaagccttccaagtgaaatgcttaattttaggaggaattttcaaagtctagagaagtttccaccaatccttaaaaaggttgggattggatgtggaaggggaagaattaagggcagtggactgggctaaatgataggctgagttgacagtaagaatgccagagtggtggaatccccaaatgagagaatcggatggaccaatgtccaaagggatatttaggacagcatcagcttggtaagtaggaagatattggtgaagcttgtcagtattccaagttaggtcagggttgacaaaaaaagagacagtggccagggaggagtcaattggttgtaaaatagttgggtgggagatattagggatccaattaggggctggaatgggtatgtcattgccagagcagactttccaaatgagaccttgtttgagaagttgagttccccacagaagacttctccaagtgaaagaaggattatgacctttaggggcatggagaaaatcagtatgcttaaaatatcgagctttaagaagagaatagagcagagaatcggggttagaccaaatccgccaagcctgcttagccagaagagcatggttatgagaagtaagagaacgaaaccccaaaccaccaaagaatttggaagcagagagagcagaccaattcttccagtgaattttctgcttattcgaagaagagccccaccagaatttggcagttaaactttgaatagaggcacaggtggattttggaagtttgaaacaagacatagcaaatgagggaattgcttgaatgacagatttaatgagggtttctttgccagctcgagagaagagcttttcattccaagcattaagcttggatgaaactttctgaatgagatagtgaaaaatagaatttttaaccctgccaacacagtgagtaacgccaagatatttactaatgaaaccttcaccatttagaagtaaggaagatcggaatgtggattgagagtcaagagaggtatttggggagaagagaatggaagatttatccctgttgacagattggccagaagcttggagatacaaaagcaaaatattatttatagcttctgaagattgagttgaaacaggaacgaaaactatgctatcatcagcaaagagaagatgggaaaaggagggggctccacgacaaattttaataccagagaaaagggcagcctcctcatggatgtggatagctgcagacaaaccttcagccacgattaagaaaagataaggtgataggggatcaccttgacgaatgccacgggaagaagagaacacatttgataagttaccgttgagggataattgataggtgacagtggaaaggcatttagtgatgagagaagtaaacgtaggaggagccccaatgtgatgaagaaagtgagagatgaaggaccattcaactctatcaaaggccttctccatatccagcttaatcccagcccaacctaatttgccagcttttctagaatgaatggcatgaatgatttcattggcaataactatattgtcagtaatttgcctaccagtgagaaaggcactttgattggggctaataacagagtgaagcaccgatttaagtcgattagccaagactttggaaaggcatttgtacaaagtgttacagaggctaattggacgaaaatcacgaacagttttagggttcttctttttagggataagaaccaagatagtgttattgatttgagtgaaatccccctgattattaaggatatgaagaagaccctgagtgagatcgaatccaagagtatcccaatttttcttataaaagaaagaattcaaaccatcaggaccgggagatttgtctccagagagactgaacatagcagtttttatctcctcaacagtaaactcatcagcaagaaaagcagattgagcaggggagagagagttggtaaccccctgaagaatggaagagatagcagatgaagaagttccttgggaggtaaaaagatcagtatagtaggaatggaattgagtgaaaatggtttgtgtatcatgagtgatggaaccatcaggaagggttaatccacgaatgtagttattgcatttacggttagaagctttttggtggaaaaaccgagtattcttatctctagctcgaagccaagcaacccttgatctttgtttccaatagatttcatcttttaggagaagtcggttaagctctgattggaggtgagatatttgttgagtagaatggggagttgactgattgttatttaacaactgatcgagctcagcttgagttctggtgatttggagcttaagagaaggttgagaagcttgccaggtcttaattgtggtgaggcaggaggattgtttgttaagaaaatgttgtaaagggtggggagatggaggggaatggatgcaccatgagtcacggaccataattgggaaggaagggtcgttgagaagaaagttctcaagatggaagcgagattgattttgattcgtggaagaagtgtcttctaattggagtttcaggactctgtgatcggatccataaaaccccaaatgagtgagagaggcatgagggaaaagacttttccaagaagaggaaatagtacaccaatcaaggcgttccagaatagagccatggcgccaagtgaacttgtttccagagtaagggaggggggttaaattgcgagtatgaagaaagttgtgaaagtggtgcatggcatgagcgggtggggaggaagtggaattacgatcattaatagataagtcatcattaaagtcaccaatcactaaccacggtaaaaggggagcagtgtcaaataaacgattaagaagagtccaagtaaaaacttttgaatc

SEQ ID NO: 51515 - DNA, 3471 bp, Cannabis sativa
atattaataatttaatacaaacattgatagaaaacgatcatatatagtataataaatctgaacttttataatacataaagcatagattccattcaaacaaaaaagggataatgctaaagatgcaaatatacttgagaaaattggattactatacaaaggagttttacattttttttagagtgtctcacatggtacgtaatatgtaaaaactatgaactacttttcttattaccaattaattttaattaagatagaactctatacaccttatcatacactcacataatcctacatctaaaccacacattttcatattctataacatagttaactctctctctctctctctctctctctctctctctagcaagaataagaattcacaaacaccacctcccaacccttaagtggcactctctcattcgctgtcgttaattatagagctcgagatcgcgagtatcaatatctctagtaacaatataatcgtgtatagttaaaagtaactagttaattcccctaaagtaaccaaaccatttaccctaacttttttctccatatttttttggctatttttttttctagaataatcccgtaaaataacttctttaataaaaaaaaagtacaacattttcataatctagagccttaaaaactatgaaataaaaattctttaaatatgttatatctctgcaacatatacatttaattcacacaacctaatataatttactaaaacagacaagatttaaatcttatgttatcaccacaacatatattcacttttataattatttactttactataaataaacatttaaaatatttaaatttttctaacatttaaaaaatattgctaaacaaaaaattcttttctccatccatatagacatagtttgaacaaattatggctaaaagtgaaacagaaactcaaaacagagtataggaaatgaaaaacagagagagatgaaagataaacctcagaattgagaatgcttgcttgaacattcggagcagaaaatgttttatttataaggtttttacaatcaaaatacagttaagaattctgttacaacagaatttgttacaagtcataacacacaagaaaaggctaaccaataaaactaactatacttttattggctatcatctcccctcaaacggaaatgggtacaaatcactttgagtttgctcttgagataatgaaaatgttcctttggtagaggctttgtaaggatgtcaacaacctggtcaatgctagggatatgtctgatagtgatttcattcctcagaatttgatctcttacaaaatgtagatcgatctcaatatgtttacaacgtgcatgaaaaatgggatcggtagcttaagagcagttgcaccttgattattgactcaaataattggagtgtcttggagttgaaaatggagctcagaaagcagtgagagatccagttgatctcagctgcaacattggtcagggctctaaattctgactcagtagaggatcgagcaacaacttgttatttttctgctgactatttgagctaagaaagactgcatatccacctatagatcgtctatcaactaggcaacttgcccaatcaacatcaaaatagacttgaagagatagtctaggagctggtttaggcaataatccttcatgtaaagtgtctttcaagtaccttaggagtcgtttgcaggcttcccagtgcacacttgtaggagcatgaataaactgagaaagtttattaataatataggcaacatcaagccttgtaagtgtgagatattgtaatgcacttaaggtacttctatacagggtttgatcctcaaatggtgtcccttcatgcagtgaaagcttgtgagcagtgctagtaggattggaacaaggcttagctccctcaagatggactttgacaagcaagtctgttacgtatttactttgagacaaataaagtccttctgaggttctgtgaacttcaactccaagaaaataatgaattccaccaaggtcttttaaatcaaaagagtggttgagatcagttattaatttggtgatgagattagtatttggacctgtgataagaatatcatctccatacaccaataaaataatcaaattcagtgaggaatcaacttttgatgcattgagtccccaattaactaaagtggttttaattttgtcattccaagctcagggagcttgttttagaccatatatttctttgtgtaaatgacaaacatgatctcgtttagtggaatcttcaaagcatttaggttgcaccatgtatactgtctcttgaagaacaccatttagaaaggaatttgtgacattcaattgaaagtgacacctaaagtgagcaccatcctcaccgagacagatttaaccgcagggttgaatgtctcagcataatcaataccaggagcttgaagaaatctcttagcaactagtcttgatttgaatcgatcaacacagccatcagagctaagtttaattctatgtacccatttattgtctgtaagatgcatatgaggctcatagggtacaagtgtccatgtaccatttgttttgagagctataaattctttattcatggctggattccaagaaggatcactaagggcaacctttacagacttaggctctctagggagaagaaatttaggaagtctatattttatggcaatataggccttgggtttatagataccatgttgagatcttgtagtcattgtatgtgtcctttgaggtgcagcagcttgaggaatctcagatgttgaagctacagcaggattgttattggtagtatgaatagatgttgatgtagcactatcatgaggagattgaattgctggagacatagtaggtgtggtgctgggagcatctgaaggggacaaagactgagatggtgctatattaaggctgttgtagtgtgagtttgagtttgaagaattagcaggtgattggacagaatcatgggacttgggaacaataggaggagttacattagtaggagcataatttggactaaactgagtaaaaaattgagcagttagaacagaagttgaatcttgagaatgtacctgtgatgagttgttgttgttggttatggtagggaaatgagattcattgaacaccacatctcgagacacaaagattttgacattatgattttcacacaaataacccttgtgtttgggagaataaccaagaaagaggcattcctcagatatgtattccatcttgtgatgagagtagggcctcaaatgagggaaacatgcatagccaaagggctttgaatcttgtaatcaggttgttggtgaaataggcattcattaggactaatattgccaataactagagttggcattttatttagactaattaggatttttgccccctgaactttgacatataccaaattatgccccttgaacttttaaggtcgttaaaaatgcccattgaactattg

SEQ ID NO: 51516 - DNA, 1094 bp, Cannabis sativa
gcatcagtctttgtaggtggtggcttcacttcaggatacatttcagcatcacaagcttctcctccaattgtctcacaagcctcagctggaaaaacacttgttttgttttggggtaccaaagaaaaaaatgtcattagtattacattccatttcattaccaaaagaaagataaagatgaggtacttacgaagtgagagagctgtaatcaactgtggtgggagtatcgtttgcagctgccgagaatggtttgagttgaagttggagaggcctgaaagtggaaggtttttgtagcttaggaaaccatggcaataagggcaagggcagtgggggtttggtaaggccaaatggtagtgatgatggtggaaggttgagggtagcttgcattttcatggagatctatggtgagagaccttagagtatagtttgtgtgtagccaatggataaggttatggtaattgactaattgagttgtgttgtgtgtaaagatattttgagacaagataagcttggattggagtttccctgtttgactactcatcataacatacatatatatacatacatacataatataatgcatgcattattgaaggggtcatcacatcacatcacatcacatcatatcgtttgtggactctcgatcagtgaaaaattacctttaaacgacaagacgactgtgttcttttgcagaagacgacacgcaatgtaatattctcccatcgccaaccaacgacattacattgcattgcatctttgatcaagattatattaaactcgcataatatttcttgtttttgtttctcggattaatttcattttctccttttaaaattatagcaacgaagaataattcatgtaaatgtgtatagcaccctcacgatggaatgtatcgtaaactcgttaaatataaaaaatgatataatttaatattagagatcaaatatattttaatttaataattattatgaaaattattaaataattatattgagttagtgctagctagatactactcagtaggagtactacgtgataacaatatagtttttggttacatttttaatttgtaaatttttaactgcaaaatcttaaaa

SEQ ID NO: 51517 - DNA, 936 bp, Cannabis sativa
atctgatgatattgaaatgagttttatttagggcacaaaacccaacattattaattagtaaatttgattatatttaaatagattttatttagggcataaaattccaacagtttgtcctcatgttcgagggacctggttagactgtctgtccattgtctaccagcttataaacgctacctaacttgtcaatgagccttccttgcaaagaatctcttataagatcttggccccttccggcagttctctcattgaatcgctttatcaggtcactggcctccctattacggtaatttagttctgcctaatgggcccaaaggatggcctcctggtcactcatccaccttatggatttgcgtctctactggacaaaaacatcacaatcagcagcgcgtggatcttcttgtcttgtctgagtcacctggcttacagcttctttgagcctggccagttcaatatcatctccaaggtctaggcagggttcgccaatggcaggttggccaacacctagcctagtttctcctgaataaactcttgggacattctcattagtattatgagcaagttgctccacgttgatctactcttttgtatgagatcttgtgggttgtcccagccttagaggaacgacgagatcaataagattcacataattggctgaattgatagtattaatcagattagtaggaccttttatggtgggaggaacaggaatattggaatctatcgtcatgggatcctgaggaggatttgatggagcagttcttctagttagaaccatggtgattagcgagaacaagatggataaaactcttaatgaaagcactaaaatgttgactaagaatttggtcatctgactgcggttgtaatatcccgaaaaatatactgatattttaattggacatattttaataaatatgtgattatgtgggtattaga

SEQ ID NO: 51518 - DNA, 1000 bp, Cannabis sativa
tgaaaatgagggcaaaaaaaatgaaagagattaaaagtatattgacatttgttctttaaaataaggagggtttactcaaaatagattttgaaatttgaacgtattcatcaccgactgtttaaaataaattaataagtatacagagaaattaatttatgtatatattttgctaggaagtttgaaaagaatcatcgtattctattaataaaataataatccttaattaacagaaatataatattactttatcaacaccacttaattaatactaacacgctaatatatagactataacagtaattatgtcaaattaatattgttgagctttttgagatagtagcatggcatggctttattgtacaacaatataacatagcacgatatagaatactgttagttatgatattaatttgtgctggtacgatgtatcaatatataatttaatatcgggtcctatataatttaatataatagtttagtattgttaatcaatcacaaaacgacacgtcttaaggtgctaggcagtactgtacccaatagtaatgctagcatatcacacaatataattattataaatatgaatgagctgtcattattataatttatatatataccaatctgttagacttataattaatacgatctaaatgtaaacgcaagatccaaagttataataatagaaaatatttatgcatgcacaacaaacataattaatgctaataatgttggtcctgctccaatttgttgggctgcaagttcttattttttaaatagccaaaatacatttgctattcgagaacattgtgagtaacaatagccaccatcttgagggaagatattagaaaacattgtcttacatagattaaatataaaagtattcagacatatataagaacatgagttactccactagtcatcgcaaattggttttaagatggaacccataattctcaacaggcccaaacctactctacctacccctagaattggccctgccgaa

SEQ ID NO: 51519 - DNA, 2307 bp, Cannabis sativa
aaaaaaaaaaaaaaaaaatgtatcatgaatactttatgatagcttttggttggaaagaatgaaaatatatgaacagaaatattaatagaaattggaataggaatcaaatttaaaatgcataaaaaatttattgaatttttttaaatttttgcattgaaatggtctttccttctatagaatagtcactccaccaaaatgatggaaaggccattctatatcgaaatggtatactggccaattgttttaaatgcaaccaaacaaaataatggaatgaaaattattttcttttcattctattatatttcattacctccaactaaatgtaactaagtaattagaatgttattacaattagtcaaacggaaaagaaatatgtaatatgtatgtttgtatggcaaagtaaaaaaataagaagtcaaatgtaataccaaaaaaacaaggcatgtgtaaaatcaactttattcccatagaaggttaaacataagaagaatagcaaaaaaatagctagtttatcaaaaatgggcgcatatatattttttcattttcttattatcataccattttcttaacataacatagtaataatagtatacgatatatgtatataaactatgctgaagaagtaggttgagagtccctttgatcaccaaaaatacgttgtctgaaatcagaaaccattagaggaagtcctttgcggagggacacaacaggctcccacccaagtaactccttggcttttgaaatgtctggcctcctcttatgggggtcatcctctgtgtttgccttaaactctatctttgcatttgggtctataacttcttgcacaacctacaaattataattatatattattaaccaaattaatcttattttactataattatatgttatgtatggcaagttacctgagccagctcaagcatggtaaattcaccagggttgccaagattgaaggggccaacatgttcaccctccatcagccgcattagaccttctacctgtattaaaacactgtcactttcacccttgtatattgtaaatcatttgtttcatatagatatgtagacgagctatgctgcaccattaccagccacaacataattttctttggtcagcaccacatacaaatttttgtagactgtccaccaattaatgtaaatgaaaaataatatttcttcagaaagttattgcaggatttgaaagcacaagttcctctattaagtgagattaagaagatctagacaattctttgttgacaaaatttacagaatcattcgtcaaaagacaggcaaatgacaaagacaacaagcatacacatataaatagtaactatttcaattctggcaataataatcactgtacatgtacaattagaaaaggttttattacttttcaataaatatttattctatctaattataatatactaccaactaccatttcttatcctcacaaagaagaaaaaataaaatgaagatttagagaccctatgaagttaaagcacgaatcacttttaatagtcaaccatatcgctcaagtatcaattcatgaaacttgaaagcactcataatatttcttatcatcacatgtgttaaaaactcaagcacctaacattttggaagcttgtaatttgggctatgaaagtacaatttccacgtgtcaacaaattatacatttctacaaacaataaagctcattaatatatatattatatatgaacattctttagttacgatcatgccttactggtccaacttctcatcgtcaaaaaagacatgtcaaagtgaattaggcaggtttaactaatcaaagttgacatattcatatcacataaccaatcaatcttgatcctacatgtgtttagtttccattagatcaacttatataattaaaaagagagcaaattaggaaaatatatatatgtttataatatattaccaggtcagaaacgtattggaaacttcttgtttgcttcccatcaccataaacagtcaatggttcctttcttaatgcctgcaaaacgtgtaaaaatttacgcttgttaaaaatttaactaaccatgaacgttatcatatatatatatatatatatatatattatgaatatatacatatatttatatttatatatatatgaaaacaaaacatagaacaaatagagattaaatatgtaataacctgagctacaaaattgctgacaacacgaccatcgtcgatgcacatgcgtggcccataagtgttgaaaattctagcaattctcacctgtggcgttatttaataacacaaacacacagtcaagttaattaat

SEQ ID NO: 51520 - DNA, 1523 bp, Cannabis sativa
  modified_base (1466)..(1469): a, c, t, g, unknown or other
aacaaaggtattctttagatctttagttatacacttataattatatgtaatatattcatctatggaattgaatcttgttattgcatattttatgagtgataaaaaattataactagtggtatcagagccacatttgattgattctttgagaatttagaatttatgtttataaaatttgggattttttttttttttaaaatctgaaaagttaagagtttcgatcttccatatgttgttttagattgtgattttttgagattttcttttcaaattaatgaattaattttaaattagtttaggtgaagctattcatgattatcgctaggtttctttcattttattcttttggctaattgtattgatggtgaaatcatatttggatatatatctatgttctgttgattatatatcaggcctcatatataaaataggtaaatactattttggaccatgtattttacaaaagttattaattggatattctattttgttaaatgacaagatggaccctgtattttctaaaatggtacaaataggaccctgaacttaatttttgacattttttttaatataaccaacctgaaaatacaaacaaatacaaaaaatataaacagttttgtcataacacttttagatcggataattattaaattttattttgacaaaaaatcagttcaaggtcctatttttaccattttgaaaaatacaaaatccattttatcatttaacaaaacagaagatccaatcaataatttttgcaaaacacaaggtccaaaatagtatttaccctatataaatatatgtggcagtagatcaaggttatagttttgtgtatataaggttttattatgtgtattttggcatatttcatatgcacacttattttattttgttttttttgtttttttcggtacacttttagtttgtcatgcgtttcaaattaaaagtgttttgtcttcgaattaattttgggttctaaatttttctttgtgaattcgattgcattgattgtcaagtatatgattgaatgatttacatatttgatgaatgccaaattttataatgagtccactcatgactaatttggattacatgatttttgatattacaatcataccatttataatatgtaattatatataaaaattgtatatataattatatgtagtttatgtccgaaaaaatttattaaagtctaaagttaaagaaagtttagattaattttgttcaaatttgacatactacaaataaaattttaaagtttgtctttcattctaaatgagttagttgaaacaagatgttaccaaagcaacttctcttgtgtagattgctcatgaagaatgttagatgtttgtgtgtatttttctcatgtaagtattgatcggtacaaatgaaagttatattcattttgagtgcatacatacatatggcaataaatatgtgacaattataaggtttccatgtgnnnnatatatacagtccaaagattgacaaattgtttgacaggatttattgtcaatatt

SEQ ID NO: 51521 - DNA, 1396 bp, Cannabis sativa
aacgactctctaaatcaccctgacgaatgccttggctttggttccctcaaaaccttttgttttgactcaagccaccagatgtaaatagaacttttctcagaggttaagtcactaccaccccaaccaaaaccaaaggtaggaggagcagtgaccccaccagaaatttgagtccctcgggacttctgaatatattctactgtgcccttagcttgcagtgccttctctaccataagatcatcggtagtcgcatcataagtggtaatcatcaattcatgtattattttgggattcaaccccgccagatacttttccttattacgaaaatctgttggcactattattaaggctaacctagccaacctatcaaactgagtcatgtattctgtaattgacatattctccccttggataactgggtgaactctttcctctttgtactacataataccttattatagtacttaacattaaaaaagtcctagaactcttcctaggtaattctggtaacatccctagtaagggacaccatctcccaccaaactagggcatcttcctggagttgaaaggtgtaggaaactctatcattgttagtaatacccatgaagttaaatattttgttcatgactattagccattactcgactttcataatatccgaatgtcctaaaaaaactggaggttcctgcttatgaaacctttcatatatcagttccatacaattaccaacaacaacctaatcctcttgcaatacatgagcaggagctaccaatactttaggagcaggcatcgcatgagcaccctattgccttaaacatcagatttcatcatcttattcatttgttctgtcttgcatttttgcaaatctctgttctcactattgggcagcctgtggtgggttaacattacctcaacaacaaaatatacctctttggcctctacctcgaccacaaacattaggggtattctgtccttcctgatcgccatttgatctgactaatttgccttggcttctcatgtttcacccggcgtccattccattggactaccctacaaaatcataagttagcctggtcagactatgatcaaggttaaaatataattaccactttcttgggaatttaaaacatgcacctattcaactatttgactactaacatgctttctaacaagcttttcttatgtcatactaataaatcaaactactagagcataaaatggcttactgaactgtgaatcgagcttatctctaatgatgattgtacatatcgtgatgatctttgaaagacaacttggcagctctgatagcatattgtaacaccctactagattaggcacgttatcgtgctttctaattactgtgcacttcatttcaaatcaaggggtttgttgaaaaatg

SEQ ID NO: 51522 - DNA, 988 bp, Cannabis sativa
ccaagcaaccctaaagttgaaggcctaccagcaaaaggttgcaaggcacttcaaaaaacaagtcaaggaaaggaaattcttcataggagacctaatgttccaaagagtatttctgatcaccaaagattctatagcaggtttgtttggacctaactgggaaggcctttaccaagttatagagatgaaaagtaagggaacctacaagcttggtaggtacatcaagaacatggagctggttctcctaccaagatattagaatggggagcacctccagaagtactactagtgaccaacttgtatgaacactactcttcagtagtagttctattaactaattaataagaattagtttaaaaaagtctaagtactcatcattcttcaacgattgcctctccattgatcttcagcgatggcctttgcctgacatgtcaagcaagggtagccacttgacatctttaatggacttcttattttgtaagcttgtagaatcaattaatgtcagttgcatagcaacaaagactaatcaaggaataaaaatagtgttccagttcaaatataatgtgtctaacccacttgctaacaagataacttcttaaagttattcttttttcagctccacatgtgtacacccagtagcatcccaagaaaattcccaggcaagatctacaaaacatgatgatttccaagtgaccaagagactgtaagtctgcatgctcacttagggggcacctacatcgtacaaggcatcaaactagcacagagaacttatgcagagaaaatgaaggcttagcgaataatcttaaatcttgtccctaagttagttgaggcatacttcagcttggcataaagaaaagtaaatctagatacttacgtgttatggaaataagaagatagctaggattaaagaccgcttggtcggtcacatttctataataaaaggctttaaggctaaacaaaagtagtgttaaaaatagagtgcctataggcc

SEQ ID NO: 51523 - DNA, 1434 bp, Cannabis sativa
gtggtaattttaagcacaactaatagagttaataaattgttatattatataagttagaaatttttgaagttggaaacttatctacattaaatataagtttttattgacttaatacaattttccctttttcaaattatacacaaaaagaatagtgtgttttatgtgttattcaaatgatgctggtggaatggtggggctttaggccttgagcttaaggtttggaatcaaattcccaatacttatatttggtctctgaactggtgatggtaactatagttggatttgcctttttctgttatttaaaagaggtttcgaaactttttatctagatttatactgagctaaaatacatcaaaattacaaaaaggttgtacaattatctaaatattttctccggtgaagtgtggggttcttgtaaattgaaaaaaaaaatgtttattataagtatctagttacaatgtatacatccttgaatgttacatgtaatgtaatgaactctaaaacaaataaaaaagaaaattgatgctgttcatttattctttccccttatacacaactcataaataaatgtatttgttacattttccttgtattgaatatttggacagcatttgaagtaatggtacaattggtacatggcagttgctgagagtcaatgttgagtatcattagacttgatacactaatagttagttagagtttattttatgtttccctaactaactcttgtttcgtaacagattttgtaatgcaacttgtacaaacactttgatataaataaagcttagcgtctctcttgcacaaacattttgtaactagaacatgatgttgcttatattgtcaacaaattgtcttaatttatccatattcctacacatgtttattgggaagcttataaaaaattatgtaggtacctcaaaggcaccacttctgatggtcttcttattcgacctatgtctcgaatgtccctagttgcctatttagatgtagattgggcaaggcattgataatcaatagtcaacaagtggttatgcaatttttttaggttccaacctcatttcttgatcagtaaagaacaacaagtggtaggtagattctttactgaatctgagttttgtgccttagccaacagagctgctgaaatcaagtggctccgacccttatcaactgaattacaagttactttagctaatgttccagtcatttgagttgataatcatgatgcagcctctctagcagccaatcctatcttccatgctcgttgcaaacacatcgaaattgaccaatatttcgtccgagatcaacggctaaacaacgaacttgacgagacaaactcaaagtggtatctacccgtttcgtttgaggggatgatacactaatagtttgttagagttagttttctgttttcctaactaactctgattttttaatgca

SEQ ID NO: 51524 - DNA, 812 bp, Cannabis sativa
agatttaagtaccggagagagggttgttgcaaccagtgcatcatgtctgcaggatccaaagccatgaacaaagacaatcttatgtttggcaaattcttttgcaacaccatactctttgtatgccaaaaaccttccatctctaagcttaattctgggagcagtgataggtggtcctccaggggagccacatactttaggtggtgggggccttgtggcctggaatgcccatgacaccaaaataactaccaaaattagagaaattctcttgaacattcctgatcatcctgaaaaaaaattaatagaaatcgaaatgattaataatgagaagtgatgatatcttagtgatagaaaagaacatactaatcattattaaatcatcctgaaacaaaagcaaagttgaaaaaagaagcaaatttgaatttcaagaacacatagatgaaatttacagactgaagccaattaatgctccaaaaaacaggaacaagacatactcaagttcgaaagtcaaacaaaagttttatattatttagaattgaatatagttttggtacttggtcatgctttatgtacatcatgacatgatataacatgtagagaactacaaacactagagatacattttgagtaaaatatatagaatgagatgaagagatagaccagagaacagttgccctttccccaaatatttacttctcaataatctggaaaccaattaagtcccaaaatagtctaccgagaatagaatcgaatacaaagaaaaatgaaagcacttaattggaataagtaataatatataactctattgcctagat

SEQ ID NO: 51525 - DNA, 2450 bp, Cannabis sativa
  modified_base (2411)..(2414): a, c, t, g, unknown or other
aaaaaaaaaaaacaactctcttatatcacaaatgtctttattaaatataacaaattgttactaattgattagttaatcattctattttctttatgaacaaagaaaatgttaataatgtgaaagttcatttatttatttttagagttgcttattttggtttagctaagttcttgtaaggtgattgtttgttaactttgggtcccaaaataaaaaattagcaaaacttataataataaatattaaatgtatagaaggaagaaaaaaacaatttgtggaagccaaaataaataaaaaaataaagcttgtcaataaagaaattagttggaacattttgagatttgagaatatgattttttttatttatatttttaaaatgaaatattataatatatatctatatattagtatataattaagtaaatggtccccggacctttttaagtaattttattgatttgaaaagcatatggtactaatggtactagtctactagtgagagatgtcataaattcagagtgaaatttcccaagctaaaattattgtctgcaaatattaaaaggctcctctcataataataataataagttgaagaatttattgataggttttcttttttaaaaaaataaatatatatatatttttaagagagtaatatatgattgatatctagaaaaacaaataggagaaaataagagtgtttttctaccataaaaaactatgactttttcaaagatttatgtacctcttaactttctcttaaagtgttaagtattctttaatagaatttgagcaaaacacataaatttaacagttatgtgataagaacttttaattagttacttttatttaaaattaattttactttgttgtgttatgtgtaagtgtgtgtcataataataagacataaaaatatctctaataatatgtcaaataaatagtgtaatgctaaaaaaaaaaaaaattagtatatgttaaaagttgggccaattatcaaatttaacacacaattaatatatattttttatttatgttattgttatttaatatcaaagagttattttaatatatttttcaaattacaatattactattattattagagcacaaatgcagcaaatgcgctaaatttatgatttattaatattttatgctaaatttaatatgtattttttatattatatattggggttggtcaaaaatatttataaaagatgattagatataaataaataaatttgtaaatttcattatgagagagaaagaattgtattggaaagaagcgatgagatgagtagctagccatgatcaattttcgaagatataattaataattaattttggtttgagttagtattaatgatattaaataattattaatataaatattataattagtaggatttggtattaataattaatgatgggcatgttgtgttgtggatgaaaacatacgccgtacgccttctctaatgtctcccattgcccattcctctcccccatatcccaatccccaataaatttctttcttttttatttttaataggagaattgttcaaaaatattattgctatttagtacctttctcgatgttacactattattggtataaatataaaatcgagtctcatataatttaaaagtattctcaatggagatgctataaacaagaccggccctaggcataggtgggcgcttagagcccaaataaaaaaaatacctttaaaaatatttattttaataattttttaaaaaaaccatttattttcatagtaagggcttaaatttttttttacctattatccatttcaactcaaaccaggccctaactatgaaatttggaataatttacaataaaaaaagcatgttaaaattgactatcttacacgcgtaaataaaataaaaaagacatgttgtgtaacaaactgtttgaactttatttttgaagcgttactttttttttaaaaaaaaataataatttacaagatgtcttaaataactacattgtacactggcatataaaaaattaagtctaaaattatctaaatgtgaaaaataaaaaaagagtgcattgtaaaattttcctatattttctatttttttttaaagaaatttgtattcttttttactacatttgtgtatctaataaacattttagttgcaaactcatattttgtttagcattagcaaaataaataaataaatagcaaagaaataaagagacctatgtaaaattttacatgaaaaaaaatgcataaataaaaaaaaaacagcaaaataattgtaaaactattatattatttatttcaattttttttatgttttttctattttgtttattagagatgatctcaggtcctacgtatgaaatttagtgtgccaaaaaaaataatgggaaaaaaacagaaaaatannnnaaaggaaaaaaaattacaaaaatactatgggccgac

SEQ ID NO: 51526 - DNA, 1586 bp, Cannabis sativa
aataacatagtaatactaacataacttatagatttataagaagaaaaatataaggcccaataaattaaaattgttaccactttaataaaagacatatgtaaacaataataatgtattttatgcaatcattacttccacatcgagatatttagactatcataccaaaataatgcctgaatatttttggttattacaaacctctatagaagaagaaaggaaaccatgcttcagggcatggtgaccagactaattttggagacaaagtcgcacagaaaaataagactgatgtcgaagtccagaagccagagtctaggaaggacaaaaatcatcccagtgattccagtaatcaagatgacaatttcgatgaggtgtatccagtatcaaacaaaaatagtaaaagtctttccatgaacgatcttcaaagaagattgaacgagaaaaaaaaagagccaacaagaaaaagtcaggcctcgtgggaacgatatgagaaatcatatcaaggatcatgtttgtagaagagaatcttcaaatgacaagactcaatgcctagaacgcaaaatcgaggagttgatgaaaatcacagaaaagatctctacaaagcaaaacggcaccatgtcagattctgaagaagaagatataaagccttgcgtgaaaagaattatagatgcgccactgttggagcatttcagaatgcctcagatggaattgtatgaaggaaggatggaccttagggaccacctatcgaagtacaaccgcattatgcaagtcgctaaagccagtgacgacacaaagggtttatgtttttcactaacattaagcaagtccatagaagattggtggaagaggttgtctccgagttcaacccacaattggagatatctacatgaaatgtttaaaaagcagattgtagcagcaaaggcctttgacctggaagctagttccataaccagtgttatgcaacaaacagaagaaagcctgaagaaatacatccaatgcatgatggatgttgttgctaaaacaaaggttactgatgacataaaaattgtagctttaacatcgggactagctaaaaatctttgttgtggggagatctctagcgcaagagagcagacacttcaactgatttcttgacgagagcctaaggattcataaatctagaagatgcatatgttagttttatggtactaaattaggtacacagcgaaagagttttatattatctgattatcattgtaccatatcccaatggatctccaaatgtatgtacattaaatcaaaacaataaaaataattagtttagagtatacattttgaagtctatcagggtatccttaaaacttctcgtaagttgtatccattaatctagatagagatgataatacaattggactcacaccagtgtctttcaaattattcgaccacacacaaggaatagtgtggactattaggataaaacgtataacctttgttcttgttgagttccaacacatgagcaagaacaattgagagagaaaataattttattttctcctctataatttcaaaaatcatagtgtaaaagtgatgtcaaagtattagtctgattt

SEQ ID NO: 51527 - DNA, 1014 bp, Cannabis sativa
aatctaacaatctcaatagttcggggagaatttttaacagccaaaaaagtttaaggcgcatgatttggtacatgtcaacgtttgggagaaaaaaattaaaaaaatactaattgctaaatctttgtaagtaaaatgtaatttctcaaatgtacttctgctctgtttgagcaattggtaaatataaagttacttcttttgaaaaaaaaattgaaaaatgttaaatgacatgtactaccatgtcaccaaatcgaagaagatatgagatattgttattaactccttccatttttattttaatatcattgtaccaacgattggtactacagggagaatcatgttagcttggaagattggattcaaaaccatatttatggtcttgtctactcggaccccccctaagaaaactttctgggtagagttcatgaaaattggggataggtttggaggtccgtgactaattatgggagacacaaattttgtgcttaacgagtcgaaacatgttggttcaaagggtagggcccaatttatctcgttcatttctaacttggtgaaatttagggggcttattaacttacctatgtaaggagataaacttacttgggataatcatcggtctggtttgtaccatgttaaatttgctcttgataaatgtttagtgaatggtgcttggctaacgctgttcctgagagcggtcattagctcctctctgacttgcaactctgatcacagacctctttgccttcttaccggtggcttggaagataaattttaaaagaagctttaaatttgaagaaggctgcactcaagacgataggagcaagttaatggttaaatttgcctggaattcggttattcacttttgggctcctaccagggtcttcaagaaagttagagcaactcgggtcgctcttatgcactggaatagaacacaatattgtagaattgacaccttaattaaagatctggaaaggaaactcaacttcattcaaaatctaactgtgggggatagagatt

SEQ ID NO: 51528 - DNA, 1189 bp, Cannabis sativa
aaaataaacactaattatagtggagtgaagagacatcataatgtttatgtttagcattaaaagagtgtaattgagctaatcataaatcccaattttacatattatacattacaatcagtacttgcaaacttgagaaattgcatcagattagataagaaagaaacaactctgaatacaaagcttagatagatatattaatatgacatgagatatataacatatatatcacaaacatttttacaatcaaggatagaaataacagtaagcagatacaacaattaaatcaaacaacactaatgataattaggaatataatatgatcaacaatgaaggattcattgcattacctcaagttcaagttcatcattgacatcttcttcttcttcttactttgattagtcaagagtagtgaaaaacgagcaaatccaaacttctttctcttacaagaaaattgcttgttacaattttctttctcaggtctcaaagaagatggtatatcaccattttgtttaccaagcatttgacccaatgaaacctttggttttccagaaccttttccagacaatcccatttcaagctcttcgggcagcagcagcttcctgcttagaatttgtccaattgacaatgttggcttcaaaacaggttttgacccatcagtcaccatgtgtagtccattcacatcgaggagacgtgaatctcttcagtggtgagacgggtgagagttcttaaatttggttgagttatgaaccgaagagcgtcttctttgaccatgttcggatctccatctacgtagagcttcttcaactgctagttcccctgtgtttgctgcttccactctgctcagagcttcttctagtgtcttttgactggttctggcttgggggttttgggttttggggttttgggtctccagtggtgagacggtactttgactccggtggtgagaagagacagagaaagaagacagtccaccgtgtcacttaactgcgatttttagacggaggggtgcagagcaaaacggaactagggtttaaatagtttagctgctaaaatttcagttttttgtgattaactgttacaaatcgtaaagttcaggtggtttagccgctaatatcccttaattgattaattataattgattgttaattgtagattgacgacacatattgtgaagggctaagagaaaata

SEQ ID NO: 51529 - DNA, 1589 bp, Cannabis sativa
ctttataggtaacgttacaacacgctatcggtctaaagtccaccactgaatcttggcaccttcttttgggaatgagagtcagtgttgttgagttgatttctttgactaacttccctgagtgcaaaaaagacagcacttcgttgcaaacactatctcccacaatatcccaattatcttgaaagaaaaagcttccaaaaccatccggtcctggagacttgttgccaggtatctcaaacaccactgcttttacttctttagtgaattcagcctgcaaaacactagcttgatctttcaaaataaaaggaccaagttgcactaccttcctctttaccatttttcttgccaagtaaggattgataaaaatctaagaaagcttcagttacctgatcggatttgtctaccacctttccaagttggtctttgattgtataaattcgatttttttgatcttctagctcttatacttgcatgggaaaaacttgagttgtcatctccttccttaagccagttcaatttggctttttgttgcaaaaacgagatgtaattagcatgagtctcaacatagtcttttctggcaactttttcactctccactaactctctgttgctaggattctgttgcaattcctgctgacgttgcaccagattttggtacgcccgagcatcttcaacttgaatatccccatacttgcttctatcgattctttttagctcagccttcaagtgcttcagtttttggactacttgaaacataagagtgccatctattctcatctaccatatttcttttaattggttctggaactcagatgctccctgccatattctgaaatacctaaatggtttcttccctttgtttaattttttgatatattgtaaggattctcgaataatggtcaaacattccttcctccataaagtgcacctcaacattaggatacttgtctagccatttttgattagctagatttctatctatcttagaataaattattgtatccacatcttgtttgttgctccaagcaaaaaaactacccgaaaatttgatgtaatgccctgactctcagggacgccacatgtgtgcttttataaacttattattactaatcttgtaattttggaaaaagtgtggtttaattaaaacctttaattaaattcaaaataaagactttcattttaaatactgtcgtaatatggggattccatgctaataaaattgttttacaactaattacaaaaccgttaataaaagaatatgttatacatccaatcatagaaaagggttgatcgtgcttctcaaaagccaagacaacacggttgatatgtacattgctgggaaacctccaactcatggtcgaacacagtccgaacttccttaccttcaccacaaagcacccgtgagtcacagtgactcagcaagaaaagctacaagataaaaaaaatcatagaaagtgataatagatttcagtacaacagattatacatgtcattaggtcttactctttcaacgtacatatacaattcaacgtctatacgagcaaactcattacaaaattaagagtatttatagctatacataatcaacaatc

SEQ ID NO: 51530 - DNA, 931 bp, Cannabis sativa
cccagtgatgtttcaccctttggtcttttaaagcaaagtcatcgcttgaatttttatgcaattttaaccttccctcgctgaagccgaagtttgcacagtttagctttcctccatggataccaaaagcttgccattccacaaaagctcctgcctccaccacgaggtctcgatcatataccaaacttgtggatggaaataccacttggaagactagtgcaacttcaaccctccctcttggaaggaagagccgcttgaagtccgccatccaaattggtttctacctacaattctagaaataaagcattggcttaaaattcagtcccaaaacggctttcccccgtagaagcagggagatcgcttctgtatttagccaagcctctctcaaaatttgggaaaaacccccctccaaatggccacaaaagtgaaagacacggtctgggtgattggcataaattatgcctcctaaagcaagggttggctaaaaatacgcactcggacctcctcctagggaccaagaaatggtacaggttggattttgagcaaatgactgagattttagaggagttcaaatatctcagctcattcagggggtatggtatgtctgatcactgacgatttcaatttcttacactcattttgccgaagttattagctcaacgcgcatatgcaacctgtttattgagtttttcggtaactgaatattttttttgagcttaagaaagtgatgactgaataaatatcaaaataaaaagtaagatatttttacctggttcaagcgttaactatctttagtccatgagtccattttattaagctcatcgaccgacaactgtttatataaatagagatacaatggactagaacccctttccaccgtgttcctcttgaagaagaggaagcttactaagaatattttggagttattagtagg

SEQ ID NO: 51531 - DNA, 925 bp, Cannabis sativa
ttgaatgcaatagagagaaaacttttagatatcttttcatcttcatattcatcttaatcgtcatcttgtttctgggttaatttagattttttggccactagaatagttgatgatttcttaccgccaatattaagtaggcgtccatgaaggctaacaacttatagccagattggcatctaccatttggtcaattcttggaagtaggaagcaatcctttgggcaggctttgttcaagttagtgaagtctatgcacactttccatgtcccgtttggatttggtaccagtgctggattatctaaccactctaggtaatagacatctcagataaagatgttaaaaaacattttgtccacttcttatttaaaaccttcaaatttgatcgggtcaatgggacgccttttctactgtacaataggtatgtctttgttgatgttcaaaacatggttaatgatgcttggattgatgtcggtcatatctctatgactctatgcaaagacatttgcagagtcattaatggcctccacaatttcatttctttcatttggattaaggcatgtcctaacacgaattaccttggtcggatcctgatcacagattcgaatttcctctacttcttccataggtttaagaatggcctcagctcccactcggggatccaattcatcctgcacctccactaggtgtccttcttttgtgtgttggaccatggggacagcttacttggtggctacactatagcattttcttgcttccccttgtttccatgagcagttctaactctcgcatgatgggtatggaattcgaggcataagtgcctgattgaggttagctgttgggctttgtgccctaaataaaactctattttaatgtaatcttttatattcatttatcaataaagaaacaaatttattttcattacttatt

SEQ ID NO: 51532 - DNA, 717 bp, Cannabis sativa
aaaaaaaaaaagagaaagaaaggtctcattaaactttaccccaaccgcctgttgcttagcagaatgagctaaagcaaagacatcatactacatgacgcccgaatctccatgggtaacccagaggcattcccaaccacctggtccaaaagttcaactgtaaatggggcggcttctttccctaccttgtgggccaagcgcttctctaggacctccacttccatggttggtctagtaggggatagggtgtgaaggctatctgaaatttttgctttcttacggctaagagcacggtggcccgtctatgtaccaatcctttctccgcctcaagacgctccttcaaggctttgttcactttcctctctctctgcatgtcatgtggattgaaaggaatagccttttttagggaatgtgaaccacatggaaggtattttagggagggcggaaggatagtgcggacgaggttggcccaacctcaacgatggatcgtgacgtggatggtgggcccctacttcgaaaacggtagtttcaggcctttgtcttttcctacaaaggctactgtcacccacagctgtagaagaactacttctttccatagcagacctaaatttacctaccagaaattagcatgaagctaaacgggtcggtacgatgcaagatcccaagtctctctctctaatagaggctgcatgcatggtgccaacattttgagaacaaata

SEQ ID NO: 51533 - DNA, 905 bp, Cannabis sativa
ttttggttgcaatttagtttgttccgtttgtttctataagaatttttatataaatttccataaaaatacaaaaataaactattttaaagtattaaaaaaaaccgtaaaaaattatttagaaattaagattttaaaaaaccaaataaaaatgacatgaagagttggcgtgcgtaaataacactgatttaattaatttctttgctaaaattaaaaatgttaagatatgtatttatattttccatataaaggaatattaataagctaagtttttctgacaaaaataaaaaataatgataaactccctttatttttttaaaaaaaatgctaacgtgcatctttcgagcaccatatataagattaagaactacttatggcatcatgttattggtacattttactattaataagacctatatttattttgagttagtaaatataacatggaaaaccgttaatcataaagtgtcacgtaattatatagtgttagatactttaaaatatcaaataataatattttaatttttttaaacagtgagactgcactcaaaatattaaatacatttctgtataataatattttggtacaatcatatatattttgtgtgagaattgctcaaaagtattactgtctagcaccatttttggtgtcatatcgttattggtataattaagtatcaagttctgtataacttaaaaaaatagctttaatttagacaatatcgctaactaatcataggacgtcatttataaaaggtgctaaatagtactagtgtctaatatcaatgctcttttttgtatgcactctcacatttatcatggatcatcctgcccaatgagaaagcttgctcaaaaatttatggaggcgaaaacatataattaataaaataaaattttatttatttatt

SEQ ID NO: 51534 - DNA, 1623 bp, Cannabis sativa
ctggattttgattaagaaactgcttggacaaagagtaatcaggtgcaaatgggtatacaaacataaagatggcaggtaaaggctaggctagtggcaaaggggtatacacagagagaaggggttgattacactaaaatattctctcctgtggtgaagcatacctcaattagattgatcttagccatgacagcaatgcttgacctagaacttgaacagatggatgttaagactgcctttttacatggagaattggaagaacaaattctgattcaaaaaccagagggatatgtcgaaaagggaatggaggatagagtgtgcttgcttaagagctccctatatggcctcaagcaatcacctagacaatggtacaagcgttttgatgatttcatacacaaaacagggttcaaaatgagtgtctatgatagctgtgtctatgtaaggtcatcaaaaaccaaggctactgtttatctacttctgtatgtagatgatatgctaattgctagcaaagatattcaagagattagtcaggttaagagaatgcttagtggggagtttgaaatgaaggatctaggacctgctcgaaagatccttggcatggaaattctcagagacaggaaatataagacattgaagctatctcaaattgaatacatccacaaggttctgagcaattttggttattctgatgccaaaccagtaagcacacctattgctcaacactttaaattgtctagtaaactgtctccatctaatgaacaagaagccaaagaaatggagaacattccctacacaaacctggttggaagcattatgtacattatggtttgcaccaggcccgatttgagtcatgtagttagcattgttagcaggtacatggggaacccaggcatggagcattggaaggctgttaaatggttaatgaggtatctaagaggcactactgatgttgggttgatgtacaaccctgatggaaatgaaccaactgtgaatggctttgtagactctgattatgcaggtgacatcgatacaagaagatctcagtcaggctgggttttcagagtaaacaactgcaccataagctggaaagctaatctccagaccatagtggcactctcaactacagaagctgagtatatctcttgcacagaagctgtaaaagaagccatttggcttaagggaatcactagagaactggggataaatcaaggagccattaccatactgtgtgacatttaaagtgcaatgcacttgagcaaaaaccagatgtaccacgagagaactaaacacatcgatgtaagactacatttcaccagggatgttctagcttaaggaaaggtgaaattggcaaaagtgccaactgaagagaatgcctcagatatgttaaccaaggctcttccaactacaaaattcagacattgtctgaatcttctcaggattacaaactaaatcagtagtccttgttaagtgtctgtaatctagattaaagctttatctttcgtgtctattttttgtaattagagttagtcttaccagaatttcaaccaaggtgggagattgttagttttatggttggtaattctgttaagtcctacccttaatagttaagttggttaactgttagtt

SEQ ID NO: 51535 - DNA, 829 bp, Cannabis sativa
ccataaattccaggataccacaacaaaaatctgaagtgtctcaacagaccacattttattcaacataataaaaaaagaaataagattaggcacccaatatttcttaataacatcccataggaccacattttttccatacttctacattgacctagcatccccataaaacatggtgggtagcttcattttggcctttagaacagcgcatacaggttggattcattgtcactttacgatgaacgaacattgaatttgttgggagccaagagtgacaaacctttcatagaaaatgtttaaattttggggggattttaagtctccacaaaccagtccaccatttttccatctgtgtaccgtcagattgccttagctcttctctcaaagcgactgtaacacggtatccactcttcaccgaatactcttcatttcgactgtagtgccaaaacattttatctttaacctcccatcctccactactaaaacttaaaattaatttggtcagaataaataatgcttgaataaaatcattattccaccctccatcgacatccttcaaatccaccacacgcatttgctctggaacggtaaacttatcatattttttgaaggtgacaagccttggtacggatcctccaacactctcactgattcccctgttccaacccttcaacgatatcccttttaaatgaagtttttccccccaaactgtgccacacaaaagatgccttagatccatacttggcacccaatacatctctattagggaagtagcttgctcttaataccctattgcaaagagaattgggatagtagatacaacgctaagttt

SEQ ID NO: 51536 - DNA, 2213 bp, Cannabis sativa
ataataattgatctttctacaattattgaaggaagtacccaccaaaagcttatgatgcttttgcagatgcatttaatgtgtttggtatatttttcaaaaaaattcagacctctttattgtggtgcataatatttttcaattttaaaagtacttttttagatgtctataaaaaaaattattccctctaaagaaatactatacagagtttatattgctacaacttattattagtggtatagaaataatatttgtgattagttaatgatattttataaaaattattatattattaaattatatgagatttaatatttagttgtttaataataatataatatataatattgtagaagatattaaatactacaaatatttttttgtatttatttttatattattttttttggatgttttctataacaatacttgtaaaatattaattctttttgtagtgattagagttggaaattcaatctaatttaacatttttctcttaattcgatcaaatctaattagtaactagatctacaaaattattattcgatccaatctaactagacatcaaaatctaataatcagaaattggattatatcaatttttcaattagatatttaattacactcttaatttttaatatcaacttaaaaacgaagaaaaatacatgtaaactaaatagcaccttttattttagtttaatactctataaatttattttctttacaagtttaatgcaactataaatttaaaataagtaaaataacactaccaataataaaataaaacaaaacattataaaaaaaaacaaccaacattacaaattcaacctaaaaaaaacgaacatcaaatattaatataaccaaattatatattttttactttttaatattttttattatacataaataaatatagataatcttttactgtatatattaaatgtaattagattgaattagtttttaattagattttaaaattaatatccaatagatctaatttaattagaaaatttaacttttaatattaaatctaatttgattataattgaatagctaatttttaataaataaattagattggaatggtttctatctacataatgaccatgatattggcattgatggttgcctcagcctgtcagtgtgtatgtgcccacacgtacataatttaacattttatagctttattttttttattcctttttattattgcttccatttttttttttttttgataattagagattttatttaaaaagctaactggcaaagggggctacatcccttagacaaccttccacatgagctttcgagcatctagcccaaacagccaaagcatccgcaacacgattgttcactcgagaaatatgcaaaaatttgacagactcaaaacattcacataactttaaacaagcatgaaacacaggataagtaccccaagccaaaggataggatccctcagtcaaagcctgtgcctccaatttcgagttcgtttggataagaattttcaggaagcccctcttctttgcaagtcccaaagccattagaatggcaagcatttctccttccaagacactcgagaccttctcacagtcagtactaatccacatctcttccaactcgtccccctaattattactgctgctaaccctgcattagagagtatcacagaggcatccgattgcaaacacacatgatccgtcaagtttgaagtagtggagtcaaagcaaggttgagccaaggactgggactgaatcgactgagagagcttaggctccatctcgccatatctcggacaaacttcctcgaagatcacattcaagtcacaagagaccccgacaaaattaactctatttctccaccaccagactttctcacaaagacaggccgcaaacaattgtagctccctatcttgaagctttgtccaccatcttccaaaatctttgatagtcctccattgcatgcaatcaacacgaatgccccaccgactcttgaaccacaatgctcttgtgaagttgcactgatagaataggtgatcaattgtttcacttgcctcatgacagaaaacacaatcccttgtatccatatcacaccaacccaattgttaaattagatctcactgtaatatttattattactgtgttacaagatgaagtgaaaaatacagataaaatacaaacagagtacaacaggaaatagatcctatgtggctt

SEQ ID NO: 51537 - DNA, 1625 bp, Cannabis sativa
tttttttttttttatatttttaacccatctcatcctttcgatatttgatagattttgcactttaaaattctgggaacctgaaatcaagaaaaacaagtgtaaaaccgtccaaaaaataacaacgaagaagaaaaataattctaaatagtaatctaaaacttaaatagtttaacacaatataatcatcacatgtacataaaatttttagtcattcattcaaattatgaattaatttattaagaaaagtattaattatgaaatcaatagatatggggatcattatttttttattggaagtgaaggaattcctaaaaattaaacttatcatcaaatactccaattcaaataaatttaactcatatgcgataatcataatacaaaaatttgtattattatttactgcgacaataaacattatgagataacaatattgaaaactaaaaagaaaaaatcaaaagtagatgtttttacttttttcttatatagaattctatgaaaggactcaatgatcaaaattataaatatttgtaagctagaatatagtttagttttagagttttaacggaatggtcaatcatattgattaactaggggcaaaaacacattataaatttgatgttcatttagatggattttagggatgctaccttacgtatgttttgtgcttaattttacctaagtataatattaaaatacaattttgatagttggattctttaatgttttttttatttttttttgaataaaatcaggagatttattaatgttttgttaaacgatctgcaaacaaattgacgcattgtttggtaagagactcttatttctctacagattgtgtgcttcagttggattctttaatgttcaattttgtttctactcaacaattatttggaaatgttttatcttaactttatttataaaaatataagggaaattgttacttattatgcaaaagttgtgtttgattttcaatcttttcctattgatggaatttataaaagttttataattaaataactttcaattataaatgtcaccattgagaagtttaggtaaagagtctaatcaaaccggtttttttttggttagagactctattataaatatactatatagtagtataaggtttttgaagatgagttatttattgcaggaattatatttttctattgcaggtttggttttagttttttaggcagaaacagtagctttattggtaggtttgtgttggactcaagatgtggggttactagttaaaagggtcttctcataatcgttatttttggtcccaactttggaaggtaatataaagtatttgaacaaattgaaaattatttttgctaatattaaagttttattgtctaatgttttttgggcatctctttttcatacgagtcacaacttcaatgttgagctacacggattggctaaaaacctccgcatcttatgtaatgtttgttacctttattatgttaaatttctataagctttcttaaaatatatttatataaatagataatcatgttattattctaaatattaaagtcaaacttttcaatatttaattacctatattaaattagaatttacgtatatatattaatgttctcataaattttcaaatt

SEQ ID NO: 51538 - DNA, 1920 bp, Cannabis sativa
ctgtctcagaatcgctctccactagaacaaaaggatgatacaaaaagacagtcgtctccacgactaacagacaagctgcagcttctccaatgagaggatcagagaagttgagcttgtttgtagccacccacaaaacagattctttatggtccctagctaaagccgcaatgcacatggtgtcgcctccaactttaacatcacagttgatcttgacccaatcgagtggggacggggaccaaataggggtcaaaacagcctcagaagaggaaaatagacaggactcataatctgtgtgacaaaaagatatagagttgatacagtgcttaatgtcactcagaaaattattatgaattttgtcattacgcgcctgccaaatcgtatcaaccacaatcgaagcgtagaagaatagcttatcaccatctacccctttatgacgtaggttccacaaaaagttaacctaatcccaaacacgagcacctgattccaaaattggcatgaccccccaagaggaagagatcgccacagatgaaaagtaaaattgcaatagagaaaaaaagaggaagatcgccacatatgtaaagcaaagttgcaatagagaaaaagatgttccatcgtctcttccccctccccacagagaggacaagggacctcctcaatatgcattctattagcgagaactgctcggataggcaacacatttgaaaggatgctccaccaaagaactttgtgccgctccaacactttagaattccaaagcttattccaaagtgtcggtgccacattgcaaaaaggagctcgttcaatggcttagacaaggtaggcagatttagtagaaaataaactatttgactctttcgtctacacccatttttctttgtctctttttcgtctaaaatccacgggtcatcccaaatctttgtctctttttcgtctaaaatcagtttgcaagccccttaatttcttaataatatctttagatcgcacaatattcttccaaacccacgaatctgagtttttaaaatcacaatctaagaactggcaacctatgagatgcttggccctcaacacccgacaacacagtgaatgctcctcattaaggagatccaaaccccatttggccaataacgcctaattcatttccaaagacttacgaaatccaaggccgccccgagattttgaaagacacagatcatcccaagccttcaaacagatagcatgattcccttgttcacatccccaccaaaaatctcttaccatgttatcaatcttaaatgagagttttttgacagctttgctgtctgcatcgtgtacaccggaagagcaagccccaccgatttaatcaaagtagctcgccccactttggacaacgtttttaatttccatccatggagtttagagaccaggttatccaagatgaagttgaagtctacatctttctagcgagacctaaacaacggaagccccaaataattgatgttacccatggctttattgagtcccagctcctgcatgataccacttttcatacctgagctggtgttcttgctgaaaaatatcgatgttttgagtttattaattctttggcctgaccaatcacaaaatttccctaaaacactgccagaattcctttgcttctactatcgttgcccgaccaaccaaaataaagtcatctgcaaagaacaaatgagacagtcttggaccatccctgcttaatttgattccttaaatatatccacaattcaaggagttctcaagaatgcgtgaaaggatttctgctgtccagataaaaagataaggggaaagatgatccccttgtttaatgccacactcaggaaccaaactattaactttgttaccattaaggtgaagattgaagagcttttagagctttgcttaacagacataaatggaagagctctt

SEQ ID NO: 51539 - DNA, 1552 bp, Cannabis sativa
cctaactaaaaaaagtaagtgtgccactaatgatacaatgcgaatggttataccgtgtggatagtttaataaacactactaattactaaatatggttaaaatttagtagttgtgttaatctattttcaaccaacgtctaatttttctgattctaaccttataaaatttatattatatttgtatttgtgtatcgtatcaaatttgtcacccctaatatacatggttaaaatttagtgataaatggttagagtttgatgtttttaactttgatgtggtatatggtcaaaaaataatagtttaaataatcaaataaataaataaataaataaaagtgaaggagaaaacgtagttgacccgcgaaaaagagtaataacaatttgacaagtcaaccaacgcgttaatttaattttattattaataataattctttttttgaaagatattaataataattcactaaataatagttgtaagtttacactacaccatctaaaaaaagtgtttcaatagacttgtttcgtcataccaaaaagtattttaattattttttgttgtgttataattatttaaaattatttttaaatttataaaaaaatttgaataatttataatattcaaaataaaatttacatatattgttgcatgtcttagtatttttttaatttttaattaagcgggttgtaattaaatatttgtaactcgatatttatattgagttggtaaaaatatgttataattcgaccaaacagcttataaattatttagaattttcttaaaaatttacaaattatcctaaataattacaatgtacacaatcataaaaaataatgatactaacaataatttttagatgtcgaaatagataaagaatttaccagaacgaccctttaaaatagtctactacataaatttctaataaataatacataactttattaatattagagtaatttacaacatatatatttaagtataattttcgattgtaattaaataaatacttaagtataatttttaacagtaataatacgttatatttctggaacatctagtcattaagtgtaagttaatgatcatgtgtgagagtctctaaatggttcaggtcattctattataatttgttatttaaaaattaatttaaatatactaataaaaaaatgacatgtagatataacttaacatttaacgaccagttacctacgaaagttctagaaatataatttaaatattattaccgtaaaaaattaaacttatatatttatatataataaaaaattaaacttatatatttacgcaacaaattactcttattattattgtcataaggtattgaattatatatcatgaggtatttacaataaatcaatttaaattgtaaactaaatatgacctaataattaaccatgcatggcaatttattcacagtagtatttaagaaaatgcttcctttttttttttttttttctttttcattcttttttttaaaaaaactataaacttatttatttattttttataagtgtggtcgtagtaaaattttagagattttttt

SEQ ID NO: 51540 - DNA, 757 bp, Cannabis sativa
gtgtgtgtttacattgtgtgtgtttacactgtgtgtgtgtttcatattgtgcgtttcagtgtatgtatctttaaactgattgtgtgttgcaaatactcataggttaatgatacaccacctaaagccctaaacactatgctagaaacactgatcctacacctcatcaattagtaacttcagcaactgccacacattttttgcaaccacgcaactcagcaacaatggtacaatgtcaaagtcctctcaaataattcattctacactttctcaactgtttgtgcattaataatctcattttatcatttattacagcaaaagacatcctaacacattgcaccaactcaacgagagattatagattatggagatagcatcaaagactatggagaagtaatttgagtggtatggagataataccaaagcatcaacctatagtattttgaaatgttctatgtgtttacatgctagaattgtaattagctacaatattgactgattttattttttttgaagtaattattgattgattaagtacttatatatatatatatatatgtaatcaggttttatgatatcaaatatgttgataacatagacattagtttatcaatttatcaaatatgtaattaggtgtttatatggtagatgttctaatatttttatgatattttatgatgttgataatataggcatatatgtatttatatgccagtgtgtattgtgattcttgattattaggttagagttggggtgcctt

SEQ ID NO: 51541 - DNA, 1372 bp, Cannabis sativa
cataagaaagaaaacacccgagaaactcaataagatgttagctatgtagtctgtacatgtcaaagtattaatagctgcaatagcattcaaagccaatgattgcataaacacaaacaaacccgaattcccaacataaatacaaaatatgttactttagtttttaaaactagacaaaggaactacgggctagcatacaaagcaagttataaatctcagcaccaagaaacaagaaatctaatatttcataaatctctctgaggcattttaacaaacaaataatgttcttaacagaaagaaagaccaggacatattgtattcaatgagagttgggaaaacactggaaaaataaaaaagaaaaacttcaactgtccaagcacattccactatcgaagccatttcagaaattagttcaatacaaccacacaactcctcctctaaagttcctcaaaatcaatccaacacctacaatggcatcactcctaccaactgaagatcaacctctacccacaatttaaatcactcaaaaatctcaatcttgtgattatacttctcaaatggcatcagaaatttccaaataaatgaatcaaagcatagcaaaattctcccaaaatcatagttgttcttcagtaaagccaaaccaccattaccactaatgaatacaacaattcagcaacaatttaagcaaaaaaatatatcaccatcatcaatcttctgtcaacctaatttaatttgtttgagctctctcagattttcatcaacagagactagaaatattaaaaaaaatcccacttcactaccaaagatgcatgaattgcagagtccagtcaagtatgaaacaacatcagttcagataattgcatacattacaatttcacactttagtttctttgagttatttccacaaacacttagaaggcgttaggtgtattttcacataaaattcaagcaacgatcctaacaaacattcatagaaggttacgtaaagagaaatggaagttgattcagcttacgtagataagacggcggcgatggcgatggcgatggcggagccaccagaatttgcatgggttgggttgctatggaggaatcggagtggctgcaatggagactcgttgaatctggtaagggtatattcggtaattcaattatataaacaagcctatgtttcaattaaatttattttccacttattttattttctatggtatttttaaattattttaggaattttttttatttttacactttaaaataatatatttttttttttgtatttttacgaaattttacttaaaactttctattacaactagcgaacctaaatgaaaacaaaaaatcgtataaaaactcctattgcaactagcgttgtaac

SEQ ID NO: 51542 - DNA, 3777 bp, Cannabis sativa
  modified_base (41)..(41): a, c, t, g, unknown or other
  modified_base (1024)..(1024): a, c, t, g, unknown or other
ttgtaatatattgttctttttcaataaataaataaataaanaaataaataaataaataagtaaaggtgaaagtaagttgagaaataagttggggtgtttccccctaaaacacaaaatataatacgaattacgatcccaccatttgcttttgaaataaggtgaaaagaaacggcaccgtttaatggttgtgaagtttgagtggtgcgagtgaggctataaatgtaagaagaggacctactttgtaatctccttcctcgagtcgtggcatcttatcctcggaagattcatcatctggtatgtctctcatcttctccttcagaaattcaacaattttctcccatttttagcttttttttttcctccaacaatcctacccacttctttataacgatttttgtcaagttttttcgttgtgatttcggttgatttggtcttctcagctgaaaaagtcgtttggatctggcatctatctttctcagaaaacctagttcttatcttcgtctgtcatcccatctgtttctccactttgtaattggaatataattctatttgactaggttttagctgagggttagtgggtgggtgaagggctcatgagtagacctgaaaaagctttattttcctcaagtctgccatagatctgttgtacaaacctttgaatcccgttgttgctctgttttcctacaagtttttgagaagaattcagctttaaatttcttgtaataaatatttcttttgttgggaaaaatctcatcttaatatttcttctggtaggttaggcgtttttctgcagaatattcttattgcctagaaagatgaaccattttagttttcagcagaacgcctttatggcccgtgaggagatcagaggcggttccggttccacctttgcatctgatccgatggaccctgttgtttgccctaggcctcgccgagttgggattttggctagcaattttgtcaagtcccttgagattgcagattaagtaatttcccttcatttattattatttttattattatnattattattattattatttatgaccttgatgtttaaattttgaagatctgttcttatttctaacgcgttttcctcttcttttgggggtattttgcagcccattatctgagttctgtgattcaaaagctggggcagatcttctggacatgattctcatgaaggtaaatatatctttccttttatttatttatttatttcgcttttcctttggtttaaggtatttatcttaatcgctagtctaggagtgagtaattcaactgcatccaattgttttaaaaatccaatttatcttattactgtatatgggtattagtgaaaacaattaccagtcttgaaaatgtaaaaatatgcttatctttgaaaatattagtataagtatatattttttgttagcaaggtttggctgcataaaattaaactgagccatctttagtggggattctgtttcttagatacaattttacatttgattgtgcttcttttgtgctacagcaacaaactatgtgctgagctttttctcaattatattatgttttgtacaggaggattatggggcagaacaatccattgcccaggtagcctcttcacccccgtttttttgtgggtctcctccaagcagggctgcaaaccctgtagtccatgatgctcgattcagagaagagaagcttgttcctgttcatggatttccttatccatccccatcgggtttatcttcaccctcatcttctgcacgcaaaggaggatgtgttagaatgaagtttgggcctaatccagccgcagttagagtagaaggatttgactgtcttaatagggatcgccagaactccagcatccctgccatggcttgaaattcctgcaattgtatatagaaggaagctgaatgccaccaccacatttcacaaaaaacaatagtgcacttaaccagaggatatattttttctggatatttttggagagaattgagatctgttactgtaaatatgatgatatgtttttttgggtgatcgtctcactgctaatgtctataagtagtttgagtgtataacggaggcaaatcttttgttcaagagaatgtttgaacatgctaaaggagcaatgctctctttttgtaatataaaatggcttagtagtagagtactagggaaaattgtgtctactatatcaagttttgatggtcactgaatattctgtataaagtcctattggtgttgtagtattggtcatgtaaatgagtattgttaaatgttttagaaactttacctaatgtgttggcatgtaattattgttattatttgtctcaacctattgtttttattttggaagctcgtaaaaaaccaagggcatggtgaatttaatcccattgaatatgaatcttgctgccttttatggatggatgttaagagctaaataaatttgttaacgaagtaggtgaaggtgaaggctcataagatagatattttgacatttggtaccgttttttcctgatagaaaataaaagttcaatctaataaggagataaagagtgtcttttggtaccttccaaaggacaggcataagaaacacacgaatatatctgtaatctatcaaagagtcgttagtgtaatgagagttttagtcaagttattttaccatgttttgaggtctcttacttaactaactgttctaatatttagtagttaagttagttggtgtatgttaattttgttagattttctgtgttagatcttgactgtgtaatctctgttgctataaataaaggacttacctaactcatttgagttaatgcttttattcaatttttgctcctctattttgcttttcatctttttttgttgctctctagttaattttactaaaggtctccaccttctttatggtatcatcgtccatttgactcacatccaaggaattttccacctccgatcctctagctacgcttcctactactcatgctactatgaacacagcctgaaatccatttttccaactccctcttttcatcccttatcctcaaacttgatcacaataactttttatcatggaaatcccaagtggttcccacggtaattggtcatttgatcttgaccaaatcttgttctccgatgtctctcccccggccaatctggttactggtgctcctaatcccaaatatgtgcaatggaaaaagaaagaccaattgctcctgtcttggctgcgatcatcaatgtcaaaacccattttggcttcggttaccaccctcaatacctcatatacggtgtggcgtgcgcttgagagagattctccagccaaacaaaagcttgtcttctccagttcaaaggccaattttctcatctccaaaaagccaacctctcaatctctgactatgtcgataaaacacagttgaatgctgatgcgttgtcaatcacaggttcccttgtcaataatcaagatttggttttacagctgctcaatggtctgggtccggagtttaactctgttgtcgtaggaatcacatctcgcagtgatctactatcatttgaagaagtgcaagcccttcttctctcacgtgaaactcgtctagaacatcataactctattgtcgatctatctgtcaagatgcaagctcatcttgcatttcagtcgtcaagaaatgggaatcctcgctcctatggtcgtgcaactgatcgtggaaatgccaatgacaacaatcgaacttgtacctatggtcgtggcattggggctcactttctttgccaagtttgtcttcgaacagg

SEQ ID NO: 51543 - DNA, 792 bp, Cannabis sativa
taaataaaattttattcaaaaaaaaaatgtaataagattttaattaatattttttatacaatattttttttactaatatgagtaacttgaatatattttgaatttaaaaatttattacaaacttttgttttcttttcttttaaataattttaataaatttaataccacctacaataataaccataattacgtataaaattatatgataataatttaaggatattatatcaagttaaatttcggtataaatatctaaaattttgaaaattttaatttgtaactatttttagtgtataatatcgttcatttgttttataaattttatattttataaatttaaatgaccatcatttaatgatactatattaaattgaattgatatttgataagcatctaaaattcaaaattttagtttctaactattaatatagtgtgtaataatttttcatatttttttttgtttatttttagttagttcgtttatttatatttcacttaattctatctctttttaatattttaatatattaattaattaagatatttatgtacaattcaaaaaattgattcctaatttttttaaagtcgttaaattttttaactaattctattatttaaatatctaatctattataacaaatatctcttaaaaatatctagaataaaaatttattaatattattatacccgaaattcggctggaggacacatgtcaaggtaaagagaatgtgaatcggtccaatatctttttatagaataactcattagttgcgtaagtatcagagtatatct

SEQ ID NO: 51544 - DNA, 2066 bp, Cannabis sativa
  modified_base (51)..(90): a, c, t, g, unknown or other
tttctttactttatatgtatttatcttatcgttttataaagttcatatttnnnnnnnnnnnnnnnnnnnnnnnnnnnnnnnnnnnnnnnntggtaaaataatatccaacagctaaaggctgtccttgatggccagcaagccataaaggacgagtacattggcttgtcttcggagctcatctacaagttcaaggttggtcaccccagagttgatctttcttacatgggagatgcttctttccttgagagcacattggcccaagggagagcactgtatgagagcaggatggaggcagactagacttttgtccagccagagggatcatcatcaaggctgttcgacgaggccatggccagctcacctactgaggaggtggctagccagggttctgatcagttggccgactagcctatagaggctatggctaacccacactttgacgatctgggctatgtagcttctaatttagctccacttgcacctgcacatatgtagcttcaatttattagtatttcagctttattattttattagtatatcattttatttcataatttgtgtggcatattggccttttacttttgaacactacttactttcaaccttagggctttcatattcgtacttttggcctttaggcactctgtttttgaacattactattctttagcccataagctttttactatggatgtgtgactgactaggtgatctttaatcctggctatcttcttattgccttaacatgtaagtatctggatttactttttttatgctaagctaacgtatgcctgcacctgacatagaggcagttttagtagcttatacaaagcattaaaatttctctctataagttctctgtgttagttcgatgcattgtacgatgtgggtttccccaagtgagcatgcagacttacggtctctagtcacttgcaattcaccaagttttatggaccttgcttggaatttttcttagggtgctacttgttgtacgcatctggaattgaaaaaaagaataactttaagaaattaatcttgttagcaagtggtttatacagaacatatttgagcataagcattgttttttattcattattgttctttgttgctatgcaacttacataaattgaatctacaagcctgcataataaaaattctgcttttagatattaaatggctacccctgcttgacatgcaaagcaggggccatcgttgaataatgatgggaggccacgcataaaggtcctgggtattagctctttttactctaatgatgagttggtagaactactactactactacaaagtagcattctttaagctagttactggtagtatttgcaaatgtgctctccattccagtatcttggtaggagaactagctccatgttctcattgtaccttctcatcctgaaggctcccttactagttatctccgtaacttaatacgggccttcccaattgagttcgaacactcctactgctggatctttggtgttcaggaacactctttgaagtaccaggtctcgtatgaagaatttcctttcaataacttgtttgttgaagtgccttgcaaccttttgctagtaggcctacaactttaggttggcttgatctcttctttcttctattttaataaggaattttgctagcaggatgttgtttgtatcctgttcgtaggttgtcctcctgtgagacggtggcaccgactctacaagaaacatttcctcattgccatcagctagagcaaatggagtttgctcggtaaccgtcttcttggtagtcctgtgtgaccataggacctctgggagcaatttaggccaatttccttttgcgtcttcaaggcgcttcttcaaggtgtccttgagggtcttattgacagcttctacttgcccatttacttgaggatggcccagggcaaagaagcttttgatatgccatgtttgttgtagaaatcagtgaacatgtcactgtcgaactactttctattgtttgacacaatcttttgtggatgttcgaatcaacatatgatttctttgacagtaaagttaaggactttcttggag

SEQ ID NO: 51545 - DNA, 1475 bp, Cannabis sativa
cgccccattaaccactaagatggaaaattcccatcccattaggggcgggtccccgcggttatccattcccgcggtataaatttccatctctagttcttacaatgggtaatgtttttagtatgttgttttaataatgtcacactttgcaacataatataattattagacacccatcatagtttctttttcagaagtactcatgttgcatttttaaaatgcgatcgtatcactaacgcattagattcagggccggtcctgaaatttagtgggttatatggtaaaaattattttttggactcttatttagaaaaaaaaaaatagtattttttaaaattagtaaaaaaattgtataattttaaaagggtaaaaatatttttttgggttcctggactaggtgggccctaagcacaggcctagcccgcttatgcccaggccggccctgattaaatcatcctatcataattttgtattaagatgagtgactttttaagaagtcttcgtcttctattactgaaacttaaaaactcaagaccatgtgtatagtgtagtagtagatttctaactctgttggcgtcttttcttgctgaggtcaaggattcaattttataaatcgataactcaacgaaggaagaatgaaatataagtcttctccattcaaactacagtatcttttattttctatctataattgattttaaaaaagaaaaaaaaaacttaaaaattacattaaatatgattttcctttattacaattttttttttaattgaaattaataattacataaaatataattatttgtaaattttttatagttttatgtttaatttttttttaatatttaataattttctataaaaacaatacaaatataataaaataattataaagtattaataatatcaaaataataacatataaataacaataaattaataaatatacaatataaaaatacattcaaaagatcctatagtaaataaaattataaaaatcacaaaaatatttaaaattgtaatagtatctttataattttttttattatttgtgtgcttataaaataatcccaagttaaaggactaaaaagttcactaaaagaaatttttataagtcgtgctagcattagcaaaagtgagccaaaaagcccagaagcatagttttccagtccaatatcagctcaactgtaatattatgggcttaaggcccactaaaaactgggtcggacaatcgatccgaaaagaggacgtgaagctctaggatcgatcgatcgctccaatccaaaaccgaagacttaggactgttaggcagttgagctttgatccccaaacaccatcactcttagagagagaaagagaaaatctagagagagaaaatgatcgcagacggagccgaagacgaagagaaatggctggccgccgggattgctggtctccagcagaacgctttctacatgcatcgtgctctggtaaaacctcta

SEQ ID NO: 51546 - DNA, 2381 bp, Cannabis sativa
aattacattatatatttaaaataacaattgttgtggtaatttcaacacacaagtgtacgtgtcgtaacaagtagtaaactcacaaaaagtgaggtcaatcccatcgagattgtagttaagtactttaaaattaaacttttacttctatttagttgaataaaaaaaagaaaattaaaataagaaaactagtgaaagtaggaagtaaataaataaatggatatttgcggcataaataccacatgtttttaattttatacacttaaataccacatgttctattttgacagaataaataccttatgttgaattttcgttactcatgttactactatttctgttaagtactgatttgacaagtgagataccacgtgtcaatatagtattggttcacatttaattaattaattaattttaaaaaataattaaataattaataaaaaaaataaaatgaaaattagctcatatttattttaatagataaaaaagatttttttaggtagataaaaattaaaaaactgattaaagtaaaaaaaaataaaaattgttactatctctctcttaatcatctctttcttcgtctatctatttttctttgtgtttcttcagatttttttgatatcttgtgcactatcaaacgccctctctcacacacataatgttcacatctttcaagctgccacccaccatttttatcgacgaagaatctctccaaacccaaatacgcaacttcaacattcagctgccacacaaattcataaaccctagatctaagatattaaaacgcaaagaagaaattctaccattttttccggcgaaggttcttggtggaatgggtttgcagcggttttggtttgcaggtgtttgcgttcaagtgaggggttttcgaggagaatctgcattcaaggggtttggttgttcgaggatttcaatagcttcactaagttttagcaattagaagatgaagagaaggaattgtgtattgaatcaatgaatgaattacaacagaatggacatttatatacagactcaagttaaggaactaacagagtacaatcggttaggaggttaggacaaactaactaactccaacagaattaacatccccttaactaactatgacacgtgtacactacaccttaaactctaagactcccccttaaggtggagtgtagatgtcataaaaccccattttatctttgagagcttgaaattgagtaggcagaagtgccttagtgcagatatcagcaatctgctctttgctggaggtgtgagatgtcttgatgatcccctcttaaaccttttgtctaacaatgtggcaatcgatttctatatgtttggtacgctcgtggaaaacgggattggctactatttgttgtgttgccttattatcacagtgcaatatggcagggcattcatgttcaatccccaactccttgagcaaagataccagccaaactaactcacaagtagtgttggccattgctctatattcagcctcgacagaagatctagacacaatcggttgtttcttgctcttccaagacacaatagaatcaccaagaaaaacacaaaaacctgtggtagaccttctggtgtcgatgcatgatgcccagtcagcatcggtataggcttttagtctgatatccgaacttgcagggtaaaacaacccctgcccaggtgttcccttcacatattggaggaccctttgagcagcattatggtgagtagtcctaggagaggcaagaaactgactaagtttattaacagaataagctaagtcaggccttgttgtaaccaaatattgtaacttcccaatgattcttctatagagggtaggatcggcaagcttgtcatcactgtcttggctaagctttaaattaatttccataggggtattaacagacttgcaacccaaataccctagatcctccaatagttgcaaagcataatgtgtttgagagacaaaaatgcctttactagaccttgcaatctcaagaccaagaaagtacctaagttctccaaggtctttcagtttaaatctattattgagtctgatttttaaagcttcaaggtccttgatgttattactagcaagaataacatcatccacatatactagtaacaagatcaagctagatccattttgtctaatgaataaagaatgatccgaggcagaatgtttgaacccttcttcaataagagctaaagaaaatttttcaaaccactgtcttgaagcttgtttaaggccatatattgacttttaaagcttgcaaatagcccttggtggaagctcccccttaggactatacccttgaggtatagtcatatacacttcttcatgtaaatccccatgcaaaaaggcattgttcacatctaattga

SEQ ID NO: 51547 - DNA, 1060 bp, Cannabis sativa
gatagcaaaattacagtaacaagatagttgtaaaaataaatagtttagaatttaaaacttgatacaagtttattataagtggtattaggacctaataatttatttcaaaagaaaaaaaaataattactggtgtttaattatttagtactactacgaagtgacgtcttacaagtctcacataatttaatgtgataatttttatacttgctaattattctttaggagttatgataatgctagacagtacaagtggtgcataatagcaatgattgtaacatatataacaatatcttaacactgttattacaagataacttattgtgatcatgtcgttataattagtgattttttttacaagaattattaaattaaaatatgtaaaaagaaatcgaaaatttaattatactaataaccatataacacctcgttatgataccgaatcaacaccacttagtattttttttatcatttctccaaaattatcgaacaatactactcatcacatatatatataaatatatttagagttattatactattttagattctgtgttttctaaaaattattgattggactataactatattttgtaaaataaaaaatttgacattgtattttctaaaatagtactcttagctcaatttcgatatttttttaatacaattaatttaaaaataatttctagtacgaacagatacaaaaatatatctaattttttcataactagctagattaaattattattaatatttattttgataaaaaactaatttaggatactattttgtatattttaaaaaatacaaggtttaatttattatttaacaaaatagaaagtttaactaatatcttttgcaaaacgcaagatttaaaatagtatttatttatctgtataatatatatatttatatatgaacaaagtttcgtacactctatgtcatgataattaccattgtcctatacattattaccccttcctcttcctttatataacaacttcattcctctcacatcttccttcaaaatcattctcaatattctctctttctctctctataa

SEQ ID NO: 51548 - DNA, 1592 bp, Cannabis sativa
ttataggatcacctttggactagcagctaatcattccaactacatccaaatgaaatgcaaaactgtagctaacattgttgctacgaagttcttcatacacaatcaattgcaaaagacttccaaaaaccattgaatgacttataatggactattgatagtgacatgcaataatgtatttcttcattattgaatgaacttataatggattaaaggcagtgacatatgcaataatgtgttattctctaacatagtagcatatacaacaccttaaaatagcgcagcttgtcattccaaggcaacttaaaagatgcaacacagtagatgaaattgtttctacaaaattcttcatacaactaaatggaattgcaacatccaaaggacttctcaaaaccaattaattagctagcaatggcagatatgtgtacgatgtaattccacatctcctgataaaatatttacacgaacagctcaaatcttgcagaagtgtaagttgcaaatcagaaatgtaattgttccatccttactacataattattttatcaaagcataaagcagcattataatttaaaattttaaatcgttcaatttaagagaaactaatccacaaagtgtcctagagatttatacaagatatctgatttccatttattggcatcctcatgttttttaaagcgaagaataaaaatcactgcgtacctccaaaccccttagtgcgccataaacagtgtttgcctgcaacaaaaacaagattatcatcactaaggctagagctgcaaagcaaaacagcatagaatgacaccaaactacttgcacaaatcagcttacagagatttttaacttaatgagggtttacaccttgaaatcttgctgtcagacaggattcaggatactattcaatacatctgttaacattttatgtgtatataacattgggcttcttaatagaccatctccaacgcaaatactattgttaatgctatatttagcaacagcaaagctaaagccaatatgaattgtgtacttgattttaactataacaataacacgaggatgttaccttgcccatatatgctttgattgaacattaagtccatgtctattcaatactaaatgtaagtgaaataactatctacgaatcagctggatttccactctccttaatatatatatatatatgtgtgtgtgtgtgtgtgtgtgttatatttacataaatatataaaacctcaaaacttcaatttacctcaatggtcacatcaccagtaatcgattgcccgtcattcttagctacatacaaagtatagctctcgtcaacgccaagttgaagctgcaaaaaataagcaagtcagagcatatcacaatcccaagtacctaaagccacttccaccaacataaataataaaatagaaaagtgagagagagagatcgcaactttccgatcaaagagcccaactcacctcttcgatttccgaattgacaacaatcctcaatgttgtaatatcatacacgggttttattcccctcagtaaactaaatgaagaaaacctattagtgtgcttgaaaatgatccgtttgtagcgatcaaaagccgctct

SEQ ID NO: 51549 - DNA, 2470 bp, Cannabis sativa
tctctatatatatatatatagatatatctatatatatcatcttctctttttgggtatgtcttctttgtacctaccattaacaagtttcaaactttttaagcttttggaaactttttgattcatgttagtttgtaatcttttcggtatattgatcctcatgatagttttggaatgtgtgatgtgtgactttttaatagaaaagattcaattttggccttttctatgattcttgactctttgagtcataaagaatacgaggctcatattcgagttttgaaagaaaaacacacattgggatgcaaaacttaccttggccgacctaggaggtcttgcttgagacctggctggccctaaggcttaatcatgggagttggtcagctttagggttttacccaataaagcttgtctgttcatgcctgggtttggtgaccttggccagttcttgctgagtcatgggaccctagccgacccttttaaggcttgagaaccttgggtagcatgggccttggttccaagtggatagccagttttctgtcctcttgtgacttcggcaagagtttatctctgtaggcatatacaaccttagcctcatacgtggtttccttagaaactttgtatgaagcttaatggtgagtctgttatagtcggatgtttaacttatgactcaacatggcttggttcccgtaaggaactctaccttagccgtagcctggtacgtggcccctatagaagctttgtccagttctaatctgactatgcagttctggcagggcgttggcctcatgcatgtgaactgatctcatatccggccttagggctttcatgttcttgctttggcctattagccctctattttcgaacactactattatttagccttaaagccatctatgacggacatatgattaacctggctatcttcttatggccttgataggtaagggtttgaatttactttgtcaagctgaagtatgcctgcatgacttagaggcaggtttagtaacttattttaagccttaaaatttctctgcataagttctttgtgctatttcgatgcattgtacggtatgagtttcccccaagcgaccatgtaggtaagtctcttggtcacttgcctgggttcttccttggggtgctatccatagtacacatgtggaactgaaagagtaacgttaagaaattaatcgtgtgagaaagtggtttggacacagtcggtctaacgtgtaataaaaataaaatcttacacttacaacttagacttagtgttcacttttgaaatcacgtagtggctacccttgcatggcttagtaaagttaaggccaccgctgaagaatggtgggagaccacgccaagaaggtcgtgggtacgagcatttttatgggttcctacacgatgaaacgttagaggaacttaattgacaagttggctagtgggagtacttaccgagattttccttattttagtgttcgggtagaagttctaacttcaagctctcttcgtactcgccaaacttgtatgcacctttacttttatcttgtaacatggtgaagaccttttctatttggtctgaacatgcttgctgtagaggatttgctgtcaaggaatattcttcaggtagtaattctcttgtgaaattttttttcctcgatatatttgttgatgagccttgtaacaccttgtgcgcaaccatgcagctttgagttggcttagtctcttcttctttcccttttgttaagggatcttgctagcaagatgttgtgtacttcttggtcaccgtagaccagaagtttgagagaagactgctggtggatcagactggcaagggaaaaaccaggtggctagccacattaagagagccttgcctgggcagttggatgaggccatggccggctagcatgtgaaggtggtggccgactagattgtggattctatggtcggccatcttgttgaggacatgcttggccagccttctaaaggcccggtcaatgctgtggttggattgcatttgtatttgattggtttgccctcccgcggtagttgctgtagagccttttatgcacttttgttagtagctatacaatttctttcttggaaatgctccttggtggtgttgggataccacttctatgtgttatgttgtgcaagattggacaccttatagccgtccttatgttgttgtaggtgtatccatgttggttgtctaacatgtctgttcttttttaaataggacttagttctttgaaaaactgagtaggtaccaagttttccttggttgtcaaggcgtaaaactagctagttgaatgagtgtgtcgagtgttgtgtcgtctttgggggcttgccttctactatagcctttgagctattgtagtagctttggtaggccatcatcttcttttattgagttgtatattcacctaggacacaacctatgactatctgagagtcatggtgtatgtctaggtcattagcc

SEQ ID NO: 51550 - DNA, 869 bp, Cannabis sativa
tatatatatatatatatatgcacgggcaagtgggaaagaaacacaggaaaaccctaggtgcaataattaacgtcggttaattattgttgatggaacaacatattggatgatgcaaggaaaaagataaaacttatatgtttggctatttgcattaatatttcatttttttttttaaatctgcattaatatttcatgctatgtataatcatgagatttttgaaaccatctttgccaattgcgcaatactatataataatttctctataattaattaatggatatattagatcatataaaccaagctgcaccaaatttacagcttggaccaaatttacactaatctaattgttttatacagttcataatctcatttgcgagtacgtggatctaaagaataggcgcttgtttttgccaaagaaagtgaggaaagaagatatgagttggattgaaaatttgtaattagatagcaagcttattatgaaaagcgctcgggagtagaaaaaacagttttcggtaaagcccattaaagtatataggagaaagcccaatagagaaatatgacacatcatctttaaaacctctaaaagtcggccacaataggatgaatagaacaagataagacttaactcagaccaggccgagataagacattactcgtaaaaggctgagataagcaatactagaaaaattccattttaagtccatcagcattgaattagataaatttttagatgagtccatcaatattattggactagaaaatatttctactccaatattattgtacttaaaagaaagggctatttacaaaaatataggaaaataaagataagttttgatatatatggcataaaaacttaattacacta

SEQ ID NO: 51551 - DNA, 939 bp, Cannabis sativa
gctaccaatatagttattattcccaaaaatacaacttaaagtctcccaatttcgacctatcttgttgtgcaatattatttataagatcatctcgaaaattattattaatagaatcaggcccatcttaccctgtaaaatttgtcccactcaagctacatttgttctgggaaagagtatgcatgatgatgatatatattagttgtgaatcaatcaattatttacgatgaaagatcacctgatcaacaaacactaattcaagaacaatacagggtactcttcttgtgcaaagatcaccaaatatcttcttgtgcaaagaacaactagcttctcgtagctccttcaagctcaaaagaggtaagacaggacttttcacaattaaaatcgatctcattaaagcatatgataagttgagctgacagtttgtggatgatattttgaaaaactctcatgctcccgagatgttttgcccatggtttgctcaatgtatcaccacaatttcactgaagtgtattaatggaggtctggtgtgaagaattaatcctatatgtggattgagacaaggcgaccctctctcccctatctttttattttgtcaatgcaaattctttcgagattgattgaggaaagtatagatgatggcacaattaaggggttgtaactaagtaggggagggcctcgattgtctcatctcttctttgcgaatgaactcatcttagttggataggctaacttgactgaggctcaaggtatgtcgagctgcttggacaaattttgtaattggtctagacaacagatcaataaactaaaaatattcatattctttagtaaaaatactagtggtggtatggaaagaagcattaaggaagccttggggattaaggggccaactgataatattaagtaccttggccttcctttgttttgtattcactaacatga

SEQ ID NO: 51552 - DNA, 1219 bp, Cannabis sativa
gagtaaatatttatttgggtcttaaatcttgtatttttttgtaaaatttattgattagaatttttatttttaaaaatgataaattaaattttttattttttaaaatagtataaaagagtaccataatgtaatttttaattaaaataaaacttaataataatttcatcttgaaaaattatgacaagaataattaagtaacttttcatgctaattaataatttttgtaaaatacaaaatctaaaatactactaatccttatattaaagaaaatttactaaaaaaactaaaacaacttatttgaacacggaaataaattttataaagggtatattataaatttttccaaaatttaacatagaatcaaaacaaacatatctagtaacaccttatgcactatattatttaaaatgcatcactaaaatttatttattttttaatattttacgttaaattttacattatactatatactaatttatttaaaatatttcacaaaaatttaatattcttcaattttttagtatatttaatttatttcaaatatataatatcaatgtatatccataattatatataaaaataaaaattaaccaaaaacaatttaataaaataattttaatgaataatattacatagattaatatagatgatcaagaaataataacgtcattgagcttcatagaacaagaatccctaacaaaagatgggatctcatctaaccaaatcaagttttgagttttctataaaagcaaagagtgcgtggcgaaaaactctatgtgcagcttcactgaccaaccaccgttcattgaagaaacactcttgaaaaactagacatcaaattaacttgctaataaatcttttagcaaagatataagcttattgagaaaaaaagaacccttaaaaaaacattaataaccgactcaacaaaatttaaataaagaccaataataagaacctacttcaatgctataagtagagctacaaattctgcttgaacaatacttgaaaagcaacttgcaatagacaacaaaaataacattaaatagctcaaacgagaattgccaaaaaaaaaaaaagtaatagagtgggacttgttcaataactgaacacacgaataagacaaaaaaataactacctattaatggcttacaaagacaatctactacagaaccaaatgtatcccttgccatagctcctgctataattaattatataggac

SEQ ID NO: 51553 - DNA, 1005 bp, Cannabis sativa
tatatcatattaaaaccacgaggtacataaatattatataaataaattaaactaaatatgttaatcaaatattttagcaactaccttttattatatatgtgtttagtcttgatctgtgtattaattagatttgacatatgaattgatgattaattagttagtggtgtttgataatgatattcatacaactaataaagctcattgaattgaagtatgcatgcatggtcatcatgaattgaaaagcaagttatttaaaatattatatcataattattataatttataaaataatttattttccaaagataattaaacatatataaataattaaattggtgtctctcaatatatacaaaaatatataccatcaactaccaattaatatatgtaattacactttattagttcaactagtagatttccatgaaattatttaagttaatttattatttttcagttttaaattatacctttcacccacccatataaatgctttttgaattttcaattgatatatacataaacctacttgtccaatatatgtgaattgatacaatatatatgtatatatatttggtgaatagatctcccactagtatatatatatataatttgactagagagaccaaaaattaataatatcaattggtatattaaattttgtcccacattttatatatatgcaagtaattatatatcatgcatatataaatggaaacttaaaagagaaaaaaaataattaaataacttttggatttctcaaactactttgtttaaatattgaatggaaatacaaaattaatctattcatagtaaaatgaaaatagtgccgtttagtattcatgttgacataataattttattaactcatctaaaaagaacgtgtacaaatagattgaacaaaaattatgtaaatcaaataacaaaaatgtaaacaatcagattgaatacagactgtggtactgctccaaaattttaagagtattagctcatagagtatcaaat

SEQ ID NO: 51554 - DNA, 632 bp, Cannabis sativa
ttgctcatttaattggaatttttgtaggttggccgaccatggtgctattgcatggggttggccggccaagagtgtgtcgttgagggatctggcaggccatagcaaccttgtggaaaggatggtcaacaagtgttgtattttgacactaactttgactttgttttgctgctaggctttgataaagctgagcatttcgcatgacaaatcctgagggtctttgtgcgctcttcgagagtaggtgaagaccttggaggctgccctccaggtgaaggactagactatctttgagatggaggctctcagtctatagaactggagtatgatttctagtttggagaccatgcttggtactaggaaccataaaaacaccacgacagctgctaccatctctaggttggaggctgaccttgatgggtctaaggagaagctgagtgtagcccttattggccagcaggccataagggatgagtacgttgacttgtcttcaaaactcatctatgagttcaagctgcacaactctaatgctgacttgtcatacaagggcgatgtggccttcctagaaaggacatttgctcaagggagagcgctatttgagacccggttaggatcagattggactgtcatccatccag

SEQ ID NO: 51555 - DNA, 1074 bp, Cannabis sativa
aaaaaaaaaaaaaaagaatcacttcatctcgtatatagattgtatatacaatagattatacatgacagataatttaacataatgagactaaattgagaatttggattacaaattattatcatttatcaattatcagttacattatttagcaaatttagcattgagaggtaaacatatattatgctgtctgtgtctggaatagggaatttcatccctttgttgctgatgctgccattagagaatatatatgagcctttttaattgtaacaggttttgtgaagttatgaaatggatccccttttaaaaagaaaaaaaaaagaaaaaaaaaaacccttttgtgaaattgtcaattatacattatttagtagtccaacttttccccaccttttagcccttttttcattgttgacttggcaagtttccaaatattgtgtggctttttctcatagtatacacacaaagatgatataactttaattgtctgacaaaaatataacataatttcaaatgaatgggttaccatttcaaaaaatgggttacaagtaggggtaccagataactctgggtaacccttttctttcttcttcttcttttcaaaactgtggaacgaaatgcaaataagagccattgccaggtccatacaaataacaaaatgggctgttatttcaggaaaaaaaaaacaaaaaaaaaaaatgggctattaaagtatcctaggtaattttcaattttacaataatatgaggatacttttttccaaattttaagaaaaaaaaattcacaaagaaaaaattacggacaaaaaaaaaggtaaataccaaaacataatcaatattaaaacaatactaaattttgtacaaaaatatagaaaattaaaatccaattttttttttctgaaagccaaaactattttaataaaaaaaaaacaaaatttttacacaaatcttataattaaaaagctgtaaaatttgttatttcctgtatattgaatgccattagtttgtcaagcgtatggctgttgggtatcatacgggtattgttggttatcatactggtattgttaccaaataattaaga

SEQ ID NO: 51556 - DNA, 1169 bp, Cannabis sativa
aaaagaaaaataagcacacattttgattttgatcccacaaaattattgttattgtatatataaatgcataaatttaaggcagggattgatcggtgaagtttggtaatgcaataatagcgcgaactatcttgttttgtattgtgtgggagtgtgagagaatatatagctaggcttgcccaaatttaactgcctgaaattcaatgcattttggtcaaagcaaccttcaatatcggatttgtatacagtaacataagtttctcactcctacaaataagctgtttatgattactcccatctcactcctctcttctccatgtctctatcacaaatattggataccagaatatataagtgacgcaataagcaataagattgattagtaatattctttaaaagttatttatataatatttaattataccaatagcagtatgatatcgagaaagctgctagcaccaataatacattttaacaattctcaaatatatataagacaaaattatggtaggacctagcgaaaattctttatcgataggaaactatttttttacctttgattttagatcttgtgattattatgatgtaaggtatatactctataagattacttgtatacaattaaaactttgtacatattataataatatttaataatatatttattaaaaaaatattaataattaaaaaatttattaatttttaattttaattattattttttaaaaaatcaatttgaattctttttatataagtatttatttaaaaaaaataattttacttacaaattttgttatcaatgtttttttatgtaaaattaataataaatacatttaaaattaaatagataaacaaaaaacaacatcctatgttgatgaatttttcaacttatcacctttaaatatatgacaaaatagtttaattgtttgttctaactcttgttattttatatattcttaagctaacaaaaattcatatgtttgttagctctatctccacatatttattagtgataattacataaggcaccatttttgtaaaaaaaaaaattacagttttacgtacaaatttttttttacacttttacaatttttcatataatacgaaaacaacaagaaagctatataaaagtaccacgaaaatagcatctaaataacatcaaaataacaaca

SEQ ID NO: 51557 - DNA, 2227 bp, Cannabis sativa
tctctgtcttctctgcctttcttctaatatggtatcagtagaaacatcttcaagaacccattaaaagcttcttcaagatcattcgaaaagcttcatcaaggttccaatcatggtgagaactcgagcgcactcttcagctacttccacagatcctcaacaaccagtggtcgatgcttccaccgctcctccaccatcaaacgcttccgccggcaatctgcctcaatctgcaccacccataccagaacagatcagatcagatccagttcaacgtcctgcgtatgaagatattcgatctccttattacctcagtaatgccgatcaccctggtcttgcattggctactcctctactcactgatcgaaattttcaaccgtggagaagagacttcatcctctcaatcggtgcaagaaataaaactccttttcttgaaggtactttacctcaacctttaccctcagattctctttacagttcttcgactagatgcaatcaaatggtaatgtcttggatattacattctgtatcacctgaaatcaagagcagtatcatgtatcttgatactgcttctgagatgtggacagtcctaaacaaccgattcaaccaaggaaatggtccccgaatctttgaattaaatgaatccttgacttaccttcatcaaggagaagaatttgtcagctcttacttcacaaaattaacagccatgtgggatgaaatcaaccagttaaggcctcgaatacactgcacttgtgcagctgctgctcaatcccaagatcaccttaatcacgatcaagttttacaatttcttaaagggttaaatgagtcataccatgccatccgagatcaaatcctccttcttgacccatgtccctctctcaataaggttttctcaatggttattcatcaagaaaggcaaagaaccttaggcactcgacccccacaacccctcactgcagctgcaactcataccagcagtaccactccaacaactgaaacaaatcccgtggcaaatgcatcttccaagaacaaaagacctaggcctcactgcactcattgtcaaaagccgggtcattacaaagacaaatgttactttcttcatggctttccacctggctatggaaagccaagaaacaatgacaacaacactcctcaaaatcgtaagaatgatggagcttccacatctcggaacacccctcaatcctcacaagtttctgccaacaccactgaggaagcaccattaacccatgctcaatgtcagcaaatcatttcaatgcttactcagcaacttcaacccactgatgcttctacctcagatgggccaaaaatcaacaatttttctggtaaacccgatcccttatctcccctttcctggatcattgatagtggtgcaactcaccacatttgttgcaacataaattgcttctcttctatacagaaacctattactaatagatctgttactttacctaatgctacaactgtcaacattgaacttataggaacagtaaaaataaattctgctataaccttatataatgttttatatgtccctaagttcaaactaaatttactatatgttagtagcttaatcaatgacagttttttccatcttcatttcacttctaaccattgtcaaatccaggacccttctcggacattgaggattgggacagctgaaaaatacggcaagctatattacctgcagcaagacaaacttcacaatcacatttccaattcagttttatgtaatgtaaacacaaaaagtgaccaatggcattcacgccttggccacccatctgtactcattacaaataaaatcaataaacaactgaattttcctactaatttcagcaacaataatgactgtccaactttccatttatctaaacaaaagaaattgccttttgtttcacataacaatttttcccaagatatatttgacttgctccatctagacatatggggaccctatcatataccttctattgaaggatacaaatacttcctaaccattgtggatgaccattctaggcacacatggttatatctccttcgagcaaaatctgatgctcccaccattattaaaaatttcttcacttttgtacaagttcattacaaaagaaaaatcaagtctgttcgaacagacaatgcaaaggaattaatactcaattctttttatactcagcaaggaacaaccaattttaattcctgtgttggcagaccacagcag

SEQ ID NO: 51558 - DNA, 1107 bp, Cannabis sativa
atataaaattgttaatcttcaaagagcactagggagggaggcagccttttgcttttcccatcggttaagactttgtagtttgtactaatataaattatgagaattattaaaaaatattattgaattagtaatttttttttttttttgtattatataaggattggtgtaattaaatgttgagtttcatataatttaagaaaatatccccatacaaaaataattattaaaacataaaataattaataaaatatatttataacaatgaataatattctataaatgtagagtataaataataaattataaagattaaagaagctttaaaataaaaataataaaaaaaaaaagtatgaaagtgtagcatatttttggtaaagttctttaaatttttaaaatttatctagagaagcttttgtgagtacggtaactctttaaaaaccctctcagtaaaaacatcaataatattaagtagtccacttcaatagaagacaaatcaaaataaacaaagttctatttctcatttctttttttagggaaacaattcatatttctttttttttttaatggaaaaattatctatattaatcattaaattctgttattatcaaactaggtaataaatcagttggaagatacttcaagctaaaacgatgaccagaataaaaaataaaagctctaacaaaattataaacaatcatatttactgatcgtttaacataaaaaattgaaacattacacaactcactcaataaaattttacaatcttgaataatacaactaaacaaagaaagcataacaatagaactatacaaaacttatacaaccgtaagacagtcaatctccatgcttagatgcttccagctctttttcttgatccaactaaggaccttccttgactgatcttaagaactcgacaagaacaaggtcaatgatatcatggttgaacaaagaacacccttctaaaaaagacctttgtcccataactatgatttttttcaaaaattattgcatctatattgaccttgatgatattaattggtggaacaatccaacactcaacttcgtcacccgccatgcataccaaaccaggacgattctaaattagag

SEQ ID NO: 51559 - DNA, 1143 bp, Cannabis sativa
tatacttgagtcatcttgcatgaatgtagaggtgagacaacagcgaccaggaaactaggaaatccctcgtaatgatggaagaaatcctgaaaaccaccctatgtctggtggtcccccctgcaaggcatccacaaaggccttttcacatggacagagagaatatgcacacttacctaagttggggatgtgtgactattctcttttgaagaagaagaccaatgcgagatgagttgcgtgaagcaagttcaagtagaggagaattgcaatcttacagggacagtaggtcgattggaacaaatagacaaacatagctaatggtaaccatattgcaaatcaatcccttgagaatatagtcctctcctggagtttatcaaaaaaatcatcaatcctgggtgacggatactcattcttaattgtcaacgtgtttaattcccgataatcaatggacattctagggatccatccttctttttcacaaacaaaactggagctctcagggtgatacactgggttgggtaaaccctaaattgagcatcccctaaagttgtattattagctccttaagttttactagagccatctcgtatggcactttcgaaacaggttcggcctcaggtgccaaatcaattataaaatctatctgtcgttgtggcagtaatctcggtaactcttcaggaaaaacatcaagaaaatctcttacaactctgagcacctcaggcccaaatgtttcaagtctttaggagtcgattacaaccaataaaaatccaacacatccactgtgtagtaaatctttagcccttaaagctaaaataactggaatttgagacccttgaacagatccaacacaaacaaatggatcttcgccctctgggtgaaaagttaccatttttcgcttgaaatcaatattggctgaatacttggacagaaagtccatcttaagtattatatcaaactctgttagtttcagctctactaagtccacactcaactccctattttccacccaaactggcatagtcctaattcgccttttggatataactgattccccgctaggcagtagggttccaaaccctctctcaataaaatcacaaggcctacccaattgattaattactcgcaatgccacatatgagtgtgtag

SEQ ID NO: 51560 - DNA, 1652 bp, Cannabis sativa
tatattggaatcttcaacattattaatacattaattacacatacataataagattgataagtgattaggtgatgatcaagttccaaccaattacataccaacgttgattatcaaaacatgtaacacatatatagttatatgggataattatggttaccaattaggatatcgttcttgtatattacataaaaccaaatctagcttgtaatattgtttcctaatcttacatacatataaggtgttttcttcttaattattaattattgcccttattcatgagcttgttggttgcctgtacacgacttgatcttgtattttaatgaaattttgtcacatatatttcagattttttgtaacaaagctagctagcaaccataatataatatatacagagaaataacccaaaaaaatccaaccctttgcattggattaatatattaacggatatataacattaatccatcaattttttcataacaaatatttacaatttaatttagcgacttttattgattgattacccttcttctcctcttctgcctgtactacataacaactaccctgaatgaaacgcagcgtttccagttactcctaataattaatacggcgtcgttgcagttttccttattaggctgctgctactacttattctacaataatcatcatcccataaccgaaccacattgccgttaagctccgtcaaatcctggtaacggtaccaactcttctcatccaatctcctcttcaacattgatctctcccaccaaccaccaacaccgcagttatcgtcgccacaatactcctcaaccaccaccgtctcgactccgccgtcactctccgtcagctcgccgttattaatctcgtaatacaaactgaatttccgtcccttcgtcagaactacgttatcagctccattatcttccgccacgtgtccagaaacagaagcagaagccaaagccgaagccggctcagttggtggcggcgcagacggagtgattgagcaccgatcatcacacgaaggagatactcctggtggtccgtctatggtggtggctctgattttccagaagctaacggcggccgttaagacggcgacccacgtccatagattattaacgaaggtgaagaaaccaaagctgacgtaattgaaaacaagagcttcgagaggggaatccaagacgttcatttttctctttctctctctgtgttttgtctagtgagattatttttgagagagaaacagaaaaatactttttctaatttatggttgagaattattttttgttcgttgttgtttttattttggtggagcagttgggttatttattgaggtgaaggaagagaaagtgagagaaaatgtgagccgttggatcaaacaagtgggatttaggatccgaatagagatgccgggaatcgagagccaagatgccgaaatgctgatcgccaaagttagtagattcgaatatatgtataaatttatcccttttatttcttatacaaaacaaatatatttatgattagttaggacacgtggcaggtcagaagtttgtcgttctattcagcttcactcctctcatatcatatatactacatagccacaagatacgatgtagatcaaactatatatggctaataatatagtgaagttgggg

SEQ ID NO: 51561 - DNA, 1119 bp, Cannabis sativa
ggatctttcgagcagaatctatacgtgattgtccgcacagatcttcattatctaaaaatacgaaattttccgagcaaggtagtttgtcataagaagatcttcagagatatttttcataaatattttagcactaagtctcgatcaaattcctaattttgtgggattgacttgcaccgacaaaaaataataggaaaccttcatagttttcctatttagttttatttgttatgggaaacttaattattgaatttttaccctataaataatggagtcatttcattgtccaggagaccaaaatctgaggttcggttcggttcttgagagctcttacgctgtcaaataattgcaagatttttcattaagaattattaagaaactcacttggctagctccttgtgatctttataattcttcgaagtagtataagaaaaaggagagtaggttattaccataatcaagggaccgaacctctataaaccatgtgatttccttaattatgttatttatcatctattatttcatcactttaattgacacaacgtcgttggctaaaagtgaggtcaatattttactattaccataatgaaggagtcgaacctctataaattcttcattcttatttgcttaattatattatttattatctattatttgatcactttaaatgactgagcgtcattggctaaaaataatgtcaacattttggtatttttattgagagcaaaagaacacaattttgtaattctgattctccacaagttatcatattaatggttctgagtattaggaggacccacaccactctttcaattgatccaatggccagagatcctaatgtgcaaactcttgataatcgaagagatccagtagtgataaatcttggtccgagcactcatttgcctccacaagctccaccgaaaggaggacggggaataacaacccctctgataggattcactccgagcacataagaaactgggaccacctgtacgcacaatagagaaaataggctggataccggagatccaccaatcggagagcctcgagtggagattggtaatatttctttaacatggtaatattttttaccacaatcgatacaaggacaccgaatttttt

SEQ ID NO: 51562 - DNA, 855 bp, Cannabis sativa
aatttaaattttgggattcagtggaagaaaattgatacccacataatattccatgattcccgctatcctaagccgtatcctcagttcgtaccacttccgttcttttacttattttattcggattttgcttttttccttttcacgacgtcgttttgattaacaaatattttttattttgcatttatttatttttcatggccaattaatcatacgacaaaaaacatctacatcaatttctctaactgataataaataacaccaaggatagtttgtaaaattatagtgtaattattgataattacatcatttaatttaatttagtatgtttggtttaattatatttttattatgtaattagagataattgagtgtaattattaaaaattttatatttagatattagccattaaaaataattagtattacacgaatatatatgatcaatagttaacatttaaaataaaaaaatttagtaattataatgtataattacacttaatttttattttataaatgaaaattaaaaagtgtatgtaattgaaatccctcaattatttttaattaattatagtcaaaaaatatgttaaattatttaattatcttcaattacatagtaactttttaaacaaatccatatatagtgcaaattataattattagattgtgtgattatcaccttaataaattccattacctaataattatatagttaatttcaattccaaacacaacaatttttttaaaatttttctttttttataattttttcgtttattataacttaatgcgaatacatttttgtacagaaaatattttcgaatatactttcttattttatatatataaataaatata

SEQ ID NO: 51563 - DNA, 884 bp, Cannabis sativa
actgaaaagagaaaacatattaattaacaattatgaccgacttatagccttatgcctaacatatgttgtatctaaatgtatcgatagctaataatgcaagaaaaatataatttttcagtaataccattaaagtgtgactaaaagaacagaagagatctaattaactcataaggaaatagcttattcatataccagatctatcctacagagtcacagtccatgcaaaaatttcaagcgtaccacatcagatgcatataaaccaactaaatgtcattctgctaatgcttacaagttgtataatgtaatgctagtaaaggagtgccaagagtatataggcgctaaatattaacggaacaagtaggccaaggaagtagtttgtaagatttcaaagacaagattgcactgtctccaattatgcggaggaaagaattttattaattcaattgacaagatttgcacatcccagcattggatgatatctcggcttgatgagttaactaattaaagtgactaacttagcttcagaaaaaggtcagaaatcaataatcaaataaataaggctatctggataaatttttattgtattaaggttcacccacactgccacacacaccaggaaataagaaaagggggctcatcataggttttaaagctcacagtaaacataaagagaagaaagagcaccaaatcttttccttaattcaatgtaagctacagcttctaattttttcttcctattttccataaagatttcaaccatttgtgggcaatactcattcaacttacactcttagtccccaaaaattcaatgaaaatgaatttgcttgagtgtttcacattttttattgcagcaacacatgtttaaaatggtcactataccacat

SEQ ID NO: 51564 - DNA, 1122 bp, Cannabis sativa
tcataaatgagttataaacgtgttgaatacttcataaacgtgttattggttgacatgtttaaacaaaatatacttataaacaaattacatgagccatgtcgtgtcaagccgtttattcgaattcagcatatatctattatacatggatctcgacacgacacgaatctgaattgtcacccttaccttaagatgcctaacaccatatagatgtagcgcgttgtaagtagttaggagtttcttatattatttattaaatcaaaatatgtagaatctactattaaattacactaataacgttataccacctcatgagtaaaaaaaaaacctttactatatttgaaaattattgtacaccgtattacaccgtattataccgtatagtattatattgaattatattttatacaatatttttatataaaattataagtagtattaatttttatagacacctaaatatataatattttaatataaagtaaaattaacataagaattatcatgccataagatatttgtataaaatttcctcaaaaaaaaatatatataaatatttgtattaaatttcttggtttttggtctactaaccttatctcaacacaaaggaagagaaaattgtaattgaatgaaaagaaagagaaaatgactagcaatacataccaaacaaacttttggttacccacttaacaacaaaaagtaaaaaccaatcatctttacaagggaccctacctactttaacttctatgcagaaaaacgaaacaacatgacaaaaattatacaaaaaaagtcactataatctattctactattcaaaactaataattgtttgaaattatagaaaaattatgtggtaagaataatatctccaattttggtagtcaaaataaccacatatatcaacatttccaatcaaatttaaaataaaaaataagtttataattaatatttaaaatgaaaaatttatagtaattacataatataattatattcaaaatataattaaaactcctcaattacctccaattacattatcactccaattacattatcaggtaacttttattatgtgccaaatttaacacactttctagaacactattagtaattttttattaagtatgc

SEQ ID NO: 51565 - DNA, 1817 bp, Cannabis sativa
tttttttagggtttaaattattggtttaggaatcaaattttttgattttctaagtatagaaaatcaaattttcctttaagaattatgatttggtagtttatttataagtttaaagaataaaaatgctatttattaatatgcagagaaacaataacttttattgtacaatttagaatttgttgtatatactataatgatttgtataattgaatcctcggtgatgttgtcaaagtaaaataaaatacgtgatatataaagaattaattaattagttagatatttaaagaattaattaaaagaggtaattagaattatttgatttattaaatcttaaattttaatgaactaataagaaaaacttacatatcccacacctacaagaaaatatatatgcccccaaagtatgaatcattttccatagataatccactaaaaaagaaactaatattagctgtttattaatttcaatacattataaaaaaaaattgttgtatatggaggtataatatttttcatttaattattattcaaaaaaatattttttaaaaatatttatttcttattaatttattcaaactgtatatttgtattatagcagtacgatctacaagtacaaactagggctgggttgttagaattaatattgtggactaatataatcataggtttaatactataaacacaatcattaactatgtgtctaatatttattcactaccataatgggatggttaataatcatatattatgttagaggcacatgagagcatccttaaaactataattgacccattaaattatagtataccattattgaaccacttaagccaaattagtaagtaaccctttagggttagaggggcatgcgatatatatatatcttatgtgaagaagtggtttagagaggttaatggtaataggtagagaagaggggatagctccacattggtgttcctctctagtcttgagatatgattgattcttgttggagattcttggacttggctcacatggatgcatcaatgggaggtatgtatgcttattatatatttttttggatgctctaaataaatacttggatcttggtttgatgattatgagtgatgatgattaattacaatcttttgtatttcaatgctcataatctgtgtttaaaattaacaattggtatccagagccaaagctattaattttagagctccattttaaagaaaaaaaaaacccattttataaatctgaaatttattatttcatttgtttgtttgttttttttttttcggattaatatggttattgttgtataaatgtgagatttattttttcaaatgggtttatatatttttggatgattatttttcattgttatggaggtgttcattaatggagaaacccattttcgaatatgtattttatgggtaatatttattttgtgaaaatggatgaaatggatgttggaaattgatagaggattgaaaatggaacaaaacccctcaaacggcgtcggttttggtggccggagatggtctctacgaccgggtcacgaactgggtagcgccgatccggcttgcagacccgcggacccgtgggtgggttttttgggtgacaaggacgacagaaaacgacacgtcgtttgccactgtcgagcaaaaatgacatgtcgtacgccctttggttcagccccaccgagcaaaaaacaacgtgtcgtttttgggccttttggatgtcgttcagggaaaacgacatgttgtttccaaaaaacgacatgtcgtacacacgaactcgcagctcatttgcagcgaaaaacgacgggtcgttta

SEQ ID NO: 51566 - DNA, 1950 bp, Cannabis sativa
  modified_base (49)..(81): a, c, t, g, unknown or other
ctcttatgtgtttaatttcattaacttagagatattcatatttaggatnnnnnnnnnnnnnnnnnnnnnnnnnnnnnnnnnctggtaaaatattcccaacatggtcaatcctgggaccaccgtccccgtaagcacgaacattgacaattctgcccctccagcctctacggttcctattacaactgagtctgcaatcctggagggccaaattcaagatgttccaacactgacggccctgctcagccttaactgctatgaacttttctttttctttttatttcattttatttagggaacaggggttcccctttttgaatgtgcggagacaatttatacccttaccgtgaggctttcttagtacttgataccttttgttaatttcattagatatttgcgtgttatattggagaaatggctaagtatttgacatttccaatttcggaaggtttctggttctaaatgtatgaacctttgctttttaaatacttagacctaaatacttttttagaaaaaatacttttccagaagggtttatttgaaactcagaatatttaattattttgaactaattaattgactgagaatttacccttccttggcattcttaattttttaattgacctggatcaattgatttaaataacctgaatattatggtgatgttaacttgaattaactattaggcttgggcctttattttaagttaacatggattaaccattttaatgttgtacaattaattctgaatgtactaagacaatgacttactttcggttccctaaggctctgattttgtcatacttcttttctctcgtttagttaagtgttaaacaatctttaaatacaataaggcagtggcttgctttcggttccctgaggttttgatttcaggcaatacttcctactcatatatttgagcatttaacttagctattttctagcggaggtaagagaatatgagtatttgtacaataacatatatgctacccccaagcgattagtaattgaaacttttgatcacttgttatatgataaaacttttaaagaccaattatgaaatgaaaaatcttctttttattcaaacggttcctgccctaaggcgtacataaaactaataaaaaggcaaagtaaaaatgtaaaacggaacttgaccaccttcactttactgatagtatcaacgcaggtggtcagcgttctaggctcttagaatttttgttccatccagtcttttcatatgataagttccatcaccaattttatcagttactttatacggacctccctagtttggacataagaccccaatcctggttcttaggaagcagggaaaactcttctcaaaacaagatcaccgatctcgaattttctgctctttacttttgagttaaaattcttgacgattttgttttgatatatctggagttgcacttgtgactcttctcagagttcctcaattaaatctaaagattcttggagtaaagcatggtttcgagtcaggtcataggtatccctcctatttgtagatacagtggattcgactgggatcacggcctcgcatccatgagtcatggaatatggagtgtggcccgtagaagttcatgtatatttgaattgtgtgtaactaattatttttttatctcatttggtgtgtagtttttttcttaagtttacaaagcttatttttattagatgcccaactaggttgcttgtggcttaaggatatgacctctattagcgaatacaataatttttgggtcaatttttttgaaatttcgattgagctattcctttatctagctatgattatgtctctagtttgtatatattgtcgatagtttgataaatgttaggttatatttagcatatgtttcaggtctttaaagttagcattttctcgtctattggtgtcatttggagcagttttacgcttaattttcattgtttcaggtt

SEQ ID NO: 51567 - DNA, 1132 bp, Cannabis sativa
caaggtttcgaatactacttatcattctcatagagcctcttcaagcctctattcttccatcgatgactcaaggaaacataacagctcgaatccctcaaatgcttatgttatattggcaagtaacaaacctgctggtgtaattccaacaactgtagtacactctgatttcactgctacaaaattagtgcctctatcaattagcactccaccggcctacattcacttggctaatcaaacaaacactaattccacaccaatttcaccaaccactgtggattcaaacacaattttagttaggccaacaactatcacaaatgtcgatgctagtgaatccaacttcaataatctgtccactcaccaacactcgaatgtccatgacaatcgtgtagcatttgttttttctaaaagacaattggtgtcttctagtggcaatgttagacaagtgttaaggagatgccgcacccgaagttcaccccttgctaattctatcaacatgttggagcaaccaacagtgaatcctgcctttgagttttctgacctctcattgaaggatgacaccaaggatgcaaaattggcgcaggctgaccctcagcctcgccagtcgccacgaatatcattagttggaatgcacgaggtttgtgcagtcctcgtgctttttgttagctaaaactgctagtgaaacaaaattgtcctgatgtaatatttctcatggaaaccaagttaaaaactggtgccctttctaaatttcataatgttttacatttttctaatgggataaaaattcctagaataggtttagggggcggtttaatgttcttatggaaatctcacatcaatgtaaccattctcaattatgcaataaactttgttgactgctatatgtcgtgtaataatggcctgcaatggcacttctctggtttttatggaaatccaatcacatcttcgagacatctttcttggacactccttaaaagactacatgactatgctcctttgcttccatggttaattatgggtgatttcaatgagatctttagtgttgatgataaaattggaggtcccccacgtccaagtaaacaaattgaagacattcgtgatgttcttgatgttggaagttattttaccaggatct

SEQ ID NO: 51568 - DNA, 2248 bp, Cannabis sativa
tatctttttcagataacagcattttccattgtttaagaaaacagtgaaaataccacatgattactttcacatttatcaataaccaaccccacaagcttgaacggcacattgttaatcaagtccataaatacattcaaatataatcttaccaagttaataacaactacaaacccttagatgattaccagaaatgacaaatacccagttcaaccttatcataaaaataaaaataaaaaacataattttacttttctcttccggataatggccgaaatttaacaagcatttcttatcaagaatgttatcttttccatattatgatattaaaatcacgagttggttatgcataacaacaacatttaaataaactcaaaattatattaaagtcatgtcattctttcactagttctatatacctattgatatataggtaattgtcaagaacaataaacaaacaaatcgtgaaaaacaaagctttcccaaaacttatcaattacaaacaatacaaattatctaaattcgtaattgtcaagaacagacggataaaacaaagtacaggagagagagagagagagagagagagagagagagagcaggaagaatcttacacggaatatgaatctatcaagaaagaacctggcgaggacgaagccgaaagcgaagtaaatggcgaggagagaatctggggcgccattgtaggtgaagatggactccatgggagagttcaaagcagaattggagtaagaaaaagcatgaattcaggagtaaatcgaaaggcgtcacgtcagaaatggaagaattttccaagagacagagatcccaatatagccctaattatgtaaagaaattgggaaagcaaagctgagatcttggaatggagacatgattattaattttattttattttatttttttaagaacaaacacaaaataataataataataataataattataagtactaataataacaaaccaggtgcactgttggaccgcttgctgagtttttatctttctttttcttcttctctcttaatttgagtgctattaataataaataataaataataataataactttatattggttgtggttggtggtgcttcttagaagtaaagttaaataaatgctattaatattcacgatgtgagtccctctaatcttaactactcgatggacacgtggcactcataattttcaccaagaattaaaaaaaaaaaaaaaaagagattctcattgaaaagcaatgaaaaattcaaatacaatttggtaaactcgaccattaaacttgaacaagtttagctaagttataagcaagttggaattaagcactctaacactatctttaatggagtaaatatcttgtaaaatggttccaaactcatcaagcaacacatctttttattcaatgtaagaatgattcattgggagtcactttccacttctgtctctatgaaatccaatctaaagcatagttgaagaccatgagggatagccaaaacttctgccaacaaaggagataagattccttgaactagagacgctgcaaaagctaaacgaagaccatggcggtcatggattgttgcaccaagccccaactttcgagcaacctcgtcaatccaacccagcattcacctttccaacagtgcttttatcttctcagaggtagtttcaattccttttgcgttaactataaaactaagaaggttccctaaatcctaaatgagcattttttggtgtttaacttcaaaattttttcaatattaagaagcattctgtgaggtcttttgcatggtcctcattcttgattaattttactaacatattgttcacatatactttcatgttccgacctatctggtttttgaacataccatttacgaggtgttggtacgttgctctagcatttttgagtctcaaaggcataaccttgtaatagtataaccccatattgataacaaaacttgtgttcttaatctagaacatgcatttttatttggttgtaaccgaaatatgcttccatagaggtcaccagctcatattctactgtcacgtcgactaactgatcaatctttggtaattgaaagcaatcttttgaacacgctttattcaggtcagagaagtctatgcaggttctccatgtttcattcagctttggaacaagaacaggattcacgatccatgtggaataaaatgcttctgtaatgaagttattggttaacaacttgtcaacctctcccttcaaag

SEQ ID NO: 51569 - DNA, 1082 bp, Cannabis sativa
tatgtcaaatattggtaaaaagaaaaactttgacaaatataagcattttaatttttggacaattttatttatttattgaaacgttttgatgggattattttgccatatttttgtaatcatttcttgtaataccaaattttatttgttgacattttcttataaaagagatttcatgtttagagagtattttttttttttttggtttctttatgtgtttgttattttttagttttttttttcctaaaagatcaacttcattacaatttaacatttcgaatacaaaatagtactaagttcaacaggagcattatgctcgaaaatactatgaccagagtaatattgagaatttttggcaacaaaatatgctactcgatttggtgatcgtctaacaaaatataaaccaacattattcaaggaagaaagtaaaattcgacaatcatgaataattaaactaaaagaaaaacaaatcgctttttattgattcatttgagcaaaaatgatacagagtctggtttatatacaaagaggtaacaaactaagtaactgtatcacttcaccaaaagctaacaactaacttataactaacataatagctcttaatcaatcaaacactttagctaactaactgatatactaaactcataatcttaatactcctccctcaagatagattgtatatacatgcaatcccatcttgtccttaatgtgcttggattggcttgtgttcttcacattttcggacaaacaacacgtgtgcgcttagtgttcccaagtcaatttttggcctattctcacggcccaaatggatagtgattggccaaataacagacagtccatattcggttaagacttgaccgagggaaaatttgggctgacaaacccggagagcagattcgaccgaattaccaagtgtttgataagacacaaacagataccccacaagtatcccggaagggtagtccgaagggtgttgcggaagccaacttcctagggttgtcgcaaaaccaactttttaggaattttttgacgtggcctatgtgacacaaaattccacagaattaggggcttgtccctcacatcaa

SEQ ID NO: 51570 - DNA, 1006 bp, Cannabis sativa
ggtaagacttgagatcaccagaaaaagtaattattgcgatccaagggaagagggggaacatcgtatttggaacatcaaaggtgtttgtaggtgcaccgacaccagagaaggtagtcatggatgaaccttgggcgtctgtaccaacttgagaataagaacgagagagagagagagagaaagaaaatcggtgtattgagttgattactttccacaaagtacaaagaaaattatttaaagtcagtcaagagaactaaaatctagaaaagcttgaactaactctcaccaactgaaataacagaaaaccaaaaataacagaattttaacaaccactaacaactaactaggactagtcaagtgtatcctcaacatacatgatattgtgtataagactgttttgctgttcttgaaactgtgaggttatactggtagaaagaagaagaacgatgttgaaaaaacttgattcatcaaacacaaaatctttaatttttaattgactcatttgaaatcgaacataactgttggctttaaaaaccaatacaattatcaagagtaactttgaatggccttatattagaagttaaaatgacccttttccttgacgctttcaatagtgtccctcagactcacttccaagggagtgaaactaattcccaaacttttcgccttcaaatctgatacttggaactttggcttcagaggctcattatgttcatatctgtaaacaatgcaaacacatattaattcctttgtatcttgctgagctccagttatttagtttataatatgaaacaaagtcaagcataataacttacttgtcaggaatggtcaaagaagggtaaatgtgctgcaaaatcttgaatgactctaaaatatgtgcaacaggtccagacacacaatatcttccactagctgaagcaacttcaaatgcttgaatatgtgcattagtaatatctctaacatcaacaaatggataaacttgattgagaaccttttctgttcctgcact

SEQ ID NO: 51571 - DNA, 1954 bp, Cannabis sativa
cttctttaccacctttggaaaagactttagaattccatttatttaagtgagaccaaacacgatcgttaatgtagttgaaggcatccttcttagatctcccaaatgcttgaggaagacccaagtacttatccatcgtctcccgaacagggatgacaagaagcatcgcgatttcatgctggagcacaggagtcgtgtttggagagaagtataaggccgacttagtgtaattaaccagttgtccagaggcacggctgtaatcgcaaagaatgctttggatggtggtcgcagcttcaacagaagcagagctaaagaggatactatcatcagcgaaaaaaaaaaagatgtgagatgattggtgcgcgccgagcaattttaatgccaagggaatgactccgaggttggtgctgctgggttttataattgatgagcgaagaaagaccctcagagcagagaagaaataaatatggggagagagggtctccctggcgaatgcctcgagtaggtttgactgctccaagaacttgttggttaagggagaaagagaaggtagcagtggagacacaggccataattagctcaatgaattgcctgggaaataagaatctttccataaccttgcgaatgaaaacccattcaacccggtcaaaagctttggccatatctagttttaatgccatccatcccaaccaaccggatttacgatgagagagagaatgcataacttcctggccgatgataatgttatccgagattaaacgggaaggaagaaaagcactttgtgcaggagaaatgatacgactgagaatgggcttaagacgattgactaagacccgtgaaatgattttgtagaaggtggaacaaagactaatgggtcgatagtcagtgatctgctcaggatttgtccgctttggtataagaacaatgagcgtttgattgatggctgttaaatctgcatccccattgaggaaattgagagcagcaatggtaacgtcatgacccagtaagtgccaattcttttggaagaaactgccactaaagccatctaagcctgaagctttataatgagcgagttggaatgtagcagttttaacttcactagccgtgaaagtggcctgaagaaggtcagtttcagcaggggtaagactctcagaaatgcctaaaagaacatattcaatgatttcattgtcaggcatttggctttggaaaaggttagtgaaatattgctcaatggttgccaagatagagggtgtccagtcgttgaagggaaagaattttattggtggttcgtctcagggaagccatacgatggaagtaacgggtatttttatcaccaagttggagccatgtgactcgagagcgctgctgccagtatacttcctctttttgcaataagccactcaactcttcttcaagctttcgactttgctctaattgatcattcgtaggattgggtaaagagttaattaatttgagctgggattggacagtacaaatttgggtagtaatcggggggcccagagacttcttccaatgtttgagtcgagaggaacaatttgttagtctttcattgagaccaattaaaggattggagtgagcatttgaagtggtctgggtccaggcatcgcacaagcaatcctcaaatccaggttcagacatccaaagcttatcaaaaatgaaatgtggagtaggagtgcaatgatcattcgtgtgatgcaaggtgagaataagagggcgatgatcagagccaaaaaaatcgccatgatttagacgggaagccggaaagatggcatcccaagcatcattggagaggcactagtcaatccgttcctgagtgtgatttggttgcttttggcgattagtccaagtgaagagattacctaccggtgtgagagggtgaagttagtaattgtctatgaatgattaaaattgtgtggatggagctcgagacatatta

SEQ ID NO: 51572 - DNA, 698 bp, Cannabis sativa
agggtgggaaagatgcaacttactttattttatcattgcaggataaaagaaattccagagttgtttatcgtcggaaggccagacatgacaattgttgctcttggatctgatgttttggacatatttgaagtaaatgatataatgtcatctaaaggctggcatttaaatgcacttcagagacccaataggtgttctctcacacacattattcattctaacatgtttgttaacttaaattaaatggataaaagtatacattttgtatggagcagaaatctgattattttttctctttttgatatttaaaccagcatccatatatgcgtgacccttcaacatgtaccagctgttgaggacttccttggagatttgagggaatcagttaaaacagtaagtggttttttttagacaaaatcaataaataaagggaaatacaatttgtgtctactaaatgatgcatattttaactttatattattgcctgctgcaacaaaaaaaagaaaaaagaaaaagaaagaaacccttctataattgcttatacgcttgtagtaccccattatagaaaagtttcaatagtcagtttgtctggagaaaatattgttatttgtattttgtggtcatgtttgacggcattagatggtgtggaaaatgaaaaatatatcccactaaattcgtgtctgagtttttttttttttttt

SEQ ID NO: 51573 - DNA, 929 bp, Cannabis sativa
tctctctctctctcactttttatatatgttccatcctttttcctaattgcatttatattctccttactaaatccactgtatatcaggtttacattttctctcttttttactttattaataattgtatctatgaagatatttatttgctatcgtattacattataagttattacatatataccgtatatgtggcaatgatttaaaataaaatgtctactacaaattcattaattgcattaattctgtctttttctctagcttcattattttacatagttcccaattaagtatatcacgaaaattgcattcaacaaatatttcgaaaccttacgtgcgtatatttgcatgtgtgcctctggaaagggtagtataattatttgggatcaatcgaataatgttttatcttatttttgaactaaaagaattaattaataatattggtgggtgaaaaagattaaagcttggtctgtgatgatgatttcctccaatgagcgcgggaggcccatatgcatacattattgatcgtttaaatctttttgcatgtgcaaactgaattagtctgtctctttattatatattttgtagtggtgtggtaatgaagttttacaatctagtttttgaaacgtacgtccccaccactacatatatgcaaactgaattaatcttttgttatatttttttgttgtgctccttctatatgcagttttcttaaaagatttcaagaacaaaagtcgaacgatcactggtctaattgcaacttcaattcgtcgaccaatggctctagaacaaatagctgaagtagtccaaaatggaaaaatacttgaagcaattgaagatgaatttaatggtgtcatcgttgaagtaaatgaaccaatggatcctaaactctttcattcaaaactcaaaacttcggtttcgcattggagaca

SEQ ID NO: 51574 - DNA, 1357 bp, Cannabis sativa
ccactaacaccaccacaacagcaccaccttcactctctctctcctccacctcatcatcatcatcgtcctcctccacaattacattctctctctccccaaacaccaccgcatcaacaacaaccaccactgcaacctccacatcctctccctcttcctcctccttcgatgacctccagcgctacctcgccgcggctgattttcggcaagcagacgaggagacacggcggcttctgatcgtactagcaggcgaagcggctcagaagcgagggtatgtgttcttctcagaggttcagttcatatcgaaatcggacatgaaaaccatagacgagctttggagaagtcacagcaacgagagattcgggtacagcgtgcagaggaaaattttcaagaaggtgaacagagatttcactcgattcttcatcaaactcgggtggatgaagaagcttgacacggaggtggttcagtacaattacagagcttttccagacgaattcatttgggaactgaaggacgatactcccgaggggcatttgccattgacgaatgctctgagaggtactcagttgcttaacagtattctcactcatccggctttcgtggaggatgatgatgaagagagtgagggagaagaagaagaagaaagcggcggaagagtggggggtttgttgaatggaattgggaaatccaaaccctcttctgctacttctagtgcaggttttaaaccagattacagcttttgatttttatatttataccacacaaaattggtgatttggttctgtatttaagtataattaattacattgattattgtgctttttccatatatattattattattattatttctatttcacagaatggttttctatttctttctttttggtttatgcctttgtaatgtcataattatgtatataatataaattgatacaaatggggacaaatattaaaaaacatggaagactgtgtccagtagggacacaaaaatgcatagccgttttgtactttttgtttcgagagggagaatcttcttcaataagaataagtcttgctttggtttttaaagcctttttgtaatttttgtttttttgttgtgttttttgggaattttatttgcccttcataaaattataaatacaccttattattaaaaaaaatataaatttaaataatttttaaaaattactcttgatatttttttttaaattttttcctcacattattttatattaatttcaatacttattttgctttcattttcataattttttctaacttatgtatatttttttttatttctttactaagaaaatctcaaaaaaaatttattttatttttttgttataatatttaa

SEQ ID NO: 51575 - DNA, 1134 bp, Cannabis sativa
aaaaatattacataaaataaaattgaatataataccaacacaatacaatacaatacagtaatacagtgtaatacgacgtaccaaacgaacccttgaatatataaataaaatatgcactataaattagcaagtcagggcatttagacaaaatgtgtgctaaaatacaaagagtgacttggtatatcattaattttaaactattgatatactaataataaaaaaaacataccctaacttttattttttatttttttgaccaagactgagtaatcattgatgatgaaaattatagtataaaatattatacatagttgataattccaactaagtaacttctatctgaagtacatatctatctatatcatgaccaattgtatatttatatgatgtattatcagaggaatttagacaacattaaatttatacgagtatttaatacatataaagaacacttaattaaacacatgtgagtactcgctcctctacgcgagtacttaaactattagtcattaaacaaacagaataaaagtagaaaacaataaaaacacaagagaattatagtggttcagtcagagcttgacctgcttaatctattgttgcaaagatttcaacttagtttatttaatttggatcaattctttatatataaagcaaatgtcctttagaatttacataactgatcaattttataactgtttcataataaataattgtattaaatcagaataaacatttaaagtataaacaaagaacagtttaatctgttcttgtactaagtacaacaacgtatgcaatttgttgagcgcgagtttcctgtttatattctcgcacaatatctattttttttcttcaagttcactaatgctgtgagacaaatctttattgattttaaccaaagaacgatttttagcacagatttctaaccacttaccaaatattaccttataagattctgccatagagttctcatcaaattctgactcattttgatctgatctaacttctttcttatcagtcaaaagtattgtttaaacatacgattcttctttttttttctcaaaatcacttgacaaaacacttgttaatgtaatttttctattttcatcctcactacttttagaatcatcactcaaa

SEQ ID NO: 51576 - DNA, 1631 bp, Cannabis sativa
tgggaaggaatcttcaaccatgacaaaggtgaaatcagcattgaactctaaagaaattcagaaaagaagtgaagagaaatcaaatggttacggtgaagggctatttgttagaggaagatctcagacaagggaaaacataggtggttttcacaaatcaaatcacaaaggcaaacagaacaaaggctcggatcaatcaaacaaactaaggtccaattccaaggtagggaaacagtgctactactgcaagaaagaaggccatttcagggatgaatgcagggcattgatggctaaactacaaagagacaaaacaaaagaaaaaggagatgctggtgttgtgacaaatggctatgagtcagctgatgtattggttgtctctagctaagaatcaggagagtcaaattcagggtgttcatttcacatgacaccaagaagagaactgtttgacagtttcaagaaacttgacggtggatcagtgctgttaggtgacaataaggcatgcaaagttgtagggattggaactgtgaggatcaagtttcatgatgatcaaatcagaacaattcaagttgtccggtatgtcccagatttgaaaagaaacttactttctattgatgaattgattgaaaaaggacataccataaagatagatagctcttttaagtttatgaaaggttcactagttgtcatgaaaggagaagttaaaaatgccatctataatctaaaagggaaaactatcataggtgagaatggcatggttgttaggggacatgatatggaaagcactaggctttggcatctaagacttggatatgtgagtgaaaggggcatgagtgaacttgaaaaacaaggaattattaagggtaaattgggagagaaattagatttttgtgttgactatgtctatggcaaatgctgcaagttgaaattcacaccagggaaacacactacacaaggaaaactagactacattcactctgatctttggagggcttctagaacaaaaacactgggatgtgctagttacttcatgagtatagtagatggctatacatgaaggtcttggttttcctgctcaagacaaagaatgaggcattcaatacctttgtcatttggaagagactgattgaaaaccagacaggaaagaaaataaagaaacttagaactgataatggcttatagttatgtttagatgagttcactaggtttcgtcaacttgagggaattgataaacacaagacagttatgaaaaattcacaacaaaatggacttgttgaaacaatgaataggactctattggaaagagtgagatgcatgctcaagggtgctggtcttgacaagaaattctggggtgaagcattgaaaaaagcttgctacctgataaacaggtgtccctcaacaactctcaaattcaaaacaccacaagaattttggactggacatgttccaactgttgatcacctcagagtgtttgggtgcacaacgtttgcacataccagacaagataaactagagccaagggctttcaagtgtctattacttggttaccctgaaggggtaaaaggatacaagttgtggtgtttggaatagggatacaaaaaatgcataatcagtagagatgttgtgttcaaggaaca

SEQ ID NO: 51577 - DNA, 1355 bp, Cannabis sativa
ataccggtctccaaatgaaaaacaagctgcccttggaaaaaatggtatatgagagtgggtgtgttacaaggttgaaaaaatgttaaaacattactgtaaaacaatgttcgagaggaaactattgagcatttttttttttttttttatttaagcgcttatatattataaccatacataatttgagattcgaacccaagaataacctccaacacacacgcaccttcctataaccacttgagctagctcaagtggttaaactattgagcatgctataataggcatatagttcccaatattatacaaaactacaaataaatgccaaaaaattttagtagtgcttaatattatttagatgtgttatttttttattcatgtaatatatatatatatatactcttttaatatatgtaatttaataattaaataaaatttctatccttttttttttttttttttttgaatatatttactaaattactaaataaaattaatttaataatttaaatgaatatatttctatccatttaaactatcctttcaatatatttactaaattaatattacatataatgcacatatagtgttacattgatataccatttagtacaattaaaaattcaaatgagatattgtgatagtttaaatggattgattggtactatctatatcaacaaggtgcatcttgttttttggtagcccatctcgaaagaactccacagttaagtgtgcttgacgtggacaaaacacgctggagacactcgtattggtctatagggagacgttacagtagtaaattaaaattttgttatataaaatatttacagaatttttattttaaatatattataataatattaatattatttttataaattaataatacaataataaaaaaagacagcaagaattcaattaggtagggtacatagaattagcgtgaggtgcgtacacagacaatgaatactctgaaatggcttctctcctacgcccccaaatacccgccaaatccctttctctctctaaaacctctttcttcttcttctgcaacttcccaaatcccaccatttctctctctctctctctctctctctctctcattgttgtgtggctatggggaagaagaggaacaaggttgtggttctatcatcatcggatgacgacgaacgtcatcgtcaccgtcatcgttcactgagctccactcgtccgcccagtaccaggtccaaattcagctcctccacggttcctcgtccaaatgcaaacccctcacgttccaagaagcctcgtctttcggattctacctcttttctgtttaaagatgatactagtgattgggatgaggtattttgattttgatt

SEQ ID NO: 51578 - DNA, 939 bp, Cannabis sativa
gaagttgaccatgactttaattatgaattaattatggtgagctcttccctagccataaaaaagaaaggacataagaacccactggcattaatttaaagtaataaataactactatagttttttttttttttttgaaatcataacaatagattaaacaagcattacaataacaaagttagtaaaacttcttatagaaaacaagcaattattaatcaaacagaaccattacaaacaaaacactaaggaatacaaattctagctttaatgctagattttatcaacttattagtacttatcagaagctaaagatttcacctcataaatacaaagttctacattagttaaaaatgagaaacataatcagtatataaagataaatactatttctattagtaagaaactttttaagaaggtgctcaaaaataaaactgtaaaagtttagagtggagatgaatggtctctgatatcccaacaatgagtttacgctaataccaactaacagaaacattaattagttataaacctaacaaaatttacaatattcataacattcaaataaaaaatatttaaacaatttatatgaaaaaaattaagaacatcatttattattactaataaaaaaaaactactccaaactaatcattataataaaaatcataataaaaagtaaaaaattaagaagaaaaaaagaaactataataatgaacaattgatgctgccatcttcttctttttctctctcactaaaaaatattgtctaaaagtccttaaaaactaaccccaaaagttctatttataccccataaaaatcctttgatttaaacaaagataaaagtttcaaattttgaaattgatctctcgccgtggcgagagccttctacttaaaaattgttatcgtgtgattagttagtatattagccataattccttcaatacaact

SEQ ID NO: 51579 - DNA, 641 bp, Cannabis sativa
cgtttccatccattttattgtgacttgtctgtgaccggatttccatcttggttggcctgcaaccaatgccgagatttaaatcttcaaacgcatgagtcatgtgtatcaggttgtttgcttcattcttttatcttatacaattgaagtggtcctacacccaatatagagcttaagacttttcttcttttctccagatgttagaattaataataatgaagcaaattctgatgacgcgtattcattggaagggaatggatgttgcaaagggggagttgattttattacattggtaggaaaatttgttctgcagataagcttaaatttgcatgattatacaaaacttaggctgaaatattgtttatcatttttatataaagcttttctgccataatagtaataatgcttatctctagctgttaatttataaataaatggtgattttcttcgaagacctgtttgaattaataatcttttaaaggtataatactaatgtgatttaaaatgtttttattgatttattagagttttcaagaagttttgaatagcatttatttgcttggtgtgatgtgctagatattcactctttcagctataccacttacagagatgccggtttccattaaagaatgcttttctatttt

SEQ ID NO: 51580 - DNA, 758 bp, Cannabis sativa
gataattatcggcggattccgccggtattaataattaccggcggcctagatacttattaccggcggatgcttccgccggtaataattaaatttgttgtagtggcaggtaagaataaataaataaattgataaaatttagtcataattaattaatgataattttttatttggtgaaaactgaaattcaaattgtattattttgtgtttttagattttcaaaatcatatatatgtagaaggaatatttcttatcttataaaatgatatataatagagtcaaggtttttttattaaaaaaaaaataaagaatataaaatgtacgttctttgttaaagacgaaataaataagtaattgattattttttaaaaataataaataaggaaacttatttgttatttgagagaatttgggtataacaaatatgtaattatttgaaatatagattaataaattacctttattatattctataaattaataaaaagattatagtatttgattaaaattcattctattaatattttaatagaattcgaattctcctcactcataaaatttttcaaacttatttttgttaagtagggattgtttttttctttttaatgtatatattctcttttaatgataaattagtagaactctcctatttaaggtaaccccagttagtaagtgaccttgtactgtttatgggattgtaagtcttttgagattcttctgaggtggtgggtgaccttgtattaattacgtatgcagttcag

SEQ ID NO: 51581 - DNA, 1078 bp, Cannabis sativa
ccaacacagcctaaacccgagcaatgaccaccttgcttaacccccgcatcgacattaatttttacttgattcgcaccaggaggagtccaacgctgacccgatcttccctccttcaaaccacaacccccccggtcccctctgtactcatctaaataactaccacaccattccaccatgtcccccggaagcggactacagtccccatgaaccaccgtgttcctcacgttccaaacctgccacagtaacaccagaaagaattcaaacttttctttatcccactcccttgccaaccgcataatgaaggacaaaagatcctccccctcataacgttttaattcctgcaacagaccactaactctccaaaatttcttgctagcagtacactcccataatgcatgactaatagactcattaacttgattagcacaacgcacacacaccatacctgaagggactccccgtttagctagcacggcattagttgggagccaattgtgaacaagcttccaaacaaaatgtttgatctttggtggtaccttcaatcgccatagcttccgccaccattcaacaataacatgatcatccgaatggtgttgctcagagtccaaagagctaaccattctatacccactcttcacagtatattccccattcttactatagtgccacataattttgtcatccacttcccaatccgaaaaaggtatggctaggatcaagttggcatctgtctcattaaacacattccttataaattcttcatcccatcggccatctgcacacttaagatcagcaacatagagattaggaggtagtggaggtttatcatatatcttaaatgtgaccggtcttggaagccacgggtcctccaaaaccttgaccaattccccattaccaacacgtcatcagtagcccttcaaaatcagctttttaccccacaccaaactacgccaaacaaaggatgcattagccccgcacctagcctccagcacacctttatgaggaaagtaagaggctttaaggacccgactgcatagattataaggatgccgaatacaatcatgagaagtttagtgca

SEQ ID NO: 51582 - DNA, 2017 bp, Cannabis sativa
cttagtattacacactatttggtacttaatagcaatgagctagatatagatatataccagctttgataacagagtggaagactgaaacatttttagagtcttcaatgtgaattccatcagtattgggacttagagcaggagagtttatagaaacagagtcaaattttacatcattactataccaaacaagtatatgaacctgtggactattaatcatgaatatattattcacacgaattcttgtacaatatatgaatgttagtgtcgtaggcctcctatcgtaacagccctgtcaaattacacaaacaaacaaaaatacagagattttgttttaatggccttaaaaaagaaataagaaattaaacatatctgaaatgggatttgattgtttatatacctttaatttaggatggtgagcacaagagagatcccaccaacctttaccaagtccattaatagtcccataaccatcaagagtgagcccacttacattctcaaaggatatcaaactttgagcctttattttccatttttcaggcccaccaggtgctacaacccctccttctagctaatacaaatatatataatgaaaaatatgatttatatgaatgtatatatatgtaatgagatggtggtgagtagcacattcttttaaggtgtcatatttagaatgaattattatgaaatattattaaccattcgatcttatagtaatgttaagtatgattcgtaccaaaattgagtaataacatgccaagaatatttgtgtgtatactatatctaaagtggagtttgagtactattagttctattttataaaattttacaagcataaaagtatgctatatgcaattttcaaatcttgagtttgagtgggctttaggtaggagtccagctcgccttaagaccgagtctgatattatacataattttttgcaagatgccaactgctaatatcaatactcatatgtgtatatgtatatatatatacctgaaaatagagatttggggacttgcatggaccggtaaaggtgaggggttggaccagaaatgtatgaccagatggaaccaataaggtagattggtttgccactgagttgcatgtgtcactccatgcctttgaaaatgcctatatcattttattaacaaccttaagctaaacaaaataatatatatataaaagtgatagaagaatgtacatgtatagatatatatatatatatatataccaagctgtcgtctttgatgccattaccaacagctccataattcaaaatatttactgcacttgaagttgccatagtgtagtcttgtactgtgtaaaccagggtgactaaatatacagtaataccaaataaaaaatcctgcccataaaaaaattgaagtaaaatgtcactttaaataatattttgtaatgaagaaatggtttatagaaaaacagattaccatggatgatccaaagtcaaaaagaaaaacaattatttgaaatgtcaaaaactaagcattatgtatccaatattggtggaagaaagagggtatttatatcaatcaatttttaaattatctatcaatactccattacatggaatagattcataattcaatcttgtttggtaattttcaaaaactaataagctggatgtgaattgtcatttcatatttagttttagttgattaagaaaatatctcatggtcttatctaattacctgtatattcatgaatttggctaacaggattggcctaattatgcatggattaatttaaggttatgcaattttatatcatttttttaatttcctcctttacttggagattagcattaatgcctgcaattacaacataatccatgttaaatggtagaatacatacacccaaatgtcattcatacatttcaaaattaaaacttatgaactaatacattttcattttcattttcatttttgacttgtaattatattgaaaatgagctactctctattttctttttcagaataaattgtattttgattgtttttt

SEQ ID NO: 51583 - DNA, 1379 bp, Cannabis sativa
tgtagattagctacattaaatgataacagatttgcattaaaaaaaattgaaaataaaatcatattttatttaaaaaaaatgataccatatttttttaaaataaaacctaaagaagtaatttttatgaacactaatgggataactaatcaaattcctacatacttacatattatttttaaagattacagaaataaaataaaatactcaaaagattttcataccaaatgaacaaacacaaatacaaaaccaacaaaaagaatacataattgtttaaaagaaaatacaagaacaatgtaaacctagaattatgggtatgagcatttgaataaagaataaaaaaaataacttagtcccattaattcaagttttaacctccgtccctgactaactgatacccgaccatttttgagcccgaatcaatacggatcctccatcatctgtagagaaagaatttagacatagattcaacaagagagagagagcaccatataacagagttctattttcaacacagtaataaaatgaaagttgagaagagtaaagtaaaatctatttgaaaaagaatcagaaaaagaagatgaagaagaagaggaagtcggtacctgaatatttttggggcaaaaatctcagcttcctgctctgttgaagccgtagaacgcccgccgaagacccaaccatcacctgggccaatctttccgttgtgctcgaccgagagagccttgaaaagtgccgacgctcccttgccgtgagctcatcttgaatgtcgatctctcgttgccttgcgattgtggctggtgtctctgtgccgcctctgagaaaaaatatacaagagagtggagagagatgaaagggaaaacaaaactagggttaataagcttttacaccctttatgcctatttcatggaagaaaaaagccaattaattgttatattttttttttggaaagtgtaattgctttttggaaaatgcaattttttttttgttttaagtgatcttctcaaaaaaaaaaaaaaaaaaaaaccatttacacattatatcttttatttttatttatttattaaaagtaccattaattataatttatttttttatttttttaatttagttatgatatagtgacgcgctatgtgtgtagggatacatttatccattcacgtttagtgcgtcactataggttaattttttttcaaattaataaaaataaaaaaaattgtgggatttacttttagtgacactccatatttttagtgactcacattacaagtgactaacacttaatatctagagtctatttgtgcatgtcactataaattaatcctaactctttagtgacccgcactaaaatgcgtgtcactaaatagtgtcactaaaaggccaaa

SEQ ID NO: 51584 - DNA, 1684 bp, Cannabis sativa
  modified_base (95)..(101): a, c, t, g, unknown or other
cgctcttccgatcttatctagaaataaatgggcttcctatatggatctaagcccaaaagcaaacatataggctcacacaggtcaaattgatttgnnnnnnncctatcatgttactaggtttatcaacaaattagatttattttttataattttacttttcagcattctacctttagaagatcttttcctgttttaatgtttgtatctctggtttgtgtttagcttttttcagtaatcaaattgatttattttaattctcagtattaattatttaataattaattttttaaaagtattgtagattattatagaaagtttttctggtcttctaatttattttggtgtactaaatttattaattagttttatgactatgacgattatttacctttaaatttttgagtacaaatgtaagaattttagtattaataatttattatattgattactttgaatttcccttcttatattatttagcatttattaacatggttttattatttgttttctaaacttttgttatttatattttgtatattaatcattctcaagattctttattaaggttttttagcatgagatgttatattattttaacttttataatgtttttccatattttattgtttatttgagggttcattagtagtattttattactaattagtttttttatttttatagtctattctattatgtagtagtattattattaatttatggtaagttatataattttttgtttttatactatacttttttaaaatagtttatacttttttgtttttgagcctatttttgtatatctaaagtatttttacttttgttttttcgtaattataagtaagatcaaataaaatatttaaaatatatggattaattatctattttaaattattttaaaatcatatattaaagtatattaattatatttatggtttctcattcgatattcttcataatgttttgatggtttttatgggcattttttgtgccttttacgacttttgtgccttttacggcttttgtgccattttttatggcttgcccttaattgtttagggtagttttgtagtacagtcaatggacaaaagaagtgatccattttgtgctcttgacttctacatcaacgacctttcagttttgacagataagtatttcaagtctttatatttatgaattgtttttatattataatatggattattttactatcttgtcttttagcaattttttcattaaattatgtagtaatagaattttatttattattgttttgtaggtcaattttgtggagggcgccctacgaatacaaagactttgtcggtaagttttaattcaaagattgtctcttttaatacctcctgttgcttggtgttgtttgttttttcagctatcaataaagaaagagtgttttaatgagctgggggtgctgtttgaggatgttataactttattgtctaaattttcgggggcagttttgtcccatgtggcttgcgatataaaattatgcagctcatggtttggcaaagtatgcccttcggttagacgatgagctatcctggttcgaggaggtgtcgccgccgaatatggattgccgctttgttaattatgtgtgattctgatcacggcgtaaaaaaaaaaaagaaaaaagagtacagacaaataaaaaataaaataaagg

SEQ ID NO: 51585 - DNA, 5382 bp, Cannabis sativa
ttgggtatttttttttatttttttttacctagtatattaaaacaatatatgctatttttaagcatatattgtcaaatttcccaaataaaaatctgaaacagaacgtcgttgaactgaaccgaaccactctcagaggattgctctcgagcccctcatagatgactgacgacgactgctcttgaaccggtctcagacggtggctgtccgacagcaacaccagcggacgacgtacggacgacgacgacgctcttgtagccgctgtcttcgttccttgacgtgaagcgagagacgtagccacttccttcgttcctatagttgggccgatattttgggcttgatattttctatataaacatatttttaatatagtgtaataagtgatattttttgatattttttttaattaagtataaaaatttaaatttctcttttattatttgtcattggatcaaaacctaatagtttaatatttttaaaattaatatttatagttaaattatttaatagataacacccaattaagaagtgttatagatctatccaataaagtctcttattttgcatgtataattttcgtttgtacagtacatgagtataaaactatttcaatattatgattattatttctatatttatattgtggtatatttggtagatcatattttaaatttgtatttatatttggttattttctactttttgtgctatggatatataatttggttactcatattctaattatatttttcgtacttattgttttgataaggaaaaaagcattgctctaatatcagagtttttttatctcgtaatttgctttctaatattttgatctaagactaatattattatgaaacctttggcatcttaaagagcaaaatcaaataaatacaaaacaaaacaaaagcaattgtaataatcaaccgtaaagcaaattatgtaagattatcaacaatcagaggccattctttcttgagctatacctacattacaaaattgttcttttctttttctttactaggacagttatgctaagaggccgagctagattgatcacttgcaattgcacaaatggggcaaggtgagaaaaacaagctaattggcttcgtgtttcacactcaagcacaacgctccaacactgaggctgcaactcttttcaatgattccgacgccttaagcagatctgattctgaatgcccagcagagacgaacaatctgattccagcaggcaatggacatttatctagtgttgatttcttggaggtcaccacaagtattgactcttccttcaatacctgtaaggaagaatccggggaattaggaacagtggtaaaatcgacctattcagattaggatgaaacaattaaccaattacttacactgtcagcaatttcttgaaggagatccctgtcggcttttgatgagcccatcgacttcttcaatgttagaaaaacaataggtgaatcaggattgcttgctaccgaaagtcctggtatgtcagataatcctgaaatttcaaacatgttaaaaatttgcggtggtccagaccagtctatccaccaagtttcacaatcttaagactaccaggtaactcctctagctgactcaaagtaactgcactatagataagagcacagtgacggaagaaatctcacatgtacatattatagaactctagaatactatctcataacaacacacggatgacagaaatcccgcatgtatgggtgggttatgtgctatcatcagatagttgtgtctcacagttattcattggagtggatactgaagctaaatctaacacattctctttaacaccacttgataaattggtagcgagacccgaactaacctttccacagtattgcaatattttccttcagttttgttatgagatcaggcttttcctccaggacatcaatggcggtaatggcagcactggcaagatatgggggcaatgaagcagaaaatacatatccagaactactcaatcgctgtcaagggttagcatgcactataggatgtgagtaccttgaaattgatgtgtatacagtttatgatcaagaatatgtataagcattactaaaataaagaacattgtaagtttctttacttatttaatttctaataaacacaacactcgatagaaggccttctggataaagtcttgccaccatacctggtgatcaatgaccctagcacttccagtgcaaaatcctccttctgtagctaatgcatgtcccattgcagcagtaattatatctattttctcaacctgtaccaccagtccaacatatgtattacacctatattttaaatctattgaaattctaatattattttcaattttctatttaagaaaaacaattcatgaaagagaaatatgaaatgaaaaataccggaactccaaagtgttcagtcagacctcttccgcttttcccaagtacaccaaacgagttgctttcatccaataaaacacgaaatcgatacttctccttcagtctaataatctcatctaaaggggctatttgcccagaattctggaaatttagaaacaaactatcaataccttggccagagctgttacatatttatatttacagacatgtcaaaatgctgcctcctacatgtcatcaataacctaggaaaacttaaatggatattgaaaaatcaatgtcgctgcatttttttaaaaaaagaactttgatgtaccccaatatagaaattgggatcgaaatggtaaactcaaaaccaatactatagaaaaccaaagagaaatagaaaagcaactgagtattcaaaaagactcagcactctcccaagagtcaagacaacttataatataataattatcatcatgcttttctcattcctctcattcatttttatattatcatatttctgctcattcccattccgaactacgatgacccacatactcccactacttatatacctatcaatataactgggtctgacaaacattttagcatattaacagagtaaaactcaatatgcataaaagacaatagacacctggtaaactgattcaaccacaatgtagcgccgcaattttttagcacgcttatttccagcagtgaccttctccaaggtgtttcttaaagattccatatcattatgcttgaaaggaacaatagtgcttctcgacagatataaaccattttgtattccccaatgaacaccctcatctctagaaaaggaaatgaaaaatggtgtcatacaaggagctcataacagtaactcgacgctaaacaagttcaataacattcattcaaattcaaaagagtaggcatactcacacaacaattatatctccttttttggcaaaagctggtatagcactaaacatagtggaaagtccataggaataaagaatggagtctgtagtacccaaaaacttagcgattcttccttcacaatcgagatggacatctaattcaaaaggacaaacttataagacttttgaaaaaaaatataaatatagatataaaatctactgcaattctttgaagttaattcatttgtaccaattgttccataaaacccacgaggaccgcaggaaccgactccatatttttccaatgcagaggtacatgattcctgatataaagcactgttagaaacgctccttctaagaaaactgcaaggacaaaattcaaaacaatagaaagcaaagattacaaagatagtgtttctattttggtccttacaattaacttctcatgtcctattaatccgagataatttgccgaagcaaagttcacaacttctttgccattgacagttgtatgtggtcctgcagcactgaataaaacttaaattgtaaggaaaatgtttaaattgtttgaaattactcccaaccataacatcattcacacataacaaatagtagtaaccacattaagagcatagtatggaacacaagatactagaagcaattcctgtgtattcggaggagagaacaaggaaactattgaacaatgccaatgtacaaggaaattaaaaaataaaaacgaccatgagaagaaatcataatagaaaagggtcaagcccaatgaagagatgaactaacttcacctttccaacaccgggggttccaacttcatttcttctgtgataggaggaataagaggttctggaacccattcctcacataactcatctatttcctacatagagattcattcactaaacaagtaagaataaatctcatatcaaacccttaaatagaactattcaaagtaaacatctaacaagatacatggataaatagcttgattcaacataggaatatgaattttagaacatctaccttatctgtcaatggtcgtttaggaggcttataacttttctgggataacaagaaaaggatcaccacgaacaaaagaccttccacaaaataatgtcctgaaaacaaacagaaaataacataagatcaaaatattggtaaaattaaattacccaatatatgaataggaaaaaatgtacagaatctgaattggagaaggtggagtaccgccgatatgaactccgtaaacaacagctccagcagaaggagcgtccaaagccagtgtcacccattctaaagtactttttaccattttcaatccaaaagattccattttttgtatctcaatttggtttgtagagaaatttgtcaaacctaatcacacgaaattaaaaatatattgatagagagaataatattgaaaattaaattgaagattgattaaagaaaatgaatttgagatttgggttggaaatgaaatgagggtaccttaggaaaaggtaaatagtatggatctgaagaggtggtctaatattcttgtcatacgaggatgatgagatcaatgatgctcacacatggagagcaaatcaaaaccatagttttattctttttattttcttctttaaatatagtttgttgttttccaaaggttttaacagatttcaaacatacatattacaaacaaacaacatacttgtcaatatttcaatatctgactagtcaaactaattcttagaaaatgggaaatttcatttactaatcataaataatagtccctattacaaaaaaaaacttttctaataaatttataccattttatcctaataatttcacactatacttaaaaaaatccttctcatttattttatttcaaaaacttaaaaaatctaaaaacttatttctctctccacatctcgagccaccaccttcctctctctatttctccctctagatctctctcattcacctaaagatcttggcgccctcaatccacccggtccttgaagcccaaattgttgaatatattttaccaggatttagatttactaacaagtatgttttattaacatcct

SEQ ID NO: 51586 - DNA, 1654 bp, Cannabis sativa
ttttcgttataaccatgaaaatcgaaaatcgaattttggcttttttttatgtaaaaaactgacaaaaccgaccgttgctcacccctacctttaggaagttaaaaagttgacaagatggttgtgaaccttttaaaagggtaccttgcctaagttattaccatagtagccggtttaattctaattttaaataaataagaacattcctttggatttaaattgtttttttttttgacgagagagcttcaggagaagccattacaaagctggaactaaagcattccaacaggattcttcatcttgccccaatgctcttcttgccaggttgtgcgctctgcaattaatagttctgtttatgtgccgcagacgaacatcagggaaagcagataaagaacatcttatatcttcgacaacatctgagagtgctgaaagatcggctttcttattgtggactttgtcaaccagcaattttgagtccgtctcaaccactgctataggtatgtgaatgttgatgcaccactctaaactggcccggaaagacaaagcctcagccattataggctgcaagttcccaaccacaggtgcagaaaaaccagctaccaaattaccttgccagtcgtgaacaacagctccaagacccatcttactttgtgtcgtgtgaatcgctgcatctgttcagagtaggtactaattttggggaacaactttttccccctgcccgaaacctgcaatttgtgaactccacaacatctgttggtattagacatggctgcttggtaatctgaaatgaatgtatcaatccaagcaataacatcagtaggggtcaaatccaaatttgcaaataactttttgtttcttgagtgccaaatagcccataaagttgtaagcaataggattaattgatctttatgcaactgttcgaaaccatttatcatgaaatctttgacatcaacatgcctgtttgataaataaaaacttgggagaggcgaggccttccaaatttttgaagctctgggaaaatctagcagggcatgtgtaacactttcagtagggtttgtacagaaagagcaagagggttgaggaatggttttcctaacaaacaaattaaggccaacggggagaatgtggtggaaaactctccaggagaaatttttaatcttaggttgaatatttaaattccaaagagttttccaccatgcattagaaagagaagaattagaagaggatggaggaagggatgcattattggcaatatgataggctgactttacagagaaaatacctgaattttcttggttccagatgatagaatcggccttatgaaggcccccaattggtactttgagaatagacaacacagagtaatcatcaaagtactgatgcaatttatatctatcccaaaacccattattatctatgaaaaaacttaccttatcaacaggaggcagatcattacttcttaaacatggaaattttatacctagaatccaaggatcctggaaagttctgatagagcaaccattgccaaccttccatagcaaacccctgataagaaggtctcttccccaaaggagactagaccaagtatatgagggagagtgacctaatttagcctcaagaaaattatttagtttaaaatattttgcttttaaaatgt

SEQ ID NO: 51587 - DNA, 823 bp, Cannabis sativa
ttttttgcatttttatagaattctatacagaaattcttatagcaactaattaacggaacaacctaaatctatagtaactcatataaaaattattggaaaaattacaggaacaatttaattcatggtaattccacgagaattaaataaataaatgagatcattaatacaagatgacgtggcagtccaatttaagtgacctggaaatgttttgtattgtatatgtggagccaatttatttatttgttttggggtatgcttattaaatattaatatatgatggtttgaaatgcaagggaaaatgatgaccaaagaggtgagtatagagacaagacaaaaaaatgtggtcttatcataattgtctactttgtccttgccattacaacatcttaaagcaatgagatgattaaaaaaaaaaaaaaggttggatgaaaatattgtaactccaaggaattcaattctacttacctacctacccactcaaaatcagaagctaaatttcctaactgatataaattattgtgaacttcttaagttacttgctgtgattacatgtacaaaaatctaccactttagtgtaataaaatactgcagattcataataataaaaggagagagaagaatagtaaataaaaagcgtgtacaatgagtaaatatcggatgggttgggcgggttttagatttacgggttttaggtttaaaaataatacctatacccgtttgtgaaatgggcgtaaccgagttcatgggtttacaggttaattgaattaacagattaatcatttgattcaatcaacaattttcttttacccgtaatatatatata

SEQ ID NO: 51588 - DNA, 2660 bp, Cannabis sativa
cctcgagatacactgaaggatgattgccaagataagtttgttgacggtgctgctggagaaaaagataatctcgataagtcagatcccgtggtcattatgcctagaaagcttcagctaactgaaaatgagttgtcttgacaagaccaattcaacgtcataatgctcgacaaaatgacaagaatagaagtcgtgatgatagccttaaccaatgggaacccaactgcacaaatgcctccagcaaatgatgctgccgaaaagactgatcctaaagatcttggaacctctaatcctcgtaaggataaagggaaagggaaagtaggtgaaactttgaagaaggcttctcagactaaacaacaaaagaaatctaaaactgtcagccaacctccatagaaaaagaaagggaaccatgcttcagggtaaggtaacaggctaatattggaggcaccgctgtacaaaaagataaacctgatgctagaacaaagaaacttacttcccggaaggacaagagtcgtcatattgatgccagtagtcaaagtgatgatggcaatgaagtgcatctaatttcagacagcgacaatgaaagtctctccacaaacaacctttgaaggagattaaatgcaaagaaagagaaagttagagcaaaaaggccagacctcgtagagatgatctgaggaatcacatcaacaatcgaatccatggacggggagtcttcaagtgacaaaactcaacgcttggaatgcaaagtcaaagagttaatgaagctcacggagaagatctccagaaagcaaaatggatccgtgtctaattcaaaagaagaagacacggaaccatgtgtgaaaaggtttataaatgcaccactgtcggagcgctttagctagagcttattgcctaaagtaaaagatgttatataaatttaacattagggtatatttatttttttgtactatggtgtatatcaatgttggatatagttcgtatagaaagaaaaatataatatattttactcaattaaaaagaaagatagagttgttggaaaaattaaactgaaaaaaaaattaataaagtataatgagagataaaaaaataatagcacgcaaaagtaaggacacgtaagtaattttaatacctaaggatatgatatttggctatttacttaatattttcaaaatatggacattaatttgattgctaaatcattttggggtcatttctctctattgcctttttttaaccaaaaaacttaagcccaataaggaaaaaaaaaaaagcaaaccaataactttatagaaaattgatatatacttggtattttagtttttgaaagcccatgcactattttggtttttaataggcccattaatgatacacttaaacaatctttacttttactcatgtaacatgttaatattttgtatttaaacacttacataattagacataattaagattaaataattataaattggaaaactatataaaactacaataattaactaaaactaatctaaaattattaaaattagttttttttttaaaaaaaaaaaactaaacaaaattaattaaaagtcactaaaataaactaaaaatacttgagaacaaagcttatttaatgcataaaaaagctaaataactctattttcatagagttatcatcccgttaggcgagagtcaaggttattcttattttataaacttcttcattattttagcattgtaaacactagtataagttgttatcataaggatgagtcaactagattttgtatctacaaacacttatctgtcaagatctaacattattatgttgtctaatagatgacaatgtattgaggattgtcccattaaaaaccacgaaccaagttagatcaacaatgaagattctaaatttatactacataatcaataatagaaaacaacataggttcatataaattcatacacatattcagaaattattaaacatttagcaagtaacaaaccaatttgttgtatcttttataattaaccattgaaactcgtctgacatagacaagctgaacgctgaattgcatgcttatgaaaggacattgtcacttgcaaggaggtccctctctagtactgcagacaagggcaaaaagaaaactgcagatattgagaaagattcctccgataatcctactacttcaggctcagttgagaatgagaaaaatagaaatagagatagagaaagtgcttccacttcacttcctcgtcctcggattatccttcacaacagattgaaccaacaataagaacaatccaagaatagttaagcagacatattgttcaatgttcttattgtgaataaaagggacgacattttaaatcaaaatgttgtcctcccaaacttctcaacactaagaacaaaggtaatgcttttgtttttgaatcatgtgttttcgagaatgataataagaagatactctgacaggggtacttctggccaacaatgatagaggactcgatagactatgtcaaaaaaatgtgacaagtgctagagatttgcaaaaattccaagagctccacctagcgagctcacgatgatgcagtctcgttggcccttcgcagtaagggggatagacctgattggtcaactcccaaagggaaaaggaggggtataattgtaatacccgaaattaaga

SEQ ID NO: 51589 - DNA, 878 bp, Cannabis sativa
tatatatatatttgaaatattttaaaaatattaaaaaaaaaagtcagtcccatgaatttctcaaaaaccaagaataggcacactttatgtagaatagatatatttaaatttgaaactcgtatttaaatcataaaacatacttaattttaagactcaaatttaaatcatatataagataaaaaatatggaatatttttttacatgtcttgctaatttgttgtacatttacttgtgtgtatatttggataatactccttcgaggtctcttgatgccatttgtcgggttacacacgatcacttcctagtgaatttatttccactcatacctcattggattcactttgtatattttgaattcaaaaaattcacatgacactaattgtaattttttattgaaaacaagcacctttttattgtaattgtgtaattacaggatagtataatcaatagcgtagtaattacttttttattgaccatagaaatgtgcgtatgtgttggaagtcctgaattcgagtttcaacttatacattgtgtaatatataaatacttaaataaaaaaattactttcttattttgaaatacaaagtgtatttagatatcaagtaaatattacatataaattcttatttgtatggttttgaaataagttgttaaattgcatagaatattatataataattaattattttaaaatagtaatatttcataattacacttaattcttacaaagattttgagaactacaaaatgtaattataatctatcaattatcttcacttacattctcaaataaatatgttaaattaagtacttacattaaattatactctaatccaatattacaaagagtttattttcccaatcacatgtaattttgg

SEQ ID NO: 51590 - DNA, 2909 bp, Cannabis sativa
  modified_base (61)..(68): a, c, t, g, unknown or other
atatgtgtttatttcatgtcgttttagaagttcatgtttaggatgttaataacatacttgnnnnnnnntctagatcgtggtaaaataattctaacaaaaaagccgtgtgatctcatatatatttttaaacaattattaatattattttaatagctactaaaaagaaacaaatcaaaacaaacatagaataaaatattaaaatattttttaagatttatataacaaaactataaattaatcttaacaagattaattagggaaaagataacattcaattgtctaatgtctgtatcaataaaatttaaacggaattaaataaaatagattaaaaaaatggaaataagttgaccacctaaaaaataaccttaataatattttagaaattaataaaattaaatattaatacccaaattcaaacaattaatatcatttcgcccaaaactaaaatcaaaaagtaaatcacacaattattgccaacaactgtaaattaaagtgaaagcatatctaaagtaaattaaaattaaataaaaataatattaataaaatcacattaaagtagaaaatttataaacgctcataaaatagactaagttgctaaaataaaatatcacctatcatagttttatttaggtccaattagtatttggcttattcaatgaataatcattatttaaataaggactttttttttttataaatatggaattttttaaatgcattttgaaaaatatggacatttaatgaaaaaacttaaaatctagaaaaaaaaaataagaaatttaaaaaatggaaaaaatagaatacctataaaatgatatttccatttataaaattcacgtccaaaatattcaaactcagttattctcaaaatagacaaaggtaagaaactattgaatttgattacattcttgacgtaattaacatgttatttaggaaaaattataaggaattttaattttagatttttattttggttctgaatgtaacctggtaccttacttttgaatatggttgtgtttgttttgtcagctacaatttataacaaaaaaaataccatgacttgaaaaaagtcacatgatagttcaatcttagggttttatattgcttctgaaagtaacctagtaccttacatttgaatatagttgtgtttgttttgttgtgactgtaatttataacaaaaaaataccatgtcttgaaaaaagtcacctgctagttcaattttagagttttatattgcttctgaaagtaacctggtactttacttttgaatatagttgtgtttgtttcgttgtggctgcaatttatagcaaaaaaataccatgtcttgaaaaaagtcacatgctagttcagtcctagggttttatattacttccgaatgtaacctggtaccttacttttgaatatggttgtgtttgttttgttgtcgctgcaatttatagcaaaaaaatattgtgtcttgaaaaaaatcacctcatagttcaatcttagagttttatattgcttttgtaagtaacctggtaccttacatttgaatatagatgtgtttattttgttgtggctgtaatttataacaaaaaaataccatgttttgtttgttttgttttgttgtaccttacattccatattcttttcacgaaaggaatctcttaaaaagcgtactagtttttgtgatatgtatgatttatattattttttaattgtttattgtatgtttttactcattttattgtgaaatcgattctatttaattcatgccttagtgttgttggaaccattcttttttttttttttataattagaatcgatttctaagttattgtttgttatttttgttactcattttgttgcggaattaattctgttataatttatgtatcaatatttttgaaactcattttctcttgtttttttttaattatatctagtttccaagttattgtgtgttattgatttttagccatttttgttgtaaattgattctattttaatttatgtcgcagctgaatttttatttaagtcatttcataaaacaattattgaattatttatatcagaaaccagtttgtgatttaattaattcaaggagatggtttttaatttaattattttgggaacggatttttgatttagttaatgcaaagaatcagtttttgatttttttatttaacttttttcgtgttaagtttttatcttggttgctttacggaaccaatttctttatctctattattaaaaggaaactttcattgtatttgaattaatgataaatgtgtacagaaaagactatatagggggaggatatccaaccctagaatacacaccatatccaactaagaataaccttaacactatacccaaacagtagaagaaaatatacaacatttaatatttaatagtttcattttttaactagttgataaatataaccagtttctttatcttatattttaagttattatgtgttatttgttttacttattttgttatggaactgattcaattaagattcatgcttcagtatttttagaattgatacccacttttattttttttaattatatccagtttatgaggtattatatgttattcgtttttactctatttgttggaaaactaattttgttttaatttatgtttagtgttttaaaaactaatttcgtctttattttttaaattatagggccagtttggcacagctgtgctgtgggaaaaagcagttgtagctgtgctgtgaggaaaagcagctgtagcagaactgtaaaaaaaaagctgagctaagtgtttggtaaattataatttttaaagtgatgcgacttgttaagattctagtataataatgataatattttaatctagttcattataatcacaaatatatatatataaaaaatatatgttatataaaattt

SEQ ID NO: 51591 - DNA, 804 bp, Cannabis sativa
cccaaccccaaaccttaattcaaattgctctactttactttacatgtgttcatctttggtactcgggataatttgcttttgttattggagaagacttcttcggttgtttttgcttgtacacaacacaaacaaaatatggctacttaaattggtgtttaatcatatgtaaattactttataatttaatttgatattacccctatcttgtggttgatgaagtcactcaaataaagtaaatttgactacatgacatgagcccccatttattttaggaaatacaattacaagtcttcatcatactaaatttgctgtcaagaaggcaattcgttttatatctaattgtgtaccaaaccaattgatatgtttgcgacatgaggtgaacatgaacagtgaggagctactcattgacaagaaaaaaaatatatgcattttatatgtattgtatgtaaaaaaaattatacatagttattattaatttgcttacaatttgccccccattttctaattcttcccttcctcattgaatatgaacataccattattaatcatgtcacgatatcaaacatgaacataattttttaataagtcctactatacaataatatatcatataacacaaattcaaaattgacatgtttaacatataatatgattatatatacacaaactggtaagattttatgtcatttttctttttttaacagagagaatgagacataaagaaggttttaaggattgtttttttttcttttcttttctttttatgcttagggttttttagatttttcttttttcctttttttt

SEQ ID NO: 51592 - DNA, 1366 bp, Cannabis sativa
agagagagtgatgaaaggagagactaaaacacttagttggcaagagggagctccaaatttgaaagtattatagaaaaagacaaaatacattttacaaaatacaataactactcttaaaaaataataaaattttatttttaaaaggacaattttataattttactaatcaattttgtctccatccttctcacctcacacctaatatcaaacaatacaaaggagattaacaactctctatctctcttactcatcatcctctctaacctctccatctatcatactcttcctcccacccaccaaacatagtcttaatttgtattagtaatacaggggttgatattgtttattatttctaagaatatatgttaattgtctatcttattatagaaataaatatataaatatatattatgcactaccatttatatttatactagtatatatttttggtacattggaaaaatttagtttgtatgcttaaaataagtccaataaatcaaaataacttactattggaccctattacaaaattatgctaatatttcaagtgtttccaaaatatcctttcataatatcttcattctctcccaaacactctaatattgaagctcctccacttgcatttggatccgccaccgcacaacctccaccacctcagcccataaaattgcaagaaaggaaaaaggcaagaaagatataatttggacccatcatcgtcgcccatcacaaataaactgaaaatttgaagatattaagctactattgaaccgtcgtcgagggcatcaaactcagcctataagtttttattttttacaacattattgaaccattgttgagcccacatcgaggacatcgaatacaatcatcgagttggcattgtgaccatatcgagactatcaaacttgaacgaaaaaaaaggagaaaaattggcagacaaaaatgaaacacccaaaacaaatctgacaaatcgaaacaatcctcatttgaatagaaataacacaaaacaatctcataaataatgcatacatttcgatagttttctttttcttcgttttttattaagaaaaaaatttaaccttagcttggagaagaacttggggcgatcgacgttatgggcaacatggctcttgggctccgattgtgggttctcaaaggttttgggcgaatagacaaagagggagaaagaggagagatcgtggactctgctgggcttcggtgggttcttagacagagagagaaagggatgggtatctcataaacaatgcatacatttcgacagttttctttttcttcgttttttattaagaaaaaatttaacctaagcttggagaagaacttgggtcgatcgacgttatgggcaacatgg

SEQ ID NO: 51593 - DNA, 2781 bp, Cannabis sativa
  modified_base (147)..(147): a, c, t, g, unknown or other
agtcgctaggcgataaacttttgttatatacagttaaacttttgtaaatacttttaaaaacgggatcccggatttttatatgtttgatattttatgttaattaaataagcaaattttaattaatcacgattttcaataacctcgttnattagcaacgagctgcacagtaagttaaaaattacgttaacatgcctaaactagtaaaggtgttacagatataatttttcgaagtgccgaaaatagaaaacaactctacaatagaaacaaaaataaatatctttacttaatttttttatatactaaattattgttacgtatacttagttatatttttaatttttatttttgttatgtgtattttaaaaattttataaattaaagaaaactatttattagtttttttaaataatatttaaagttttcttgaagaaaataaatataaaatatatatatatatatattaatttataactattaataaaaaaattttgatagaaattttagccttgtatatattgactgaacatgagccctaaggtgatccttgttggcttaagcttgtaatatattaaatgtaatcaaagtaaaactaaaattccactttgaagtcattcccatttgcaagtagatcaaatgatgatcatcacattcacatgatattcatattgtacacaaattttattgtaattaaaaataagaatttttgtagtaccaaaacaaattttaatcaatataatgatcacaccttcttgttttttagatgattacatttttagatcacactttctaataactacaaggtaaaaaaaaaaaaaatcaaaacaaacaacaccaaaccccaaaaaatagaaaaacaaataaaaataaaaacacagataacataaaacataaaaatatagatgtgatcataagaggcatagtctaatgattttacatctcttgataaatcccaaattcaaaaatctatcttccaatatgtaaaaaaaaaacaattaatataactcaaattgtcaaattggtctatgaatcatgatgatcatgatcacaaccaacactcatagagcttaacatgaaccctaagtctaaaataaacttcaccttcaaaagcatcagttgtcaaagtagcaatccctcttgacatgaaaaaatctccagtcccaccaacaatcgaaatatctttaaatttgttcaaaatcggatcggctcccataaaattaaggctgcctttgtgctcactcgagttaaacacgaacgaaaaccctagccaagaagtgaaaacatccttcttgtcatacatgtaaaacccttgagctcggccaactggggccgagtgaagattgttgtcgagtgtaatgggatcatcgaacaccaccacgtcgccaaaatggtcattcccggctagtttggttttgttggcccaagctggagctccaacaatagctgaggttgcattcttggcattatttccattgtatatgatgtcatggaaataaaacactagacttttacatggcttaagcttatttattatcattgatgatgatctcttcttttggggtagggcattgttaaaatcattgatgaatatgatgaagaagaagaggattaggcttgaaaatattggcttgggagacttcattatcatacaagcaagagtttttagctatagggggtttgagtttattgaatagtcaatagtgtaatagaatccttatatatagtatgggttgcatgttcatattatattattatattttaccatttaaatttaagtaatgatatatacatttaaaattatgcactatcacacacactaacgagacagttttttttatcaattatatatttaataattcagatgaaattaatatatttattgttttataagaagcattatatatacaccatgttagtaaagttttggtgcataatattataaatagagtaatcattacatatatttatataataatgtataattaatttctaatttatttataaaaagtgtaaaaatttggtgtgtttccgacattcatcttataaatcataagtccagtacactctcctaaaagggtgttttggtagactttttatctagttcagtatttaagtgagttttttaattagtttatttttctttataatcgtgtatattgtacatagttatttagagttatatatcggtatatttttaaaaaattctgaataatatttttttttggtaagtaaaaaagaatctattgataagtgcatgcaattttttacatttgggcacaaatctcaaactaatctatatcctctatacttgtattctctcttttaaagtgagaaaacataaaacaaatttccttttcaatcctatgtacaagaaaatttaggcagttggaagacttgaaaatattggaatcgaaatgagaataagaatatgaataggaatggaatgaaaataaatttaaaataaatgaaagaaattgataaataaaaattatcaaaaaattttctcatcttacattgaagtattttttttttatttcaaaatagaataatcattcttccaaaataatgaaaatgtctaattagtcacaaaatagtcatttagtactattccattaaaataacataatactttaaaatgtaattaaataaaagaatataataaaaattattctttttttctatttcattctatcacctccaaccaaatacgcatcttaaaatgtatatataagttctaaagaatattatttttagcttcccaaatattataaactaaagtattaa

SEQ ID NO: 51594 - DNA, 823 bp, Cannabis sativa
tttattttataatttatttatataaatatatgtatatttttgtatttgattaccaactagaagcaatggaaaggcaaaaactgtggttcaataactaattaaaaagagacaaaaagacaaagttataccccataaatatttttaacattctaatgaacttcatttaatatattcttacaaaaagatattttatatgtatatttaatttatagacgtaacatattgttatttgaatttttggatgggtgacacgtgatttctcgttgaagccagttaagcatgggcctatcatttggtctaaacgaatagaagagcccaacttttaagtgggtacaaaatcagacatgttttccaaatatgatataagtcctctggatctcttgagctcccagaaaaatggttcaaccccaataaaagacataagtaatattggaacataagaaaaatgctcctaggtgtcatccgagaacgggagtctaaagggtatccaggatcattcaccacctgagaggtagcctacgtggcacatctctcacacaatcctaagaatctggcagcttgtcccctctgctagatcttagaaatgcacacgacgaaaaggatatcacctttttggagggcccactactctgaaattcctatttatcaacaactgcacacacctcattatatcactgtcaacagtgttgcatcgtatggaaggaaaatctttggaattgggtctcacctacaaagcctaatagctcaaattataaaattataatattaaataatgtattttacccccatgagtgaattatattatacaaaacactaatgaggc

SEQ ID NO: 51595 - DNA, 835 bp, Cannabis sativa
taatatattttaggggcttttttatttttatacttcaaaatagtttttttttttttgacatttttgcaaaactcgacacagaaacctccataaaaattaacgaagcaacctaaatcgcaaccaaaatccacatagataatttttttaaaaaaaaggttaaaaaatagtatgtacgataattttcctatattttattaataagaatatttgagttaaatattcatttatatacatatatatatttggaacaatgaccaattttattgaaaaataatcaaaattaagtatgtagtaaagaaatggtggaaaattatccttcacaaaaacaaaatactacaattaaaagttttcttaaaaaaatgatgataatggtggaaagcacgtgggcccagaacattagcccatatcatttcttggccgggcttcattcaatcttctgcatagcccgttagtgaaggccccatgcatgggcccataaccttattatgcatgctaaattgtaatgagagtaattaacgataagagaaaaaggcctaacatgagagagaagagggagtgagaatagccaaggagactgcctgaactttattcatccaatcaacaccttccacgtgtcaaaagccattcaaaggaaagcaatataatgcaggcaagtcatccttggctatcaaactaaaccacactcttatcttcatgtatggccctccctcttcatttcaagctttgactttgagtctttgactagctatatatatatcatatgcattttttatataattagtttattattaatggtcaagaacagaaggtctagcatgagaaaaaagagcctgtc

SEQ ID NO: 51596 - DNA, 1420 bp, Cannabis sativa
ggggggggggggggatctgccttatagagagagcgcatagtgagtgtgagagtggaagaagaagtgagggggagagatggagatctccgtctggggttttgatttgatgaagaagaagaagaaggtgtgcatgtctacgtgtgttgtggagcattaatttcagaaaaaaaagtaaatcaaaatattttttatatttttaattatttattttattttatttttaaaattgtttgtttttattttttaaattattttttataatatttaaataattaatattatgtgaccactaaatatttgccgcgtgtacatcagggtacaccgaggcatgtccaacgtggcacttaactgagttttttgaacagaaaagtataaagcatatcagaagtgcaattcaaataatttccttgtcaaagatgagtttataaagttaagtgttacaaatcataaaatttaaatggttttactagcaatatcccttgatatgtttgctttggtcgatcaagtttaagaagagtattttcttaattaccgttgcagccaaattaatgagaagaatgagtatacagttcttatatgtgtgagtcaattcacttataattctattcaaaatgatcacttcatttcgaagtgtagtgggccctccccatcaatcaaatcatctaaaaacaaaaccttatatatgcctcatttttatttgtttaggcctgcgaatttgttgcaccagaatttatttcaataatttattgtcacaatagtttttatgtaaagacttataaataattagttattcgaaaacagttctataaaaacagattaaagtctgtaaaaagaaagaaacaaaacagtcaccctaactatatctatgtatttttatatatatatatggtttatatgcaagtgtaatataatatattttatacataaatatatgctaaagaaatcaagaaaaacgatacagtgtaagataagatctcgatctattagatcgatatacatgttgacaaaaaaattaatgatcaaattatagatgagataatgtgttgaacttaagtatgggtctagagcatgacacaacagtactatatattcactaaacagtacacgggatcaacgtgttgagccatattgagcagaaagacaaattaatattcatgtatgtcagacacatgtttatatatatcgatcataatatataatacatgtacgtatttaatgcttagagagcacggtagagtatcataattatatattaatctatatgtacattaatatatatatatatatatatattcgatgtaaaattaactatataataaaatttgaaatttttacataaaaaatccattttacacaatttattacaaaattactcatacacgcctatgtctacatttttacttacaaagttggttttatt

SEQ ID NO: 51597 - DNA, 926 bp, Cannabis sativa
tcaattcgttgtattagaaggtgcaaactcagccaatacatagcgtgatctggattacacgtgacatttttcgtcatattatgctcggtgctcctcttaaaatcttgataaatagtttctttgactgagtcccacttccaagaatcccaaagcttttccttcattgaagaagcccaacctctccaactaccaaacgacatagtattattactattattatttgaagaagaagggtaattttccatagctagctatataggtacgtacaagaattaatattttcctcacaattaataataatcaaataaaatttaggttgcttgctttttcattccacttattatatagtaaagtatttaaaattataatcgtaattgaattagaattaaaaatcaaagataataataaattaggtttaaacttagatatattttttaaaagatgtataaattatttgaaaaaaagatatttatttttccttttaaagaaaaagatatttgattattattgtaggataatatttaaacaaattcagattatattttagtatatatttttatatatgtaatattttttttaatataaaaaaatcatggttaaactcataattatgtttaaagagataatatattattgataaagataaatttccaaaattataccctatttagttaattatctttttacataatagtcatttaattaaattattagaatttaaatatatcgtttaaaagataaataataaattaggtttttaacgtaactttgtattattaattaaaaaaatacattctatatatggaaagtaaaaaagatattcagtttattttttaaaataaaaaaataaataaatattggattattattataggataaatttaaacaaattatagagtatatattatatattcatacgtattttt

SEQ ID NO: 51598 - DNA, 1090 bp, Cannabis sativa
tgattatgaaagtaaaactgacttttcaaaccctcaagttactactcctatttcggaaaaagggctccaagttttcacctttaagcagctgcattctgcaactagtggtttcagcaagtcaaatgtggttggacatggtgggtttggtttagtataccgaggagtcctgagtgatgggcgcaaagttgcaattaagctgatggatcaggctggaaagcaaggagaagaagaatttaaaatggaggtttgatcattttaattaaagatgtatcactttgaatgtggaaattcattgtgggcatatcattaatggttttgtgtttgatctcaaatgtgaagtgggttactaatgatatgcaattgtaggtggaattattaagtagattgcggtctccatatttgctgactttggttggttattgctcacatagtaatcacaaagttttggtgtacgaatttatgccaaatggtggtcttcaggaacatttgtaccctgttggcggtaagtagcatactttactattagtttaaagtttttattatgtctgaactgaaaaaataaaaaagaaattggactccttgcacctttaattatttccttatgcatattattacctttgggagtgtcagagtcatatatatatatatataatgcacactatatattagttcattattattctttccactaatcttctgctacccaacacaagcgtgattgttttaaaagttttaagtaatctttgtagttgtgaaaacttgttttacctacttgtctaactatttgcttcactggctcatttttcctttctcgtttccatttggtttggggcatgatgatatcttagttattgaacaggtataggctgaacttatgtgtccttgggttcgtcctactataaagtataaactattttttaaaatttagaaaattagaaaaatgaaattcatatggttaattaatactttttatgctgggtatgaaacattgaaagccctgaactgagataagggtacagaataaaccggcttgcatcctggaggtcctttatgatgctgctagaggaacatattgaaacaatgtatgtga

SEQ ID NO: 51599 - DNA, 1424 bp, Cannabis sativa
tataacagaattcttggtttatgaaaaattagtgggtgttttttttttaattttctattcaaaaataacaattttttttctaatattattatatatatttaaaaccctttctcataacttttacatataaataaataaattaaactgctaaaactaattcaatttaagaatttttcttctgcgattgaactcatcaactacgggcgaaagggtgtaaacaaaagttttctttttttttagtcttgtctatctaattcaattacaatcgctgctcaaaggtttgtttggcataaaaaagaatttcacaaagaagacagtgggctcagtgtttaactccgctcatcatggggtaaaaataaaaatattatgattcttttttttaagcttatactacttgaattaacaattttcaactaatcgagcattgttttacagtggaattggcagactatagtaataggggtgacattcttggcttttcttctggtcgccaaacacattgtaaggacaattcctacaatattcttaaacttattattattgattttttctcttaaaacttatattgcgatttccaaataatcttaaaccctaaaaaacctgtattcatacacctagcgcttattttacagactcactgatgttgtcaatttctttgatgttgatattacaaaaccagctctaagtaaggcaccataatttctatcccatggctggtcgattgcatgccgagacgatgatcgacttatcgaaattgattgtaatgtcgaaggtgttcttcgtcgaggtggagtccacccatgtattactttgatggcattgcttcatatcctctcttactctcttggtgttacaggtatgaatgtttttatttatgtaatttgagttgacattattgtgaattgggttactatatatcaatgaaaatgacatctatgaatttaaatactagaaatttattaatattttttcggaagaaattatcattgtctgttgataattattaagtatatttgaagatattattgttttcttccgttcttgaagaaagacttttttggaaaaaagtactcttaaaattttttaccaacttttttaagacaaaaatttctttagtaataaagttaattggagttaattattactgtaatgaataactatttatttcattgggtcctcttcagaaatatatctatgctaatgctaaaaaattgggtctctaacgacgacaaatgtcctcgttataacttcaaatatcctcggtaaaactatagaacgaggacaagtcctcgctaaaaagtcctcgttaaaaattgctttctgccaaggacaatagtgtagttctcgttaaaggctataccgagaacattgttgtcggtaaaagctttgatatgttgtcggtaaaagctttcattttggcctaa

SEQ ID NO: 51600 - DNA, 1548 bp, Cannabis sativa
ccaacaattccaccttgttttgattactttgataaatgggagaggatgtgactcagcagtagttatgacttgaaagagataatattcagtagccattgacattcagtaagcttagacagtgtctgaactttgcctgagtgacacacttggttagcatatcagctgggttgtgtgctgtgttgattttcttcatgctcacttctttccttgcaacaacatctttgataaaatgaagctttatgtctatgtgcttggatctctcatggaacatgggatttctcattagatgcagaacactttggttgtcacagtatacagtgacatcatctgagttaaaccttaactcttttgtgagacccttgagccaaatagcctccttgacagcctcagttgctgccatatattcagcctcagttgatgagagagccacaaccttttgaaggttggatttccagcttacacagccccccaaaactgtgaatgcataccctgtgagtgactttctggtgtcaatgctgctagcatagtctgagtttacaaacccagacacttcttgtgagtgtgagtcatttccaaaggtgagtcctatgtcaagtgagcccttgacataccttagaatccatttcaaagctgaccaatgttcttgtccgggatcagcaatgaatctactgactacacttagtgaataggccagatcaggcctactacacaccatggcatacattagactaccaaccccattagcatagggtatggtgtccatgaatgccctctcttcatcagtgttgggagactgatctttggtcaatttgaagtgtggagccaagggagtttgcacaggtttggaatcactcattccatatttttcaatcacatttttgaggtattctttttgagatagggtgattgtgtttggcctttgtctttgtatgtcaatgcctagaatctttttggcttctcctaggtctttcatgtcaaactcagcattgagttttgctttcaatttgtcgatctctgttctgtcttggccaacaataagtatgtcatcaacatagagtagcaggtacatgtgttcatttgcgtaaacacagtaatcatagttgcttcttgtataccccagtttctccattgtttcattgaacctcaagttccattgccttggagcttgtttcaacccatatagggatttttgcagcaagcatacttcttcagggtcattgctttcaaaaccctcaggaatagtcatgtagatatcttcctctagactgccatggagaaaggttgttttcacatccatttgatccacctcaagatcaaattttgcagccttggccattatgattctaatggatgcttgcttcactacatgtgagaatatgttagtgtaatcaataccctcattttgagtgaatccctttgctaccaatctggccttgaacctgacctgttcaaatccagggatgccatctttgaccctaaagatccatttgcatagcctctgtccaggtggtcttctaactattctccatgtcttgttcttgaccagtg

SEQ ID NO: 51601 - DNA, 784 bp, Cannabis sativa
tagcaacgtaccagaaaattgagaaaccataggaggttcaatgggaacatgtggcatttctggcatcctttgggacagcaatgccattagcttttgacactacacagaagtaagactagaaaccagatcttgactactatcagctccctcaccagctttgtcatgatttccagcattgtctccagtaatgtttgcagcactaggtttccgtccatgtgtgtttccttgagcactagcatttcgattagggaattttccatgaagcttgtgcccaggagggtaaccatttatgcgaaagcacctggaaatcgtgtgtccagtaatcccacaatgagtacaaaccaagttaggtcgatgtgtctgtactgcaccagcaaattgattttggttcgatccagctgcagatccaggtttttcactttccacaggtgcactagacaaattcctttgactttcttcttgtatgacagtcgcataagttttgttaatgtttggaataggatcttgcatcaagatctgggatctgactccaacataggactcattgagaccaactaaaaactcaagaacacgatcctcattttgataatcttgaataatcttcattgctccacaagtacaaactggctgtggtctgtattcctgaattaaatcccatagagacttgagtcgagtgaagtatgttgttatgctattcgatccttgaaccagagactgtttggttcgaatagcttcaaaaacacgaggagcatttttttgattaaatctttcttcaagattagac

SEQ ID NO: 51602 - DNA, 1777 bp, Cannabis sativa
agagaatgagtgaaattttattttaggggtattttaggaatctttttgaattagtggtatcaatttgtacaaaaaataaaggggtctaatttttgatatagggtattttattagggaaaaaatatgaaatttccctaaagtacacaaaggtgcgtgtgtatttttaaaattttgtgacatttttatattttatttaaaaataaactgttacacatgtaaatttaaaatgttacgtaaataataattttattatgctattttttttttgttcaaaaaacatttttctgatgattaacttatatcttattcttttacatttttatttaatatataaaaataaataatttattattcatattttaataaataattatatattttttacaaattgtttatagttttttataatttttctttaaaattaacacacatgacacatgttgacctcacttttagccaacaacagtaaggtaagataaagcgattagataaaataaataataaaaaacaaaactaataaagtaaaaagaacatcaggttttctagaagttcgaccccgtgagaatgataatagcctacacccctttttgttgtattgacttgagaaaaagaatgaagtgttcttcctctcaaagctcttacaattaatctctgagttattcactctcttagatcacttttctatcttgaatgttctttttggatttaatttttgtctcctccatggtgagattatgccactatttataagagattattacatgaagaatagtttcccttaatctataataaacaaaataggaaactatattaattctataatcacaatgcaaggaatggaaaaccaacgtgtattgcctttattctctaacttaatcccacgaatatggggattatcttcgtatcttggaagcgacgagacttatgtttgaaatttctaaaatttcccctgcagcttctagccggatactcaacttgctgccagacttatgtaagggtgattgtacaaaccaagttcataaagaagacaagtgtcaagggatctgatcggatgaccaacatgccaaccagatttagcactgctagggataccggatagagatacacgatcatttatctcgtcttcaacaagcttctacaaatatctacaattgaaccctacatactcagattcagtaaatttatccaagaataacagagctttattagattataactgtatcctacaaaatatggatatttactatgtttactcctaattttacggagccatatgtaacaactattaccttatagtgaaggcatccacacggggagggaaccgaaaaattgagaggtatactcatacttacacatctaagagtattttattgggagatatctgtaaacactttgagagccgtagctagaaatcaccttgtcttcattagtgatttgcccggtattatctcacaagtaatacaacaaaatgagagtaagtaattacccacatacaaaagggttgaccctttagaaattctctgtgatctttctttatttattattctaacctctttagtagtgattgactaatatttattagactctgagttaattggctaatttttcagtcaatagaatttgttgttacaacttttttttcaatttttttttcttttttcctttttgagataatgatagttaaataataactataaactgaaaaacaactaaaaaataacataaaaataatagaacaaatgcacatatatacaacaaatatattgtctaaaataaa

SEQ ID NO: 51603 - DNA, 676 bp, Cannabis sativa
cacaaccactttctctctatctatgagtaaactatttagagaatcaacttggagaactagttgagcttccttgtaattgttcttagctttttcataagcctctctaatatcaccaaacaagtgcctgttgaactctttgggcttatgttttagcctcataactttaagataaactccctagagaccataatttctcatcagtttgctccaactgtctaaaacaacctctttaaactccttatgattagcccagaagttataaaattgaaacagtttgcaacctaacctcgtagctgaaaccatgtgtattatgcaaaggcagtgatcagaacaagtttcccaagaaaagtgagcctgagaattagtaaaatcatttaaccaagcctcattatgaaaaacatgatctatttgagaaaaaattctattatcttgcttattagaccaggtgaagttggaacctgatgttttcatcggcccaacatttgcttgggcataccaggctgtagagtcagcaagctctgaagccgaaatgagctttcccccttcctatcatcgtgatgaaaaactacattgaagtctcccaaaatgagccaagctgttttcaccttaatcctagataaggtggaccacaactccaatctagcctctatatagttagcaccatagataaaagtgg

SEQ ID NO: 51604 - DNA, 785 bp, Cannabis sativa
tctacatgcatctcaacattcaagaacttacgagtgtttgatttatcagaattatcttttgaggtgttgccaagttcgattgggagcatgaagcagttgagatatcttgacttatacaataatgaaaagataaagagattgcctgattcaatttgtaagctgcaaagtttacaaactttgaattttggtggatgtgtggagcttgaggaattacctaagggtatatggaacttggtaatccttagaattctttcattaaccacaaaacagacccttttaggagattgtggaattggtcgattaaagtctattcgtatattaaatactcttgcaataattggttgtcgagaattattgtctctaccaaaagggatggaatgcctcgcatcattacatactctcataatattgggtattgatcaactcaacttagcaagtgaaagtattaaagaagatgtccaatggagacttcagacatttgtgattgatgagctaccaatgacaacagatctgcctcaatggctccaacatagctaccaagaccctgcgacgaatacagattgaagattgttccaaactaatgagactgccggagtggctgccaaaactcatgtcactcgagaagcttgtgattaaggattgtccaaaattgttgtcccttcccgatgggatggaaggcctcacctccctcacacatttgaagattgaagattgcgatgcattagaggaaagatgcaaacgagaagtaggcccggattggcataaggttgctcatgttcccaacc

SEQ ID NO: 51605 - DNA, 3379 bp, Cannabis sativa
tttcctaggccactaggggttgtgtggtgtagtgatagagatgtctttatcagtgacatcttttcttgcttgggtcaagtgttcgaatcctaccataacctcttatgagaggaattatgcttggccctttaggaggctaccttgttgtggcagtgttattcttattgggatgagaatcctctgttagaaattgtatatgagaatatgaagcatatatataatcatgtatgaatatgcggaattaaattaactatgcacacgatataactaaatgatcgaaatctctccagccattgattctttgagcttcaatcccacacatgctttgatctacaaaagaaaataaaattgattagtgtgggtaatcggacttctaagctctctctactctctttagatggatttactatttttacagattgagttgtgagttcagggattgagaccctatatttatataggtgagaccttccatcaaaatttctaccacaattaattgttagaatattttgacaattaattaaggaaattaaattgagagatcaaatatttggtaaatcgcaatctgaccatatttagaatgtcaaccaattaattatgtctagattcaatgaatataaaatattcatttatcttaaattaattcattgattctattcttaaaataaaaaatattttaatattttctaacttggtcagcatttagatttaccacttaaactcaacgattatccttgctatataacaaacatataaatcatggggatatatcctcaatatatggcgggtttcatcttccatgtattacaataaatttattgtataacaatgtactttatttgacaatatacttaaacgaacaaaccctatatgtttattctggtcctcttacgataattttctcagatgaaattatggtgcacatgaatataagaatatattgaaattagagtttcattgaacaattttagttgtacaatccaaaactgcataggagtaactgactcccatatttattttatgatccttgaatttgtgttgtgacatgcctttagtaaaggatatgcattatgtgcttaatgataacttgtcatacctctttatggctaaatatttaatgtcgatatgctagattcggctagtactcttacaattcttaaccataaatatagtagctgattttttgcaaaaatgttcttaatggcctagatatctgaactctagattagatatgaaactctataattcaccatacgaggtatcctcaaaacaataaataaatctaatttttataatagaaataacaatttaggttctccacaataatttactggtaatcttaaaaatgcaattaaatgtttatttacgtgaatcaacataaatagtgaagtacgttagaatctaattggttaactatattttcagaatgtcaattcatctcattgaaatatgtatgaatataatatttagtatattaaagatacatcatcactttgtatgaaaataaagggatcataactttaattattttgattttactttaacaatcctgaaataaatgcaatgtaaagtcttattcagactcttaggcacacattaggcttttaaaaatagaaacaagggatgttcttaatttattctcattctagatcattttacaaatgctggtttgagttgagtttatcacacttaaagataaaagtaacatgaaatggataatacataatttttattaattagagacgtttatatatatcatttatattaaataataattttaagatatgaattatttttaccttatatatgaaacttttatcatcattacaagtaacatattgtctatatataaaataaatattactcccactgacaatctggtatatagttaattctataatgttattttcaaaattaaagaaaagatgatataatgaaattccaattgtaaatttttttttttaatctataagtaagcttttaaagcttgcatatgttcaccaccatcagaggaaaatctttagggttggttgtatacattctcctctagttcaccgttttaaaattgatgaatgaattgaaatgagcaacaaatgtcaaggttactataataaaatcttttataaagacaagtgagaatgcaaatctcctttgttattgattcttagtttaaaataaacttcttaacaatgaatcttgttttatatcttttatgtttctccatattgcctaatgagtatttattagtaaaaagcctatgcttaattaacagtcttcaccccattaggcaactttattaaagataaacttcattgctccttaggatattcatctcttcattcatggcatattgtaccacaatttcaattttgtgcattgaacagtttaatttctctctcaaattgatattatcgtcttattgtacataatgtaatcactagaaaatattgatcttattattctaataagttattttaaggatgagccaacaaactctttaaagaacaaaactgttcaacatgcatattgtttagaaattgtaagcaattactaaataacataacttattagaattttatcaataacttgtggatctttaataactttgaaatctcaataatcattaaacttaagggttgttgtgaatcacaatcaatccaatacttaacgtgggagtttgataaaataaataaccttttttagaaactaggttcctagatcgatcgctcccactgatcaacaattccataattctagtgttttgagatggataataaaacatgtaacccttacaccctataacatttatgatgtttaggccaagttctatccttttgacaattataatctaattatatatggacatttctaaaatgtgtacatgtcatcaagttggtttccaaccttatcacaactcaaaatatatttgaggaacaaattttgtcagaacacaattcaatatgcacactagcgttgaagagtatcaaccaacaaagattcaagaaaattaagagtttgctatgtagactccactccatgtccaacaatgcctagtttcttaaacctgtcacatgccattatttaggtgtatcaggcatatgtattgggcaatgaacccatattttttttaagaaactttacaaataaaaaataagtttattcatccttacgaattttaatgtagtattctccatctatatttgatctcactattttaatatgcaaattgtattatatatctacttatgatttaaatgtcattacaacatataaatctttaattttgttgagatataatttatgtgagtaatcattaatgaattagattatttatttttttttaaaatccgagctcaaatctgttgggaatattttacca

SEQ ID NO: 51606 - DNA, 1254 bp, Cannabis sativa
agagagagagagagagaaggaaaggtggtggtgcagtggtggggatggtggtggtgatggagaagagaagaagcaaaggaagaagaagaaagaagaagaaaatagtgaaggagtgcttcaacttgttatattaagagattttaaccgacgcattttgttgcgccgataaaagtttacatagcgccggcaaaagttttataacttactcaattgaaatgcaacattttaaaataattttggcggtacacatttgcgccgaaaaaagtcttctcacctaccacatttccaagcgagagttttcccacttttttggggaacttttaccggcgcagaagtctaattttttcgctaacaatttgaagaaaaaaaaatcatttagtcagcacagatatgcatatgcgtaaaagtttttccattttcttaagcagcaaaatttctcccaatttttttaaccttttgacaaaggtttatgagcccttggaaatggtttgtgccataaggcagttaattccaagacttttactggcgcaattcatgagttgcattggtataggtaaccggcaaaagttttcgctgaaaattttggggattggttgagccactttatgccgacgaattttgccggtgcatttggccaaatgcaccaaaaagtgccatttttatagtgtgaatggaaaatatgccaagaatacttctcgagagaaatgtttggaaatggcccgagttgacaatatgtcaacttgggtgctaggtccgaattctaactctcaaatggctctatttattttttaaaagtactcatatcttaattgttgacaaaaatagagaatatactcggaagattttgtatgaactgttattgaaaatggcacatgttgacaatatctcaatttgggcgctagaacctagcactaggtcaactaggcatgggacctagcactaggtttattttttaatgctacaaatcaattaggatcttcaaatgtttcatgattattgctacgaatttaagttcttccttctctcgccattgaagaacagagaagctcgaagaaggaagaagatagaaaagaagagaagtggaaacgatgagctcaccaatagtgtggctctgataccaaattagttttaggataatgaaagaatgggatgactaaattgattctcattaaattgtaatagagagaacaaatgtatttttatacaatttgagtaacagagacaactcaagatctcaagttacctgcagtggcg

SEQ ID NO: 51607 - DNA, 874 bp, Cannabis sativa
  modified_base (327)..(329): a, c, t, g, unknown or other
attcttttaaaatgtcatgttgggcactatcgtggtctcttaaaggtcgttcatacacactttcaaacccaaacgtgagaagggtgtcttagaaatagtctcacattactaatgtgtaggagtgtaaatgaattgggtcagatttgatctggctatgatttgacctgatccagatcatgtaagaatccgccctaccctgccccgcctcgctagatcagatacttgaatcaaatcagatccgactcaacttataaggatcggatctgatctgaccaaacttttttttcttatgaattttaattttgtattagtattatttaatacaannntatgtttggtattgacttgtatgaatagattgtgtaaacttataatatattttcaataaactcgatcccaacaccacttacaggttgggcccgaatctcaatccagtttgggtccgagtctgagtttgagtttgggtttgggtcttgagtctaggttcatgtctcgggtcttgggtcccgtgtccgggtccggtcttaagttcgggtccaggtttgaatctcaggcgagttcgatccgaggctgggtcccaagtcccaggggtttaggtttgagttccgagtcttaaattaagttttatttaatatattaaaatttaaatggatctttttgatatgtttactaatgtatagaaattttataccataaataaaatataaactacttctctcattatcaattaattatgagattaaaagcattaactttaataacaaaatggttatttgttattgtcttgtcttctaagcctcacgtgggaatttctttagagactccaacttgtctccaactaaataggtcttatttttttaaaataatattatat

SEQ ID NO: 51608 - DNA, 1118 bp, Cannabis sativa
ttttttctttaattggattcaaataaaatgggccttaagcccttttattgggtccagcccaccaataaaggggcggacccaacacttttgtagcctctctttgtagtggcatcctctgcattggcttttttccccaaactgatattctgttgtgcaacccggcactgagggagtccaagcttattaccaattcatgttttggcccctattgggggaaattcaaaagattaaatgaaatattgctaggatttggtcatgattcgattgataatgtttacaaagttgttagggtggtgaatcatgaagatgggcaattgggatctgaaatgcacacattaggggttgatggtgataattcttggagaaggattaatgtaaatgtcgaacctttaataattcgtcggataagctctattaaccaagagctacagcataaggggaccatttattggttggcacgtacaattccagtgattatttcattcgacatacatcatgagcaatttcaaaccatatcactgccaaaacctcttgatgatgacttttcatcaatgtgtttttataaaagctacaagcttgctctatggaaagactctgttgtggtgtttaagtattatgatggaagattccatagacatgattatgattataataatacatcatcaacatgttcttctccaataccaagtattcaaatgtgggtaatgcagcatgaatcgtccttaaatgcatattcatggaccaagcatcttacatttcctcctcttgacaaaatatattatccaatagtattctggaccaatgacgatctcatcctctctagtgttcatgacagagtttggtcggtttcatcatacaatctttctacccaaaaaatcaggaggcttagagggattcctgagaccttacaacgcgttagttctttcgtttatgtgcagacactgcagagtttggtttcagttgaataatttatttatatattaatttttggttatgagcaaattttggttgaattaaaaaattggagttttagtgggatgagttttgattaaagaatattggagtttccatctttgcttcttggtatttaataaatgcagctatatcattctcttgta

SEQ ID NO: 51609 - DNA, 915 bp, Cannabis sativa
aaaacttgtatggagctcattctagagctaagatggatgatttgagaactcttctacaaaccactcacaaaggttcagtctgataccttagaaaaaaaacttgggcaaatcaattggctcttgcaagggatccataccctgagtctcatcttgtgtataatgtccttagtggacttgatgttgagtactttactattgttgctcttatagaagctaaaaaaatcttgattcttattatttggcgggaacttcaagagactcttttgagtttgatagcaaattggaaaggctcatgcacctaggcaatggaaacaagactaccaatccttcatgttcaacatccagctgctcatcttgctaaaaagtaaaatcaatctaacagtaataataatggtcatggaagaggatactcctgtaattcaggttatgaaggtaaatgcttcacaaagagaaggtaacaatggaaaaggaggaaaaggtagaggtggtggtggtaggaactcaaaacccactttttaggtctgtgggagatatggacactaaataacttactattacaatagatatgatgaaagctatggggatcacacccaacactggatctagtttaggccaagagaaacatcctaccacattcataactacaccaaaaatagtggatcatgaaggttggtatgcaaagagtggaactagcaatcatattaccactgatgctaagaatctaaatcacaagtcaacttatggaggtaaggaaaaacatactgttagaaatagaaatcaagtatctatttctcatattggtactggcaatcttcattccaacaatatggacatactagtattcttaaagacatgttacatgtaccacatatcacaaaaaagaattaattatagtgtgtcaaagttaacttgtga

SEQ ID NO: 51610 - DNA, 3671 bp, Cannabis sativa
  modified_base (565)..(565): a, c, t, g, unknown or other
gtgaacatattaaatactgttccaaaagagcagtgttcaaagtgtaagttttataaaaccaacaccattgaaaaattgtaagcctcggttctaccttagaaatagggtagttttaaatgttagttttttaagttgattgacattttgaccaacactaacaatacattttatagtgtgttagtgtaattatttttaaataataaagtaattatatatatatatatatatatatatatttgtttcatttataatctagagctgtgcaagacaaccgactaaattttatcagaaatacaaaataaaatataagtcatatcgagccaaccatatagaataaaaggtaaatatcattttagaccctgtatttttgtaaaagttataaattggaccatctattttgttaaatgataaaatagattgtaaaaatagaactctgaactcaattttcaacagttttattttttatatatatatataactaactttaagacaatttctaatgcgaatagatacagaaaatgtaaccaatttcgtcataacatctttagatcatattattattaanttttattttaacaaaaaaaaataagttaagggtcctgtttgtataattttagaaaatacagggtacattttgtcatttaacaaaacagatggtccaattggtaacttttgcaaaacacagactccaaaatagtatttactctagaatagataaaagttatatgaataaacgcttgcctgcaaaatatcaccaatgttgatcactagagccccagaaacaggtggtacgtcaaaccatttgttatcttttagaacttggagacctccattaaggtcatcttggagaagcaatgtaatgaagtcattgtcagagtgtttggttgttcccatagttaattctggttgcggacatggtggatagtaatgacctaaaacgaatagaccctcggcgcaacctatgttgctcaagtaatttggatcaagccctaatgcttcagataacaactcgaacaacacaattccaagtttcattatttggtttgagtactcaagaagaatgtccctatgagaaaagcagctaattacaatcatttttattaattaatcataaaaaactattataagatagtgtatatttttggccatatagcattgttatggagcactaaggtatctaacatcactatgagacgacgctttataattggttagtagttttctatactttttaataaagtaaaatagggaggacccgatattaaattatacaaatagcgcgatattatacctcataaaggtgctagctaggcagtagcaccatgagtaccctttagcatttctcggtaatgccacatgtatatgagaaacgctaaaaggcacccatggtgcctaacactcttatgagctgtaatattgctattgatgcaatttaatatcgaatcacacttattttaatttagtaaagattatagagaaccgtcaaccaattataagacattatatcatagaggtgttaagcacattgataccatataacaatactctctataagtggtgttaggttcttacgtagtgtctaagaacaatactctatatgacattccatatattacacttcattattgtagcaagcttaattaacatccttccatataaatattcttgtatttttgttaatagtttttttaaatcaattcatagctttgcaacccaaacacaaacaaatccccaacaaaaagtttaataaaaaaatagaaacatttgaaagcaagtcatctcctatacaatcatcaataataggaaatcgaagctattaaaacataactatatatatgcacaacttgcaccaatttttgacaattaatggatttaacagcataaccaattatgaattgaaaagaatgaagaaaaaaaatagtcactagaaaaaataatttccttttagtttattaataacaagtaacccaatatatattaaggaaaaaaaagaaatactcacaaatattttttgaagcaattaattaaacttctataaaataatagaaataaattaagctacaaaaaaattattactatttttgttttaaatttttatcatttttatagatgccatattattacatatatttatttatttatttattttcttattctaagtctctaaattttatattgccaatttggattaagaagaatcatgttttgttttattatgttcttagtactttatgttaattcaattaaacaagcaacataattattaataaatctaattagaattggtaattaattaaaggtacttacctgcatactagaggcaaatcttgaggattcggagggtgaggagccataaaacaagtaaatgtatccctccaattcacacaaggagtaatatacaaatcaaagttgctgttataaacaaatggttccgaaatatctcttgtataatactccttcttaatcccatcctcttgctcgtaaaaacaacgaacaccgtctttcatttcctccaaaaccctaattgggattccatggttgacgatttgaaagaagccccataattctgaagcttctctaactttcttaatgacatcttctcttgttcgctcgccattaataatccctttaagatctataactggaatgctcacttgggtgtcttcggaaactgatgatgattgatcagatggatgatggaaaaaaattggaatttcagtgattccagaatcaacaaggcctttaacacccgcttttgtgtcgtcaaaagctttgagctcgctttgtctgtggcttttcgcctttggtgtcatttgagtagcgaattcatcactattggtactagttgttgttaccattttggcaactattggagaaagctaaaagctagaattggttgatcaatgctttgtactatatatatatgcattattgatgtttaaaatagtaaataaaagatcaatattaataataatatatttttgtatgtgtcatatatattacatcactatattttaaagagtcccatatatactaaataagaaaaaacaaaataatattaaatatttattagaaacgtggatccttaatttcatcaattttttatagatatttaattaattaacaaacattttattccattaattatcttctaccttaatttataataaataaattaaattaaaaattgtatattaattttcttatactatacacacacaaaacttgcaattaactaaaaactagtaatattattgaatcataattttttttttttttttggaatattatccctaatatacatgtataaatgtagatatgatattatcatgattgatgaataaagccaatacgtggaaaagaactagcctttagctaattgtggttcctatatttatagttgtttaattagaaaagttttaattaggtttggaccatatggtgagtggtatatataagtcccccaccaaaataaataccaataaattttatgagtattattattgagtatgaatgatgttcgacacttttaaaagtgacgtcttacgattagttatgatgaacaatattttttaaaagttatactatattaaattatataagattcgatacttaattgtacaaataacgatatgacacctagaaggatactaaatattagcggtgccttt

SEQ ID NO: 51611 - DNA, 1302 bp, Cannabis sativa
acccggcccgtttttataaagctcatttttgtatgtaggttcggcccgacccatattataaaaggggtcaggttgggcctggccgatattttgaagtaagctcaacccgtctcataaacacatattatttgtattgggtcggactcgtattgggcctaagtgcgccagcccgtttttatgaaatagttgacccatattcatcaaatggctcctaaacagacctatagaaatttgccattttgtttttatacttttcaaattaatttctaattttaaagcacaaataaattgtttcaattaaaatgagctttaaaattataaataataataatatctataattacaattataaatttaataactaaaataatatcactataatagtaatccattaataaattttcacataaacctttcaataatatacaatataatctctttcaacaaaaaaaatgttcaacatattaaaatgtgctaattatgatcgctgattcataaaatgtgttagcataatttagaatcttcgcctagcgaaagatatgttaaaagtatatattaaaataatttaatttttttggaaaatatatatttttaaaatatttaaataaaatatttatatacgaaagagtagatgaattattaaatactaaattattttatgaattttaatcgtgttttattttgtatttgtgtgtcgtgcttgcaaaatctatatttacgtgtcgtgcttattgtgtcgtgttgtgccgtgatcaagctcatatttttcgtgtcgtacaagaaagctaagttcgaatgtacacctttacacatatatgtgtgtgtgtttttttttagattaatcaaaccaaagttaatctattaaaggtcactagaatttatagaaatgtcatgaagcacgagctaaataaacatgccaaaaaaaactttttgtgtgttattcttcttcttctctagctttcttacaatcttgatgaaatacttttatttgtattttgagtattttgatgtaatcctcacattctctcttgtaatgagaactttttcaacacttatataaaggaaagtataaattataaaatattttaggtgacattttatgtaattttttatttgtttttactaatatgtgggaatttcttattttgtgaaaattataatgaaataatatctcacattgtttaaaatttatttttagtgttgtattatacactagacactataaataagttgagtttttgactgttgaattctcgtaattatcgtttcacttgcacttaattctttaagtttaaattttga

SEQ ID NO: 51612 - DNA, 855 bp, Cannabis sativa
ccatgcaaagtcttatggcagtagaggcttcactctagatgcacttctcaaggaccaaaatccaagtgcagggattcatgcaaattttaaagtactggaggccacaagaaaaggttcgatcgagatctagggttaggtcaaccaaacaatacgtgacggagggacatgcaaaacaataggccccatgctcaggtaccgggacctaatgtttagggaaggaaaagctgctccaactcctctagttaacaaaattatcgatgttgaggacttagaccccgatgatagcatttcaaccactggccttatggactgcctgaacattttccatgaaaggacaggttgtgagaaagccaagcctcgtggaggagacctcaaaaacaatatcaatgatcaaattcgggagcgaggagttcaagattgtaacagaaaaaggttggaggatcagattgaagccttaaccaaaatcacagactgcttagtcaacaaacaaagcaaaacgatgtctgactttgaagaagaagacccaaagccatgtactaagaggattttagaagcacctctgccaaagcgattctacatgcctcaaatggataagtatgaagggaagacagaccccgaggtacacatgttagcgatgatgagaagtgtgtgtatttttcacttaccctagcaaaagccgctaaagattggtggaagagacttccatctggatgttacagaaattacgctatgcaagtacacgtatcaagtagtactcacacaggtgaggtcaaaaccacgagaattgaaattgattaccactaaactagacttatgtttatatttggttgaaaaaaataatctttgagagaaaat

SEQ ID NO: 51613 - DNA, 4776 bp, Cannabis sativa
  modified_base (2466)..(2477): a, c, t, g, unknown or other
  modified_base (3165)..(3187): a, c, t, g, unknown or other
gcgactagcaatatcatcttggtgttccctatttttgcatcatttatctctagtctggatttgggttttgaaactctgggtttatataggatggcaagttcactggggcactctgattctaaaatttctagacgataaacttctgaactagattgggacattgtcacaaaaagaaagcaatcccaattcctgaataaaatttatcaaactagaagcttataaatttgagaaacccaaaagtctacggtctgcctaaaccctaagatttacccagagaaaattcaacctaaaatcgctaaaaccaaataaagtgataaaggtgcaagctaagaaagtagtgattaaacccagaaatgtgaaataaaaagcatttaagaaaacaaagaaagatgaattacttactatttgaagtcgggttttggtgcaataaacggttctgcaatcgatgatgcagcgaatggcgtggtaatctctctgaatgcttgcggtcgaaaaacaaatctgatgaaactcacaagaggtatgtcaaagacaaagatggcatgcaaagcttcgaaatatctgggtggggtttttcatagaaaaatctcaagaaattttttgaaatggctaagatgatgaaaaggtggttcctttttcgttttataccattgggttgatctccatcagatgaacgagtgaatgatccaacaggtagaaataaagaagaagtggaaaagatggttatttaatgctcatgatgtgcctcaaaaccacaaaactgtcaaaatcaaatggcatgcattttttccaaaatgaattatgacaacattaccctcggtaatcatttaaaaagcacttttcactgaaaagaactttctaaggggtaattgttatacccgaaatttagctggtacttcagaagatgacacacgtcaatcttggggaatacaaatcaataaatataatgacaattatattaaaaggatattaaatagaataactcattaaatgcagaatcaataagatgtattcataactcgtagactgcatagtcttcagcgaaacaaggatgtacgaactcttgattcacgtattaacaagaaaatatttcgcgtcagaggaccattaaggatgacacatctaatacatagcgaggcatcaacttcgcaatatgtagaaaggtgttgacgaggcaaactggctgttagaacacttatagtatagtatacattatacaaactaagcacaatagccaaaaggacataataacgaatggcgaggcatccatctcgctataggaaggcatactactggtaccttccctaatcagctccagacatctttcaatgagctccactgctccgtcaagtcagctctttcagaaagaagctgacattcaaatgatgttggctactgaagttcatcttggcaccaagaactgtaattttgagatggaacgttatgtcttcaacctcgaaaagacatgggaaaagctccagcttgctgcttgggttattgctgttatttaccaagcgagataccccaacgagaaatactttacagcgtgtttaaatccacgtcagcattgactgttaaaagcggttttatctacagctgtgtgatttacaaaaaataatcgtatttatttacgtggagcatgattacagcccacaatttcgagtttatattgttatgggatttgaaatcaaatgtaattaactgccaactatgttactataaatagggacaaaatgtacagaaaaagggatggaaaatccttgagagaaaaataagaaccctagttctgtattagaaaaatctaataagattgactcgtggactatgcaaaattttaattgtaaaaccacgtaaaaaacctggtgttatttttgctttattcttctttcttttattttttattatttctgtgcaaaatcctatcacgaaaataagcttattatcattaacgaaaatcttgttaacagtaatatattgtttatttgaataatgtaagtataatttttgtagaaatattaagttaattgtttttatgtaatcatttataatttattcattttttatatgaattaattcatttagtaaatagaagaaacatataaatttcatataaaaggtaaaatggttaacttaaagcattttgattacctttccttattgatgtaaacaaattagggtaaatattattttggaccctgtattttacaaaaattactgattggatcctttgttttgttaaataacaaaataaatcctgtattttccaaaatgtaaaaataagaccctgaatttaattttcgacgacttttttttaatataatcaacttgaaaataattcctaacacgaatagatacaaaaaatgtaaacagttttgtcataacactttaagatcaaattattattaaattttattttgacaaaaaaataagttcaaagttctttttgtactattttagaaaatacannnnnnnnnnnntcatttaataaaatagagagtccaattaataacttttacaaaatataaaatctaaattagtatttacccaacaaaataaaatgaatttgattccatttctaatcaatttaataaataacatgttaacataataattttgatttcataacattttattccttttatttctcccattaattattaatttattcttataatgattgcgctttaataaatgtgccataattcgaataacctcaccagctctcaccaagtttatcaaatcttcacatatgatctcatccatgtctactatgatgagactcactcttttgattgcaactcactcctctccttagtgattattttgcaactcattcataaattaaaaatataatataattagatagcttgctatattatttctcaaagtaatataacatatacatattttttttttaataaaaaatgcttttaaatttaacttttttttttgtgacctttccaaattaaaagataaataaagatttacatttgggtaatgaaaaatcgccagtaataatttaaattcattgttttatagaaatattttgtttacagtattaatttattttaaatcaaaacaaatttcaaaattaattttaataattttttaataaatattttaaattttataaggttatcttagataataataataataataatnnnnnnnnnnnnnnnnnnnnnnntaataataataataatacacaattcaaaattaagagtgaaacataataagcattaaaaaaaaaatcataataacaataatattaccagcataacctattatgatcaacagaaatttcaaacttggtctttccagcagaaaatcttcaagttgaagaggctaagcttgctattggtcaacgtcaaacctttaattgattagcacatggtttgcacagaagttagaatcaaacagtgagatcagcacttatagctaaaatttatattagaggacttcttcactttccttattttgattttcaaaataccaactcaatgataataaactgaatcacacatcacagtgagagggataaggtatcaaagaaatatatttatacataaggttcccattaaagaaatatatttatacaaacctaaatacaacaaaactaaaccaaacactactttatctaatacaaaagtaaaagtattttttttcttcttattttgctttgtttgtatttgaaaataaaatgcgttccatgttttatttttaaaattaaaaataaaagttttatttaaaaaaatgttaacagaacatttacaaaaataatttgaaattttgtgtaagataaatatgagtgagagagcgagaaaatggagaaatgagaaatagatttagagctgaacaagtaatgggagacaatgaagaaaaagagagaaatagtgaagaaatggagtgtgatgaagaggagaatggagaaaataatgaagttgggttcgaaaagaagagccaaggacgttaggatggctctagtggtcgatgtggcagctgctgtgtgttgtaatgggttggtggaggtgaggtagtggagatttgggttgtgtcggatggggaaactggaggggttgtcatggttggtgggttctctcgtgacgcccgatgagatgaacggtagtgatggggtggtttttgaaagcttggcaacgcctgtgaaccaaggctctcattatgaacgtgttgcgtggaacattcaaggcgtgagcaatgataggatgagatctccacgacaattttcaaaaaacaaaccgaatgtgctttttctttttgaaactattgccaatgtttcaaaaatagagattcttcgagtttgattgggtttcatgggcaagttagtaattgagaaaattagtagaaattgtggtttgcctcttatgtgtattggagcatgttgatcttatggttctctctctttttattttgaaagataatggttctctcttttacccgtggtcatattgatgttttggtcaagatttcgggtgttattctttggcagatcacaagtgtgtatggccaactgaattcttctcttagacaattctttcagtctgttttaagtcgtgttgtttataacaattcctatctttaagttcgtagtagttgattgtgttggtagataggaaatcgatgagttttctttgtgttgtttcctattttaaaggattttttctttatttattttctttattctattttattttgtattaaagaaatttaatttataaatacactatataacatcagttttaggttgtataatacaca

SEQ ID NO: 51614 - DNA, 1307 bp, Cannabis sativa
  modified_base (116)..(133): a, c, t, g, unknown or other
aattttgtccatgtcacttcaagatactctccatgtaactctcttatgtcaaggtattttgggtacaatacatataaaaataggtatgtttcaattagaggtaaatttgattaatnnnnnnnnnnnnnnnnnntttttcaacttaccccaatttttagtcactacaaaagaccaccttaatttgttacctgtcattaattataatcttagatattggctatattgatgtacctattttagaggtttccattgtagaatttctaaaaaaattatacttttacatttaatattttttatatatatatttttatagtattttataaagacataaaaaaaacaacaaaaaatatacgaaatcaataacaaaacaatattaaaacaacataaaaaaataatatatagataacaaaaaattaacaaaataataagagtacaacttaaaaatacattaaaataccgtattttttgtaaataaaattttaaaaatcgtaaaaatatttaaaatttcatacaactctaattttgtattttttttagattatccttaataatattaggggttttttcaggtatatataaaaaaagcaaaaatactaccaaatatattgaactactcctataaatatttatatagtccaacaactaatattataataatacctcttcttctaagccttcagccacacaaagcaaaatccttaacaatagaaagctttgatcgatcaaccaagcaagccaatcaaacaaaacccaaccaggcagagaacaactattaattttggcgacttcacctaagaagaagaccggaatcgatccaaacatatgctgtttcgtattgatgaaaaaaagtgcagaaaaattagtttgaaactaaaattcaaccctaaattctggtttaattcgtagaaaactaatcctcctaatattaatttttcgattcataaaatgtagatctctaacaaatagatctggagctctcaatcaatctaaatcaggtataatccaaaaaataaaaggaaaaacaatgcatcaatactatagctaaaagtttatctcgttgcattttcgttatttttttttacagatttttaatggtgaatttgttcatattaaatcacgaatagaatagtgaattcacatgtagatagagacatatgtggaaatactgttctggttttttatgttttagaaaagttccataaccgttttactaatgctctgaaacttgacatatcaattattacaaactgataacgatacaatagattttatcatatttgtaggtgtttcatatcgtcaatacaata

SEQ ID NO: 51615 - DNA, 706 bp, Cannabis sativa
atatatttaatcataaaattaagtaaaatagtcaacgtgcaacaatgtgagaataactaatcaaagattaaaatattataggctaataatagcatttcacaagaagaattcccctaacctaagaactgaaaacctatttatctataattacatattaattcataattattaagttaaaattaaaaggaagtttccttcatcaagattggcaacttgcacggcagcagtagctgagcagaaatcaattattataatcatgttctctggtcaaatattttagtcgttagaagaaagttaatgactactaaattcaaagaaaaaaacagatggttaataacgactaatttttctttataataataattattcctataagagtaatcttgtattttgtaaaaattattaattgcactttctgttttgttaaatgacaaaatgcactttgtatatactaaaatggtacaaataagatcctgaacaaattttttgtgaaaataagatttaataataattcgatctaaaagtactatgacaaaactgtttacatgttctatattttttcgtattaggaattttcttcaagttagttggctatattacaaaaaaaaaaattgtcaaaaattaaactcaagatcctgtttctgctattttaaaaaatacaaaatctattttaatattaaacaaaataaaatgtacaatcattaac

SEQ ID NO: 51616 - DNA, 591 bp, Cannabis sativa
tttaatttttaatagtaataattcttaaattatatttctgaaacttttttatgtatcaaactatttagtggtaagttattgtttgcttatcattttcttactaatatatttgaattaaatttcaaataaaataaaaatttaatgagaaattataaagagaaatatatgtgtataagaaataataattttaaatgcaaggatgagtgtattaattattgtcaaattcattcgagtattcacacaacattttacaaaaaatgataataaagtgaaggaagaaacaaaagaaagttggtagttttaaatatgtagtaggagttattttcaaatgtttttttaataaatttaaaatagagtttgtactgacgaaattggaagaaaattactgtgttataaatattgggtacttatgctgctaaaaataaacattgagtttataccgcgtacaaacttaaaacatacttatgccgctatttacccttttaaatataactaatttgttttttatgaaaaaaaaaataacaatggtattaaattcaagtggatagacattaactattcgtactatctacatatgtatattcatcttct

SEQ ID NO: 51617 - DNA, 1036 bp, Cannabis sativa
tttaggacatcaaggcttttgctgagtagtcgttaggtgacaaaacttttgtatatgaatagtaaaattttgtaaatgtattttgtaacgggatttcgagattttataaatatattattttatgtttttaattaaataagtaaattttaattaatcacattttcattaatctcgttgattagtaacgagctgcacagtacgtttaaaatcacgctaacatgcataagttagttagggtgatacagtatgtgtttgttgtttgtgattgagttagagctcaaacttttctcttcaatggtgaattatgttttagaggttattacctatttctattgcttgaattatgttcgttgtgacttgtttaggtggtttggagagtttagtttgatttggggaaaatttaattttgtagtgaagttttttagggtttttgcaggaactggttaattggttcaagcaagccttgtagaaccagttaactgtttcccgaggcagaaccctgacaatcagttttccattttagaaatctagtttagcgcttctggtagttttagaaccctagtttttcatgttttagcaatacttaaggtattgccatgatatccatcgatagggaaacttttagttttgattttaagtccctaaaaagtgatttagcgtgtcacttatcagctttatgaatgttgtgacttaggggcctgtatatcatcgaggagcagttccacttaggctcaccgacacacctgaatttgggatcgaggtaagattagtataatgatatgcatatgtcattacatattagcgtgcaagtttatgaattcctgttagataacatattgaaatagtagtgttagtatacatagatttatattggataccgatgaatgtatgtttcgcgtaagtactgattgacactatcacatcgatttgactaaaataccgagtataagctaatattatggtcaatagtactgtcgtatgaacgttctagactcagtacacgtgggacacaggataggattatgattgggtgtat

SEQ ID NO: 51618 - DNA, 1112 bp, Cannabis sativa
  modified_base (398)..(413): a, c, t, g, unknown or other
taagatcttcgacaaactttattgcaaagaaattctattgttggaaaaaatacattgtcgagaccataaatctttgacaaaacaacaatcatgatcacaattatacaaaacgatacatacaaatacatcaatgaaaatctagcactaaggacattggagcattctaaaattgggaacaataaaatttggaaaaaaaatatagaatcagaggtaaaaacagattaaagtctgaacaacataataaaccaaaactagagcaaaactagattttaccaaaaaataaaacaaactagtaacaaatagaaaaaacaacaaaataataataaaaaaaatcaaacaataaactaaactcgaacaactaaaaattattatcaactgaaataataataataataatnnnnnnnnnnnnnnnnataataataataataataaacagctcaaattgataataatatgtattctcatttatcggagcaaataaatgaatcacgagaaaattaaaccatatatctcttttaaattaatgtctttaatttttacttttttttttaaaatctattatgtttatctctttttttaattattctaccaattttacttatattacttcacgatagtctttattcttctctaattaaaattttttcctaacttttcttcaaacctagacatctatctctaaagaacacaaatttattatatttgaaattatgttttagttatgtgagttgtgaggataatttgagtataatacttataaaaagaggtatctttgaattaaattttatttgaagataaatttgattaatgtataaaaaaggggtattcttcaatttttcccattaattacactagtagtaaaataagcccaatccataaaaaaatcatataaagacacatggtacaaaaacattaatacacttttttttggttatttttgtaaaatagatgtaaaattagatgccacgtctaaattttccaatttcactcaatatacggaccgagtaaactaaatttgggcttgacgttgagggttcagttgattgggctggacatgcaaattgcgatggcaatgggcccataaacggaagcaagaaaacgacgaaagaagg

SEQ ID NO: 51619 - DNA, 1886 bp, Cannabis sativa
atatgtgtggatatatgatggtgagtttatgaatgtgaatgtatgaatgtatatgtgtgatgtttagttacaggtaaaaaaaattatgttaatttgattatattttgtgtatatgtatgttgccacgtataaatttgtttatattacatatgtgcttaatgtttaggtgtaaataaaatactaattattttttaaatgattattttatagaagttaatctctttttattgttgttctttatctttgggaagaacttgcattttaaggttagtattggttattttttatttaatatatgtatcgtgaaattaatgttgttttagttcaattgctagctatttttattggttcttttaattgttgctgttctctttaaattttttagaaaatatctagttataaatgttatgttgcccaaattgtagtagaaaatttaaaataaattataaatcaattttgaactttatttttaacttaataaaaaattgaaatattaaaacttaagtaaataattcaattttttttagattaatatttttacgattacataatttaataatttaataagtgagaaatttatatttaaatcagtatgatgatgaatagttattaattaacttgtcataatatgctataatctttatatggagaaaatgtgagaagtgacatacaaattaatataatatttctaaaagtttccttatcataaataaatgattgtaaaaataatttatgatttctaaaaatatgaataattaaataattcatcataaaagtcattttaatttattgaaaatagaaaaaatatatgatatattaattattcagttgaaaagtttcataattttaaataattttaaaaaattaatttaaataaaaaactaattcataataattaaaaataataaataagtttaataattaaaaaaattaagtgaataaataatgaattcataataataaagataattcatcataataagtgagcataagttgtttaaaaattcatcataataatcttcgtcatttatttttttagatggcgattgataaaagttggataacaaaaaatcgttgtgatgatgcttattgggaaggtgttcaagtctttatcgaatttgcatcaaaacatacagactctagtagaaaaattttatgtccatgcgtgagatgtcgaaatacgagacgacatgatctattaaccgtagagacacatatttttgacaagggctttgaaagtagttatcaaaagtggatttggcacggggaaatagatggacctcttgtcaacggtattcacgaggacaatgaaggtgcccacccgcctagtgaattgacttcagagcaatggcttcctatttgtcaatttttcactagttcggagtttattgttcgttctaaaataaatgcagaaaatagaaaaaagatgcagtaccctacaacacaaggaacaaaatctatggctgagaggcgttatgaaaaagtaagttaaaatatcaatttagttaaattatattacattgcacattttctaatttttttaatctctcgtagaagaataagagtaattttattgagacttggaaggaagttcacaccaagaaatcgtcaaatacatttgttaatcaattggctgcacagaaatatgtaagtatttattcataacttctaaataaaatactattttatgtatgtttaatgctttctaacttatattcttaaaatagggtgagctcgtttcagcttatataaaacgagccaatactccttacgctagagctgctgatgagattgaaatgagtgtacttagtgaagtacttggtgaaaggcgtggtcataatcgtggagtggggaaaaaattgaaggggcaatcttcgtcgcggaac

SEQ ID NO: 51620 - DNA, 1267 bp, Cannabis sativa
aattattaaaaagtactttttattaaaaaagaactttttaaggggcaattgttctctctctctctctctctctgccgtaaccccaatctccattgacgccgaccgcaccacctcattctaccccaatcgcaactctctctctctctctgtctgccccaaaacccaaccccaatccccattgacgccgaccgcaccactctctctctctcctccgttctcgattttcctctgttgctccgccgggctgcaagctcctcctaaaaggtggtaagaagatttttatatatataaacacagaggagactatgttgaagctcctctattaaagtttcaattttaattatcttcacaaattcagatgtgggttttggtatttattcctttttcgaaatgggtttagagaattttcttttagtgttatgtgtaaagaaagcttctcttgactttgagctggtgtttttgctcaatttcttatatggtttgttgggtttgtcttaattttctctcacattctttcttttgactctcttatatcacaattttttttgtgacattgttattatcggtagcatagtgacaacgtttgttctcaaatgtggttttagtactttatatttttcgtttgtattttcaatttttctgagatgggttttgcatcaagtttagatctttgtggtgtaacctgtttagtacttcctagttttcttaattcaacataaatttgcctactttaaagatttatttatctagggaagcattctcctcaattctaaaaaagttggttcctgacttgcaaaaggatgcttttgtcaaatgagttttcaaggccattgatttgcaatggatttaataggtaaaaggtcaatcttataatggggtcattctaaaatatcaatatactaagcttgcttatttctcaattttattttcatgttaaatggatactagtagtgtggacttggaattagtggggtgggaaaaacatgtcatatttgatataaatataacatatttaaattattaccgatgctctctctctcacacattaatcgataatggactcgttctcaattatgcaaattcaaaagcttgctcatttttgggatttgatgatgtggtggaacatgtcatattgatatctatagtattaatatcttgtaagttcttttttcaaaatgatactaagttgcattctcttcgcttcgtcgaccacttgcttttatgtattttttttagctatagtattgtacatgtttttggttgtcat
